United States Patent Application Publication US 2004/0214272 A1 - sequence listing, part 31

SEQ ID NO: 127914 - DNA, 466 bp, Zea mays
  unsure (1)..(466): unsure at all n locations
  Clone ID: MRT4577_48126C.1
gggcgggggggaactcatccatatgaattagcactgcatgcagtacttttgttcaagttgatgcatagtcctaagccagcagcaaactgatttaaaagcatccacaccctaaattgacacaatctcattttactcatacatatgcttattattaccccccaccgaagttaaaagttcgccggccggcatgcgtacgtttaggggcactggcacacaacaaaaatcattgacacaacaaaaaccacagtccacgcgacaaaataaaagcaaaaaagggatgcatgccagagagagaaaaaaaatctttgatcttgacaaccacggcggccgaaaactggtatgcgagctactaactcgcggggtaacccttttaaccaacgggttgtggcgcgctcgaacccaatttcaccgcctacnacacaagtacaaactcgggttgacaaccccgcaattgaaaccgaccttt

SEQ ID NO: 127915 - DNA, 1050 bp, Zea mays
  unsure (1)..(1050): unsure at all n locations
  Clone ID: MRT4577_48127C.1
tcgaggccggccgggccgggacgcagctgcgcggtgcacacaaagcgaactattctttcgccttttactaaagaataccgtgtgtgcgccgcaaatagcagcatacgctaatttttggagcgatcctctattttagagggccccacagttcaaattaaagtttgttatatctatactacttattaaggctacaagggtagcctgccattctgtaatctcaaccgtccattctaccattatacgatcttagccgtccgatcctgcacaacactcctgctcccgatccaatccaacagccctgactccccgaggttctttctcgccccgaaaccgtcgcgctgaaatcatcgtgcgccgcccgcaaacgcctcccccagctgactccccgaggttctttctcgccccgaaaccgtcgcgctgaaatcatcgtgcgccgcccgcaaacgcctcccccagccgctcgccccacaccaacgccccacacccagccagagacgatgatggtggggctcggctctatggcgggctacggctatgggacccccacgcgatgctcgccccccacatcccccatgatgcccatggacaagagaagggagatagatccggtgatggacgctcattgtgttgcgtggctctagcacgacctcctcgtgctcctccaaccccacctcgtccgcctccacctccatggggacgctgccgtccgtcgtcctgtcatgggcggcacgcacgaacacgggggatagctgctactaccttgtttgccacatcgccagcatcaacgccacgcggaacttgatgtgtgcgcccgaggcggcctccgcacgcaggttctttgcgggcgccagggaccggaggctcttctttcgtgtccgcgccgcaggggcggnggtggggtccaacgccacctagccgccatggacgccgncgatgcggtccacggccaagtccaggcgggcgccagggcgggatgcagccagggtccccgcgacgagggacggngttttggttgcacgactggacgctatacaccaaatcttcccattt

SEQ ID NO: 127916 - DNA, 301 bp, Zea mays
  Clone ID: MRT4577_48128C.1
ggccagaggtgacctgtgaagatggttcgctactcccttgacccagaaaaccccacgaaatcatgcaagtcaagaggctcaaaccttcgtgttcactttaagaacacccgggaaactgcccaggccatcaagggtatgcatatccgcaaagccaccaagtatctgaaggatgtcactttaaagaagcagtgtgtgccattccggcggtataatggtggagtcggtaggtgcgcccaggccaaacagtggggctggacacagggacggtggccaaaacagagtgctgctttttgctgcacat

SEQ ID NO: 127917 - DNA, 434 bp, Zea mays
  Clone ID: MRT4577_48129C.1
gtacactccaaagttgtgtctatatttaaccaaacagtctagaagacatgacacgtttgtccatcgatcctgactctgtttctatattctatctgcctcacacgtcacacacacatacatggaccacgtggctcctacatgccaccatgcccattcaatcgtacgtgcccacacggcgagattttatttagtagagcatcgcagtcaacatgttgtcggcgagcatgaggactgaattgttacatctcctcatgacaaacgatcgaagatccggacggcggagacagcaaaatcgttggccgaccgagcatccataagatgcgctgacgggtctagataatagtcttacccttcaccagtgccatgaggcatctgcacgaggagaggactctgtctccccacctttgagggacgccaatcttttctccagaaac

SEQ ID NO: 127918 - DNA, 243 bp, Zea mays
  Clone ID: MRT4577_4812C.1
gaaaaagccaacatttggtcggactctttgggttgtcccgggaaaaaccgaccggttcctgggggcgggggagttttccctgtaatgggggcccttgtccctggggggaaccatggttccttatggggggccgggtgaaaaggttgggggatcacagggccaaacgggttccggggggaaagggttaagggttaaaactggggcgcctaatgagggcgggacttaaattgttgcgcggggggc

SEQ ID NO: 127919 - DNA, 298 bp, Zea mays
  Clone ID: MRT4577_48130C.1
gggaaaaaaaggaggggcctgtttcatttgctgcgtcccattttattttttacacaatgccccaacaatccccaagccaaaaattgccccggttttgctcgcccaacttattggggggggggcactactccactaaatacatatattaaaaacattggaaaagctagctactggaacccatgcgaccgcaccaaaacatttttagttgtgcatgggaacatccggcaacacaaacccttttttctgatgtgcttgacccttcaacggcctaagctaaagccggcccccccccccaaac

SEQ ID NO: 127920 - DNA, 229 bp, Zea mays
  Clone ID: MRT4577_48131C.1
ccaaggcgtccgcggccccttgggcttcttaagcctggccgacctgaaccatgtgcctgtgattttttgcctgttcgttacgccttacgcatttgtgctcgacgcctacccgaatgtaaaggcctgtgggtctggcctgatggaaaggccgtttgtccaaaaggtcgctgccctgttgaagccatttgcttgaaacggttgccctgtcaatcgttgattggattaagcc

SEQ ID NO: 127921 - DNA, 761 bp, Zea mays
  Clone ID: MRT4577_48132C.1
cgctcatggtagtcgtcgccatggcagtcatgcaagggcaagcaggagcaacgcgtgtcgccgtctccctcgtcttgctcctcctggcaagcctcaccggcgggagccccccgccggaaccggtgtcgtgcgcgcggggcacgtccgactgcacggtgacgagcacgtacgggtcgttcccggaccgcgccgtgtgccgcgcggcgaacgcgacgttcccgcgcacggagaaggagctggtggcggcggtggcggcggccgcggcgtcgcggcgcaaggtcaaggtggccaccagccactcgcacagcttcccgaagctggcgtgcccgggcggccgcgacggcaccatcatcagcacggagcggctgaaccggacggtgcgcgtggacgcggcgcgccggctgctgacggtggagagcggcatgctgctgcgggacctcgtcagggccgccgccgacgccgggctggcgctgccgcactcgccctactggtacggtctcaccgtcggcggcttgctggccacgggcgcccacgggagctcgctgtggggcaagggcagcgccgtgcacgagtacgtggtcgcgctcaggatcgtcacgcccgcgccggcctcccaaggctttgccgtcgtcagggagctcgtggccggcgaccccgacctggacgccgccaaggtctcagctcggcgttccttggcgtcatatctcaggtcacttttgagctgcagccgcagtttaagcgggtggtgacgttcgtgacgc

SEQ ID NO: 127922 - DNA, 293 bp, Zea mays
  Clone ID: MRT4577_48133C.1
tttttttttttttttttttttttttttttttttttttttttttttttttttttttttttttttttttatttgaaagccacccaacccctttttaatttttggttgtttgccaaaaagtccacaatagcggaatgggaaatttcccaaattttgaacagggtaacaacaaaataaaaaaatgatccttgacaattgggacggatcgaccggggcttgcattacaaagcaagcttttaaaccatgcaaatggaaaaactgagcttaaattttgccccgcgggcccggttgggggg

SEQ ID NO: 127923 - DNA, 279 bp, Zea mays
  Clone ID: MRT4577_48134C.1
ggaaggggacccacgttgggttccctccatttattgggaacaggaacccaagattcgtccgcacaattttttttaatgccttttcatgacccccccttgaatgtaggggaatgggaaaaaaatggccccatttgtggggcccataaaaaaaacccccgcgccctaggtttaaaaacacacttgcaacaagttaagcttgaacatgatcaaaagggttttttatttttattttagggggcccttagccccttccatgggggggcacttagagtcccgggg

SEQ ID NO: 127924 - DNA, 371 bp, Zea mays
  Clone ID: MRT4577_48135C.1
tcatttacaaaaggggcgcatacttgtcttgcgaggcatatatgtcgcactacaatggaaataaacgctagcagctgacaggcagatcaaaatggtcgcatggagaatggtgtataaaaccgcagaaagctgcaactgcccagaacactcttcccctgttgtcacatgagagtgctctatccacaggcgccgtatcaacgcaaagcatctgcttgtactgctaagacggcgaggtctaccatggccttctgaattcactttcccaatggattgcacacatcaacgtcggagaagcctcttacgttcttaagacaaacgagcggagctgtcttatggcccaataactgactactacagggtggggagctaac

SEQ ID NO: 127925 - DNA, 761 bp, Zea mays
  Clone ID: MRT4577_48136C.1
cgggaaaaccctatcttcccgccgccgcccaaaacatccggccgccgcgcgccgccaaccgccgtcacctggcgagcgccctagccggacggccgccaaccgcgcgccgtctcttccccagtcgcgcgccgtcgtctcctccgatccgccaaccgcgcgcgcagtccgccgtgtcacgttcccagccgcgcgcgcagtccgccgccaaccgcgcgcagtccgccgtcccgtccccagcccagccgcgcgcgcagtccgccgtctcctccccagccgcgcgcgcagtccgccgtattgcacatcacagcccacaggtctacaacaacctgcagctccaccgcgacgtgttctccgtcgatcagaacctctacagggacggctgtacgcgctggatggtcgaccagctggccaaggttctcgttaagctcagcgaggtcaacatgctcaccggcgtgtagggggagattcgaaaggatactcaagctggtgtagcgaaagagcgactggagcatgaatcgaagagcacacaacgactgtgcggtccggtctgcgggtctggccacgggcctgctgcggcctgcggtaggcggtgctgccctgcctggtgcttgctagagtgctagtgctccctggcccctgctagccagttggcccaggcccattactccattacgccattacctcccgggtcgccagcaaaagccacaggaccaaagcccaaaagcttctaggcactgagagaggcaggctgcgaccaggcg

SEQ ID NO: 127926 - DNA, 550 bp, Zea mays
  unsure (1)..(550): unsure at all n locations
  Clone ID: MRT4577_48137C.1
ccggccgggagggctgattttcgctctactacttgactcaaagtatagagatgctttttgcttcgctcacctaacaaccagcattatatggtggccacgattatgtgctgcacctaccacattaacgcggtcaatatgcctcttattagtcagggtcgcgtcgccgccagcgccaccaatgatcaaacacctctctcacgttgacgctgccgctgttgttcttcggatcacaatgtctaactatctgcggcacccttgggatgcttttgagaacgatgggcctgtatctcggcatagaaatgcttccacctgacctgcaagttcacaggcgactacttactccaacaccgactgagatgactcagaaccctgaggtgctcgcatgccaatcggagctggatgagaatgactgacatgagacacatgatggaagccctggcttgcataacctcgaacgagctggataattgttagtatctggactttntttattccaggagatgcttgtttgtatagaatatcttgtcgtaggacaaaatggactacctgg

SEQ ID NO: 127927 - DNA, 265 bp, Zea mays
  unsure (1)..(265): unsure at all n locations
  Clone ID: MRT4577_48138C.1
acatccncccactcttccncatccccttcctctaacccttctacaattactcactacgcttctggatataatcaaaacgagcgcggtttctctatcctntntccaaactcaaattaaccatatactccccatctccctaactcttatatttgcgcgccatctttttttttttttctccctcccaaactaaaatacaaattttccttcattntactatttttcctttactccttcttacacaccaatcacctttatttataccaca

SEQ ID NO: 127928 - DNA, 144 bp, Zea mays
  unsure (1)..(144): unsure at all n locations
  Clone ID: MRT4577_48139C.1
gggtgggagtntttggttgttgggtggaatcgttccccccatcggccccagcaggaggaacttttaggactcatccacatcccttgttaccgggagtaactgaaattggtgtccaaaaagcgttcatatttccctcgtccaata

SEQ ID NO: 127929 - DNA, 1232 bp, Zea mays
  Clone ID: MRT4577_4813C.1
cggctcgagaaaagggtcttcagagcacaatacagagtccttaaagggtctctctttgagtgaagttggtaacaaccgtacaagtaacaacaaagttgtttgctgtcacttctcttcagatgggaagttactcgctagtgccggccatgagaagaaggtcttcctctggaatatggacaattttaagatggataccaaaatagaagaccatacaaactttatcacagacataagattcagaactaattcaactcagttggctacatcatcttctgacggaactgttcgactttggaatgctgctgatgaaagtggcgctttacaaacttttcatgggcataggtctcatgtaacatcagtagattttcacccaagattgacagaggttctttgctcttgcgacgacaatggagaaattctcttctggacagttggtcagactacatctactcatgttttgcgggtgaagcagggtggaactggaagagtcaggtttgaacctcgaagtgggcagctcctcgctgtggcagctggaagcatggtgaacatttttgatgttgaaaagcaatccagcttaccctgccctccaaagggtcacaatagtgaggtaaactttgtgtcctgggatgaaaatggtgaatatctggcatctgtaagtcaggacactgtgaaagtgtggtcggtatcgtctggtgtgtgcattcatgagttacgatccaatggaaaccaatatcagtcatgcacattccatcctagatacccgaaagtgttgattgttggtggttatcagactctggagctgtggagcttatcagataaccagagaatcccaatccaggcgcacgaagggttgatagctgcactggcgcactccccgttcactggaatgattgcctctgccagtcatgacagatgtgtaaagctctggaagtagctatatatagaggtgatggaatagtcctaatcctaattatatatgccattattaacttatatgtagcgtttgtttcattccttggttaataacttatataatataatatatacataggcggagacgtgagatggatatacttttcaagggtgattggaccctgtgaggtggatggatgtagggtcggttgtacatgatatattgttgagctgatgattgggctgtatctgcgcctatacccttaaaaaaaaaaaaaaaaaaaaaaaaaaaaaaaaaaaaaaaaaaaaaaaaactcgag

SEQ ID NO: 127930 - DNA, 433 bp, Zea mays
  Clone ID: MRT4577_48140C.1
cggggcgtgggaaggaccaaaccaactatggggccccccccaccatttgaaacaacttcggggggcaattctggctctttttctgcctttttttcaaactaatcggaaatcggggcggcatccttgccgagaaacttccctccaacacccctcccccggggggggggcaaaacctgcctttatgggaccttactggccgcccggttaacaatctggcaaccgctccgtttttgcatgtagcggaggatgatatcccggccctcctcatgcgtgtagcggaaaacccggatccccacctcccggaccacccaaaacgggggggacaaggacggcccccccttggacccgtcattttcgggggccgccccatccctttccttgtccccggccttgggctggttcttaggagcgaaacggcccttcctggaactgg

SEQ ID NO: 127931 - DNA, 792 bp, Zea mays
  unsure (1)..(792): unsure at all n locations
  Clone ID: MRT4577_48141C.1
cctcgaggccggccgggccgggttacctatcttcccgccgccgcccaaaaatccggccgccgcgcgccgccaaccgccgtcacctggcgagcgccctagccggacggccgccaaccgcgcgccgtctcttccccagtcgcgcgccgtcgtctcctccgatccgccaaccgcgcgcgcagtccgccgtgtcacgttcccagccgcgcgcgcagtccgccgccaaccgcgcgcagtccgccgtcccgtccccagcccagccgcgcgcgcagtccgccgtctcctccccagccgcgcgcgcagtccgccgtattgcacatcacagcccacaggtctacaacaacctgcagctccaccgcgacgtgttctccgtcgatcagaacctctacagggacggctgtacgcgctggatggtcgaccagctggccaaggttctcgttaagctcagcgaggtcaacatgctcaccggcgtgtagggggagattcgaaaggtgtagatctctatcacaaaggcaaactatttcctctaggatactcaagctggtgtagcgaaagagcgactggagcatgaatcgaagagcacacaacgactgtgcggtccggtctgcgggtctggccacgggcctgctgcggnctgcggtaggcggtgctgccctgcctggtgcttgctagagtgctagtgctccctggcccctgctagccagttggcccaggcccattactccattacgccatttacctcccgggtcgccagncaaaagcacaggaccaaagcccaaaagcttctaggcactg

SEQ ID NO: 127932 - DNA, 708 bp, Zea mays
  unsure (1)..(708): unsure at all n locations
  Clone ID: MRT4577_48142C.1
ccggccgccaccgcgcgccgtctcctccccagtcgcgtgctgtcgtctcctccgatccgccaaccgcgcgcgcagtccgccatgtcacgttcctagccacgcgcgtagtctgctgtctcctccccagccgcgcgcgcagtccgccgtctcctccccagccgcgctcgtagttcgccgtattgcacatcacagcccacaggtctacaacaacctgcagctccaccgtggcgtgttctccgtcgatcagaacctctacagggacggctctacgcgctggatggtcgaccagctggccaaggttatcgttaaactcagcgaggtcaacgtgctcactggcgtgcagggggagattcgaaaggtacttatgcagcaggtttaactaaccagcacacccgtacctccattgttggctctcttctactacatttattaatttcctcttgctatgatttggtttggtcaactttgaatttcaattcattcccttttatatatatcatttgaatgaccaagctctttgagtagtaatgaacaaactgttttttcctcatcactcccgatcagatgtccaaggttacgaactctgaccatcttctcttttttatatactactcccnacatgaatactccatggtatttgacatgcacataaaactctagttgagcattgaggccgagaaacattaaatagaacacacctccctgtca

SEQ ID NO: 127933 - DNA, 329 bp, Zea mays
  Clone ID: MRT4577_48143C.1
aataaacgcttcgcataagtcattcagcttttactcgcatggtgtttacttcgaaccaaaatgtggaaaaaaggaagatgaattagatcacgcggttttggttgtgggatatggaattatgaatggtgaacaatactggttggtgaagaacagttggagtaacttatgggctaacgacggttatattctgatgtcggcacgtgacaacaactgcggtgttctaactgatccaacctatgtgtgtgtgtgatgtatatcttcagtatacaaaggaaacatcgtttgttgtgtagtagcattgtattagtttaaatgtatctctactacct

SEQ ID NO: 127934 - DNA, 291 bp, Zea mays
  Clone ID: MRT4577_48144C.1
gtgttgttcgttggagtcgttttgtttcagggtcggcagcgcccgtccggccgcgcgggcggcgtcccgccgttgtagcggaccaggtactccgcgaaccggccgaggtcctcctcgggccagtcggcaagccgctcccggatcgcccggcgccgccgctcggtgacctcggcgaggatccgcgtccccgcctccgtcaggtccaccacctgcacccggtggtcctccgggtcgagccgccgctcgatcagcccggcccgctccaggcggacgcgtgggcggacgcgtggg

SEQ ID NO: 127935 - DNA, 307 bp, Zea mays
  unsure (1)..(307): unsure at all n locations
  Clone ID: MRT4577_48145C.1
gtcgaaatgatgctttaatatggttgagatgagatgtcatattaccacaggacaaaataacatcacacacatgtggttacataccaacttactcaacctatttactcttgctttaacaaactatggacaatgagattgctngctctggctatgacatcggcatgttattgttcatatgcatatatactgagtggtctggtcttaattattcaccgcatgatgatgatggtcatcagtcgtctgctgcctcgcttgctagctgttggtgtgggctctgcccgatgaacattatctcctagactagcgc

SEQ ID NO: 127936 - DNA, 347 bp, Zea mays
  Clone ID: MRT4577_48146C.1
cggacgcgtgggcggacgcgtgggctttttttttttttttactagaaattgaaacttgatcaatctttcttaatctatatggattggtgtaaccgaacaagcacaaatgtgatctacttttacaaaattcgttcatgggagcacgggaaaaaaaaggaattcccacaccatggagactccaagaagaattgtgcgcatatgcatgttctaagtgctcgttcggatccagcagttgcccctgcgccatcgatccctgccgatcccggcctgggccctgcgcagccgggccttgtagtccttggcccacgcgcggagctgtgccttgagcttcttgaggtcggcggcgg

SEQ ID NO: 127937 - DNA, 277 bp, Zea mays
  unsure (1)..(277): unsure at all n locations
  Clone ID: MRT4577_48147C.1
cgcagaagncagaaancaagacaaaacgaccagcaaaaagaaaaagaagcccccacaagaaacacacgaacaggcacgacaacgacaagacagacaagaaaggagaggccgacgcgggagaccagccggggaggaggaacacagaaaacgaacagaggcccgaaacaagaccnaaaagagcaaaaagggggacgaagagcacgaccgaagacaaggaacgagcngcagcngcggaacatgagaaaccgggaaacgaagcggaaaaccacagagccca

SEQ ID NO: 127938 - DNA, 289 bp, Zea mays
  Clone ID: MRT4577_48148C.1
ctcgggcacaaaaatacacacagcgaacaaggccatgatcaggccacatgttccgacacaaaccaaaacatttgaaccccatggttttgggcactaaccacatatggttagggcacgcccctaaccgtcggttttcacgcatttgtatgcaggccccaatgcaccattaatggccccgctctgtgcttgcgaataaatgcttgcatcaaagctgtcggcaatacgtaatcatgaccatagctgggcactaggggaaacaggtatccgatctcattgggacacaacatac

SEQ ID NO: 127939 - DNA, 879 bp, Zea mays
  Clone ID: MRT4577_48149C.1
cattgggtacctcgaggccggccgggactgtctcccagtccccaggtcctcatcggcctccggtcttctggtctccccagatctcccaccggggaaccctacccgagcatcagccatggcgatcgcggcgcgcgtcctgcgccgcttcccgctccacctctacccctcgctcgctcgctctttctgcgcagtttccccggccgccgcctcggcccgcccccgcgtccgccaaggtcgccgatcgcatcgtgcgcgtcctcgccatcgatcccgagggggcgcgccgcgaggtcgtcggcctctccgggcagacactccttcgcgctctggccaacgcggggctcatcgagccggcctcccaccgcctcgaggatatcgacgcgtgctccgccgagtgcgaggtccacatcgcgcaggagtggctcgacaagctgccaccaccgtcctacgaggagcgatacgtgctcacgcgcgcgtccaggaaccgcgagctcaacaagcacgcgcgcctgggctgccaggtcgtcctcgcgccggagctgcaggggatggtcgtcgccatccccgagcctaagccgtgggacatcccataatggcctgccgacgaaaggtaaggtgcggcttttgacgctgtgagccttccttaattcccttggctcggtcaagctgtgcgcctgtgccatccccttttatatgttacggatttagtgaagaataataatttgatgagcaaaacttggcattggttaacttttgttcctagtatatggatgctgtaatgtggaatccttttgcaactaccgcagtttaatgtttcatggtttgaaatttaaaaaaaaaaaaaaaaaaaaaaaaaagggcggccgccaccgcggtgga

SEQ ID NO: 127940 - DNA, 798 bp, Zea mays
  Clone ID: MRT4577_4814C.1
cctcgaggccggccgggataaaaacttgttctatttggcacccccccccttccaagacagccaatgttccatgacaagatcgctgctgattgtccactggttgaatgcaaacagattggtcctgtttttgtgcatccaaatatataatttagtttggttgcagatatagagattgagatggtggatgcagctgctcttatgcttttcttctcattgtttgctattgccattatcttttagaagtaatgtaaaagtttctgtctttttccttttcttgagaacctatcacaagtaattccagcaatgtaacacagctaactaagcagaataatgagtagactttcataagtaagaagtcgattacattgctggaagttgtaaaaactgaaaacaatatattcacagggcacccttctgtgggtataacaatttgtagcatcaggatgtagcgggtcattttgttcacacttttgacgtttctagttagatagtatatgttactactattttatgaatactgttcttgtgataaaattagtgtttttccttgcaaaaaatgatattcttttcttactattttccttgcagcaagcattattgtgagctcaggatctatctttggtagattatcccccttctcttcagagaaccaaataaatccagtatatcttagccctttacaggtaatgtagagaaaggtatataagattgcagttattagtttataatgtattgaaccttcaactttccaggaacaaaggttggatactttaagacacagattgcaaatctcttttg

SEQ ID NO: 127941 - DNA, 730 bp, Zea mays
  unsure (1)..(730): unsure at all n locations
  Clone ID: MRT4577_48150C.1
caccggggaccctacccgagcatcagccatggcgatcgcgagcggcgtcctgcgccgcctcccgctccacctctacccctcgctcgctcgctctttctgcgcagtttccccggccgccgcctcggccgccccggcgtccgcctcggccgccccggcgtccgccccccgccgccgcgtccaaggtcgctgatcgcatcgtgcgcgtcctcgccatcgatctcgacggggcgcgccgcgatgtggtcggcctctcggggcagacactccttcgcgctctggccaacgcggggctcatcgagccggcctcccaccgcctcgaggatatcgacgcgtgctccacatcgcgcaggagtggctcgacaagctgccaccaccgtcctacgaggagcgatacgtgctcacgcgcgcgtccaggaaccgcgagctcaacaagcacgcgcgcctgggctgccaggtcgtcctcgcgccggagctngcaggggatggtcgtcgccatccccgagcctaagccgtgggacatcccataatggcctgccgacgaaaggtaaggtgcggcttttgacgctgtgagccttccttaattcccttggctcggtcaagctgtgcgcctgtgccatccccttttatatgttacggatttagtgaagaataataatttgatgagcaaaacttggcattggttaacttttgttcctagtatatggatgctctaatgtggaatccttttgcg

SEQ ID NO: 127942 - DNA, 1126 bp, Zea mays
  Clone ID: MRT4577_48151C.1
cggccgaaaaaaaaaaaaaaaaaaaaaaaaaaaaaaaggagcgttgccggccgggcagcaccaggccggccgggagcgactctggggctctggcctctggcctagcctccactgtctcccagtccccaggtcctcatcggcctccggtcttctggtctccccagatctcccaccggggaaccctacccgagcatcagccatggcgatcgcggcgcgcgtcctgcgccgcctcccgctccacctctacccctcgctcgctcgctctttctgcgcagtttccccggccgccgcctcggccgccccggcgtccgccaaggtcgccgatcgcatcgtgcgcgtcctcgccatcgatctcgagggggcgcgccgcgaggtcgtcggcctctccgggcagacactcctccgcgcgctcgccaacgcggagctcatcgagccggcctcccaccgcctcgaggatatcgacgcgtgctccgccgagtgcgaggtccacatcgcgcaggagtggctcgacaagctgccgccaccgtcctacgaggagcggtacgtgctcacgcgcgcgtccaggaaccgcgagctcaacaagcacgcgcgcctgggctgccaggtcgtcctcacgccggagctgcatggcatggtcgtcgctgtccccgagcctaagccgtgggacatcccgtaatggcctgccgcgacgaatggcaaggtgcggctttcgacgctgtgagccttccttcattcccctggctcggtcaagcttgtgcgcctctgccatacccttttatgttacggatttgatgaagaataatagtttgatgggaaaaacctgccattggttaacttttgttcttttgaatgtggagtgtaatggatgctgtaatgtggaatcccgttgcaattaccgcagttcaatgtttcatggtttgaagttttgtacactgataaaaaatgatagttgattagtcttttcatttccatcttcacagaactatagtagaatatgaaacttgctcttgtataagcatgtgcctaaacgattttctatgttctctcagagttcttgatgtgcctgcaaggtactaggtacatgtgtagtaactcatagttccgaaactgaaaatcttttgatgcc

SEQ ID NO: 127943 - DNA, 531 bp, Zea mays
  Clone ID: MRT4577_48152C.1
ggcaagaatagggctgcatggcctcgacgataggcatgcagggggcaacgtggcatgctaaacacaaagggcgtacacaacctgttatggccaaccacaaccaatggcaacgtacactataagcctgcgtccctgaaacaactacacagtccttattactattataataagcgactccctgataaaagctaggtcactacctctgacaaggtgggtaatattaagtatggacacaagaatcggtgcactacgccgggcacctactgaaagcagactagtctttttgccctgcgcgaagggaaaaaaagtaattaaagggctagggaaaagacaggaaactcctaccgttgcttttcgcttatcggctgatcacgtctgtggtggcctgctcgcatcacttcgctggagggttgttcctccaccgtgcagtggcaccgtgctcgctatggcgcgcgtccttgagcgtgtgcaggatataccttgacggccggctatgtggcctctacactttggacacgtactaccagaacc

SEQ ID NO: 127944 - DNA, 763 bp, Zea mays
  Clone ID: MRT4577_48153C.1
ccggccgggatagagggagtagggaaaaaaacctgctctcccaatccccaggtcctcatcggcctcctctctctcggtctccgccagatctccccacggaaccctacccgagcatcagccatggcaatcgcggcgcgcgccctgcgccgcctcccgcttcacctctccccctcgatctcccgctctttctgcgcagtttccccggccgccgcctcggctacctcggcccccgccgccgcgtccgccaaggtcgctgaccgcatcgtgcgcgtcctcgccatcgatcccgacggggcgcgccgcgatgtggtcggcctctcggggcagacactccttcgcgctctggccaacgcggggctcatcgagccggcctcccaccgcctcgaggatatcgacgcgtgctccgccgagtgcgaggtccacatcgcgcaggagtggcttgacaagctgccaccaccgtcctacgaggagcgatacgtgctcacgcgcgcgtccaggaaccgcgagctcaacaagcacgcgcgcctgggctgccaggtcgtcctcgcgccggagctgcagggggatggtcgtcgccatccccgagcctaagccgtgggacatcccataatggcctgccgacgaaaggtaaggtgcggcttttgacgctgtgagccctccctaattcccttggctcggtcaagctgtgcgcctgtgccatccccttttatatgttacggatttagtgaagaataataatttgatgagcaaaacttggcattgg

SEQ ID NO: 127945 - DNA, 945 bp, Zea mays
  Clone ID: MRT4577_48154C.1
gccggccgtttccgagagccattgagcacccctcagtcggccagcgactctggggctctgggctctgggctctggcctagcctccactgtctcccagtccccaggtcctcatcggcctccggtcttctggtctccccagatctcccaccggggaaccctacccgagcatcagccatggcgatcgcggcgcgcgtcctgcgccgcctcccgctccacctctacccctcgctcgctcgctctttctgcgcagtttccccggccgccgcctcggccgccccggcgtccgcctcggccgccccggcgtccgccaaggtcgccgatcgcatcgtgcgcgtcctcgccatcgatctcgagggggcgcgccgcgaggtcgtcggcctctccgggcagacactcctccgcgcgctcgccaacgcggagctcatcgagccggcctcccaccgcctcgaggatatcgacgcgtgctccgccgagtgcgaggtccacatcgcgcaggagtggctcgacaagctgccgccaccgtcctacgaggagcggtacgtgctcacgcgcgcgtccaggaaccgcgagctcaacaagcacgcgcgcctgggctgccaggtcgtcctcacgccggagctgcatggcatggtcgtcgctgtccccgagcctaagccgtgggacatcccgtaatggcctgccgcgacgaatggcaaggtgcggctttcgacgctgtgagccttccttcattcccctggctcggtcaagcttgtgcgcctctgccatacccttttatgttacggatttgatgaagaataatagtttgatgggaaaaacctgccattggttaacttttgttcttttgaatgtggagtgtaatggatgctgtaatgtggaatcccgttgcaattaccgcagttcaatgtttaaaaaaaaaaaaaaaaaaaaaaaaaaaaaaaaaaaaaa

SEQ ID NO: 127946 - DNA, 334 bp, Zea mays
  Clone ID: MRT4577_48155C.1
tgctcaaataggcaccaaattatttaaatggttatatgatttttaatgacaaagacgtattgattttgtcatataattatcccactttcatataaatatctagaagggcaaacctggtgcagtggtgagagctgtcccactgagtcaacaagtcacttgctcgaagcagtctcttcgcattttcgcatttgcgtcgggaaggcttgccttggttatcccttccccaaacctagtcacgtgggagcctccgacattggatgtggcctttttttccatatcacacacaagatgtagataaaaacttggccattaggagaaagaccgtccccacggt

SEQ ID NO: 127947 - DNA, 258 bp, Zea mays
  Clone ID: MRT4577_48156C.1
ttctttgttttttttggtaggcgagattgtttttttcaattggcgatccgtttttttgtttggactaagccggttcagtgcagggggaaaaacccattttgggggacgcatcggtggtttcaacacaccccgaacctaagaatgctgtcgccctacagctaaggaatgacctcccatcccgccaaaatggggaggggggaaacgtttagggattctgataccacccaggcctgggacacgctgaactccggctaaaaa

SEQ ID NO: 127948 - DNA, 408 bp, Zea mays
  Clone ID: MRT4577_48157C.1
gtttttgtttttttaatttttttttttttttttttttttttttttttttttttttttttttttttttttttttttttttaaagggtaaaaaagaaataaattttttgaaaatccaaatccactccaaaaaggattggatcggatacttggaaagaaaaccaaaaatttaatggttgataaccaaatttttaaaaaacggacggacccaaaaataattttgcagtagtaaaaattatttgcagaaaacgtagtaataagccggaattaaaaaaggcttgggctgtttgggctttttaaatataataacggggaagggcgcttaatgggaaaaatattccttaaaatttaaaaaaaaaaccctttaaatggcttccaaacaatggttgccaaaaaaaaaaattttggccc

SEQ ID NO: 127949 - DNA, 312 bp, Zea mays
  Clone ID: MRT4577_48158C.1
cccccttgcgagttttttttttttttttttttttttttttttttttttttttttttttttttttttttttttttttggggaggacaatcatggggggttgttttagggatagataaacgaggggggacagaacaaagtaccaaaccatactactaaacaaaggctaaggatgcccctcaccaatggcccaaggggccagagcatgccaagggccttaaaaagactttttcccttttggtggctactacgcgggggggaaagcaaaacaaacctcccgaacgtgggcttttagggggggctaggacccctccc

SEQ ID NO: 127950 - DNA, 560 bp, Zea mays
  Clone ID: MRT4577_48159C.1
ctgcagtaccgctcctcaattcccttatcgacccacggggcggcgctctcatacatactatacatttccttctccggcctcctctgccccctatcctatttattccaggtggaagaggaactactccaccggcattttattttaactgcctccttgcgtcagaatgcgggacccaccgtttctagccgccctgcaatgataactagggaaccacggtttttgtcccacttgtcatggaggtccatatacttaccgtactgtatcatgtattgaacctaacaaggctggagtgggctctccattcaccaaagcgaggcgtggctgcctactactgctatttaaaccgctaccctcttccgagagagacagaccttccatttcaaaaactagctcctacagcaaaatattgaaatggaaattgagtccacttggaagaccctgttccaacctaaagaaactttgactgacaaacacttctacaacttccactatcgacttctccaaatcctccttccctttaacgcctactttcatgacaggctccattaccccgggccctt

SEQ ID NO: 127951 - DNA, 137 bp, Zea mays
  Clone ID: MRT4577_4815C.1
ctctaacctcaaattcttggatcctacgcacaatgtggctattggtgtcataacaaagtcattcaactgaaaggttgtgtccccgttttttccattgaacaatttgtcaaaatatatccgcctgctgtccgatttca

SEQ ID NO: 127952 - DNA, 324 bp, Zea mays
  Clone ID: MRT4577_48160C.1
agcgaagctcgatccatctaactctgcgttgaggggtcactcttgcagctgcaccctggactgagtgttagactgttattagctctaggctctagctcgccgtaccactccttggtgtagccatcaagcttatgatcggcactgaatggtcactgtctaagttcaaaccctgaccgtatagtcggccgcagaagcgctcgtggtgaataccttgtcaacgaggcgcgatgcacgaagagtgtgactcaaccgaggctgtggccctaggctgagctactattgctgctgatccataggagcgttcagagtacgatcagtaagcac

SEQ ID NO: 127953 - DNA, 1225 bp, Zea mays
  Clone ID: MRT4577_48161C.1
gaaaaaaatgcggtaagtaggtaggtaggtaggccgcccaggcccacgaggcgcacggcggagcccaggcggacgcgtgggtccgtccgggtacggcggcggtggcgactggtgcgatgcaaagggcggaagacgcggaggagataggacaactcagcgcaccacacaaggcactgtcagcagcggcggccggagactcccacgccagtgccagactcgattgggaggggagagatgaaggccacgctcaagggtcgctacgagggcgacaaggccacggccgccaccagcctcgccgcccccgccggcgacctccgcctcaaggcctccgccaccgaggccgtcttcgccaacgggccttccctccggggcctcaccctcaccctcgagaagcctggagctttcctcgtcgacctcaagccccacaaccaggatgtgcgcttccagttcatgaaatccgcgctcgtgctcgacaagcgcgtcagcctcacctacacccactccaccagccttgcggcgccggcgccgccctcccgcaccacgctcgactgcactgccaccttcgaccccgccaacaaggtcagcctctcccacacgctcgggtccggcggctgccgcgtcaagtacacctacgcgcacggggtcgagcgcctcaccaccatcgagcccctcttcgacaccaacaagaacgcctgggagttcgccgtcaccaggaagttagcgggaggggacgccgtcaagggcacctacgccgccaccaccaagctgctcggcctcgagtggagcagggactccatcgccggcggttccttgaaggtcgcgactatgtttgatttgtcggaccaacccaaagcaccaaagctaatagcagagagcacatggaattacgagatatgatttttttcccataaaaatgagaaatcatccttctcatattacttacacctactgcttgcttgattactgtatcctccagaacaatggagctattgtttcccatgtgctggtttacattgagcattttgcttgaccattttgagctgcggtcgaatgatgccgcgacattggattctgagaatgaatggacgccgaatatggtctgtccttcggcaaggttacatctaaataggagtaacattgtacttaaactgaaacctcatgaccttagtgtctcatatcaacattgagtagacggttcatatttaaaaaaaaagaaaaacaaagc

SEQ ID NO: 127954 - DNA, 222 bp, Zea mays
  Clone ID: MRT4577_48162C.1
ctatgatctgccttatgaagggggacacacttttgtgggtgtaaatgtgttactccaagcaacaagtaacccaacgatcatgatgcttgttacggtttactagtaccttatccatgcctttgtgctcgcgtttacctgtggttgcatatcaagtattattagcacgtcatgtcgtctaactaggatagattgtcttaggggccttcggcttccgaaggtcct

SEQ ID NO: 127955 - DNA, 295 bp, Zea mays
  Clone ID: MRT4577_48163C.1
aaaccgaaccaaggtgccccattccataaagcgcgagccgcctaaatattgctaaccgacaaaaggttttaaagtggattcacaccgtacacaaccataaataggacttttactgggtcacccggccagtgcaggggacacacaaaactgcctcagactcgtttagtccagcctccttgatcttggggccagggcacaccgcttccagccggagcgtgcttgttcatgcccggcggagcctgccatgtcggcacccgcgccacggtacatcttggcgatgagggggattgcaaag

SEQ ID NO: 127956 - DNA, 475 bp, Zea mays
  unsure (1)..(475): unsure at all n locations
  Clone ID: MRT4577_48164C.1
cccacgcgtccgcggacgcgtgggtgagcccccggcgacactgcctacacagcaaccagctcctccgccaccgcccaactacattccatcttcggctggatcctcactagcttcagatgggttctacttgagatcgcctgggtatccggggatgagctatcacagatgactttgcagaagagaaccttttgggggaaggtggatttgggtgcgtgttcaagggcattttgcaagatggtcgcccagttgccgtcaagaagctcaagattgggaatgggcaaggcgagcgtgagttcaaggctgaggtcgatactatcagcagagtacatcatagacatttggtttctctagtaggctattgcactgcggagggccagcgaatgcttgtttacgattntgttcccaacaacacactttattaccacctccatggtgtggacattnttctttcagttataatattttctaacattta

SEQ ID NO: 127957 - DNA, 2106 bp, Zea mays
  Clone ID: MRT4577_48165C.1
tgaaatatttaggacgtcgctgtgtcattttacaatgaagaatatgaattggacttggacaggtttgctgccgttacgatctcaacccagaaccttatgcatgctggaaaatttgcagggctcgtttttctctctcgcgcgccgtccttcacctccgccgccgaatccgagactctgatctcgggttcaccgcagcgcacagagcacccccgactcccgtcccgatccgcgctctcctctacgacgcttcagtcatggcaggaatggcacccgagggttctcagtttgatgctaagcactatgattctaaaatgcaggagctgctgagcactggtgagactgaggagttctttgataccggagccatcggcgccacctgcaccattgcttccatcgccgccgccacctgcaccattgccgccgtcgcctccgccgccagcattgtcgcctcctccgccggacgctctccctccgtcgcttccaccgtcaccgctgccatatccaacccgatcaccgcctcaagccccgccgcccccgctgccgacggatcagccgcgcgttcagccccgcgtatacccatcaccgccaccgccgtccctccctcctccgccgcctcccaccgtctcgccgccagcgccgggtccatccaactcgccgtcgccgtcgcctgctccagctacacaagctccgggtcccgcgcgtgttgctgcctattcgcctcccccgcctaaaatcgcccctcccccgcctccgcactatcgcggcaagtcgcattacacgccgcactcgcccgtgaagtcgcattcgaactcgacccatgcagctagcggcagcggcaacaacatcgagatatcgagggaagcggccaccaccatcgtagcactggccggtctcgctatgctcagctttattggcgccaccatttggttcgtcaagaaaaagcgccggcgcattgagcccccggcgacactgcctacacagcaaccagctcctccgccaccgcccaactacattccatcttcggctggatcctcgctagcatcagacggattctacttgagatcgccagggtatcctttcatgaggtacagcactgggagccatggttttccatactccccagccgactctgggattgggtattcccatatgctgttcacaccagagaatttggcagctatcacagatgactttgcagaagataaccttttgggagaaggtggatttgggtgtgtgttcaagggcattttgccggatggtcgccctgtcgccgtcaagaagctcaagattgggaatgggcaaggcgagcgtgagttcaaggctgaggtcgatactatcagcagagtacatcataggcatttggtttctctagtaggctattgcactgcggagggccagcgaatgcttgtttatgattttgttcccaacaacacactatattaccacctccatgtaagtgaaacatcactggattggcggacaagggttaagattgcagctggagcagcccgagggattggttacctccatgaagattgtcatccacgtattattcatagagatattaaatcatccaatattttgttggacaacaactttgaagctcaggtttctgattttggacttgcaaggttagcggctgattccaatacacatgttaccacacgtgtcatggggacatttgggtatttggctccagagtatgcattgtcaggaaagttaacagcaaagtctgatgtatattcttttggggttgttcttttggagctgatcacaggaagaaaacctgttgatgcttctcagccgttgggagatgaaagtctggttgaatgggtgagttcatcacttcattttatataataagtgaccttactgcatgtcactaatgttaggttctaaattatgcgtaacttttctgttttttaaccataaccagtaaccatagtcatgagattgagatccactaataaatgacatgattatttcgtgatacaccaatggatgtgtctagacttcttcaagcttcaactgttgatttcctgttccactgtctgtcgataaatatccattaagctgaggtggaagtcgaatgcctcaaagtttgag

SEQ ID NO: 127958 - DNA, 826 bp, Zea mays
  Clone ID: MRT4577_48166C.1
attttggacttgcaaggttagctgccgattccaatacacatgttaccacacgtgtcatggggacatttgggtatttggctccagagtatgcattgtcaggcaagttaacagcaaagtctgatgtatattcttttggggttgttcttttggagcttattacaggaagaaaacctgttgatgcttctcagcctttgggagatgaaagtctggttgaatgggctcgtcctcttctgatgaaggcaatcgagcttcgggagtttggggaccttcctgaccccaggatgggaaacaggttcgatgaaaacgagatgttccatatgataggagctgcggctgcatgcattcggcattctgcagcaatgaggccacggatggggcaggtggttagagcactagatagtttagccgactctaatctgaacaacggcctccaacccggacgcagcgaggtgttcttagagccacagacggaggagattcgactgttccagctgagggagttcggcagccgggactgtagcgacgagctgagccaagcgagctggagaagccgaagagatttgtgaacagattcggtacaagatcattaacattctttttttttgctcattctttacatgtaattatctcttttacatgattcttttttttttggttttactcctccctgaggcaattcttgttccccggtggaataaattttgcgtgagataagtaaattgaaccctctttttgcagtgaagagagttcggttcctggccttcactgacaaatattactgctagtgctagtgtcaaaaaaaaaaaaaaaaaaggcccctagggcc

SEQ ID NO: 127959 - DNA, 817 bp, Zea mays
  unsure (1)..(817): unsure at all n locations
  Clone ID: MRT4577_48167C.1
ggtccctggacctcgggcggggcggggggaagaacccgagcacctcagctcatcctcgcagatacgtttcagttccggagcgactagcgcgagcgttcagggattatttactgaaagagagagtgttcagggattttagcacttgttcatggctgctgcgtgcatcagccatcgctttcgccactccaagctcccggtactggtcctggcgctggcgacggtggtggccgccgcacgggctcagctgtcgccgccgacgttctacgcctcgtcgtgccctgccgcgctcgtcaccatcaacgccggcgtgagggctgccgtgctgctggaccgccgcatgggcgcctccctgctccggctccacttccacgactgcttcgtgcagggctgcgacgcgtccgttctgctggacgacacgggcaacttcaccggggagaagagcgcgggccccaacgcgggctcgctcagggggttcggcgtcatcgacaccatcaaggccctgctggaggcgctgtgcccgcggaccgtgtcgtgcgccgacatcctcgccgtcgccgcccgtgactctgtcgtcgcgctcggaggcccatcgtggaccgtgcagctcggcaggagggactccaccacggcgagcctctccaccgcgaacaccgacctcccctcgccagcgtccagcctgagtaccctgctcgccgcattcgccaggaaaggcctcagcagcaccgacatggtcgctctgtctggagnccacacggtggggcaagcgcagtgccagaactacccaggccagatctacaacgacgccaacatcaacgca

SEQ ID NO: 127960 - DNA, 345 bp, Zea mays
  Clone ID: MRT4577_48168C.1
tcgcgatctaggaacgttttaagcaggccgaagcagattgtgaccgggccttactgttggatagaaaggtaatagatttttgtagatgcaatattcctgtgctgctacgggtgacatgtctgaagcattgtcaaccctaagagaggagttccaaaggtttattggatagtcctggatggttctgacatcgttaccatcttgtgctgttatggcaacatcaaatccttactgtgaataccgtttgtggctccaatgccaaagcatgcctgaaatcttgaagtgcttctttgtaattcaaagttacttcccttgcaaaaccacgccgtagatatgctttaacattct

SEQ ID NO: 127961 - DNA, 357 bp, Zea mays
  Clone ID: MRT4577_48169C.1
actcgtccgcacggacacacatacaactggttcctaaatccaactatctgtactatcaaccacctggctcgagcctttgcacgcatacatcatgtctgatgagaagcaccaccacttcttcaaccaccacaataaacaccactatcacccctcctgctaatacggctactccgataccgaggtgattaccgacaccgactaaggccagtaccagaggtacatgaatgtggagaacgatcacaatcacaagcatcacctcggccaggccgtcgccatcgtcgtccacgccttcgcactctactagaagcacgaggcgaataaggatcccctacactcgcacaggcacaagatcactga

SEQ ID NO: 127962 - DNA, 266 bp, Zea mays
  unsure (1)..(266): unsure at all n locations
  Clone ID: MRT4577_48170C.1
catcgagagcggncagactttttttctctttttatccaacatgcacatgattgtagaactgaccatatgcagaggctggaattctcgaggcgagctacacaagtgtgcaccctgcacctgaatgcccaacaacaagattttatccggagacgtggaatagaaaggcgcggggggcatggaaacatctccgcctgacgaggtaccagcggtttacaatgttcctgatacccaaccgtagggaaccccacctagatcttgtcgagccc

SEQ ID NO: 127963 - DNA, 483 bp, Zea mays
  Clone ID: MRT4577_48171C.1
ccgccggcgacctcggaggccgtgtgatctccaatcggacccgaccgatcattttcatacggcggaggagtgtatgcatgcatctgtcatcgcgcctcatcatcagcatgcatgttaggttaatccatctccatccgtcacctatcacatggctcgatctgagtaccactacaagcagttgcgtggcgagtaacatgtacaacgattgcaacctttcgtcagcgaactgcagctgctcccgtttttatatgatattgcaactggacctatatattttaattttgtttagcttaagtgggacagcagttgaccgagcatgagtggcaactgccatgaatgtcgtcgatcattaggtacaatccatgtgatcggtgctttagagatcgagttattaattctcacaaaaaaaacttatgatatgagacggattttgaatgtttcagggcctgtttggtttgtggctaaatgtgtcacactttgcct

SEQ ID NO: 127964 - DNA, 437 bp, Zea mays
  Clone ID: MRT4577_48172C.1
tcgagcggccgcccgggcaggttgattgacataataatgtgtcacgcatcaccatggttggaatggtcagtgctagcattgacctgaatgatactattgaaatgatatgaaaatggtgttggttcgaatctgacgtcagttcttaatctatataaaatatatggggggggggggggggaaaaaaaaaaaaaaaaaaaaaacaaaaatttgaactttgggccaaaaaaaaaatgttggcccttttctcgcgacctccctaagggcaagttgtccttttttccttcctcttgggggcccttttggcttttttttggggggccttatttgccctttgcggggggtttttacattccattgggggagtttttacagcttcccgattggaaaacccttggggttccccccctttttcgctttggggctcttccccttttggc

SEQ ID NO: 127965 - DNA, 1507 bp, Zea mays
  unsure (1)..(1507): unsure at all n locations
  Clone ID: MRT4577_48173C.1
aattgaacaaaccagaatcctaagcactttttatcgttctgcatcagccttgggatcccggcttccatctatggcaaatgctaaagcaagagtagctggtgctggcgccatcttaagacctgtatctactgggacacaggttgtaatgaggagagctcgcagtgtagcacaggcagcatggacaagaccagcactgcaactgtcctcatggacttgtattgggccaagacggcgaaataatatatctcgagccactgtcacatcagaggaaataataacatctacaggcggtggatctgaatccacttcattgttgactgaaaccactgcagaaaccacagagacagttacatcagaagctgtatcagaagtggttcagagttctgtttctgtggcggtcgatggtgttgacttggtagatgacaagggagatagcgatgatgacatcgtcgatcaccatggggatgaggacaggatgactgatgtggagctgtggcagcaacttgaaagtgagttgtaccggaagagggagggagaagaagatgacatagcggacgcgtgggctgaaagtacaattgctgaggaggtgggtggcgtggctgaagatgtgctcagcgagacaaaggaagtgcataggttctaccctcctggaaaaatcatgcacatattattctccagcagtgaagaagcagttcgtggagaggagcctgaggatgatgttacggatggagaggcacaaagcagcctagggatcttcttgacgccaagatctctgtacggcaagctgaggctttcgaaaatgatgatcaatgaccattacatgcctatatacagaagaaacattgagcagctgatcgcggagcttgagaaggattcctcggatcaaatagggtccgtcaggtgtagttgaccgttgtaagagctgatcaaatagggtgctataggtccgacatgtgtatacttgcttaagtttaccgcttcccttctggctgtgtccacatgagatgactaacctatagagggtggatagggattggtagggcgagtaaaaatctagcctatccttcatgttgcacgagaagcgtagaatacccctttccactgtacaaactagatataataagaaaatcatcatggagattctgattcnaaaaaaaaaaaaaaaaaaaaaaaaacgacgacaaggacatcggctactactagctgcgcttgttcacctgcttgcactgtgcatatatattgctgctgccgagctgggcgcttggatagtacgtggggaaacatggatggcttttggtgtaggagctgcatgctttgctagggctatctggtcatgtaggaaatggaagctctgctgtactttaagaaacttgatgaaacctttgtataactcaactgtacctctatctatcccttgtgtgtatttgagaacgatttcagagcgaaaaaaaaaaaaaaaaaaaaaaaaaaaaaaaaaaaagaaaaaaaaaaaaaaaaaaggccccta

SEQ ID NO: 127966 - DNA, 426 bp, Zea mays
  Clone ID: MRT4577_48174C.1
aagacctgtaccccacaccactaagcactaccgcactacctagcgctacctgccttatgatcgcgtcctgcaccaccgtcacgatgagctatcgtgcgtaccagatccgtcgtgctcctgcatcgctctcgcatgatgaagatcacggtgcggtggtctgagatggcgtacccagcgaccgagacgccgcgcagacggatctggaactcggggacccacctgccggagtccgggttgcacacgcgacaccgtatacttcttccgccgctaggacgcggacagaaacgacctgtccgacgcacacggcagcttcttagacagagcgcgcatgcggtgcgcgctggcctatgcgctcgtgcctttctaccctatggacagccagctggcgcgctactaggacagccgtgtcatagatcgactgcaacg

SEQ ID NO: 127967 - DNA, 316 bp, Zea mays
  Clone ID: MRT4577_48175C.1
aatggctcacgctctgcaaactcgtggacgtgcacgggtggtcctgcaaccaccattttgcactacttatagaccatatgcatgagctcactttatacaacgggtggacccatgattacctacccgagatggccagatgtggacaccgtgtctgcaagcacatttacttaatcaagcgcttttgggaggccgacttcaatggcatcatggctgatagtagacaactctgcggtgcataccctccattcctttacgttcttcaagaccttaggattaaaccgtgtattggctttagctactgcgactgcctctggta

SEQ ID NO: 127968 - DNA, 224 bp, Zea mays
  Clone ID: MRT4577_48176C.1
gggaaacaaagtttacttttttccattaaaattaaaacccttgcaatcgacagcaaatttttatgccccctaaacttaacaccctcaacatagatcgggttttaacccgggggttctttaacccccggccactgaaaaatgtttaacccccccgctttttttttttttttttaggagcaccccatccttgtccgtttttccccacaaatgaatcatttttcgcc

SEQ ID NO: 127969 - DNA, 671 bp, Zea mays
  Clone ID: MRT4577_48177C.1
ccggccgggcttctttctcgcaccgaagcttacaggaaagctgtcggttcctgctgtcgtggctcacgtctagggtttggcgaaccctaggccacgggtcgtgacacctcatcgtgcaccgcgggcggcggggcccgcgcttcaccgtcggcatgtacagtctgacggacgagaccaaggccaggttccacgacctcgacttcggatggggcaggccggtgtacgggggaccggcagaagccgtcggtacccggccttgccctggctgtcaagcttcatcttacccttcaagaacgctagtggagaggacggcgccgtcgtgccggtgtgcctgcctcgcctggccatggacaggttggtcgacgagatgggcaagatgcggcggcggcgctcaccggccgaggtgcagcagcctcgccatgggtttcccgtcatcgtcaagaggtctgcactctgaagtaattgtccaataatgcgtggccgcgccggatgcacttactgtatatttgctgtgttgtattatacctgtagtattatttggtggtctctcctatatatttgccctactccgccgtggtgtcgatatgtatgtatgtgtatgggtattcataaataaagataaggaatcatgcatctgtgttgtgctagaaaaaaaaaaaaaaaaagcggcc

SEQ ID NO: 127970 - DNA, 203 bp, Zea mays
  Clone ID: MRT4577_48178C.1
attctagtcctaacagtacccctcatagatcacaacattataatttggtctaccaaagtggagatagctgtagtagaactgatgatgatgaagcttctacatctgaaagagaaacatcagaacatgataacaatgggtcgagggaagaaacccatgtgctggaattacatgcttatcgcgcaacaatgttagccttgcatgct

SEQ ID NO: 127971 - DNA, 1588 bp, Zea mays
  Clone ID: MRT4577_48179C.1
cttcaagcagctaacataattaactcatgggtgcatagagatatgccgccgacgacccatcatatctatggttacttattattgggcatggagcacgtcatctcaatggaggagatcctcgggcccttctgggagctgctaccaccgccagcgccagagccagagccagagcgagagcagcctccggtaaccggcatcgtcgtcggcagtgtcatagacgttgctgctgctggtcacggtcatggtggcggcgacatgatggatcagcagcacgccacagagtggacctttgagaggttactggaagaggaggctctgacgacaagcacaccgccgccggtggtggtggtgccgaactcttgttgctcaggcgccctaaatgttgaccggccgccggtgatggaagaggcggtaatgatggcgcctgcggcggtgagtagtgccgtagtaggggaccccatggagtacaatgccatactgaggaggaagctggaggaggacctcgaggccttcaaaatgtggagggcggcctccagtgttgtgacctcagatcaacgttctcaaggctcaaacaatcacactggaggtagcagcatcaggaataatccagtgcagaacaagctgatgaacggcgaagatccaatcaacaataaccacgctcaaaccgcaggccttggcgtgaggcttgctactagctcttcctcgagagatccttcaccatcagacgaagacatggacggagaagtagagattctggggttcaagatgcctaccgaggaaagagtgaggaaaagaaaggaatccaatagagaatcagccagacgctcgagatacaggaaagccgctcacctgaaagaactggaggaccaggtagcacagctaaaagccgagaattcttgcctgctgaggcgcattgccgctctgaaccagaagtacaacgacgctaacgtcgacaacagggtgctgagagcggacatggagaccctaagagctaaggtgaagatgggagaggactccctgaagcgggtgatagagatgagctcatcagtgccgtcgtccatgcccatctcggcgccgacccccagctccgacgctccagtgccgccgccgcctatccgagacagcatcgtcggctacttctccgccacagccgcagacgacgatgcttcggtcggcaacggtttcttgcgactgcaagctcatcaagagcctgcatccatggtcgtcggtggaactctgagcgccacagagatgaaccgagtagcagcagccacgcattgcgcgggggccatggagctcatccagacggcgatgggatccatgccgccgacctccgcctccggatctacaccgccgccgcaggattatgagctgctgggtccaaatggggccatacacatggacatgtattaggcactgcgggtttcgtgatcgctgggaacattttatttgcaggcgtcgctgaataaggctggttgtctctcccttgacatgaaatccaaataactcacaattaaccatgagtgttccgtttggtcccagtttcgaaggtattgttaatcataatagtgttgttctgtacttcaga

SEQ ID NO: 127972 - DNA, 400 bp, Zea mays
  Clone ID: MRT4577_4817C.1
ggataaagtgctaaactttaccatattaaatgcatacttgagtagagccgccattctcgcggtacgaggagcaaagctatcgaaggtggttggccgagcgtgaggaggggagagagtaaaaatagttgtcaatggtggggaggagacagaaaggagtttggtgaccaattttagcacagtttaacatctttggtgaagctaaagtgccgatgggtactaaactttagcacaacacttttagtcgccctgttgtttctttaatagctaaactttagtaaaaatgtttggtgctaaactttagcaaaggggaataaatgggtcttaggctgatgatttagctgggtgaaagctgaagacaattgcatgtcacgtaaaccaagcttggtagctcatataatgc

SEQ ID NO: 127973 - DNA, 413 bp, Zea mays
  Clone ID: MRT4577_48180C.1
cccacgcgtccgcccacgcgtccggatttatttataggaatttgttagtggaatacagggagtattgcagaaatcagcgttttttttcacaggagaaatgtgggtttcaggaaaaaagcactgcattccaaaggggacctgaaattcgtgctagattcatgtacaattcttacattccaaagaggcccaaatgccagcaagctaggatcactggtctctcttggacctgtgcttcctggtgccatccttcctgctccatcaaccatcatgttgactttatgaagctgatcagatggggatgcttgggaaccatggagtgggtttgctttggcttctggttcgggttttattaggtgatatgggatctagcctgtaatcgatgtttttttatttggttcattgtaaatttatat

SEQ ID NO: 127974 - DNA, 1815 bp, Zea mays
  Clone ID: MRT4577_48181C.1
tttctttttttttgcctctccagaagtttccgcagggaggcacagcaagagagagagcccagcactagataagtagggggggaaagaagagcatccaaccggggcgtactcctcgatctccttcaagcagctaacataattaactcatgggtgcatagagatatgccgccgacgacccatcatatctatgggtccctccccttgcactgcatctccttcaattcctagtgtttgcttctcccttccttgacctttgcttggaaccattgattgatagttacttattattgggcatggagcacgtcatctcaatggaggagatcctcgggcccttctgggagctgctaccaccgccagcgccagagccagagccagagcgagagcagcctccggtaaccggcatcgtcgtcggcagtgtcatagacgttgctgctgctggtcacggtcatggtggcggcgacatgatggatcagcagcacgccacagagtggacctttgagaggttactggaagaggaggctctgacgacaagcacaccgccgccggtggtggtggtgccgaactcttgttgctcaggcgccctaaatgttgaccggccgccggtgatggaagaggcggtaatgatggcgcctgcggcggtgagtagtgccgtagtaggggaccccatggagtacaatgccatactgaggaggaagctggaggaggacctcgaggccttcaaaatgtggagggcggcctccagtgttgtgacctcagatcaacgttctcaaggctcaaacaatcacactggaggtagcagcatcaggaataatccagtgcagaacaagctgatgaacggcgaagatccaatcaacaataaccacgctcaaaccgcaggccttggcgtgaggcttgctactagctcttcctcgagagatccttcaccatcagacgaagacatggacggagaagtagagattctggggttcaagatgcctaccgaggaaagagtgaggaaaagaaaggaatccaatagagaatcagccagacgctcgagatacaggaaagccgctcacctgaaagaactggaagaccaggtagcacagctaaaagccgagaattcttgcctgctgaggcgcattgccgctctgaaccagaagtacaacgacgctaacgtcgacaacagggtgctgagagcggacatggagaccctaagagctaaggtgaagatgggagaggactctctgaagcgggtgatagagatgagctcatcagtgccgtcgtccatgcccatctcggcgccgacccccagctccgacgctccagtgccgccgccgcctatccgagacagcatcgtcggctacttctccgccacagccgcagacgacgatgcttcggtcggcaacggtttcttgcgactgcaagctcatcaagagcctgcatccatggtcgtcggtggaactctgagcgccacagagatgaaccgagtagcagcagccacgcattgcgcgggggccatggagctcatccagacggcgatgggatccatgccgccgacctccgcctccggatctacaccgccgccgcaggattatgagctgctgggtccaaatggggccatacacatggacatgtattaggcactgcgggtttcgtgatcgctgggaacattttatttgcaggcgtcgctgaataaggctggttgtctcgatctcccttgacatgaaatccaaataactcacaattaaccatgagtgttccgtttggtcccagaaaaaaaaaaaaaagcggcctttcgaaggtattgttaatcataatagtgttgttctgtacttc

SEQ ID NO: 127975 - DNA, 371 bp, Zea mays
  Clone ID: MRT4577_48182C.1
gacggacgcgttctgccgacagcctttcagctgttgtacaagctatctttattcatgtgtttgggagatatgagtaggcttttttatgaaatccgcgtaataaaactggtcagtgccattcgaaaaatcttgtccgcttacgagaaatattctgatgctgtaactggtctgagtggtaaagacccgtcctatatcttactagcattagaagccatggctaatggtagagattctactaggctctcttgggaccttgcccttgagtcttgcatctcaaacacttcttggtccttcaactattgttagccatacatgcaaacattcaaagcatctgaaagatcatgttacctctccaccatgtactaccattg

SEQ ID NO: 127976 - DNA, 854 bp, Zea mays
  Clone ID: MRT4577_48183C.1
gctaaacttgtcagtggaatgcacaagcctgctcagcaaacagttgtcccttcttcatcagttcaagacttactagcatcactacctgtgaagaagatgtaatgatctacctctaacaagatgcctctgtcctttatggttcttgctttcctgggaaaagtttttgagactttgtgtcactattagatcacagacattgtgctttagttggaactctgcatgtgaaactgaatggtgagaataaccatattgttcaggaaacaacttggtggtaagcttggaagttccttgcaggatgatcttggggttgagacaattggtgatctcctaagttttacagaggaaaaattacaagagcagtatggagtaaatactgggtttgaccatataatatatctccctactactatataagcatggtgtgtaatgggtttggaaaaggttctggacggacacatggtcaaagtctgcaatgatcagtacagtttgactgacaaatatactgatggttggctgtcttcagattgtagaacaactctttttaaataaacacctcaaagagtaaagctgacacccatccacgatcatcacgctgcttgtgacgatcgtcgttctcttccgtcgctaaaacgtagtgagttctctgcttcgtcgagtcacgccctcatgggttgctcgtgttcattgttgtttgatctgtcagaaaaatcccacgtgtatttgtttatagatagattacactaattattaaaacgggtgaaattcattcacgctgcaaagttgtacatagtgcgttggaatttatttgaaagtaaagctgtacatagtttttgactaaaaaaaaaaaaaaaaaa

SEQ ID NO: 127977 - DNA, 317 bp, Zea mays
  Clone ID: MRT4577_48184C.1
cctggcgccatctggcttctcctcccctctcggggggggggagcggtggcgtgccgtgtccatggctatcggcgctggcgccgcagaaaaacgccgctttgaggagctgcaaggccggactccatttccccgtggcctggattggccggttcctcaaggcgcgcatgtacgctctactgcggcggcgcctgcgcgggcgggggcctcgccggcgtccttgcgtacctcgggggtgtgggtctcgtactcccctgctgtgccgcggggcgcatcatgaagacccgctttgcgccgccccacgtctaactggctgggcg

SEQ ID NO: 127978 - DNA, 669 bp, Zea mays
  Clone ID: MRT4577_48185C.1
gtggcctactcggacctcgtcgcggggctccgcgagggcgccgtggccgccgtcgctttcgaggaggactcgcgccgatctacttcagcaagaacgctggggatgatgttggctccgacacgaacgagaccggtgagaacgctgcggcgccggcgccgaagtggccgtactacgcgcggagggtgccgcacgatgagggcttcttgctcgggctaatgcgggatggccgggtggactaccgttcgtcgccgcggcctgctgggaggctgctcgtggacatgctgagcacgctgctcacgctttgggtctcgctggtgcccttgatgtggttcatacagcgtcagatgtctggtgcgggcggtgctgacaagcgacgcaaaccgaggaagcagagggtgggctttgatgatgttcagggcatagatgaagccaaggaggagcttgttgagctgcttaccgaaatggatggttttgactcggacatgaaagttattgtaatggctgctactaacagaccaaaagcactggatgctgctctttgtcgacctggccgcttctccagaaaggttgttgttggtatgcctgatgtggagggccgcacaaagattctggatgttcatctaaagaatattcctttggaagaggatcacggaataatcagtgatctgg

SEQ ID NO: 127979 - DNA, 421 bp, Zea mays
  Clone ID: MRT4577_48186C.1
cggatggatatccttatggaggctatgaatacttctcccgtgaaatcggtcagtacttctctgtggtcaccaaggggcaacaactgtactacggcatcaaaatttttgaaatggtgagcattgacttatcaaacaacaacttatctggtcgaattccagaagaaatagcttctcttgatgcactgctcaatttgaacctctcaagaaactatttaagtggagaaattccagataagattggggccatgaagtcactcttctccctcgacctctcagacaacgtgctttctggggaaatcccttccagcttatcagatctagcacaattgagctatttggacttatctaataacaatttgacagggccggtaccatctggacagcaacttgacaccctctacgcagagtacccgtctatgta

SEQ ID NO: 127980 - DNA, 733 bp, Zea mays
  Clone ID: MRT4577_48187C.1
ccggccgggaatggctttctataatatgactttgcattgaatgctgtgattctctaggagatcccattctggcttcttttcatttataaatcaaatactcgcgataactttgtgttttctaactgatatcatgacctcagatcttgctgtgagcaaagagggtctctcaattcccctcattgatttctcccttttccttaacggaaccccttctgaacgtaatgacactgcaaatgccattctcgaaggcttcaaaactgctggcttcatctacctcaagaaccatcccgtttctccaaaagaattacagcatgcatttgacatgtctgcccgctggttcgatcagcctctcgaatcaaaaatgaaagttgtttggacgacaccagaagccaaccgaggctactcagctcctggtagagagaaagtcagtcagctcactgacctggccgacgttgagaagatgcgtgctgctttgccagatataaaagagagtctcgagattggccgtgaaaacgaagctggacacccgaattattggcttgaagagagtggcgaacttgtaggtttccgaaaggacatgcttgggtttttcgagcagtgtcgccagttgcacgttgaggtgatgaaagccatcgctgttggcatgggccttgacgatggtttctttgacggtttcgttgacgttggggataacacgctgcgtttgttgcactacccgtcagtccagtctaat

SEQ ID NO: 127981 - DNA, 712 bp, Zea mays
  Clone ID: MRT4577_48188C.1
ttttttttttttttttttaacacaaaaaagtttaatttaaaatataacaaagcataatattacaaaacttgataggtaaataaataatagctcgagaaggataagctaaaatgtgctttattgttggtaatattggtatgatgcggatatattttacctatagatatacaagtatgtgtagtactgatctatactcttaccgtctattcaatagatagagatttctgtccacgtggatagagaaattatctcactatacggatccatactcgtaccgtttatccaataggcagagattgttgtccacgtggatagagaaattatctcatagacgccttaatttggttcggataaaaccagtcgggttttcgtgttttggtaatcattgccatctctattagcaatgcacggtcatagctttaatttaacgcgctccccgacgataggaacgtatcgaaatatctttgctagaatcatagccatcacataaagatatggtgcgtccattgagcacgtcgttggtttcgtagctgcacaagctaggtgctgcagtgctgcgctttgcacagtgcgtcccgttcgtatgcaattcagcactgtatcttggataaaaaaaagagagaaactattcagtgcacaacaaacagcgatgaagtcgtgatgccagaatggtcaatgtgagtcattttctaccatggtctcgtgccgaatt

SEQ ID NO: 127982 - DNA, 294 bp, Zea mays
  Clone ID: MRT4577_48189C.1
ggaacacaaggcagctagctaactttaactaggccacacactgctgaattattcaggaggaggaccttctagatacctagctatagctcgcccggcggacacactacaacagcgacctcccatgcgcgttgagaagctgatgaaccacctgaaaccatacctggcgattgtgctgctgcacgtggcgttctccgagatgtacatcgtctcacggcgccttccctaagcgcggcctgaaccacttcgtactaagcagataccggaatcttgaggtcaacgacgacatggccccct

SEQ ID NO: 127983 - DNA, 595 bp, Zea mays
  Clone ID: MRT4577_4818C.1
ccggccttgaaagcctgtagactgaacggagtgaacatcatccccatcgccccaagtcctgacctgtaccgactgtcccatgcggaacacaaggagaactccagcaactctctccaccagtgcacccaataacacccagttctacatagcgccaaacttggatgagatcgctgatacagagcgttgcacggagaatgaaccggaagcgctgccgaagctgcattgggccacacaagggaagaaggatctcctccgaacgcacgcccaaattgtagaagcgaaacctgacgaacctcctcctcatcggaacaatctcgttgcccacccgctggatgatcagacgctacggagaattcttcaacactgtcgcttccggaaatgtggtggaggagacctactgaaaagaccatgtgtccaacaacgtcacagcgaacgtaagtgtcaacatcctctgacaccgcgaccgcaagttcatccatatggtctccgccgatcacacgaacgtgattgaggagcaggctcttacgatatgcaactacgatacatactctctgtgtatttacctttctctgagagctacgaccttactcgactg

SEQ ID NO: 127984 - DNA, 450 bp, Zea mays
  Clone ID: MRT4577_48190C.1
gctctatcggtcggcgcgtgatgggtttattgataaatatcccttattgattcccagagctaggaccctcccttaacacttatttttcgttattactttgctagagatataactttttctggacttgaccatgatcctccttttctgaatggtatcgttataatatgatgtcattatagcatagtatacttatatttttggattgtgtattctaataatttatctataatatattacttaaattacgatattctaaaaatgttgagtatttatatgaggtattggtagtaagttcttatgatttataagaactactccaatctctttaaataccacatttttgaattatgaactattatggattatatttttattattttttttggattccaattcttatacatctttaatttgtttttgcttaatatactgtcgatgcaattagaaggg

SEQ ID NO: 127985 - DNA, 402 bp, Zea mays
  unsure (1)..(402): unsure at all n locations
  Clone ID: MRT4577_48191C.1
accaccacggggaacacagaccagcagcagaacccacaccagagcgcagaagaacccgancgacaccangagggngcngcacgangcccacgcacacccggcacacgcagcgagcgccaccaccacgcanacaagcggcgggggcggcagccagccaccgccgccggaacaacaaccgccgccggggcaacagccaccagcggaacaccagccaccaacggngcaacagccaccgccggaccaccagccgccgccggaccaccagccaccgacggaccaagagccgccgacggaacaacagccgacgacaccangcaacaacccaacacaaccgacccggacagaggcagaagcccaggcacacccangcccgagccaacagacgaaagcaaacccgggcca

SEQ ID NO: 127986 - DNA, 1217 bp, Zea mays
  unsure (1)..(1217): unsure at all n locations
  Clone ID: MRT4577_48192C.1
cggncgcgtgggcggacgcgtgggctcagttgcgttgtgggtgatccactcgttcttccctccacgcgccaaaaccccagccacggccatctcctcctccactcctcccgtagtcccgttcgtccacatccaaaagcttcctaggagaaaaaaagaacagttatttgcagcgggaaccctaacaaatcactcgctacaagcgagcgagggagagatgtctctccagtgcgtggcgcccccggtccgagcactcgccgtgctaccagcgccagccccccctcgccgccggacaaaccatgtgtccctataccttccgagccggcggccagggctcgccgtcgccccggtccgtgcggcggactcgtcctctccgcccaccgtgcccgcctccgcggccggcaaggctgtcgtcccggacgacgagttctccctcgccaaggtctctttcggtgtgatcgggctggggcttgggctctcgctcctgtcgtacggattcgggtcgtatttcaacctgcttcctggttcggagtggtcagctttgctgctaacctacgggtttcctctcacaatcatcggcatggccttgaagtatgcagaactgaaaccagtaccctgcataacctacgctgatgcctttgctctaagagaaaagtgtgctacccctattctgaagcaggtcaggagtgatgttacacgttttagatatggtgatgaacaacacttggatgaagcactgcagagaatctttcaatatggtttgggtgggggcattcctagacgtaatgcacctatattacaaaagattcgagaggaagtaactgacgatgggaaatacagtttagtactcgtatttcaagccaaagcattggagctatctgattttgagaagagacaggctaaattcacctccttttttggtcctgggattaaggcagaaatcgatgcaggaaaaggtggcggtgatctatatgaagttcgtctaatctcagacactgtttagaaacaatctttgtgaattttctctattacaaaactaaacttttttctttttttttctttgatccgctgattttgcatatatgatgttaatagcatcagattttacccatacactccatggacatgtgtaaaggaaaagttgttgtaatattaaatgtaaatgaagtttgatcagctacgctgcccatatagttgaaaggtatttagctgtttttttc

SEQ ID NO: 127987 - DNA, 1321 bp, Zea mays
  Clone ID: MRT4577_48193C.1
ggttgaaataaattagtggttgaaattttgaaaaaaaaaaaaaaaaaaaaaaaaaaaaaaaaaaaaaaaaaaaccatccaaaagcttcctaggagaaaaaaaggacagttatttgcagcgggaaccctaacaaatcactcgctacaagcgagcgagggagagatgtctttccagtgcgtggcgcccccggtccgagcactcgccgtgctaccagcgccagccccccctcgccgccggacaaaccatgtgtccctataccttccgagccggcggccagggctcgccgtcgccccggtccgtgcgggggactcgtcctttccgcccaccgtgcccgcctccgcggccggcaaggttgtcgtcccggacgacgagttctccctcgccaaggtctctttcggtgtgatcgggctggggcttgggctctcgctcctgtcgtacggattcgggtcgtatttcaacctgcttcctggttcggagtggtcagctttgctgctaacctacgggtttcctctcacaatcatcggcatggccttgaagtatgcagaactgaaaccagtaccctgcataacctacgctgatgcctttgctctaagagaaaagtgtgctacccctattctgaagcaggtcaggagtgatgttacacgttttagatatggtgatgaacaacacttggatgaagcactgcagagaatctttcaatatggtttgggtgggggcattcctagacgtaatgcacctatattacaaaagattcgagaggaagtaactgacgatgggaaatacagtttagtactcgtatttgaagccaaagcattggagctatctgattttgagaagagacaggctaaattcacctccttttttggtcctgggattaaagcagaaatcgatgcaggaaaaggtggcggtgatctatatgaagttcgtctaatctcagacactgtttagaaacaatctttgtgaattttctctaatacaaaactaaactttttttttttttctttgatccgctgattttgcatatatgatgttaatagcatcagattttacccttgtttctgttgtgccttctgagcttccatgtatattggctgttgatccttggccatgacctgacaccttcatacactccatggacatgtgtgaaggaaaagttgttgtaatattagatgtaaatgaactttgattgggaacgctgtccatatagttgaaaggtatttagctgtttttttcaaaaaaaaaaaacgctgataatgaacctaacaaaagggcgccgctctcgatctacaactagacgcacgcgtgggtcgtaccctcggaa

SEQ ID NO: 127988 - DNA, 262 bp, Zea mays
  Clone ID: MRT4577_48194C.1
ataaggctcaaggccacttatggagcacctgacgcgcatttgcattggtctgatggcatggccaaacatccatgaacaagaggtacatcaaggctggatcagaaatggggcaggtgcaaactgcgaggctgccaagggacacactggttaaagaaacgatgtgcagatgcagagaaccataaacggacatatcaacgctgtcatacatcggaccatgcccgaggaccaggccacaccaaatgaatggagacacactctaaga

SEQ ID NO: 127989 - DNA, 245 bp, Zea mays
  Clone ID: MRT4577_48195C.1
ggtggggggtacacattgttacaaaagttaaaaaatatcatgcacattcggggtattcaagaccccatggaatgggggaaattttccaatcaatttttttttatttatgtaaccaaactacatttttgatacaggggggggtgggttccacaatgttcccggttttatggggaaacacaaaaacggggagtttttggggagcacccacccatggttttgtcatcaaacgagggttttcccagggg

SEQ ID NO: 127990 - DNA, 347 bp, Zea mays
  Clone ID: MRT4577_48196C.1
cgacccaaaaaggggcggctcatacaaacaccggaccggacttaaaaagccacccccaggggggtccggggggggggggccccaccccccccctgcgggaaaaaaaagctttttctgagatgacacaccccctccccaaaaaatttctctgggtgggatggatgcggaaccaacccacccgcccgccatatggcctcgcatgttgcaggggcttcccccatccccaacaacgaagtttttacgctatggtgtcggagcactgccaacccttgctttgggggaattaagggctaccaaagctgcgtctccttttatctgacacggccttgggccgccccccacgaaca

SEQ ID NO: 127991 - DNA, 234 bp, Zea mays
  Clone ID: MRT4577_48197C.1
ccaactcgttctccatcgtttgttgtgacccgcgacgcacattgcttgcgtcgcctttcttgatggcctggcttgcccagagctcgactccgatgcgggggacgttcgcgtgtgagctgactcacgtaacacgccgaccccagcaagaccgcgatgcaacgtctccgcgacgcacatgacaccgacatgcacacgaacagatccaggaagctatgtcgcatcgacgtgctgact

SEQ ID NO: 127992 - DNA, 198 bp, Zea mays
  Clone ID: MRT4577_48198C.1
gttccaccattatcctgtttacaaaatactactgctccgtatatacggagaaactacatttaacgtaatcgaaaacaaacagctattaattagcaccatctccatacctgcataccaccttggcctaaacgacctgatcataacatttaattaattaattaagccaaagacctacaagccctaggatcgatgcctccc

SEQ ID NO: 127993 - DNA, 271 bp, Zea mays
  Clone ID: MRT4577_48199C.1
cgtcacgcgtcggctgtcgcatccgcggctttccgcgtccgggcacgcattccctcacgcgtgcggggaattgtcggcgggaccaggaccatgccatgacggaggctgtagaccactagcgctgctatacggacagtggcacatagcaaattgcatcgggacgtgaaccaatctgtagtcgcatggcgactgcaccttgaatacatggtgccacattatgacatacaacctaggtacgagcactaacctggtcttgacgcagaatttgtgg

SEQ ID NO: 127994 - DNA, 310 bp, Zea mays
  Clone ID: MRT4577_4819C.1
aacatatatactaacattgtggtacttccaacaggaaataccacaatatactttgaaatgaaaaaatgggatttacgttacatataaaaacttacatagggccaaacaaatagaggatcaataaaccatgatcttaccaacaacagttcaacacagacgatgcgcatatgggcccttgacccaagtgatagaaactaaatggtaaccagacacgatgatagtgtattccatcacaaatatagtacgaatggacaccctagctataggtggtgcctgaaatccaacaagaaccactcacattatatataaa

SEQ ID NO: 127995 - DNA, 242 bp, Zea mays
  unsure (1)..(242): unsure at all n locations
  Clone ID: MRT4577_481C.1
ccggccgggaacctctattctttcacggacctcgaaggaccagatttcgacattcttttttcttaccactctctttttcaatcactcactttcgcttcgagccttgacggccgtttatatttatttaccactctttatactacaacttctggtcctagagacactttcacgaaagacaactacttcagtacacttttatatctactaccgccaaaatgaagaaccgcccgcnccgctatccc

SEQ ID NO: 127996 - DNA, 244 bp, Zea mays
  Clone ID: MRT4577_48200C.1
gatatatttatttcattgtaactctcttttttttcgtccatcttatttctgtagctgagaaaaaaaatgtattttggaagacaatgatactgattgcgtgcgtgccatttagttagattcgtttgtttatttttatatgtcatgcctttgtattgtgcttagatggcccatttgtttagagcaactttagtgggaggggaggagtgttaaaatactctattcagtaaagaagcacagcatgtcg

SEQ ID NO: 127997 - DNA, 801 bp, Zea mays
  unsure (1)..(801): unsure at all n locations
  Clone ID: MRT4577_48201C.1
tcagcggtggccgcctcgatttcgggaattaaaattgctcttgaattgaaaggttcctcgacaaggcggccgtgaacgacggcgacgggcggcggtggtcgctgtgcacggtgacgcaggtggaggaggccaagatcatcctccggatgcttcccgtcttcgtgagctccgtcctgggctacctcccgatcccgctgctcctgacgttcacggtgcagcagggcgggaccatggacacccggctcggcgccaccaacgtgccgccggcgagcctcttcgtcgtccccatcgtgttccagatgctcatcctggtggtctacgaccgcgccgccgccaccgagatgtccgtgttctggctcacgccgcagttcttcctgctgggcgtgatggacgtcacctccttcgtcggcctgctcgagttcttctacagcgaggcctccgctggcatgaagtccatcgggggcgccgtttgcttctgcatcctcggcatcgcgtcgtggctcgggagcttcctcatccgggtggtcaaccgcgccaccgcgcaccacggcaccagcatgggcacagggtggctggaaggcgccaatctcagcgccggccgcctcgatttgttctactggcttcttgcgatctttaaactcgtcgccgtgcttctctacctgctgtgtgcgtggagatacacctataggcatcatccgaggatgcaggtgcagtccacggtggaggatcacaccgcagccatcaagcgagatgcagcactttgacgatggcatcgntaattgttagtagttcacgtcatcc

SEQ ID NO: 127998 - DNA, 431 bp, Zea mays
  Clone ID: MRT4577_48202C.1
ttttttttttttttttttttttttttttttttttttttttttttgggcttagttattttttttattagtattacctagctaatcaaagcatgatcaacctcaacatatatgatatctgtgtcccactcgaaaaaggggaaacggggtaaaaacaagaggggaaaactccctcccgagggcacaaaaaagaagccccccccccgggggaaaaaaaccaaaataagggggggaaaaaaacaccccgggtacccgaaaaaaaacccggacaaggaacaaaaacactcgggaaaaaaaaaggccctaacttggggaaaaaaaaaaaaatcgtcagccacgggagggacctctcaaaacaaaaaaaagtccccaaaaaaaaaatcggcggggggaggaatttttcaccaaaaaaaaagggtaaattgccccaccgt

SEQ ID NO: 127999 - DNA, 603 bp, Zea mays
  Clone ID: MRT4577_48203C.1
gcggaaggcggacgtcaacgacggcgacgcgcggcggtggtcgctgtgcacggtgacgcaggtggaggaggccaagatcatcctccggatgcttcccgtcttcgtgagctccgtcctgggctacctcccgatcccgctgctcctgacgttcacggtgcagcagggcgggaccatggacacccggctcggcgccaccaacgtgccgccggcgagcctcttcgtcgtccccatcgtgttccagatgctcatcctggtggtctacgaccgcgccgtcgtgccgtggctgcgccgcgccacagggtacgcgggcggcgtcacgcacctgcagcggatcggcgtcgggttcgcgtccaacgtcgtggcgctcgccgtggctgccgcagtcgagggccgccgcagggccgagggcggcgccgccgccgccgagatgtccgtgttctggctcacgccgcagttcttcctgctgggcgtgatggacgtcacctccttcgtcggcctgctcgagttcttctacagcgaggcctccgccggcatgaagtccatcgggggcgccgtctgcttctgcatcctcggcatcgcgtcgtggctcgggagcttcctcat

SEQ ID NO: 128000 - DNA, 415 bp, Zea mays
  Clone ID: MRT4577_48204C.1
aaaaaaaaaaaacccccattataaagctcccccaagggaattttatctttttttttttaaaaaaaaagggatttaaaaaaaaacccttgtggggtaaatccttttttttttttgcccaaataaggggtccaaaacctttgggtcttttaaccaaaaaaaaaacttctcccccaaagggggaaaaatggccccccccaaggggttgggcctccccaaggccttaaaccccaagggcccccctttttggccgaaaaaaattatgggcccaaaagtggggcccattctggggggcccctaaattttgggaacctctttttcgggaaaaaaaatgccggaaaaaacctcccccggaagggcaaaaaatttttccttgggggggttaatttaaaacccctttattcccgggaaggggttt

SEQ ID NO: 128001 - DNA, 296 bp, Zea mays
  Clone ID: MRT4577_48205C.1
attaaagggggtttgggtgtttattcatgggagggcaaccacaaaatatttatttatccaacgtacaccacatggggcacaaacgaagagctgtataactggaagggcccaaaaattccaacctagctttcacgaaactaaacataaaaacgttggcccttaaatatcgatcctcaacctagttaacattattgaaaggatccattatggcgttttctacaaaatcacatttatccagggacagccacaataaggaaatccggccatccttgggcatttaaaaatgccatttatcc

SEQ ID NO: 128002 - DNA, 270 bp, Zea mays
  Clone ID: MRT4577_48207C.1
cgtcgcattgagccgaacgtggtgaaggggctcacatcgctggcaacggaggagggcttgcgacatgagaacctggtctctggaatgctgaatacagtggctggggtgctgaccactctgactggtgcatctgcgaatgagtcagacggaagcacctttcatatgaccgttactgtagaggctgcctattgcgcttgttgtcacaagatatctagccgtggctgaacgaccgggtacgaatcttgcgggagaccatgctccacttgctcc

SEQ ID NO: 128003 - DNA, 283 bp, Zea mays
  Clone ID: MRT4577_4820C.1
accgtaagttgtgcataacttgaggaagacaagtaacatgacccgggagaaaagtgaacaaaacaaggccccctaacaaaggggccaagcacatagcccctttccttcaacacaaggaaagaccatcccaaatagatacaaaggagcctggagacacccaacaattccaccggcgctgaaaaggcggacaacgcaacgagcacggaaatgaagagggggaccgaccggaatgcccctaaggatgatagaaccccgaaccacctggatgcccaacgaaagggga

SEQ ID NO: 128004 - DNA, 812 bp, Zea mays
  Clone ID: MRT4577_48211C.1
cattgcattgctcgccggccggggtcaactggcttgacctcttcggaaagggaaaacgccaccacacgcggatcgaattaggctctccgagtctccggttccctcctctcggcggcggctcaggtccctctccatctccggcgtggcgcttggcgtctgacctcaacaagcaagaaagcaaatggcaggcggcagggttgcgcatgccaccctcaagggcccgagtgtggtgaaggagatcttcattggactgaccctgggtctgatcgcgggaggcatgtggaagatgcaccactggaacgagcagaggaagactaggtccttctatgacatgcttgacaagggccagatcagcgttgtcgtcgaggagtaaagagttcttcccagttattttcaaagaactctctcgagagcatgacaaagtgattgcttgctgtggagatttgtcctggaaataagcacaaccatttgagaacaccagattttgtcgaattttcctttccttttgatgaatatttgagcacgtccatgtcaataccaaacatctggccttttctctctctgttttttttacatatgtttatgtggtcttagcgagtagctgtgctcgactttgcgttatgaggtatgccgtatgtgattggatcacggtgacctaacaggccattcccacacttgtgtttttacatgacttttgagtgggtgatgcacggataatattgacatgttgcgtgcacgctcaggtggtgctctttcacttgatggcgtcgtcggttcggtcaagataagtttttaaggttttcctgttccaa

SEQ ID NO: 128005 - DNA, 339 bp, Zea mays
  Clone ID: MRT4577_48212C.1
aactcatgctttttttttggtctgaaagggccgcattgttatacagggtacaggcgtccagtgtacagtcggtgggcggcggcatatcacgtgctgatcggaaaacttaatgagactgcctagtttatttccagtgttgcgcacaccttacatgtcacattgttctgcaaacgattgcatgctgaaacagaaaaacgctctgcattctactaagggataaaacaggaccggctcgatcgtttctgcacccaatcaatctctgacacagacttcattccctctgctgaacttggggggatcacctgtccccccaatataatgtcatacaaaatacgtgtg

SEQ ID NO: 128006 - DNA, 236 bp, Zea mays
  Clone ID: MRT4577_48213C.1
aagacttgtatccccttatgagtcttctctttttaaacccacagggcccagaaaggcccacattatattaaaaaaaaagacacgaacccctcaaagaccttttttagcaaaaggggagcagaccgaccaagaagaacaccacaccagatcccccggggggcgggggggataaatcaccgacccacgcccgatggcttggcaccaaaacgtgctgatccctgcaagactaaagcctg

SEQ ID NO: 128007 - DNA, 276 bp, Zea mays
  Clone ID: MRT4577_48214C.1
gaaacacacacacacacaccacgggggaaggagaaacctatagcagccagagccagccacacacacggggggagatcaggggctacaggaggatgatgaccacctcggcgacgaggctgcgccggcctggcccgagtccggcctgctgatctggatagccggaggctcggccggggggggaacggtctcggggggccttcgcttcacgtccctcgccatggggaaaaaaacctggtccacattctggtttgttttcgggctcgtctcgaaaaactt

SEQ ID NO: 128008 - DNA, 674 bp, Zea mays
  Clone ID: MRT4577_48215C.1
cattgggaccctcgaggccggccggcgaccaacttttcatactatggcacttgtctagggcgctcacatggagcagcacgaagtcctattctcgagtcttcgtacgtgccccattcatcgatgtccgctcgactctcacatacagagagagacacagactactgagatacacacatcgacaactgttcctccgacgcaaggcgatcaagacgcagggccacactgagatgctacgccacgcaagacgccatccatcatagtcaggcgagaggcatcatccacctcccgcacagtgatagaaatgtggcaatatcctctaccccatgctctagacacaccgacgacaacttctgctatgtcatcgtcctcacgccgaagaacccataggatgttgaggatctcaaggcataatggatcacaggacacctgagataaggcgagatggatctctggccatacaaccactgcctatcggtgatcatctctcataccccaagagtgcccccactgaccttcagaggagagatccatgcgatacctactcaggaccgacgaagaacgctgtttgcatagacctccactcttttccccgcttcacataagcatgcagccatctttcactgctgcgagacgaccggatcttacgagtacccggtattccatggcctctgact

SEQ ID NO: 128009 - DNA, 377 bp, Zea mays
  Clone ID: MRT4577_48216C.1
cccgcgggggcccgggcgcaggtttccgggtgtagacacacgcgcgggtcttgtcgctcatctccgcctactgcagggccgggatccttttggaggccgttaagctgttgcagatgatgcccaacataggcgtcccccggacgggggtctcctacaacgccgcactcaaggccatactctgccgcggtcgctaggccatggccagacggatctacaccaccatgatctcggtcagggtaacgactgacgtatgcacctacagcacgctcatatgagggttcggcctgttcttgacgatggagaccgccagcacggtgtctggggacacgaatggccactgggtgacccctgatgtcaccgcctacaacaccctgctg

SEQ ID NO: 128010 - DNA, 803 bp, Zea mays
  unsure (1)..(803): unsure at all n locations
  Clone ID: MRT4577_48217C.1
gccgctcgaggcggccggnncggnnacatagccgctccctccctccctcccctgactgccaacctccaatctcccgtctcagccctcgaatctcgacaagagtatcatcaacgtcgtgctaatgtgacatgacaactctgtaaagactacaaccactggccatctgatctacaagcttggacgtattgacgagcgtgtgatcgagaggtttgagaaggaagacgctgagatgaacaagaggtctctcaagtacgcctgggagatggacaagaagaaggccgagcgtgagagggggatcaccattgacattgccctgtggaagatcgagaccaccaagtactactgcctcgtttttgatgcccctggacaccgtgacttcatcaagaacatgactactggtccctcccaggctgactgtgctgtgatcatgattgactccaccactggtggttttgaggttagcatctccaaggatgcccagacccgtgagcacgccctccttgctttcgcccttggagtgaagcagatgatctgctgttgcaacaagatggacgccaccactcccaggtactcgaaggccccgttatgaggaaacttgccaaggaatcctcttcccacctgaacgaggctggctaccaccctgacaaggttcccttcgttccccatctcggggttggagggtgaccccttgatcgagaggtccaccaacctttgactggaacaaggcccctaccccttcacgaggcttttggccacattcaaagacccctagaggccctcagacagccccctgctcgttcccc

SEQ ID NO: 128011 - DNA, 809 bp, Zea mays
  Clone ID: MRT4577_48219C.1
cctcgaggccggccgggcctgactcctcctctcagcagtgctccttctcgctgctcccctccttcgttgcccccaccaccagtgcctcgctcctccacgccttcgccactctcaccgtctccgacgggctccacccgtttcgcgatcgcgatggccacatgcgacacttccgctcgcgcctcatggggcggcacagatctatcacctttggcctggagggctactactccactagtccaccgtcgtccggagacctctgcatggtggcaccgagtccaggagcacatctccgaccacctccgcccgtggagccgctacgcacagttctgggtctgcgtcgcggacatctacatcagctacgaggtaggtttgtggtgtgcctctgatgtgctcttcgatatgcgcatgcgctgaggtgacctgtgaggggtttaattgtcgatcgtgtttggccggtgcatgtgttctagctacaagcggggttcttcaaggattatggcgagggggcgccatgtgagcgaagcagcatgagctccacgcccataagatgtactccctctcccttgagcttggcggaatctttctcgatgttggcgtgctttgttttctctttttttgtgctttcctccccttcgattgcatccagccttgatcaattatctttctcatgattggcagaagttgcaattatattgtgttgattattgtgatatgtttggtcgtttagggcgcatttgaatcatcgggttatgggataatgtatctcccttgaatggagtgatatgtaacattgaaccagtggattttga

SEQ ID NO: 128012 - DNA, 279 bp, Zea mays
  Clone ID: MRT4577_4821C.1
catgtaatgtggtgtcatgtatacgtgacagcaataaactagtagtgtaataatattaacacggcctgtagccaagccgaaatttgatataaaaatgaccttcccaaaccaaaattaaaaataaggaaactcattttaactaagaaacattcggggctccttaaaagacacctggcgacgtattttgcaaccaactcactttttatgataaaaccgggggcgtccctttttaaggtccactttttttctccccgtggggtggaggaaaatttttttttt

SEQ ID NO: 128013 - DNA, 775 bp, Zea mays
  Clone ID: MRT4577_48220C.1
tggttattgagtatcgtggtgaacaagttagacaacgtgttgctgatttgagggaagcacggtaccatagagaaaaaaaggattgctatttgttcaagataagtgaagatgttgtcatcgatgctactggcaaaggaaacatagcgcgcctgattaatcactcgtgtatgccaagctgctatgctaggatcgtgaccgtcagtggtgacaggagccagatcattcttattgcgaagagagacgtctctgccggagaagagctgacgtagttcctcagccctgccagtataactacctgtttgaccctgacgagtccgaagactgcaaggttccatgcctgtgcaaagctcctaactgtcgtggatacatgaactagggtgctgctagaagagtaaaaaccaatctaacaaacaaggactgaggctaactccttacagaagccaaaagccggccattttttttttcctggaattctttcggtagtttctcgttttcttatattactcaccagaagcttacaattcgtgggctgcacaaggtttggaccattttgttcagaaattgcgatttagggcagccgtaggcagtcatccatttgtatattcttccattgctgtgataagatggtaagaatgctcaaaatttttttttggttaaatgaaaataagaaaaactcagtttgattcaaaaaaaaaaaaaaaaaaaaaaaaaaaaaaaaaattaaaaaaaaaaaaaaaaataaaaagagaaaatggtaaaaaaaatataagagaaa

SEQ ID NO: 128014 - DNA, 205 bp, Zea mays
  Clone ID: MRT4577_48221C.1
gtacccaattaagtacatacacttacacacacacacttgcacacacctgcactgctccatcattttgcacccgctaatcaaaaatacgtttttgtattgtgtagtttgttttaattagttcaattcaaatgattgtaacaaagcgattgttttggtcatttgcttaattgagcttttgtttattttgcaaataaaatgcgtcttt

SEQ ID NO: 128015 - DNA, 2372 bp, Zea mays
  Clone ID: MRT4577_48222C.1
gactcgcaacagtgactttctatttaccacttgccacaatttcgcaattgaaggaaaacaaaaaaaaactttgcaggggccaggggttttacctaagcccttccatttccccctgttacaccttagggcttgttcggttagctctcaatccatgtggattgagtgggattgggaataaccgaacaaggccttaggatacaaatttcctatctgagcaagtacagtccaaaaggaacagcaaacaaacagagaacactactagctcaaggagctagaaatggcgatccaatgcaattcgaagcaagaaaaatgcttatcaacattgctgaacttcgcttgacaagtccggtcctgctactggtcttggtcctgggcagtccagtacgtcttgacgaccaggaggatcttctccctgacgagcgggccgtcttcgtggtcgacgatctggctctcccacctcatcccgtccgccaggctcttgaccttcaccagcatgtccacgtcttccctgacgatcaccgtgcccctgggcctcaggatcctgtccatctccaggaggatgcggtccatctcacacctgtccttgtacagggtgaacaccgaatccgcatggatgaggtcgtaggtcctcgggtaggtagacatgccctcgcaccagtcctggtagcttccgatgaggccgcgctcgtagatggccccgagcgtggtcgcgttcgccacggtcgggaccatgttcatgacccacagcgggtcgccggccagcgccagcgccgcggcgaacccgcccaggcgcgcgttcatgtccagcacgttgcggtaccgccccttctgctcgagctggctggccaccgacttgtagtgccggaccctcctccgccacagctccgtgtcctgcgcgaacgacctggccgtgacgcccctgacagtgccgcgggagaccctgggcggcacggccgtgagccgctgcggccatctcttcaccgcgccgccggcgacgtcgctggccttggagatctccggcagcggcgttatgcaggcctccatcttgtcgtaccatgccgcgtcagggttcttgcgcgagcagaagggccgggacgacttggaggccttgcagccggcgtggttgtagggcttctgccagacggcgatgtcgccggcctccttgaccttggtccagcagaggctcctggcgacggcctcgatggcctgctgctcggcgttgaggtcctccttggtccgctcccaccccttccagtacttgttccagttgatcggcggcccggacaggatccagtaccctccgggacgcagcacccggtcgacctcgatcaggtacagtccatcgtagagttgccaggggatgaggcagcgggagcagtgcgccatgtcgaacgcgcgggccgggtaggtgaggcggttggacgcgagcacgccgatcatggccggcacgccgcgctccagcgcgaactgcacctgcgcctcgtgagagtcccgcggcgcgaacgacatggccaggatgtcccgcgacagcaggtacgcgccccagctcgccaccccgcatccggtgtcgagcgcggtgcggatggagccgtcgtggagcgggacgagcttggcaatgtcgtcgatgtaggcgtcggcgccgttggggaacatggtcccgccgccggggaacctgagcctgtcgccgtcgacgcggatccagttctgcaccgccttctcgacggtgagctccttgtgcggcgcgttggcgaaccaggcgacgtcgcggctggcgggccacgggaacggggtgcggtacccgggcggcgcgggcacaaggcaccgcagccgctcccgctccgacgccgggcagtgccgctcgcggtacaccagacggtcccgcgggaaccgcagcgaccgctccacgtcctcgcacggcgtgtactcggagtacctggcggggcacgccgggtacgacgacctccgcggcgcggccgaggaggcggcggtggcggtgctagcgtcgagcgcgtcgtccgccgcggccgcgtggcgcgcggagaagtcgagggacggggagctggcgccggaccgggtcctcctcttcggggcggcggcgacgttggtgcaggcgacggccgtagcggtggagacggcggcgggtttgtcggatggagtggcgaagccgccgtgctgccagacgccgatgagataggaggcagagcagaggaggaggacggccacgaatggcaggaacgtgggtcggcgggcggcggatggtgggatgtgcagctttgtggccgccgaccggacccccatggcgcctgccctcgcgctgctcctgcctcgtgctggctgccgctcccagcgggggactggggactggggagtgt

SEQ ID NO: 128016 - DNA, 619 bp, Zea mays
  Clone ID: MRT4577_48223C.1
cgcctgcgtgtaccgggctcctattacgcggtcgaccttagcgttctttttaacacgccaagcgatgcttcctatcttcactggacaccaatggctgcctgagggttccccctccttgcgcttcttgccctttttgagagcgcagcacctgcgtccattgtttcacatgctcactggctcctagtgtcattataccacagctgcttcgaccagatacttgaatgtgcttgaaacacctaactaatggagcctgcactgttcaacaagcacttgactggagcgtcttacaacagcccactaaccaattgcaaccacaatgcttggtgcatgtaaccatacgaaccatggcagcacaacagcttcgacacagttctactcagcactgagccgaccaaatgtggggaaccctggctgctacttgcatcagcgggcgcttgcatacaacccacttgttatggcaaacgtagctgcttaccaacgacaacaacaattgctacacatgtctggcagcgctgagcgaactagccatgtgtgaaccctgccgcctacctacaacatgcacaactgctttcatctaaccctgtcgttgtgggtaatgcacctacatacctgcagcaac

SEQ ID NO: 128017 - DNA, 552 bp, Zea mays
  unsure (1)..(552): unsure at all n locations
  Clone ID: MRT4577_48224C.1
ctgattcatggntaaccgtgcagagattcagtaattagattgcgtagctcagctgtgaaagctctttcaagggtacttcccccaattcagctaaagttggtaaactagttggtggaatcatgagtgcccaaacagatgataaagacgcactagatcattgtgcttccgctgatgctctgcagacggttagtgaggctgagctaagtaatgatcaagcgcatggaaggaatccagtgcatacaattaaaggtggtttatttctctttgggcaagcaatatcttgcttgataaatactccaaagcatcgagttaactccacagcagcaattaactatgagttgggcagatctagaattactactgttagtgacggaaggaaatccgtggttgcttcctgtggttttatggatgtttcgcaccgtggagaaggtaatccgcacataaacagtcactttctagaagatggtttgtttgaatgtggtgggggacacatatcacctcattcaantgatggtcctggactcacgtttgcttctgatggttgcatcatta

SEQ ID NO: 128018 - DNA, 287 bp, Zea mays
  Clone ID: MRT4577_48225C.1
gctcttctaacttctgttgtacagccttgatgatcccaacactttcggtaacaggattcacaggatgctgaagcttggactgagcattgatgaagatgctggtgaagcagatgctgacatgcctcctctcgaggacgccgatgctgatgccgatgctgagggtagcaagatggaagaagttgattaaatctaacttaattattgatttgcctttgtgtttttagaaacaatgattggggaacagtcttttactatgtttatgttttgaattttcgaattttggaatg

SEQ ID NO: 128019 - DNA, 1414 bp, Zea mays
  Clone ID: MRT4577_48226C.1
gctagaatgaatccagttgtgattgtgcttatccggggtcgggatgtctcgcaacaatgacttctttttaccatttggacacaattcggaattgaagaaaactttgcaggggccaggggtcttactacctacccttccttccccccacatgttaaatttcctatccgagcaagtactgtccagaaagaacagcaagcagaaaccgtcaagagatcactagctcaaggagctagaaacagcggtacaaatctgaacatgaaaaatgcttatcaacattgagaattttacttcacagtcctgctactgatcttggtcatggcctcatgggcagtccagtacgtcttgacaaccaggaggatcttctccctgacgagcgggccgtcttcgtggtcgacgatctggctctcccacctcatcccgtccgccaggctcttgaccttcaccagcaagtccacgtcttccctgatgatcaccgtgcccctgggcctcaggatcctgtccatctccagaaggatgcggtccatctcacacctgttcttgtacagggtgaacaccgagtccgcatggatgagatcgtaggtcctcgggtaggtagacatgccctcgcaccagtcctggtagcttccgatgaggccgcgctcgtagatggccccgagcgtggtcgtgttccccacggtcgggaccatgttcatgacccacagggggtcgcccgccgccgccagcgccgcggcgaacccgcccaggcgcgcgttcatatccagcacgttgcggtaccgccccttctgctcgaactggctgatcaccgacttgtagtgacggaccctcttccgccacagcgcggtgtcctgcgcgaacgacctggccgtgacgcccttgatggtgccgcgggagaccctgggcggcacggccgtgagccgctgcggccatttcttcaccgcgccgccggcgacgtctctggcgctagagacctccggcagcggcgttatgcaggcctccatcttgtcgtaccatgccgcgtctggattcttgcgcgagcagaagggcggcgacttggaagccttgcagccggcgtggttgtagggcttctgccaaacggcgatgtcgccggcttccttgaccttggtccagcagaggctcctggcgacggcctcgatggcctgctgctcggcgttgaggtcctccttggtccgctcccaccccttccagtacttcttccaattgatcggcggcccggacaggatccagtaccctccgggacgcagcacgcgatcaacctcgatcaggtacagtccatcgtagagttgccaggggatgaggcagcgggagcagtgcgccatgtcgaaggcgcgggccgggtaggtgaggcggttggacgcgagcacgccgatcagggccggcacgccgcgctccagcg

SEQ ID NO: 128020 - DNA, 1365 bp, Zea mays
  Clone ID: MRT4577_48227C.1
ggggaccagaacagtgttatttcatatcataaatagatctgaaaccttgaatccagcacaaacacagcacataaataagatctgaagggaagggggggattgcatacaacaaaactgtaatgctagaacgaacccagctgtgcttatccgggatgactcgcaacagtgactttctatttaccacttgccacaatttcgcaattgaaggaaaacaaaaaaaaactttgcaggggccaggggttttacctaagcccttccatttccccctgttacaccttagggcttgttcggttagctctcaatccatgtggattgagtgggattggatgggtttgaatcccacacaagtcaaacttcttaagaattttttccaatcccatccaatccatgtgtattgggaataaccgaacaaggccttaggatacaaatttcctatctgagcaagtacagtccaaaaggaacagcaaacaaacagagaacactactagctcaaggagctagaaatggcgatccaatgcaattcgaagcaagaaaaatgcttatcaacattgctgaacttcgcttgacaagtccggtcctgctactggtcttggtcctgggcagtccagtacgtcttgacgaccaggaggatcttctccctgacgagcgggccgtcttcgtggtcgacgatctggctctcccacctcatcccgtccgccaggctcttgaccttcaccagcatgtccacgtcttccctgacgatcaccgtgcccctgggcctcaggatcctgtccatctccaggaggatgcggtccatctcacacctgtccttgtacagggtgaacaccgaatccgcatggatgaggtcgtaggtcctcgggtaggtagacatgccctcgcaccagtcctggtagcttccgatgaggccgcgctcgtagatggccccgagcgtggtcgcgttcgccacggtcgggaccatgttcatgacccacagcgggtcgccggccagcgccagcgccgcggcgaacccgcccaggcgcgcgttcatgtccagcacgttgcggtaccgccccttctgctcgagctggctggccaccgacttgtagtgccggaccctcctccgccacagctccgtgtcctgcgcgaacgacctggccgtgacgcccctgacagtgccgcgggagaccctgggcggcacggccgtgagccgctgcggccatctcttcaccgcgccgccggcgacgtcgctggccttggagatctccggcagcggcgttatgcaggcctccatcttgtcgtaccatgccgcgtcagggttcttgcgcgagcagaagggccgggacgacttggaggccttgcagccggcgtggttgtagggcttctgcc

SEQ ID NO: 128021 - DNA, 528 bp, Zea mays
  Clone ID: MRT4577_48228C.1
gcttcgccgacttatacatcgtcgcctttggcgaatacatgatgcatgggttcccagagtatctcaaaaggccctggagatcaccatcccctgcgcctctgccgtgtaccgcacatcgctgcctggcgctcttgagtacgatggcaagtgcccgacctcctatcgcaaataccttgacacggccatggagcccacatgctatcccacatacagtttactacatcaagtactttactcatgaccgccaacaaaaccaaacggccgtgcgctgtaccctgatccagatgccctacctctacctctacaatggttaccaatcatatagaccccaccaaggtactttccagtgccatacgttaacaccactgtcgacgtaggacaacaacacgggtcacccaagtctaccagaaatgatccaattgggttgtgtctacttttagatctgatgaagcagctagggcttcagctattttgcttgctaccctgaggctatgctttccatattttctagcgctatgagctttcact

SEQ ID NO: 128022 - DNA, 254 bp, Zea mays
  Clone ID: MRT4577_48229C.1
ggcccccctttttttttttgcttatgatctcgccaacacagtgtttttttgttttggggaacatccaacaacaggttaagcacattattcacggagtagacgcgcgttaacaaaagtcggaggcaggcacagtacggtttccatccacacacaaaccatacctatgttttcatatgttatgcattggcactcaaacacaaacgctcgcaggaatgatagatttatatcctttcacgtacctgacacaaacaaca

SEQ ID NO: 128023 - DNA, 389 bp, Zea mays
  Clone ID: MRT4577_4822C.1
cccacgcgttcgcggcaacaccttttggtttttgtcgttcttgtccttctatctctgccaacatgtgaggggtgaggggcatctaccttccgatgtacgccattcactccagcaaccagccatggtgcgtctgggacctggtggccgcagccacctgcgttgcctgaatcctcatcgctcacttcgctgacacccaactgcacaggttcttgaccaggaacaagaagctgaatcttctggtcgagccaaccgttccgaccctataagactggctgtggcggtactctcgctaccccaactacttctttgagcaactctggaggaggggcttgtacttttttttgtggaacctgagccagcaagttgatgtttttggggcctctcgtaaa

SEQ ID NO: 128024 - DNA, 291 bp, Zea mays
  Clone ID: MRT4577_48230C.1
acgagtgcgatcggcaaccaggcaatgactagtggagctggacctgcaagcatatcagcttacacgaatgggtgtcactgagcactgagtgaaatgatgatcataaagtacgcggatgtgaactggatagccgctcacaggacgaaacaacacacgactgcgagcagcgacatggtatcgcatgtcggcatgcattacctgtgcttaaatggcagcaagtatacgacatccccccttgctatgtacgacggtggtggcgatctgacttcaagcagtggcactacctagaga

SEQ ID NO: 128025 - DNA, 189 bp, Zea mays
  Clone ID: MRT4577_48231C.1
ggctgccccagacttggcctcctcatgccccctcctgacctctgcacttctctggtcctggcatccctggggaaggtaggggtcttgacctaagtttagatttgatctccatgtgcagggaggctgtcctgggcctgacaggtcctccccctttctgaggtagcagtgccttgtggaggtttgacacca

SEQ ID NO: 128026 - DNA, 369 bp, Zea mays
  Clone ID: MRT4577_48233C.1
cagcatagtaataccaaaaaggcccccgattacaaaaggcaggcccataaaaacacaatggggggccattagtttattacccatgcgcacgggaaaaaaaaacccaaacgcgtttggaattcgcacattttttacagggggggtccatttatttgcattggaggcattttcagccttcccaatccataacttagcccctcatttgatctgtttttggatcccccactgacaaaaaattcctactttttcagggtgggggaattgattgcataaaggggctggaaacactgttttggaaaccactttttattcaggaaagggtgctaatttctggtccccatggagcaaagtttatttttaaaacagggg

SEQ ID NO: 128027 - DNA, 247 bp, Zea mays
  unsure (1)..(247): unsure at all n locations
  Clone ID: MRT4577_48234C.1
ggtttgacccactgcgctgctgttggagagatggcaatatcgactcggggtagcgctgtggtgagcttggcgagcgggtgacgttgtcgtccttcagggtttgtggatcggtggcgatggcgaccagggcggtggngaggttcttggagggcaggctcctgtcttccgggggtttggtcctcatngaggaggagaaggttggggggggcgtgtgcttnttgaagttggtgctggagaagttggagaa

SEQ ID NO: 128028 - DNA, 389 bp, Zea mays
  Clone ID: MRT4577_48235C.1
attcggctcgaggggtcaccaagcaattattttaccgcagcaccactacctaagtggctggggggtgacctccggccactgcacggacaaatagcagaaggaccccatccaaaaccccttccacacagaactcatatactcaggaatgtggacaataggcccccccggacgaatggaccttctatactttaccgactgagctagtgagcacctgttcagccatacaagtatatgttatcaccgagaaaccatatagcctcactaacagggtggcaaccggtacccggctcgatacaagatacaagatgcgatgccatagaagcaccttacgcagaacctaggtgcttgcaacctgtatgggaaacaggtagaacattcagaggctgctg

SEQ ID NO: 128029 - DNA, 560 bp, Zea mays
  Clone ID: MRT4577_48236C.1
ggccatcttcgccatcgggtacgtgccgagccatatgcgccgcgccttgcggggctgcgggatctccgacacccacttgccgctccggcaccggatgcctgggtagaatgcgtgcttgccggacgaccgcggcgacggctcccccgagctcgtcgcggtcgtcgtccccatcggcggagccgtgatggcagctgcccgcgccgacgacgtcccgtcgccctgctgcaccaccggagaaggggaatgaggcgaggctgggcccgaagccgaagcagaagccgcctggtggtggctgtggccgccggctgccggcccggccggttgcacctgcaccgccggggaaggagaatggggtgccggcggctgcttctcagccatgaaccgttagggcacgcccatctgtttgggcacctgctgacatgtgccaaattcagctcctgcagcagtggagtcagtgcacctacctatctatggcgcgtgcacgcgcacaggtatatccctccctccctccccaggagctgtcagctagctattccagtgttgcgcgtttgcagctcgtg

SEQ ID NO: 128030 - DNA, 296 bp, Zea mays
  Clone ID: MRT4577_48237C.1
ccagcctccagcgccttcaccctgctcgtcgcctcactccctctgaggtcgcagatacggccggttagacgaagccgcccgcacgcatggcctccggtgagctcgcctgcacctacgccgtcctgatgctcagcgacgacggcatgggcatgaccgccgagaagatcgtcaccatcgtgaaggcgggcaacatcaagctcgagtactactggccggcactcttcgataagctcctggagaagcgcagcgtcgaggatctaatcctctccgatggatctggtggtggcgctgctgca

SEQ ID NO: 128031 - DNA, 222 bp, Zea mays
  Clone ID: MRT4577_48238C.1
ttctaagcctgtctctcaagtttatttatagagaaaaagtaagtaatctgtattgccacataccttgaaaatagaatgtggtatgtttaggatgcccacggaatgaatttttccttattccaattcaaccttctgtctggttgtgccaggaaaacagatgttatatgacctatgtcatttttgccattatagtcaaatgtaaaaaaaaaaaaaaggggcggc

SEQ ID NO: 128032 - DNA, 519 bp, Zea mays
  Clone ID: MRT4577_48239C.1
ccggccgggggatatccagctcaacgtcgacctgaacgtcgtcacgctggtcaatgaagagatctaccatgaacatgaacagaagaagggtcatgctgagcaaagacgcggccagtccaggggaccgaaggccccccgcacacagatggcaaccacatgggcgaggaatcctgggccaacaacagcaacacgggaatatggcgtacacgaacactgcctctacatcggccctgcgacctatacggcggaactaaaagaccacagatgtgctcatgcgcaagttatccttataagaactctaccgtgatatcaggaaggaattcacgacacatccgtgaacccagaggaacgccctcttatgactacaatgagcggccgccgcctaccagctcacgatgacgtaggaaacctgcctctcggctatcagagccaatattataacattaatatgcaggacttccccactccccccttccttcgctatgaaggactgccctaacgagttgtgtattgcgaacc

SEQ ID NO: 128033 - DNA, 169 bp, Zea mays
  Clone ID: MRT4577_4823C.1
ctaatacgactcacttagggctagagggtccgcgcggtgttaaccaattggacgatcaccaaatctagactctctcacttgagagacgtatgagcgtcattatgataataaaaagaggttgaccggggtgcgaaccacgcgaaggacgacctccactacactgtctgaa

SEQ ID NO: 128034 - DNA, 371 bp, Zea mays
  Clone ID: MRT4577_48240C.1
cccacgcgtccgcccacgcgtccgctcttctctacctgccgcacccgcacagccacagccaaccacacaccccacatcacaacagctccctctgcatctccgcctcgtcgccgtcgtctgcctgcacaaccttcttcttcctcatctctctctctcttcttccgctgccaccctcccagcaccgagggaagggaagcccaggaatctccgtcccgctcccggccgccgtccttctcataacctcattttttttaactgtcaaggataagcaagtgacctctgtgtgcataccaccaccaccatacgtagcatacacaggcacagatggcagagcataaagggaacgttcttttgcacaagtatgagatggg

SEQ ID NO: 128035 - DNA, 869 bp, Zea mays
  unsure (1)..(869): unsure at all n locations
  Clone ID: MRT4577_48241C.1
cccaggcctccaatgaagggacgtcttcatcaactcctgttgctgccagtacagctgttccagcctccgaagctaacctgactgcatatactagcacattcttgagccagcgagctgataccccatcattgcctccgaagggtgatcctcctccatcagaggatgatgatctggaactgactgtcgctccaccatcccaacagaatatgaccaatatgtcctcccagaatgcggtaggcgtgattcaagtcatctaagctaattttttttctctctctagaagttactgtgggtatttacagttcaccgaataagtactaacattctatcagcaaatacatcagtataataagatcatgagtgacaagacacagtagatgttaagcgcgttaatgtggggggtctgttgtgcatctgcatccccttttcacttgtgttggtacttatctagggattggtgcaagcttagccgattgttttcactgcacttgtgttgctaattatcttgtgtacatgcatggttctctctacattaggcccagacagaaggcatctcacattatgatattgaatattatcaatggggggaaacagaatgttggctggcactgccaccattattattggctttccacccggcagttggtactgtcgtagcacaagagtagcttggtgtatttctggtgtgcctgaatgtagttgttatgtggagaagcaatacttggtgcagattgcgagaaatttgtaattttgccactctcagttttggcttcctgttattatgccccccaaaaaannnnnnnnnnnnnnnnnnnnnnnnnnnnnnnnnnnnnnnnnanngaaaaaaaaaaaaaaaaaaatttgcggcc

SEQ ID NO: 128036 - DNA, 2922 bp, Zea mays
  Clone ID: MRT4577_48242C.1
ctccagcccggtcatcagtgcacgccagcggttgtgagggttgctactatacaaaaccagccgagcgccagaggagaaggccggggtcttgccttctcttctctacctgccgcacccgcacagccacagccaaccacacaccccacatcacaacagctccctctgcatctccgcctcgtcgccgtcgtctgcctgcacaaccttcttcttcatctctctctcttcttccgctgccaccctcccagcaccgagggaaggcaagcccacccaggaatctccgtcccgctcccggccgccgtcccttctcataatcgcatcggatctgtattgggttttcagtaaggagcagaaaacgccttagggaatgcagaaagatgtgcttgcacgtcgaagagctactttgtgagggacttggcaggaaagcacgccatactcttcattctctgccacctcttgatgacttcgaagctcaagagtacacgtatctccacctcgtgctttcgcacaatggggttcgacgtggcggctcaaccgtcttcttagatcaccatctcggtggagacggttgaagtcttcacaccctctcgacctctttgctgtctcatttttttttaactgtcaaggataagcaagtgacctctgtgtgcataccaccatacgtagcatacacaggcacagatggcagagcataaagggaacgttctcttgcacaagtatgagatggggaaattgcttggccaaggcacctttgccaaggtttaccatgctcgtaacacggcgacttcggaaagtgtcgcgatcaaagtgattgataaggagaaggttatgaaggttggtctcattgatcaaatccagcgagaaatttctgtgatgaagcttgttaggcatccaaacatcgtacagctctatgaggtcatggccaccaaaaccaaaatatactttgtgctggaacatgttaaaggtggagagctgttcaacaagattcagcgaggaaggctcaaggaagacgcagcgaggaagtacttccagcagttgatctgtgcggtggacttctgccacagcaggggtgtctatcatcgagatttgaagccagaaaatcttttgctcgatgagaatagcaacctgaaggtatcagattttggtctaagcgcacttgctgaatgccatagacaagacggcctgctccacacgacttgtggcacgcctgcttatgttgccccagaggtgattaacagaaagggttatgatggtgcaaaggctgacatatggtcttgtggggtcatcctgtttgtgctattggctggttatcttccgttccatgataagaacttgatggacatgtataagaagattgagaaagctgacttcaaatgtccaagttggttttctaccgatgttcggaggcttttgcaaaggattcttgatcctaaccctagtagaaggatctcggtggaaaaaatcatggagaatccatggtttaggaagggtttaggtgcaaagctacttaggtacgatttacagaataagaatgcccctcatgtggacaagaaggcagattttgattcactgagcaccaacgtaacaactgagagcaagcaacatgaagaaaagaagcctaccaacatgaatgcatttgatataatatctctatcaactggcttggacctctctggtttatttgaagaatctaacaagaagagagaatccaaattcacatctaccaacacaagctcgacaatcatatcgaagatcgaagatattgcaaagaatttgcggttgaatttgacaaaaaaggatggtggcttgttaaagatggaagcttcaaagcccggaaggaaaggggtaatgggtatcgatgccgaagtatttgaggttagccccaacttccatcttgtggagataaagaagacgaatggcgacactctagagtatcaaaaggtcctgaaccaagaaatgaggcccgcactcaaggaaatagtgtgggcttggcaaggtgagcaatcaaagcaaaagcaggaacaacagtcgtgttaaaaacttatgagctagtgcaatgtttttagccaatttccaatctttcgtgtatttgtgtagtttttactcttttattatccatttttgttttcccgtgtaataccaacaaaaacttgtgtagttgtgttattttctgaggacaaatttgtttcaaagatgtgtttacgctgttattaagagtttcctttatgttatatactgttttcaacacacaaaaaaaaaaaaaaaaaaaaaaataaaaaataaaaaaaaaaaaaaaaaaagtggctttggcacacatgcttgcttctaacgtggttttgaaaagggtaacacgaaaagcgaatcaagaaacacatgttgaaccacaatctccccaattagagcaagaagccaagaatgtcgagaagaaattgccccggaacgtttgaaagcaagaaatgtgggttgtataaaagtacggactggagcccgcacagggtatggtatcaggggtataggaggtagaaccttagtgtttacctctcatgatcatcttggcgataagaaacacgattgacgactatctcgacaagctcgaggttctgagccacgaactaaggagctcgctctggaattgagggtgtgtgcgacaaagggagaaccagcaacacaagccggggcaaaactcgcgtgttaaaaacttatgagctagtgcaatacatctttttagccaatttccaatctttcgtgtatttgtgtagtttttactcttttattatccatttttgttttcccgtgtaatgccaacataaacttgtgttattttctgaggacaaatttatttcaaagatgtgtttacgctgttaaaaaaaaaaaaaaaaaaaaaacaaaaaaaaaaaagaaaaaaaaaaaaaaaaaaggccccta

SEQ ID NO: 128037 - DNA, 253 bp, Zea mays
  Clone ID: MRT4577_48243C.1
cacatagtaactggatgcttgaggaactgcctggagacttataacaacaggcctcacgtagcgaacgccggaaggagcacttgtctctttgcacactaccgggcaggggagaaccacccttcacggaacgggacggggaaacgcaatcaactagtgaaacaaccgtacgtcctgatgctagacaaaactcaaatggagaggctgtttggaatgcccttgacggagataccggcggcgccacccttcgggtctg

SEQ ID NO: 128038 - DNA, 525 bp, Zea mays
  unsure (1)..(525): unsure at all n locations
  Clone ID: MRT4577_48244C.1
cattcaacaagatgatgaattgcaaaatcagaacaagggaaacacaacacgggcaaacatggccgagtgaacattatcagaagccacaagggcaaaggaggaaattagggcgcggaacactnataacatccacagnattctaaacacggaacatggcttacagcagagcgcttaggntggagtgactaattttctaaaggctttcttcggggaaccttggcgtgncgctttctttggggacnnttggcgggccttnncttaggggacnnttgctctccttttgctgccgccgctagaacgcctttctccgccacctttctttgggcaggagaaaccgggtntgatgtntggggaaggacaaccgccgtgcgccgaaatggtgacgccagccagcagctttgcgcgagcttcaaacgtcgtnntgcggatccgccagggagcaccgtgnggcgcgggacgaatgcgncgtctttctttgttggtcctttcgcccgcgtttgcccggccagcttccaggcacctcgg

SEQ ID NO: 128039 - DNA, 214 bp, Zea mays
  Clone ID: MRT4577_48245C.1
tcgagcggtcactattcactaactcggtgatttttcatactagaaaacgtttacagatgtgatttcactttagtatgtggaataatattcgtagtagtattttaggtgtaaacgtattgacatgaagaaattgaaataggcactaagtcacgtattttctagtcgaatgagaatatagattttactattcataataaatgtattcataagtgtg

SEQ ID NO: 128040 - DNA, 439 bp, Zea mays
  Clone ID: MRT4577_48246C.1
aaacgagattttccgggaatctacggatggatcatcgcggtctcctcctccgctctctagccgctggcgccgctgcagccggtcgacgctcacaagtttgcaccgccgatgcggcggcggtctttgggcggtatagacaactatctggactggtaccgggagtcccactacctgcagcttcaaggagtaggtcaaggaggactgcaaggacggccatgcatacgcgtataccttgaccgtattctggggcaagatgatgccttgcacgccgtgaccatgctgctaggaccggagaaggtgaacggagaccactaagttctcctgccgaacgccgggaggagcatggtgcgaacgaccgcaatgctgataagccacggctgactcacctcacataatcctcagagccagcgcaccaagagcacgcgctcacaaactatgg

SEQ ID NO: 128041 - DNA, 157 bp, Zea mays
  Clone ID: MRT4577_48247C.1
ccagctagacattggacacatatggaaacagctctagctagcgcgctcggcacgtaacctggctgacgggatgggtcccaagcagatcggaggctggacctggtagattgccatgaccggtgtggactagcgagcctgcagcatacgacgagcccat

SEQ ID NO: 128042 - DNA, 250 bp, Zea mays
  Clone ID: MRT4577_48248C.1
aaaaaaaaaaacaaagggggccagaaacaacccgggggtgtcggcaggcgaaatgtttttaagggtgggggaccttttttgtaccttggcccccccattcaaatcaaccctgaggaagcacaaagccgactttgacaaacaaaaacccggtctggccccccccaaaacaaaagccctaaccccccttgaaagaaggcctaccgggggtgaaagtccccaaaaaggcccgtaattgcaagaaaaagccggt

SEQ ID NO: 128043 - DNA, 369 bp, Zea mays
  Clone ID: MRT4577_48249C.1
aacaaaaaaaacccttacccggggggggggaaaaaacgggcatccgggggggaacaaaaaaaaaaaaagggggcaccgtaaactttccccccgggggccaaagtaaaacaaaagggggggggaggccccaaaactccatttccccccgatttccaaagtttaaaaacccaaaaaaaaacggcctaaacttcggggaggcaaaaaaaaaggggccgggcaaaggggggcaaactttatttgtaaaaagggggcccaaaaaaattagttccaaaccaacccaaaataatttccggaaaaaactcaaggggccccttggggccccaatcctcaagggggtagtttgggccccaaaactaatggaaaccgcaa

SEQ ID NO: 128044 - DNA, 1207 bp, Zea mays
  Clone ID: MRT4577_4824C.1
gcccaaatcccgtgtgctggcgtgctcgagcccacatcccaaccatatacgagacgagccgacgttcccccgggcccccaaggaaaaccatgtgctgtgcccgccaggtgccactaaatcggtagcgcatgctagcactgagacggagctcccagtaacggcaacaacaagcagcagcagccagacagccagtagtaacacagtaaccggcagaggccatggcgagatcaaggcaggaaggggaggccggaggagaggagcggaagctggtcctgggcaagtacgagctgggccgcctgctggggcagggcaccttcgccaaggtgtactacgcggcgccgcctcatcgcgcgcgtcgtagcgcgcctctatcccagatgtgcagccgtggttggaagggcttcgtgccgcttcagtttcacccccgatgacgcccaagaaacggctggacggagatgactgcggcggtgcgctcttcgacagcggcggcggcggcggcggcgacgacgacgacagcagcagcaactctggcgccacctcttcggtcgtgcaacgcgttccagctcatctcctccatgtctccgggctcgactgggctgtcgagaacgaacagagccgtgttcacggcccgcgcgccggcggccaccgtggtactggcagcgcgcgccctgggatgggaagggcaagggatggagcaaggccgggggcacaaacggacgtacgtggccggggactatgtggacgtccgtccggggctcgcggaaatcgtctgggcgtggcagggcgacagcccggccgccgtcgttgggaccgcgtgaacctacggccgcccgttcgtcctggcgtccacgcctgttggagccagccttacacggctgcatcggcatcatgtaaagtttccgttgttgcttcgagacagccatggctagttcgttatgagtcgtatgttgtacaggaagagaacaagtgcaaaactgaagagaggtttctgtcgacacgagagccgaatcgagccgggagtgttcgatcggcttgcaaagttttgtagatcatataatcgctattttgtggagatgcgcacatacacaattttgttcacgatcaaatttagttttggtcgccatatgattttgagaccgtatcctgtgcgcaaggagggctgctgctcccatgagcaaaatcaatccagaccgcaccttccacatcc

SEQ ID NO: 128045 - DNA, 330 bp, Zea mays
  Clone ID: MRT4577_48250C.1
ggggaaaaaaaggggggttgttgtttggattatatgaaaggaattgggaaaaatgtttttaaaggtggaaaaatggaaaaagttgtgggggggtaatttttaaaaatggcgggtttagaagatgaaatatatttggggggttttcaaaagggagttaagggggtaaaaggattattataggttaaaataaaaaaaaggtggctatttattttttggagatttttttaaagttaaaaagttacaggtggattggggggttgttgaaattttttgataagagggcctgggtttaatattggggggaataaggggtggaaccttggggaaaaa

SEQ ID NO: 128046 - DNA, 229 bp, Zea mays
  Clone ID: MRT4577_48251C.1
aaagcagcgacccgagagatggaccccagggtggtccggcttgaaaaccccccggtgggcgggcttgattaactggttgaccttccccaacggcaacaaggcggccggcgggccaaccgcaactacgtccgcgacgcgcgccgcatggcggccaccccggccgacgtcaaggagctcggcggagcgtacgcgttcgtggtggacatgcccgggctgagcacgggcgaca

SEQ ID NO: 128047 - DNA, 290 bp, Zea mays
  Clone ID: MRT4577_48252C.1
gcccgaaaatcccgggggcgacaccacacgcgcgtggggacgcgagcaagccacggcgcggaagggggaaaaaagacgacagcgcgcccagaccccccaagacagagaacccggggcagccgcacgccgaaagaggatacacgaggacggagcaacccacacggagaagggaaaggaagcccctaccaaggaggccaagcggaaaggggaacaacaaaaaacggaggaacgggaactggaaaaaaaacaaggaggggaacgaacgaaacacaaaaaggcgcggatgaaag

SEQ ID NO: 128048 - DNA, 264 bp, Zea mays
  Clone ID: MRT4577_48253C.1
cgcacttcgatgacaatggctaccccttacacatgagtaagcagaaactgcttagtctgaggcgcctaccgagtagaggctgctcacattactagcgtggcgctcactgacctgtttgaactgccaatgcccaggctgccacctgatttattcgagtcgtcacctatcacgccgagaggcgagctgctgaatattggctcttgcatttactctgtcacggccgctttgaagagccgtttccatgcacactgtagcacaagatta

SEQ ID NO: 128049 - DNA, 318 bp, Zea mays
  Clone ID: MRT4577_48254C.1
atttgcatatatatatgttttaaagttatattattctctgctagatgaaatatttgtgtggaacaaattcatatgatattttggttgtgatgtgtaatattctatgacgatatgaatgcatatgatgtgttcgttgcaaaaaaaaaaaaaaaaaaaaaaaaaaaaaaaaaaaaaaaaaaaaaaaaaaaaaaaaaaaaaaaataaaataaacaaacaaactaaaaaagggctgtcgttttaaagcttcctagtttaattcactgtcattcgatatacaacttcttgaatgggtaaacctatgtcaaatccgcatgtcaa

SEQ ID NO: 128050 - DNA, 1896 bp, Zea mays
  Clone ID: MRT4577_48255C.1
agaacgcggcgttcgcgctttctttttctttgtcaacccctgtggcgtcgccgctgccattccgccctactactgattcatgatatttgggaaatctcctctatccatccctctctatctatatatgtcataatgcagtaagacgacacacattagcatgtgtggtctgaccacataatataccggccgggacacccacagacagcgctctcactagcctcgcattccgtccctgcagtgcaggggcaggccggtgaggtctgggagaggaggaggaggaggagatggccggtagggagagcggcgggatggcggcggcgctgcgctgcgctggaaggatcgggatcctggccaccgtcgcagtgaacctcgcgtggatcgcgacgtacatccgccggcgctacttcggcggcgggaaccgatccgacaacaacggtggcggcggggaggtggagccgtcaagagggaagccgccggtcacttcggactccatcgtcaacctcgatcatggcgacccgactatgtacgaggagttctggcgcggcacaggagatagcgcctcgatcttcatccctggttggcaaacaatgagctacttctccgacctcggcggcatctgttggttcctggagcctggattcgagcgcgaggtgcggcgtctccacaggctcgtggggaatgccgttgtagacggataccatgtgctcgtcgggacaggctccactcagctctttcaggccgtgctgtacgcgctctcacctgcaagtgacggcacacccatgaacgtcgtctcaccggcaccgtactactcgtcttacccatctgtgaccaactatctaaactctgcgctctaccgttgggctggtgatgccaatacatttgatggcgacacatgtattgagctcgtctgctccccaaacaaccctgatggtggcctccggaagcctgtcatcaaatccaagtctagcaagcctgtttatgacttcgcctactactggccgcagtacacacccatcaccgaggcagctgcccatgatatcatgctgttcaccgtctccaaatgcaccggccatgccggcaccaggctggggtgggcattggtgaaggatactaaggtggctcagaagatgatcaagtttatagagctcaacacaatcggtgtatccaaggactctcaacttcgtgccgctaagattatcggggcaatatgtaatggctatgagccggtaccatcctctggtaaaacaagccaactcttccatttcgccaaggaaaaaatggcggctcgctgggctagacttcgtgcagctgtggcagcctcagacatctttactctcccttatgagctatctggctattgtagcttttccaatgagactgtcaccgccaatcctccatttgcatggcttcgctacaacaaggatgatattgaagatctggaggccttcctactcgagaaaaagattatcactcgaggtggcacaaggtttggagtggatgcaagggctgtcagagttagtatggttgacacagaccaagccttcaatgtgttcatcaatcgtctggccacaatgaagtgaaatttcagtgcaaattaataaagcactttgtggctactacaaggatgaccgcgttctagatggaacaatcgatgctttggaaagcttaataatgttttatgttgttgaataattccgtgtgttttcgggtatgttgtgtaatactcaatgtcaaatcctatgcttaatcgatgttgtggtccatcctgttatcagcatggccaattatatatggatgaccgtcactgctcagtctttactcctaattacatggcaagtgtttaatggtgcttcaatatcagttgatgactataacttggtactaaaaaggccccta

SEQ ID NO: 128051 - DNA, 986 bp, Zea mays
  Clone ID: MRT4577_48256C.1
agaattcctctaggcaataataaccattgccaacagttgtctcgtataatatacattttagtgtataataactaaaaagaagaaacatcattgctatcaaaatattaccagtaatccccgcaagaacaagacccttttctgaaatgatgaaaccgatttgcatccctaacaattatgcacctcccataaatcttgcttataagttttatggcattatgacaatctccgcagatccggaggttatttactaccctaataggcgtgccaggagcagtgctgatcagtccaaaggctattgcgagtttctcactatgtagagctagtgagctctctttcacatcttcatcgtcaatatctagcagcacttgtgaagtgtcaggagtgtatcctgaacttttaagttgttgacaaatctcacctagcatcttatatatatccctcttcctcgagtggcttttgtctccagaaatgaactcatgaattacaccattaagttccactgaactgctcccaggggtcttcagcacgccacgatccaacataagctttctcaccttatgcactcctccccagttgccatctagtgcatatatgttggataacaacacatacccggcgtgatcatttgcggcagcctcaataagcctgtggccaaccttctttcccaactctaagttcttatgagttctgcaagcacccaatagggccttcaacatggaagcatctggctccatcggcattgtctgaattatctacctcagctttctacaaacatccctgcacggcagaacagatccaccatgcaaccataatgtgcaatgtacagagttcaatcccataaaatctagacattctctgaaaatagcttcataccttcctcaactaaccccccgtggctacaagcattcagtacagtgttaaaagtaatcttgttaggcatcagccttgttgactccatcctggtgaagagctccagagctctctca

SEQ ID NO: 128052 - DNA, 4550 bp, Zea mays
  Clone ID: MRT4577_48257C.1
caccctcgaggccggccgggaaaatgcgagaaaccagaagcgctcgcgagaagtaagggagagagaggggggacgacgacagccttgggacccgcggactgcatcgctcgccggtagctgacgtcactcggccccgtggaattttcaagctttggtggtggctcgtctgtctgatccgcgctctgctgctttttcttcgcccgccgcactgtatcacaactataacagtacctacgtgttcacaggtctaggcatttgtcctaccagtacagtacattggactagtaataactagtatgtatccagcaaaccgccacatggatccatactactcgcactatagaaaccatgttccttacccatactatcctcctgccagatgggaaatcccatccggtcatccacaggcaatggactcatcttattattatcggccaccaaactgtggaacttggccatatcatgatatctcacatccttctgagttccattgttgctgcaaccgggcatatcttcctgattactacagtttcagacccccattccctcaagagcttccaccccctcatttatactatcacgtgccatctccacatcatccaaatgcatgtccttcttactttgtcccatcacatccttacccttttgatcagacaccatatggttatgaaaagttcaagagccactgctgtggatgtccaactcatgtgtgccctggggctgagaagaacaatgtgaaaatcgaggaacaaaggcctgatgtcaagcttgagagcggtgagcacaagaatgctgatagtgacagtataattcaacacccaaacaagaagtatccattcatatggctgccatcaggcaatatgaaaggcaaggagaatggagagcattatgaattgtcacctcaggttttaaatgaatgggctcctgtgagtgggaagtggttaggggatgtgaagcaacaagggcaggataatgagaaggggaaacaattccagtggccaatagtttggatgccagcaggatatgatgcaccaaaccaaaaggctaaagatatgaatgacacagaagagaccccaaaatccccaaagatttctgaagtgtctcctcaatcacccaagatcattcctctgtcttggtttgggaatggtcatcatcatgatcagaaatcggctgccagaaatggttctggagaccacaacaacggatcagcagtgaagaaccaacctgtggttactgaccatcaagacagcatgatactggaaggaaaccctaaaatcactccagctgtgcccaagagcatacacgttgggaagaaacctccaagggaaaactgcaagaccattccagttgtgccagagaaagagattaatgaaaagaaggccagtacttacagagccattccggtcataaaagaaagtgatgagaagaagattggcatgagggaaaagagggagtcaaaggaggccaacagtgctgaaatggttgaagagaacaggaaaacaaaacacaatgactcatcagtagttaagcattcaaaattgcccccagtatgcttacgtgtggatcccttgccaagaaagaaacctggaaatggttcttctaggtctcctagtccaccaaggaaggatactgacaacacgaagaaggacgtggatgaggcccagagccagatcctggagcctaaacagtctagtacaagtaaggatatcactgtgtctgaagtgaaagaaaaatcgccttatgaaatgaagaaggaagttgggtttagaaatgaaacagtggaagctgcttctgttgaacatctgcaggaggaagaagctcccacaagtaaagatggccaaaaggtccaagctgctagcactacagttggtgatcaagaaaatgcagccctgaatagcatagaggaagatcatgtgcaagaaaatgctggtgcaggaagcttgaatggatgtgacaaaagaaaaaatgaagatgggacagtgattgaaagtgaaactgcgaaagatgatgccagaacatatggagttaatttgtcagaatcagatgctgcagttcgtattcagtctgcctacagagggtatgatgttcgaaaatggcaacctttggataaactctggaagatcaagcatgtgcatgaacagatgcaagttgtgaggaagcagattcaatgccttttagattcttgcagtaagccaacacaaaaagagcaagtggccataggtgaaactattatgaatttactcctgaagcttgacgcaatccagggcttgcatccaagtgtaagggaagctaggaagtctgttgctcgagaactgatttgcttgcaggagaagcttgatactttatgcaaagcagcatctggagacttgaatcacacagatagtaatgatgatgaatctgaggggaccaagaacattatccaaactgaagctcctactgtaataactgaagcttctgatagaaagagaactattgaactgggtaaggtacaagaaccatgttcagtggactccatggagccatgcaacacagttccatctggagtttcctgggaggtgaggccagatgtagacgctagcgaggagaagaatgaaaaacaagagtcatgtagcaccacagtggacgaagcgcacgaacaagtagcatcatcgatggatatgataagtgatgaagcttttacagctgacaaccaggagcatggaattggagaatcaaatgttacttcagtggaacaagtgactgaagaagagaaaccagcatctgaggatgaagtaaaagagccaccattggtgaactccacggcactattgtatgatactacttcatcaggggattccagtggactgaaacaatacacagcttcgaccgatcagaatctctatgctgaatcaaatacagggtcgtctcctgcatccactgaggacattgacataagtactctggctgtggaaagtgaagtggcggctgagaatgatggcccaattaacagtcaggtgcatgaaactgtagctctagaaaatgtggaaatgaaagatgatgtttcttctgctgaaaatgagcataacagatcgagcagccctgttattcatttagaggacccactagtgtctttgaaggatgttgagcagcatggtccaactcctactaaggactttgttgtacctaacacagaagaccaacaagaagccagagatatcagcttgcaggtacaagctgtggattccatgaaagattgtggcgaagtaccagatggaacaatagaggcttcgacgaatgatgatgaattagaactgggtacttctgcagatgtagaaaagaatgatcaacctaccttgctggaaccaagatcggagtctgtctctgtcccagaactgtccgtcttggatgaatctgacgataaaatgcaatgtggtgtttctggcaaggatgaggaagcacatgtggaggagaaaactgtaactattgctgttgacaaggtaacaggaggttctgcaaatttcgaggatcctctttgtgaggcatcgaggaaggaacctgacattgagaagagtcacccaagcctcggagaagaggaagacgatacaataggtggaacagtcttccctggttcaggtagctgtgaattatcatgtccacaggatggtggcatcgcagtctacgaggggcctgagatggtgtcaccagagagccaaactgatgctcggaaagaaaacatccattcagatgtcgctgagacagatgaatgcaccaagactcagaaggccgctctagcaggcacagagggagaaaattctgctgaagattctggtgtgccggtgtctgagatggacaaatgcaacgagatgccgaaggatgctccgacacttacagcagcaggtgcaaatcctgctgaagacgaagcttccctgaaagacctctctgtgcagacagagaacaaggcttcttctgcctccccagctcctgatgatccgaaggccagcgacgagaagacgctggcagaagagaaccagaagctgaaagagcttctgcaaaagcttctggcgtccggcaacgatcagatgggggtcatcacggacctaagtgagaaggtcaaggtgctggagcggaggctggcacgcaagaagagaccaaaggtgagggtgcacaagccatccaggcatgcttcctgtgtccactgaaaggataagtctgtaaggttttgaggttttatgttgtatggatccccatgttgcttcctgtgtccagctattgtgcactgtgtaggtatagccatgctgtggcactgtgcttcgtcttggacaacacaaggtgtggcatgttctgtattttatgtctgtataatgcatccaactacatctagtgttctgtgagcaattgattgggacaaatcgataaaacaaaaaaaaaaaaaaaaaactaaaaaaaaaaaatacgaggggggtgccccgtcgcagcggatcttacctataaagctacggctggcgccaccatggtggccgaccggtaaggaggcctgaagaagctcccagggcgaggtccaggcgcaccaa

SEQ ID NO: 128053 - DNA, 946 bp, Zea mays
  Clone ID: MRT4577_48258C.1
aaaaagagcaagtgcccataggtgaaactattatgaatttactcctgaagcttgacgcaatccaggtatatttttcattccagtctatttttctctgagtggcataggcttatttcttctttggtaaacttttttggtacttgttgggttgtttctaagacctttataatattgacacagggtttgcatccaagtgtaagggaagctaggaagtctgttgctcgagaactgatttgcttgcaggagaagcttgatactttatgcaaagcagcatctggagacttgaatcagacagatagtaatgatgatgaatctgaggggaccaagaacattatccaaactgcagctcctactgtaataactgaagcttctgattgaaagagaactattgaactgggtaaggtacaagaaccatgttcagtggactccatggagccatgcaacacagttccatctggagtttcctgggaggtgaggccagatgtagacgctagcgaggagaagaatgaaaaacaagagtcatgtagcaccacagtggacgaagcgcacgaacaagggaaaactgagggacagattgaaattcaggtagcatcatcgatggatatgataagtgatgaagcttttacagctgacaaccaggagcatggaattggagaatcaaatgttacttcagtggaacaagtgactgaagaagagaaaccagcatctgaggatgaagtaaaagagccaccattggtgaactccacggcactattgtatgatactacttcatcaggggattccagtggactgaaacaatacacagcttcgaccgatcagaatctctatgctgaatcaaatacagggtcgtctcctgcatccactgatgacattgacataagtactctggctgtggaaagtgaagtggcggctgagaatgatggcccaattaacagtcaggtgcatg

SEQ ID NO: 128054 - DNA, 1726 bp, Zea mays
  Clone ID: MRT4577_48259C.1
ttgggtacctcgaggccggccgggggacgctcactgcaatcacaggccgcggcctcccagaacggcagaaagggcagcgcggccggctatataaatccatgcccgtgctcgggtccaaaccacacacaaacacatcagcattcagcaatagctaatcgagcatcgtcgccttagctccctctcctctcctcttctctccgtcgtcgtggaacttctctccgccggctgccatataaaggaggaagaagagaacagcaacgtcattgggaccctcgaggccggcctccgtcgtcgccggcgtcgtcgactagctagctaactctcgatctccagttcctgcccccgcgccccacgcccggccgtcgtcgtcagcaatggcaggaggcttcttctccatggctcacccggccgtcaccctctccggcatcgcaggaaacatcatctccttcctggtgttccttgcaccagtggcgacgttcctgcaggtgtaccggaagaagtcgacgggcgggttcagctcggtgccgtacgtggtggcgctcttcagctcggtgctgtggatcttctacgcgctggtgaagaccaactcgaggccgctgctgaccatcaacgccttcggctgcggcgtggaggcggcctacatagtcctctacctggcgtacgcgccgcggcgggcgcgcctgcggactctggcctacttcttcctgctggacgtggcggccttcgcgctcgtcgtcgccgtcacgctcttcgccgtccgcgagccccaccgcgtcaagttcctcggcagcgtctgcctcgccttctccatggccgtcttcgtcgcgccgctcagcatcatcgtcaaggtggtcaagaccaagagcgtcgagttcctgcccatcagcctctccttctgcctcacgctcagcgccgtcgcctggttctgctacggcctcttcaccaaggacccctttgtcatgtaccccaacgtcggcggcttcttcttcagctgcgtccagatgggcctctacttctggtaccgcaagccccgcccggcggccaagaacaacgccgtgctgccgacgaccacggacggcggcaacgcggtgcaggtgcaggggcaggtcatcgagctggcgcccaacacggtggccatcctgtcggtgagccccatccccatcgtgggcgtgcacaagatcgaggtggtggagcagcagcacaaggaggccgccgtggccgccgagacccgccggatggccgccgcaaacccggacggcgccatgccggaggtcatcgagatcgtccccgccgccgccgcggtgtgacccaacgccaatcaccatgcaccgtacacaccctgctagcttcttattagctagctcggatgacgtacgacagtttggtggcaagtggctggcagctcaagcatgcagatgcaggcatcgtcgtctgctagttgatcgtttagttggttaattgttggattattattgcgtgtctctctcgtgtgcgtagtcttgtcagttcagttcagttcagtgtcgaatcaagtagtagtagctgttgtttgcattggatctgacaatgcatgctaataattatggtggtgtgatggtcttggtcggtacgtgcgtagtcgtctacgtacgccgtgtcaacgtcgtagatctctacgggaagatgataagactgtaacatgcagggcatgcatctatttatacttaacatattctttgtgtgcttt

SEQ ID NO: 128055 - DNA, 566 bp, Zea mays
  Clone ID: MRT4577_4825C.1
taggggccttttttttttttttttttcttttttttttttttttttttttttttttttttttttttttttttttttttttttttttttttttttttttttttttttttaaaaccacaagggaggcccccctttggttgaagttccttatgaaaagacggggggaacaaaaaaaaaagggggaaagttttttggtggggggggacaaaaccaacccccaaagaaacttgccccccgtaccccaacaggaaaaaaaaaaaaaacccctccccctgaggggcccccaggaaagtcccccctcctcccgggttgccggggaggaacgggccaaggaatttagggtttccccccggccctctcctttcccttgaggggggggaggggggggcccccccagggcaaattgacgaaataggaaaaaatcctccccccaatgaaaacggggaaaaaagggcccggggacctcgggaaaaggaacttcccaaaggaagggacaacggcctggtcggggctctttttgacgttgccccaggtaaagggggttttcagggaagggggaacggggggga

SEQ ID NO: 128056 - DNA, 383 bp, Zea mays
  Clone ID: MRT4577_48260C.1
ttcaactcgttcgtccacgctgatcaggacgcgcacgtagaagcgacctgatggagcatgattgtagagtagagagaggtgcctgtctctcttggaggctggctgcatcattcaaggtaacgttgcttagtaaggtgcccttgatgctgatgtgcctgggcgcactggagtactgctccttcacaggagagagttcggaccagaagctggacataacgtggagcaaccgtgagtgcaaggtgcttgacaactctctgatgctgacactgagtatgtaccggacatacggatcctgtgtccaatccgggctcgagtacctgtgcggcaagatcgacatgcagatgtaactggcgcctgggaaatgcgccgctgccatatccaac

SEQ ID NO: 128057 - DNA, 1005 bp, Zea mays
  unsure (1)..(1005): unsure at all n locations
  Clone ID: MRT4577_48261C.1
ctcgaggagggccgggccgggctattgttgttgacaaggtaaccggaggttctgcaaattgcgaggatcctctttgtgaggcatcgaggaaggaacctgacattgagaagagtcacccaagcctcggagaagaggaagacgatacaataggtggaacagtcttccctggttcaggtagctgtgaattatcatgtccacaggatggtggcatcgcagtctacgaggggcctgagatggtgtcaccagagagccaaactgatgctcggaaagaaaacatccattcagatgtcgctgagacagatgaatgcactaagactcagaaggccgctctagcaggcacagagggagaaaattctgctgaagattctggtgtgccggtgtctgagatggacaaatgcaacgagatgccgaaggatgctccgacacttacagcagcaggtgcaaatcctgctgaagacgaagcttccctgaaagacctctctgtgcagacagagaacaaggcttcttctgcctccccagctcctgatgatccgaaggccagtgacgagaagacgctggcagaagagaaccagaagctgaaagagcttctgcaaaagcttctggcgtccggcaacgatcagatgggggtcatcacggacctaagtgagaaggtcaaggtgctggagcggaggctggcacgcaagaagagaccaaaggtgagggtgcacaggtcatccaggcatgcgacggctaaagtccagtgaaagtaagtctgtaaggttttgaggtttatgttgtatggatcccatgttgcttcctgtgtccagctattgtgcactgtataggtatagccatgctgcccnatctgatacctctaggacaacgcaaggtgtggcatgttctgtattttatgtctgtataatgcatccaaccacatctagtgttccgtgagcaaattgattgggacaaatcgtgtgagtatatcacatatgcgtctgtgttgtgctaaaaacaccccccccccac

SEQ ID NO: 128058 - DNA, 521 bp, Zea mays
  Clone ID: MRT4577_48262C.1
cattgggtacctcgaggccggccgggctttactacttcccatagctgatctggctgaccctgccaccgctgagaaggactgggcaaggcgtgcgctctacactggccctcctttcaacaacctggatgaggacctccagattctgcttgaaaagtacctcgaggagcgtggcatcaacactcgtcttgcactcttcatccccgactacattgaccacaaggagcagaaggaatacgtcaggtggctgaacaacatcaagaactttgtcgcataagttcgcaccggattactccacagccatgttaaaagtacattggcacgacgaaacgacgcttcgatgagggtagactgagtcccttttgtataatctagtaacacatagtggggtgttttttgtaagatagttggtaagatatctcttctttatgccactcgaggtcacagttaaagatgccttgtattggccaaaatgaaacgaataaaagtgtttgaaagggaaaaaaaaaaaaaaaaaagcggcc

SEQ ID NO: 128059 - DNA, 404 bp, Zea mays
  Clone ID: MRT4577_48263C.1
cactccacctacaggtacggctgatacttgcaagccgctctagagctacctcccccaactgtcaccatgcacaacgagaagtggaagactgtagacctatatgagcccagaacgtgctgggacacatactatatcttgactgccaacgactatgcctatggacatatcaacatttgccactaggctgccattggcctgaaagatggacgcttaacatcattagctctctgctgcgttggatagtgctcaaggcaatgctgacagctccttgaacatgctgctgcaaaataagacggctgctctccaccagaagattgtacatctagtttaccaagcattggacactgccttagctatgttctgagctcatgtcactatatgcaatgatgctattccagctgctg

SEQ ID NO: 128060 - DNA, 574 bp, Zea mays
  Clone ID: MRT4577_48264C.1
caggctgtcaagcctatttgtcctatatttctcatttttacagaatctgtagttcctttgtgatgcaccatggttcttaaagcgttaaggcgaggtgcggcgttccaccaccttccggacgcctaggcgacgacaatacgaggcaagccgatgccttattatcatataaaggaataaaatggcagcaggatggagggagcacaagaaaaaagagagggagggagaagggagaaaaagagaagaggaaggggaaggaaaaaaaggcctgccagcccaccagctcagcccatatggccatccatcccatataggggtggtaatggatcacgatccaaatgtttcttcacaatttgttagggccctaaattatttttagttcaaaaatgaatagaaatagagcccgatcctaatccgatccgatccttacattttgtagtgtaaaatttagagcccattgtcacccctaatcccgtacctgtcttgacctactttgagctccctccagcgccgttcccttacccttagagctcctccatagtcgttgccaccgcccatccagggccgccgccttttc

SEQ ID NO: 128061 - DNA, 278 bp, Zea mays
  Clone ID: MRT4577_48265C.1
gaacgtgcgggcggttgaaataagggaacaaggggctaggtttggccacaataccaagacctaaggcaccggtccccatttgcgcctagacaaggcaaaaatgctaaaagaaacggatggttgggaaaacggagtgcacccaacccctatactcgactgaaaatgctaatcgcgggggaacaatatcgaaacgtccggcgaagcttctccgggcggggcttttggttcttcctttttacacgtccgccaatgatggacaaggggccccgcctggggag

SEQ ID NO: 128062 - DNA, 511 bp, Zea mays
  unsure (1)..(511): unsure at all n locations
  Clone ID: MRT4577_48266C.1
ggggggcgggcgctggttttataaaaattttttttggaagccaattttctaaacttttttttactataattattgcgccccgggaacaaataatccctggggggggccccggaccaaaacaaaaacccaattttttttaaccaactacatacaacacagggggggggggnccttttaaccctacccagatccaaaaacctttatcctcaaaaaaaaaaataaccagctaggtttccccccccagggcctaaatggggaaaataatccccggaatttaccccaaaaaggggaaaaaaaaacaaatccaaaactctgggccccccccctccttaaaaaacccccccaccggaggcaaaataatggcaatcaaaattcccacccatttggaaaccccctccaaaatgcggccaaggcttttttttcccccttttttttttctctaccttagtttagcttaaaaaaaacaaattccttcctccgcccaattcgaaacaaacccttttcccaaatt

SEQ ID NO: 128063 - DNA, 228 bp, Zea mays
  Clone ID: MRT4577_48267C.1
cccactcgttcgttcgctctcaacgccgtctagttccgcgaggccacgggggtcaatgggggctctcagaggttcagagagggccttctgaaatacctcgataacccgagcctcattcacgcgcagagcatccttgccatctgggcctaccacttcattctcatccgcgccctccaggctacgccatctccttttacccacatcctcgagctctgctaccaatctacc

SEQ ID NO: 128064 - DNA, 577 bp, Zea mays
  unsure (1)..(577): unsure at all n locations
  Clone ID: MRT4577_48268C.1
cagcactataaaacttggcttcctccttctcctttctcccctttctattgattccctccatctttcttgttcccacaagctagctagcagcagcagcagcagtaccgtagttcttggcatcatcatcatcaattattgaagatattatcgatcggccatggtggagcctagtgtgaaatcttcagagcatggtggaggaggaatcgacctgctgttcctgcctcctggcttcaggttccatcccaccgacgaggaggtcatcaccagctacctcctgcagaagctcctcaaccctagcttcgcgccgcacgccatcggggaggtggacctcaacaagtgcgaaccatgggatctcccaagcatggcgaagatgggggaggaggattccaaggagtggtacttcttctgccgcaagggcntgaaataccccgcgggcacgcgggcgaaccgcgccaccaaggagggattctggaaggcctcgggcagtgtcagggtgatcttcttcaagccagctgctgggcacgactctcttcgccgccgtgtgccgctggtggtgttgtagtagacgctggtgttc

SEQ ID NO: 128065 - DNA, 101 bp, Zea mays
  Clone ID: MRT4577_48269C.1
gatgttcaactgtacaagatctcttagtccaattttagctcatcatgtcaccacttcttgatcccatgctagctctacatattgtgtatgaggctagcttg

SEQ ID NO: 128066 - DNA, 159 bp, Zea mays
  Clone ID: MRT4577_4826C.1
gtctcattaactcttccccccttaacgaaaacaagtaaaaatgcatgccttaaccatcgacagcccgaatccatacagatctttaaccccccacctacccagaatctggaaacccccccaggaaagcccccaacgagcccacttttaaggccaatgaca

SEQ ID NO: 128067 - DNA, 704 bp, Zea mays
  Clone ID: MRT4577_48270C.1
cattgggacctcgaggcggcgggaaatcgttcacccgaagcgcacgtcagtgtcgccttcccatcatatctcgcgagacagatcagcttgctagccccacttattgctctgactctatgatggcgcggcggaccgacgagaacaagaaggctggaccgctcatcgagcatgaggccaacagccacgggaacggaaaagcccagcagaatacgcgccacgtccgacgtcgatcactatacctgctcaagaccgaccacctcgaccaagacatcgtggacacaagcgtgcacccgcgtcacgcggaaaacatgaaagacctgcatgatatcatggcccagcacccatgaaaactgatgaccacctccgccgccgaggggcagtcccgcaacatgatcatcatgctcgttctatgcaagaagagcatggagatttgctgctacaccgggtactctttcctcgacatggttgtcgtactctgggatgaatgtgctagcttgctcatgcacatcaagcgacagaactaccagataggtctttcctgcatctacaacggctatgcgacgaacaagatacactgtccgcgaggttcccgcgtctccccatcctgtacgacctcgtgcgcggatatgagcaaggccgatcgtacgacttcgccttcatgggcgccagtaagattactacctcatatatctggaacgcctgct

SEQ ID NO: 128068 - DNA, 156 bp, Zea mays
  Clone ID: MRT4577_48271C.1
ggcaaagcaggaaatttaataatccccatagacttgttttatggcactcggtttggactttacatacgggcgggaacacaatagggtacatacaggggggacgttacgggaaccggccattatttaagttattactaggggggcactcacgtttta

SEQ ID NO: 128069 - DNA, 572 bp, Zea mays
  unsure (1)..(572): unsure at all n locations
  Clone ID: MRT4577_48272C.1
ctgacacatcaaanactcgtctattcgaactgtccctccccaggcgagcacgcgaagcagctcattgccctctcgcggcgccactgatggagagaagcgcctcgaagcactggccctgggcagggtagcggaggctgccgacgcagttgcctccgctgcttgcgccggcgaggtggtccgcgcgattcacgctgtcgcatccctcctcttccctgtggactctgaggccgtcgccggtaccgtcgaggaaccattcaggagccagattgttgatgctgtaactgtaaccctcagcaatgaggagagggaatcttggaggcatgccttttatcatggtccagcatttcctactatgtctaagatactgcttggcaatgttgccttgaagtggttgccgaagattaatgtctctgcaaggcaagagatttacgactcattttttgtcaaagggcctccaactgaagtgattcaagctcttgttccagcgctatctgaaaaagattttctaaggaggacccaccagacttttgcttgaaccttgaaaggctactgattctatggttacttgatat

SEQ ID NO: 128070 - DNA, 367 bp, Zea mays
  Clone ID: MRT4577_48273C.1
ggggtggggtttttttttttttggggttgtttttatcctaaaatttgctttttttttaaaaatgcaaaacaaacattttacaacgggtcccaaaggtggaacaaactaagttcactttgtcggggaggatagtaccatcacaaggattccaaattttaaaattcggaggatttaatttttttttaacataaaccattttttttagaaaaaaaaaccatggggctctttccccctacggttttaacctttataaccccaaccgggggttaccattattttacctttgtgggggaacaattttttattttttggggctttaatgggccatttttttccacccgcatatggggccctttttaacagttta

SEQ ID NO: 128071 - DNA, 398 bp, Zea mays
  Clone ID: MRT4577_48274C.1
acgaagaggaagagctcgctgagagcgagagcctttgttaaacagccgccggcggcaaaatgggggagcggtttagctgcagcaagcgctacttcttcgcctcaaatttcaatctgactcacgtgtgtgagaccctagctgtgaggcgatgtgttccagtaacaccaaaaatcgtgctagcggtcacgatatgcctggtcaccggggagattatacacggtattccacaccttagactttgtgatttcaatatgtgaccgtctgaatggaacctaagaattcttaaccaaccatatcgacgccttctgtgtacgtccggtgttagagataatttcatccgtgcttttttgttctatgagcagaagataggtaatagcgtatttattattcaaaattct

SEQ ID NO: 128072 - DNA, 895 bp, Zea mays
  Clone ID: MRT4577_48275C.1
gccggccgggtcccgatttctgaaaaagcaaacttaaagccgggggcacaagcgaaagcgaaagcgcatagtgcccgtgcaccgtgctgcctgtcccctaccgcaacggtagcattcgaattctctccccaaatcgccaccctggggcacccaatgctggcagcctcccttctcgctctccgcttcctcctcgtcggcgccactgcggcggggatggggaccgggacggtgggggtgagtggtggtggccagctgtggtgcgttgcgaagaacaacgcggaggacggcgcgctgcagagcgcgattgattgggcgtgcagtgttgacggtggccgcgcggactgtgcagccatccagcagggtggcgcctgttacgatccgcccgacctccagcagcacgcctcctacgccttcaacgactacttcctccgttccggcggtgccgggagccccgccgcctgcgacttctccggcgccgccgcactcaccgcgctcaaccccagtcatgggagctgcgtgtttccttccagtgcatctccgaaaaatggtagcttcacaggaacgacaacctatggtccaaccggtgcagacttcagcagcagtttttcatggaaactcaacttctggccattgctcttgcatatatctacatctgtaacgttttgtgctgcactcatgtgttgtagttttttcttaaactgtgttctgcgcgtatgataaactatcaggctgcagaatgtgggtttgttcgctggtctccccttgagtttgctgcattgtttgggaggggagaaactgtccaatatcagctgctccctcttttaccaggcagtcctcttcagttttgtgtgggcatgtgatttcatccttctgctaaactgtagtgcacgaacct

SEQ ID NO: 128073 - DNA, 423 bp, Zea mays
  Clone ID: MRT4577_48276C.1
tttttttttttttttttttttttttttttaaagaaacaaaaataaaaagggcggccgcccttttttttttttttttttttttttttacttttaatttactttaactataactctaaaacaagccctttattaattgaaaaaacaagacaaaaaattaccctaaatgcttatttgcgagaacttacataaaatgggctgctaaataaattgaaaaaacaacccaaaaaaatataaaattttggtaaataaaaaggaagggaaacccatttattcatgcaaaaaacctacatccaatcccatacaatccatatagacaaataaaacgattcaatctcaccaaagcaagtaaaaaaaaaaaaacccgggggcatgctctttcataaaaaaagaaaaagggcccaaaaaacaatacacattttaact

SEQ ID NO: 128074 - DNA, 1447 bp, Zea mays
  Clone ID: MRT4577_48277C.1
ttgggtacctcgaggccggccgggatctttccttgtccttcgtaccccgtccggttctctctctcgctcgctctcagccttccttccctggcggcaacgcctgggcggacgagcgccgtcgccctgccagttcttcgtcggtcccttcgcctgtgattggcgccgcgtcttctttggatttcggccctttcgcgccggggactagcgcccaccaggagcaagattgaagccttgaagggctatatagggttgggcacggttgacctgatcgactgaaactgaaatggcattggtggtgaagcggtaccgatgtacgcactccgtgagctgtgcttgcctcaagggccatgtcagggaggatgcaatgtatctcgtgtttaaacacatgaactggaacccgaagatgattgctatcttatccagtgtatgtaagtggttcgatgaatttgccaagagggtgctctggaaggaattctgccatgccagggcaccaaagatgatgaaggatttgcactctgacggaagtcatatcgttgatggcaactggaaggccctagggaagcttcttatctattgcgcagggtgccctagtggagacctgttcagtaatatccatgacccagtcccggggcactttgtctacagaacccgtttttctaggacattggggaagagcttactggcgccacagtgcaggtctgatgcgttgtatgtctcagagtcctgtgaacatcttgaccagggcgaggaaggtgacttgggcctcttccggggtatcttcaagtcgtttgctgcgtcgaagatgaagaaaatgttgattgagaggcaggcaaacttccatttgaataagatgtgtccttattgtaagacaaagctatgggacttgatgcaaccaaatatgataccaagtagtgccgccgtgagattgggtgcggaagatggttctgttgagtactatgtatgccttaatgggcacatccttggttcatgcactctgatacccatctctgattctgagggcacaaaggaagagtgatcaagacttgatttaggttgctgtgtgaaatcccgtgcttgttgactagggcgtgagcagcgataaggacgagccctgtcgccgccgttgtacttaactgtaattgtagtgccagtgttcttctagctgcctttctttgagggtgtgggttgacggattctcgtagttgcttgtagcagtagaaaaagaagaggttgctgtatcgtggttgccttttatttatgaatacctcattacaggtatgtttgcagagcacctgcatattgctttggtaccggtatgtaccttcaaatgcacagatttttcctgtatccagcacagcctgttgtgctccggaaaaaaaaaaaaaaaaaaaaaaaaaaaaaaaaaaaaaaaaaaaaaaactcgagggggggcgcgtgtaccccaaaa

SEQ ID NO: 128075 - DNA, 307 bp, Zea mays
  Clone ID: MRT4577_48278C.1
tcggcattacctgcgtacgagcagcgggcaaggatcttgtttcgcccggaaggccaccaacccccggggtacacgaggagggtgacaggtgggccattcggggttcgggcgagcccaacttaaaccccgcaccaattcccactttagtactttacacccagcgcacttgagcttgagcccttggccttttcttaaacacaagccttaaatctcaatcacctgcgccggcgctttgttcgtgtggaggggagaaaagaggaaatggcggcgaccgagggcgttcttcttgggattggcaacccccttc

SEQ ID NO: 128076 - DNA, 489 bp, Zea mays
  Clone ID: MRT4577_48279C.1
gtcgcgcccccctcagctctcctctctagtctccagcgtccagcgccgcgcctgcttcgtccatggccggctccctgcgtcggtcttccctgcgagttgctcacgtcttcatcccctgagctctctctcccatgccgacgcgcgcgctctgcctctccctcagccgtcgcaccgtggttatctgctcggccatggaggtcgcggttccctgatctcctgctcgcctggccgcgtcgagctccatgctgggccaaagtctcctccctgctcggattttgtcaggcctgaaacgatcttcatgatcagccgatctcgtatcagcaaggtcggtaaccattgagagttggttcagcgattgcattggcgcttcgggttcgctcgtcgtagtccgatcgtgagggtctactttcaccaaatcggaattatctccactcacccaaaggatcgggcactccagctccatcaagtggtatcagatttccatgttga

SEQ ID NO: 128077 - DNA, 844 bp, Zea mays
  Clone ID: MRT4577_4827C.1
caaattggacaaccctgtcgccctctcggtctccctcgagcttttcttgtgcgcagccgcagccgctgcttttcgttcgtcttcatcctacgcgagggcgaaacccacaaaccctctccctcctgtactccggccgacacatccaggggcgatgacgctgggtagctccggcgccggatcgagcgtcgtcgttcctcgaaacttcaggctattagaggagctcgagcgtggagagaagggcattggtgatgggacagtgagctatggaatggatgatgctgatgacatctacatgcggtcatggactggtaccatcattggccctcacaatttgttttgtgacaaagactatccggagaagccaccatctgtcagattccactcaagaatcaacatgacatgcgttaatcacgagacaggaatggttgatccaaggaagtttggtttgctagcgaactggcagcgggactacacgatggagaacatcctcacccagctcaagaaagagatggctgcctcgcagaatcgaaagttagtgcagcctccagaagggacattcttctaacgaagtgttcacttggcccgtcatgggatccaacagtaattgaaagttttatgggctaaaaaacagcgtctacatctggtgcccctgcctggctttgtgattttttatgacttttatgttcttgtatcgtgaaccgcagtgaacaacggttgttgcaagttccagggatatctttggaagtggtaaacaaatgcgtcttatttctatgtaatattagaccccgtgcgtgtgtggtttcgaggtacagctccctatcaactgttgccgtgcattccgtcg

SEQ ID NO: 128078 - DNA, 431 bp, Zea mays
  Clone ID: MRT4577_48280C.1
atgctggcagcctcccttctcgctctccgcttcctcctcgtcggcgccactgcggcggggatggggaccgggacggtgggggtgagtggtggtggccagctgtggtgcgttgcgaagaacaacgcggaggacggcgcgctgcagagcgcgattgattgggcgtgcagtgttgacggtggccgcgcggactgtgcagccatccagcagggtggcgcctgttacgatccgcccgacctccagcagcacgcctcctacgccttcaacgactacttcctccgttccggcggtgccgggagccccgccgcctgcgacttctccggcgccgccgcactcaccgcgctcaaccccatgcatctccgaaaaatggtagcttcacaggaacgacaacctatggtccaaccggtgcagacttcagcagcagtttttcatgg

SEQ ID NO: 128079 - DNA, 2523 bp, Zea mays
  Clone ID: MRT4577_48281C.1
atggatgtgtatgggtatagaaacatgggaataatgagaagtgtaatgtactcgcaacgatgcacctacgctcaggtaaaaagctacactaacctcgaaaacgtatgtgtagttgatgactcgcaaattaccgagagaatccctaccgaaaactccacacatttctacgacgagaagttttctgtttctccaggcaatcgctcatccaatctttcaccggttccacctgttggttgcagttcaccactgtggcttggagcacatgtcacggtggatgcccagttgctggaagtaaggggacaagttgatggacttgctgctgacattaggacgatgcatgaacggcttgattcaacggtcacttcgacgaccgagcgtttcaaccagcttgaccttgctcaaacggcgacttgcaccacactcgacactatcctggcacgccttgatgcgttgaccacaaagatggagcaggactacggcggtgacactgacgttttcagcaaggttctcaatctgttgaggactatttccaggagttacaaaaagtgtcatcgctgtagaggatttggccatgtgattcgggactgcccaaacaagcgcactttgctcattcgtgaggatggtgagtactcttccgttagtgattctgaagaaattgaacatgcactacttgccactgaccatgcagctcaggcggaggagtacgctgatgtctttcccaaagacttaccaccgggtctcccaccgctttgtggcattgagcaccagatcgacctcatccccggtgcacagcttccgaaccgtgcaccgtaccgtacaaatccggatgacacgaaggagattcagcgccagttatttgctaacatggaaaaatgcatcttttgcacacgacgtgtctcgtttcttggttatgttgttactccacagggcattgaggtggatagcagcaagattgctgccattcgggagtggcctacaccgacgacggtcacacaaattcggagctttcttggacttgccggtttctaccacagatttgttcgtgattttagctccattgcagcgcctctacatgagcttacaaagaaagatgtgtcgtttgcttggagtgattcgcaggaggcagcgttcaacactttgaaagataagttaacccaagctcccctattgcaattgcctgattttaataaagtgtttgagcttgaatgcgatgctagcggtattgggctagatgctgttttgttacaagaaggaaaaccagttgcttattttagtgaaaaattaagcagtgctagtctgaaatattctacttatgataaggagctttacgctttagtgcgcactttgcatacatggcagcactatctttggcatcgtgagttcataattcattctgatcatgaggctttaaaacatattcatacccaaacaaatctgaaccgtcgtcatgctaaatgggtagaattcattgagtcctttccttacattattaaacataagaacgagaaggacaatgttattgctgatgctttgtctcgtcgctataccatgctgtcacagttagattttaaaatctttggtttgcacactgtgaaagatcaatatgttgacgatgctgattttaaagatgctttcggccattgtattaatgggaaaccatgggcaaatttcacatacaggatgggttcatgtttcgcgctaacaagttgtgtgttccagctagctcgattcgtcttttgttgttacaggaagcgcatggaggcggtctcatggggcactttggcgtctacaagacacatgagggttgttttagacaaaaatttaaaacgttgggaggattgcttgcctcatgttgagtttgcttataatcatgcaacacattcttctacaaagatgtgcccttttcaaattgtttatggttacattcctagggcgcctattgctttgttttcgcttgatgctgtggatgccccacacatagatgttgttgcacatgttgaacaaatgattaacctccatgaacaaactcaacaaaacattgctgctgctaatgctaaatatcagattactagtagtaaaggccggaaactagttacttttgaacctggtgatatggtttggttgcatttgagaaaggatcgttttcctactttgcgtcgttctaaattgatgcctcgtgttgctggtccttttaagatactaaccaagattaatgctaatgcttatatccttgacctgcctgcagagtttggtgtttccactagttttaatgttgcggatttgaaaccgtatgtgggagaagatgaggagttgtcgtcgaggacgactttagttcaagaaggggaggatgatgaggacatcaacaccaacacgagtacatctacaccagcagcaccttctccagcccaggcaccatcttccccagtccagacgccaccccttccacctgggccagtgactcgggcccgtgcaagagaattgaactacatcatgttgttaaagaacgaaggcccagaagtttag

SEQ ID NO: 128080 - DNA, 735 bp, Zea mays
  unsure (1)..(735): unsure at all n locations
  Clone ID: MRT4577_48282C.1
aggatagtgcccgtgctgcctgtcccttaccgcaacggtagcattcgaattctctccccaaatcgccaccctggggcacccaatgctggcagcctcccttctcgctctccgcttcctcctcgtcggcgccactgcggcggggatggggaccgggacggtgggggtgagtggtggtggccagctgtggtgcgttgcgaagaacaacgcggaggacggcgcgctgcagagcgcgattgattgggcgtgcagtgttgacggtggccgcgcggactgtgcagccatccagcagggtggcgcctgttacgatccgcccgacctccagcagcacgcctcctacgccttcaacgactacttcctccgttccggcggtgccgggagccccgccgcctgcgacttctccggcgccgccgcactcaccgcgctcaaccccagtcatgggagctgcgtgtttccttccaggttagtcattgctcctaacctcatatttgtgttgacctttccagtttcctcctttttgtgcatctccgaaaaatggtagcttcacaggaacgacaacctatggtccaaccggtgcagacttcagcagcagtttttcatggaaactcaacttctggccattgctcttgcatatatctacatctgtaacgttntgtgccactcatgtgttgtagttttttcttaaactgtgttctgcgcgtatgataaactatcaggctgcagaatgtgggtttgttc

SEQ ID NO: 128081 - DNA, 2325 bp, Zea mays
  unsure (1)..(2325): unsure at all n locations
  Clone ID: MRT4577_48283C.1
cgtaaccgaaggagaaaaaaaggaaacgatgttgactcggtttgttttttctgttttttttacgtaaccgaaggagaaaaacaaggaaacgatgttgactcggtttgtggcgtgatcaaacgggagatggtggcggcgctagggtttgaatggtggaagaacacaatgcaaccagcaacaaatgacgcgaaagcacacaaattcaacaatgcagattattgaaagaaagtgcgaggctcaaaagggtgctgggataaggtctaacctgaatttttatgtggttttgtggactgtaggaaaaaaaacactcgataaactcaccgatcaacctggaaatctgataccaattgatgtagctgaggtgcccgatctttcggcgagaggagataattccgatttggcggaagatgacccttgcgatccgactacgacgagcaagcccgaggcgccaatgcaatcgctgaaccaactccctgtggttaccgaccttgctgatgcgagatcggcctgatcacgaagatcgtttcctgtgcgcaatcgaagaacgaacaagaaaaagatgcgagcaatctaatctattactcgagggtggagttctgaatacacgaagacagtgcagatttgcgcgtgttcgagagtagctaaggctaacgtaaaacaaaactcgaagaacaaaggaggcacagctcctgtttaaatagagagggggcgcagcacctaggggcggccaaccctaggtcgtccattatgggccgcaattgggctggtcgtctattcttccgggccttcgttctttaacaacatgatgtagttcaattctcttgcacgggcccgagtcactggcccaggtggaaggggtggcgcctgggctggagaaggtgctgctggtgtagatgtgctcgcgttggtgttgatgtccgcatcacaaagcatatgttttggccatcggaaccatttcttcgtttttcgcaacgaacatgcccaatccacaactttaggtccaaaactcatgtttgcggtggtttcgcgcaatttcgttgccgcacgtcaccctttccgaaaacgggtgtcgatgtgcatacaaggcacgagtttttgccaccgtaaccatttcttcgtttttcgcaacgaacatgcccaatccaccactttaggtccaaagcacatgtttggggtggtttcgcgtgatttcattgccgcacgtcacccattccgaaaacgggtgtcggggtgcatacaagcacgagtttttgccacaggaacaatttcttcgtttttcgcaacgaacatgccaaatccagtatattaggtccaaatcttatantggggtggttttgcgcaatttcgttgccgcacgtcacccattccgaaaacgggtgtcgggggtgcatacaaagcacgagttttcgccaccggaaccatttcttcgttttcgcaacgaacatgcccaacccactactttaggtccaaaactcatgtttggggtggtttcgcgcaatttcattgccgcacgtcacccattccgaaaacgggtgttggggtgcatacaaagcatgagtttttgccaccggaaccatttctttgtttttctcaacgaacatgcccaatccactactttaggtccaaaactcattttggggtggtttcgcgcaatttcgttgccgcacgttacccattccgaaaacgggtgtcggggtgcatacaagcacgagtttttgcaaccggaaccatttcttcgtttttcacaacgaacatgcccattccactactttaggtccaaaactcatgtttggggtggttttgcggaatttcgttgccgcacgtcacccatttcgaaaatgggtgtcgggggtgcatacaaagcttgagttttcgccaccggaaccatttcttcgtttttcgcaacgaacatgcccaatccactactttaggtccaaaactcatgtttggggtggtttcgcgcaatttcgttgccgcacgtcacccattcagaaaacgggtgtcggggtgtgatgcggacatcaacaccaacacgagcacatctacaccagcagcaccttttccagcccaggcgccaccccttccacctgggccagtgactcgggcccgtgcaagagaattgaactacatcatgttgttaaagaacgaaggcccggaagaatagacgaccagcccaattgtggcccataatggacgacctagggttggccgcccttaggggctgcgccccctctctatttattcaggagctgcgcctcctttattttccgagtttttgtttttacgttagccttagctactctcgaacacgcggcaatctgcgct

SEQ ID NO: 128082 - DNA, 354 bp, Zea mays
  Clone ID: MRT4577_48284C.1
acaagtctctacagtgagtcgtattagtgtctgctgttcggggacatcgacgtaacgtctaatgacagggacatgcatgtcagtctcgcattcagcgactttgagacggtgctggtgcagcgggcgctgcgcagccgtgagcgcttcatcgacgtggtgaacagcgactacacgcactggctcaggtacgcaataggaggtaaacggcatcctaccatcatcagcgacggcaaccgcgtccgcgtcgtcatcgacaatacgtgtaatgacgtgaggaagctggagtacacgcagtatagcgagtatccgagctgggtgtggaagtctcaggacgacctgttcctcaacggcgcc

SEQ ID NO: 128083 - DNA, 715 bp, Zea mays
  Clone ID: MRT4577_48285C.1
gtcgtcgtagtcggatcgcagggtcatcttccaccaaatcgagattatctccactcaccgaaagatcgggcacctcaattatatcaagtggtatcagatttccaggttgatcggtgagtttatcgagtgttttttctcctacagtccacaaaaccacataaaaattcaggttagaccttatcccagcacccttttgagcctcgcactttctttcaataatctgcattgttgaatttttgtgctcgcgtgtcatttgttgctggttgcattgtgttttttttcaccatccttctttcttccacaattcaaaccctagcgtgccgccaccatctcccgtttgatcacgccacaaaccgagtcaacgccgcttccttgtttttctccttcggttacgtaaaaaaaacagaaacaaaaaaaagtagagaaaaaaagaaaacgaaagagaaaggatagaaccagacaacaaacaaaaaaatagggaaaggaaacaaagcggttgtctcaactcggtcgtttttaaccataacttgaggtacattccttaaaccgggcataacttttcgctcggttgttcaaaaaatctgaaatttttacagtagcttgttgacaccattctgagattagaccgatctcgcatcagcaaggtcggtaaccacagggagttggttcagcgattgcattggcgcctcgggcttgctcgtcgtagtcggatcgc

SEQ ID NO: 128084 - DNA, 346 bp, Zea mays
  Clone ID: MRT4577_48286C.1
agttggggttttgggttttttttttttttttttttttttttttttttttaataaattaagggttgcctggagccgtaaaagcattgaaccgaccgactatcacgagggccaaaaaaataacccccacaaaagtcccaaccaaccacaaataaagtttaagcggacagacgggaccaactgacgataactctaggcaggaactgggccagccggcaactgcagatcattaaagactgacaacaaaccgcttagtgcacctcctctatcttggagccagggccgccgttggcgctaggggcctactatgtcatgccgacagggccgccaatgtgtttacacgagccct

SEQ ID NO: 128085 - DNA, 939 bp, Zea mays
  Clone ID: MRT4577_48287C.1
ggtcttccgggtaacctgagaatgtgcagcaatatcatggcatgaaattttttgttcaacctttaactcccaatcaagatatgcagcaggatcatatttgccattaaaaggtggaattttaaatttaatcttagaaaataagtcattagggggatgacgaaccacacggcgtgcacgaccacggcgatctccatcgtcctactcagtgtcaccgccgtagtcctgctccatctttgtgatcaacgcatcaaggcgtgccaggatggtgtcgagtgtggtgcgagtcgccgtttgagcaaggtcaagctggttgaaacgctcggtcgtcgaagtgaccgttgaatcaagccgttcatgcatcgtcctaatgtcagcagcaagtccatcaacttgtccccttacttccagcaactgggcatccaccgtgtcgtgtgctccaagccacaggggtgaactgcaaccaacaggtggaactgatgaaagattggatgagcgattgcttggagaaatagaaacctgctcatcgtagaaatatgtggagttctgggtaggcgttctcggtggcgacagcagcactgcccacggtgacccacggcccgactgcctgaatgaagaaccgatgagaaattccgccgcaccgcaggcctcagcgctggattaggcccgtgtacacgatctaccaaccctgtagaatgcctggaaccgcacaacggaggttgggaggcgacgatggctacaatcaatggcggcgttgcagattcgcacggctacagcgagcaattccccaccgtccagccacacatcaccccctcgatgcggacataagcaccacccgagcggctgtacgccatgatgaagtactcctccacatccggccgccaccgcagcctcaggctgtatgtgtaccgtccgtttcagcagcttccggctcccggccgg

SEQ ID NO: 128086 - DNA, 1474 bp, Zea mays
  Clone ID: MRT4577_48288C.1
aaagttatgcccgttttacggaaggtactcaggtttatgttttaaaaacgatcggcatgaaacaactgtatcctttctccttcgttttcttttttttgtttctgtttttttgacgtaaccgaaggagaaaaacaaggaagcggccgttgactcggtttgttttttttttttgttttttttttcgtaaccgaaggagaaaaacaaggaaacggccgttgactcggtttgttttttctgtttttttgacgtaaccgaaggagaaaaccaaggaaacgatgttgactcggtttgtggcgtgatcaaacgggagatggtggcggcgctagggtttgaatggtggaagaacacaatgcaactagcaacaaatgacgcgaaagcacacaaattcaacaatgcagattattgaaagaaagtgcgaggctcaaaagggtgctgggataaggtctaacctgaatttttatgtggttttgtggactgtaggaaaaaacactcgataaactcaccgatcaacctggaaatctgataccaattgatgtagctgaggtgcccgatctttcggcgagtagagataattccgatttggcggaagatgacccttgcgatccgactacgacgagcaagcctgaggcgccaatgcaatcgctgaaccaactccctgtggttaccgaccttgctgatgcgagatcggcctgatcacgaagatcgtttcctgtgcgcaatcgaagaacgaacacgaaaaagatgcgagcaatctaatctattactcgagggtggagttctgaatacacgaagacaacgctgatttgcgcgtgttcgagagtagctaaagctaacgtaaaacaaaactccaagaacaaatgaggcgtagctccttgataaatagagagggggcgcagcccctaggggcggccaaccctaggtcgtccattatgggccgcaattgggctgggcgtctattcttccgggccttcgttctttaacaacatgatgtagttcaattctcttgcacgggcccgagtcactggcccaggtggaaggggtggcgcctgggctggagaaggtgctgctggtgtagatgtgctcgtgttggtgttgatgtccgcatcagttttggacctaaagtagtggattgggcatgttcgttgcgaaaaacgaagaaatggttccggtggcaaaaactcgtgctttgtatgcaccatgacactcgttttcggaatgggtgacgtgcgacaacgaaattgcgcgaaaccaccccaaacatgagttttggacctaaagtagtggattgggcatgtacgttgcgaaaaacgaagaaatggttccggtggcaaaaactcgtgctttgtatgcacctgacacccgttttcggaatgggtgacgtgcgacaacgaaattgcgcgaaaccaccccaaacatgagttttggacctaaagaagtggattgggcatgttcattgcgagaaacgaagaacccg

SEQ ID NO: 128087 - DNA, 2275 bp, Zea mays
  Clone ID: MRT4577_48289C.1
gggcgcagccccctaggggcggccaaccctaggtcatccattatgggccgcaattgggctggtcgtctattcttccgggccttcgttctttaacaacatgatgtagttcaattctcttgcacgggcctgagtcactggcccaggtggaaggggtggcgcctggactggggaagatggtgcctgggctggagaaggtgctgctggtgtagatgtgctcgtgttggtgttgatgtcctcatcaatgttcgttgcgaaaaacgaagaaatggttccggtggcaaaaactcgtgctttgtatgcaccccgacacccattttcagaatgggtgatgtgcgacaacgaaattgcgcgaaacaaccccaaacatgagttttggacctaaagtagtggattgggcatgttcgttgcgaaaaacgaagaaatggttccggtggcaaaaactcgtgctttgtttgcaccccgacacccgatttcggaatgggtgacgtgtgacaacgaaattgcgtgaaaccaccccaaacatgagttttgtacctaaagtagtggattgggcatgttcgttgcaaaaaatgaagaaatagttccggtggcaaaaactcgtgctttgtatgcaccccgacacccgttttcggaatgggtgacgtgcggcaatgaaattgcacgaaaccaccccaaacatgagttttggacctaaagtagtggattgggcatgttcgttgcgaaaaacgaagaaattgttcaggtggcaaaaactcgtgctttgtatgcaccccgacacacgttttcggaatgggtgacgtgcggcaacgatatagcgcgaaaccaccccaaacatgagttttggacctaaagtagtggattgggcaagttcgttgcgaaaaacaaagaattggtttcggtggcaaaaactcgtgctttgtatgcaccccgacacccgttttgggaatgggtgacgtacgacaacgaaattgcgcgaaaccacccaaacatgagttttggacctaaattagtggattgggcatgttcgttgcgaaaaacgaagaaatggttccggtggcgaaaactcatgctttgtatgcacccgacacccgttttcggaatgggtgacgtgcggcaacgaaattgcgcgaaaccactccaaacatgagttttggacctatagtagtggattgggcatgttcgttgcgaaaaacgaagaattggtttcggtggcaaaaactcgtgctttgtatgcacccgacacccgttttcggaatgggtgacgtgctacaacgaaattgcgagaaaccacccccaaacatgagttttggacctaaagtagtggattgggcatgttcgttgcgaaaaacaaagaaatggttccggtggcaaaacctcgtgctttgtatgcaccccgacacccgttttcagaatgggtgacgtgcgaaaacgaaattgcgcgaaaccaccccccaacatgagttttggacctaaagtagtggattgggcatgttcgttgcgaaaaacgaagagatggttccagtggcaaaaactcgtgctttgtatgacaacagttttcagaatgggtgacgtgcggcaacaaaattgcgcgaaaccaccccaaacacgagttttggacctaaagtagtggattgggcatgtttgttgcgaaaaacgaagaaatggttccggtggcaaaaacttgctttgtatgcaccccgacaaccgttttcagaatgggtgacgtgcggcaacgaaattgcgcgaaaccagcccaaacatgagttttggacctagagtagtggattgggcatgttcgttgcgaaaaacgaaaaatggttctggtggcaaaaactcgtgctttgtatgcacccgacactcgttttcggaatgagtgacgtgcggcaacgaaattgcgcgaaaccaccccaaacatgagttttgtacctaaagtagtggattgggcatgtttcgttgcgaaaaaagaagaattggttctggtggcaaaaactcgtgcattgtatgcaccccaacaactgttttcagaatgggtgacgtgcggcaacgaaattgcgcgaaaccaccccaaacatgagttttgaacctaaagtagtggattgggcatgttcgttgcgaaaaacgaagaaatggttccggtggcaaaaactcgtgcttttatgaactcgacacccgttttcggaatgggtgacgtgcggcaacgaaattgcgcgaaaccaccccaaacatgagtgttgtacctaaagtagtggattgggcattttttttttttttcccg

SEQ ID NO: 128088 - DNA, 604 bp, Zea mays
  unsure (1)..(604): unsure at all n locations
  Clone ID: MRT4577_4828C.1
gcatggcttggcgagnaagctgatccccagtactcagatcgactgctcagaccatacaagaggcccgtggaggtttatatggaccaacaagattcaaggtggtttatatccaaggatgcaattgtatctggccttggtcttctaggcatcaagcagggtggacctgagacaacgttgtctaagcctcgtcgaaagagagtcgtccgcaaaaaggccgcttcaggttgagtttagtggatttggcagcaatgctggaacgattttgcttctgttccactatgccagagggaggtctacccaaattatggtaaatgagaaaaactacaaacgtcaaccagcacagcacgtggtcaataggcgaaggcatcaaagggggttgtgctgggaagcgttggtcaaaaggtgccctttactattttctaattcaagtgcagtggtttctttattttttggtaagaataatatgttggtttcttgtattgctgaggcaaatagacacgtttagtggtagttctgtaagtttgttaatgtactgactttaacatgagatggattctgcatttttgtatagatcaaatagctgccgcatgccaccccccccaaa

SEQ ID NO: 128089 - DNA, 886 bp, Zea mays
  Clone ID: MRT4577_48290C.1
gacgcgcaagcacacaaattcaacaatgcagattattgaaagaaattgcgaggctcaaaagggtgctgggtaaggtctaacctaaatttttatgtggttttgtggactgtaggagaaaaacactcgataaactcaccgatcaacctgaaaatctgataccacttgatggagctggagtgcccgatctttcggtgagtggagataattccgatttggtggaagatgaccctcacgatccgactacgacgagcgaacccgaggcgccaatgcaatcgctgaaccaactcccaatggttaccggccttgctgatgcgagatcggcctgatcacgaagatcgtttcctgtgcgcaatcgaagaacgaacaagaaaaagatgcgagcaatctaatctattactcgagggtggagttctgaatacacgaagacagcgcagatttgcgcgtgttcgagagtagctaaggctaacgtaaaacaaaactcaggaaataaaggaggcgcagctcctgaataaatagagagggggcgcagcccctaagggcggccaaccctaggtcgtccattatgggccgcaattgggctggtcgtctattcttccgggccttcgttctttaacaacatgatgtagttcaattctcttgcacgggcccgagtcactggcccaggtggaaggggtggcgcctgggctggagaaggtgctgctggtgtagatgtgctcgtgttggtgttgatgtccgcatcatccacctcctatggccgtcacgatcttgtggagcgtgacaccctggccactagggcactcgtcctgcaagcaatcgaagaactagcaagaacaagtagaacaagtacagaattaccagatctaaatgtaggtttcaaaatcaaacc

SEQ ID NO: 128090 - DNA, 2899 bp, Zea mays
  unsure (1)..(2899): unsure at all n locations
  Clone ID: MRT4577_48291C.1
gcgaaaagttatgcccggtttaaggaaggtcccctcaagttatggttaaaaccgactgaaatgagacaaacgctttgtttcctttccctattttttgtttgttctctggttctatcctttctctttcgttttctttttttcttttctttttttgtttctattttttttttgacgtaaccgaaggagaaaaacaaggaagcggcgttgactcggtttgtggcgtgatcaaacgggagatggtggcggcgcgctagggtttgaattgtggaagaaagaaggatggtgaaaaaaaacacaatacaaccagcaacaaatgacgcgcaagcacacaaattaaacaatgcagattattgaaagaaagtgcgaggctcaaaagtgtgctgggataaggtctaacatgaatttttatgtggctttgtggactgtaggagaaaaaacactcgataaactcaccgatcaacctagaaatctgataccaattgatatagttgaggtgcccgatctttcggtgagtggagataattctgatttggcaaaagatgacccctgcggtccgactacgacgagcaagcctgaggcgccaatgcaatcgctaaaccaactccctgtggttaccgaccttgctgatgcgagatcggtctgatctcagaatggtgtcaacaagctcctgtaaaaatttcagattttttggacacccgagcgaaaagttatgcccggtttaaggaaggtacctcaagttatgttttcaaacgaccgggatgaaacaaccgtatcctttctccttcgttcttttttgtttctgttttttttgacgtaatcgaaggagaaaaacaagaaaacgatgttgactcggtttgtttttttttctgttttttttttgtaaccgaaggagaaaaacaaggaaacggtcgttgactcggtttgttttttctgttttttttgacgtaaccgaaggagaaaaacaagggaacgatgttgactcggtttgtggcgtgatcaaaggggagatggtggccgcgctagggtttgaatggtggaagaacacaatgcaaccagcaacaaatgacgcgaaagcacacaaattcaacaatgcagattattaaagaaagtgcgaggctcaaaaggttgctggaataaggtctaacctgaattttatgtggttttgtggactgtagaaaaaaaaactcgataaactcaccgatcaacctagaaatctgataccaattgatgtagctaaggtgcccgatctttcggcgagaggagataattccgatttggcggaagatgacccttgcgatctgactacgacgagcaagcccgaggcgccaatgcaatcgctgaaccaactccctgtggttaccgaccatgctgatgcgaaatcggtctgatcacgaagatcgtttcctgtgcgcaatcaaagaacgaacaagaaaaagatgcgagcaatctattattctcgagggtggagttctaatacacgaagacagcgcagatttgcgcgtgttcaaaagtagctaaggctaacgtaaaacaaaactcgaaaaaacaaaggaggcgcagctcctggataaatagagagggggcgcagcccctaggggcggccaaccctaggtcgtccattatgggccgcaattgggctggtcgtctattcttccgggccttcgttctttaacaacatgatgtagttcaattctcttgcatgggcccgagtcactggcccaggtggaaggggtggcgcctgggctggagaaggtgctgctggtgtagatgtgctcgtgttggtgttgatgtccgcatcaatcctccccttcttgtaatagagtcgtcctcgactctagcgtgtgctcctcaaccaagtatatctttaaatttgatgatgtgcttgcttggttggaaatgttggaaatatcattacttggtccccaatcaacttctttgttcctcaatgtctttgtagcaggagccattaacatggccatatctgtacggtttatgttctcatcagttccggtggcaaaacctcgtgctttgtatgcaccccgacaaccgttttcagaatgggtgacgtgcggcaacgaaattgcgcgaaaccaccccaaacatgagttttggaactaaagtagtggattgggcatgttcgttgagaaaaacgaagaaatggttccggtggcaaaaactcgtactttgtatgcacccgacacccgttttcggaatgggtgacgtgcgacaacgaaattgtgcgaaaccacccctaacatgagttttggacctaaagtagtggattgggcatgttcgttacgaaaaacgaagaaatggtttcggtggcaaaaactcgtgcttttatgcaccccgacacccgttttcggaatgggtgacgtgcgacaacgaaattgcgcgaaaccaccccaaacatgagttttggacctaaagtagtggattgggcatgttcgttgcgaaaaacgaagaaatggtttcggtggcaaaaactcgtgcttttatgcactcgacacccgttttcggaatgggtgacgtgcggaaacgaaattgcgcgaaaccaccccaaacatgagttttggacctaaagtattggattgtgatgcggacattaacaccaacacgagcacatctacactagcagcaccttctccagcctaggcgccaccccttccacctgggccagtgactcgggcccgtgcaagagaattgaactacatcatgttgttaaagaacgaaggcccggaagaatagacgaccagnccaattgcggnccataatggacgacctagggttggncgcccctaggggctgngccccctttttatttattcaggagctgngcctnctttatttcctgagttttgttttacgttagccttagttacttttgaacacgcgcaaa

SEQ ID NO: 128091 - DNA, 585 bp, Zea mays
  Clone ID: MRT4577_48292C.1
gtctttcgctacagtacactttaccacttctatttgctccaccagctcactattatcactctttacatctcaatcatgtatgcctctatcatcttttatgctctcgtcgccctcaacggcgtcatggcgtctccggtccaagggcccgaggttgagcctcgagccattgaacgccgtgtgcctagtatgggagacatcccgtttccgaagttcccggcccgcaacaagaacagcaacaagatgggcaaaggcagcagcgactgtagtggctcgggtacgaacacccaggtaaacgcctgctctgccggtagcccatactgttgcagcagcgacggcaacggcggccaaacttgttccaacaccactgcttgtacggaaacgattatttgctgcaacaacaacaacggcttccaaatttgcattggcgacctcgacttcaacgtaccgatcaccatcaatgtctatgagtaaaagactcgttcgagggaaggacgctgttgaagtggcgagtggccgaggggccgcaaaaatgtataggtacaccagacagccaacttagatccgtaatacatggacgtacctatg

SEQ ID NO: 128092 - DNA, 294 bp, Zea mays
  Clone ID: MRT4577_48293C.1
ggcgcatacatgcctgtacaggtcatcggctgtcttgatgcacgctgctgacgtgggctcttgtcttagttctgaaccaccgacccacttccttccttgacaaacattgggagatcaacgaggggacgctcgctgggatctatttgcgtggaccagatatgtgtcagcctttacatgtgtcgagaggatcaaatgacatagtgcatcaatcttccataacattatactctctaaacccatcaatgattactggaactgttcctgctcttacacgaactacagcagcatcttgtt

SEQ ID NO: 128093 - DNA, 229 bp, Zea mays
  Clone ID: MRT4577_48294C.1
ggggcaaaacatttacatctgggaacttgaaacttcagaccagaatttcattaaaaatgaaccggtccagtaactatgtcgaggccaaattagctttctaaaatacactaaaaagggttaaaaaaaaatttcataaccaaagaacgggggaacccaaccattggggaactcagggatcaacagggcacaaccccccttaaagcggggctaaattccaaaacccggcccc

SEQ ID NO: 128094 - DNA, 408 bp, Zea mays
  Clone ID: MRT4577_48295C.1
taacaacgatcatttttatatagatgaacctgctgactctgatcggggggatcctgatcaatgtaaggaagtccacagcattatgctaccgaccaacatgattattaccatggacatgacgctaaccccattacccatcacactacatacatacaccttgctctagcacacaccacagactcaaagcataggacctcaagatctgtcaataactcctaatctgacgatcgaacgaaggatacaacgctctcaaccgacatctcacttcttaccaatcgcgccatcaatcatccaccatctcacgcatcatacggcaagacctccgatacagcaacaaaccaacacagaagtctacaaaatctgtggtgtacgacagtgcacttgatgcagacagacattatatcgaca

SEQ ID NO: 128095 - DNA, 394 bp, Zea mays
  Clone ID: MRT4577_48296C.1
atcaacctattcttgcctaccagcgagcaacatataaagtaaaatccattaagcatacacatagagcaacaatggcgaccaagatattttccctccttatgctccttgctctttctacatgtggtgctaacgcgacaattctccctactcgctacaagctgcctatagcttcccttcttcccccataccttccatcaattatagcttcagtatgggaaaacccagctcttcaaccatataggcctcaacaagcaatcgcagcgagcaacatacctttatcgcccttgttgtataagacaatcaccatgccctatctctggagcaggataggtaccaaccatcaggggcgcaaccagcttgcagcaacttcgtgctaacctgtgatcaaaccaag

SEQ ID NO: 128096 - DNA, 542 bp, Zea mays
  Clone ID: MRT4577_48297C.1
atgttgccattgcattgccgtgaatcgtagtcgtagatcgactacacctaccgattttggatttctcgacggcgcggctgttctctaccttctccttgagcagctcctcgtcctttgcctgcctgctggcatctccggcgccggcctcggtgacgacgacactgccctccgccttcttctgctcggcaggtctggctgcggccttccggagctcggcctccgttctgcccctggcgtctctgacgacgctggacttgtcgacgacctcctcgaccttgtcggtgtcgaggccgaggttgtcgagcatccggtagaggaggttgaagcggtcctccgagtccggcgggccgacgcacacccacaggcggagcgcgaagttgtccttggccttgtcgtgcacgaacaccttctgcgccagcgccgtcttgccgctgccgtggatgcccgcgatgcccgcggcccggaacatccgcgcccccgagccgtcggcggcggccacgagggcgtcgatcacctcgccggcctccttgtcccacccgtag

SEQ ID NO: 128097 - DNA, 230 bp, Zea mays
  Clone ID: MRT4577_48298C.1
ctccacttcgatcagcagctgctcgcacccgtgctgatgttgaagcctgccgattcgtcgtcgacgttcgtggtctgcgctgttcgaggttcggttgcttcagcgcttcccatgccgaccgctctggtgactgctcgggcaatgtggcctccgccggttccaggcatctcgcgctattagcaccgctgctttcgccggatgacctatcactgtcgctgtcgggatctgac

SEQ ID NO: 128098 - DNA, 1307 bp, Zea mays
  Clone ID: MRT4577_48299C.1
cattgggtacctcgaggccggccggggctaacgtgtctagcggaggagaggctgcctgctaagccgcagccgcctcgccctctcggacggtcggaactcggtcgacgacgagacgacggtccctctcgcggttgtctcctagctgcctggcttgcaagcaacttgccagctgcccagccgtgtctccagttccacttccacgcggctcctggcttgcaagcactggcagtagcaggtgcagccgtgcagtgcggtgaccgccgaccggtgaggcactgaggccgtgccgtactgcggaggactagtagcagctgtgcagctgtgcggctgtgtctccacgctcacatccacaggcccaacaaggcaacaaccaccacctcctccggcggcctctcggcggcagcaaagaccttagggagggatgggccgcaggaagagagagacggacgacagtcatggaagggtcaaaccattagtggagctggaaggaagcgaagatccggatcagattcagatgggggatctggagatcgtgtgtggcggtgacagtgatccgctgatgcaagaaacagaacatctcgacccgatgaggatcgtcggcgatgagttggatgaaggccaggttcgatctgcctaccttgtggcatgccactgggattggtccaggaattccatgccctactccgtgtacaagatggacgtcgccacttcctttccttcgcgggtgaagcggaaacgcctgcaccgggttacccgtctggccaccgttgctggcggtatgaccttcacgtccctgcggtcagtgcaccgcgcgtggatcattggggtcgggggtgatccgggtgacaccgtcattttcgacaccaagacgaagaaggttattcacgggccgactctcaattctacaaagtggtgccctgtcttgacaacagtgggggacaagatttatgccctgtgcaagactccctgctggttcacagaccccgattttccaccctggttcgagttggactcttcatcccaagaagctcgaattgtttccaaaggaggcacatttaaacctgagaacatatcagacagagaacctttcatccctggaggttccagaggaaacattgttggctgtgaagccggagattgcagtccacagccattgggagcaggccttcaagatttcctgttcatcccatgggttcaatcaatctgcttccgtccttctcgtataagtcacacttatacctttattttagaaatatgttccttaagaaccttgtagctgcaaatataaatgtcatgaacttttcttt

SEQ ID NO: 128099 - DNA, 390 bp, Zea mays
  Clone ID: MRT4577_4829C.1
ccaacgcgtccgccaacgcgtccgccaacgcttccggtgcaattcaaggaaccttataggggcgccccggcaattattgggagagcgcccgctctcggtatagggaaggccctattcaagggacccacccaaaccttgcgatcttaacctttccaaggatgccccgaacccatctggtccaatccttccttccgcctaacccgttcacaaggttgactacaacaaatttaaggacgccaacgccacccttttctgatctccctatggccactgcgggtgagtgcctctagttagccggttacccttttcttgcaatctccgagttttggagaacgcaaaactggcagggcgcgacggttgacgcaatgtacgtggttagccggcttccaa

SEQ ID NO: 128100 - DNA, 297 bp, Zea mays
  Clone ID: MRT4577_482C.1
acttgattggtttggtagaggccgtgacaatttccggttgtttgaacagcctttggtacctgtagtaaatgccaaagatggtaaatggttaatcagcaaatcacttttccctgttggtaaacctggtggtcatggtgctatttggaaacttgcatatgatagaagtgtactccaatggttacaaaattgtggcaggaaaggtgcaactgtacgccaagtcagcaatgtggttgctgcaactgatttgaccatgatggcattggcaggaataggccttcgatgcaacaagaaattagg

SEQ ID NO: 128101 - DNA, 1910 bp, Zea mays
  Clone ID: MRT4577_48300C.1
agcccacggcccaaggtgaacgcacaaaccccgaactccctatccgccgggccggggcccctgcccagctgctgcctgctaagccgcagccgcctcgccctctcggacggtcggaactcggtcgacgacgagacgacggtccctctcgcggttgtctcctagctgcctggcttgcaagcaacttgccagctgcccagctgtgtctccagttccacttccacgcggctagctcctgcatgggtcctggcttgcaagcactggcagtagcaggtgcagccgtgcagtgcggtgaccgccgaccggtgaggcactgaggccgtgccgtactgcggaggactagtagcagctgtgcagctgtgcggctgtgcctccacgctcacatccacaggcccaacaaggcaacaaccaccacctcctccggcggcctctcggcggcagcaaagaccttagggagggatgggccgcaggaagagagagacggacgacagtcatggaagggtcaaaccattagtggagctggaaggaagcgaagatccggatcagattcagatgggggatctggagatcgtgtgtggcggtgacagtgatccgctgatgcaagaaacagaacatctcgacccgatgaggatcgtcggcgatgagttggatgaaggccaggttcgatctgcctaccttgtggcatgccactgggattggtccaggaattccatgccctactccgtgtacaagatggacgtcgccacttcctttccttcgcgggtgaagcggaaacgcctgcaccgagttacccgtctggccaccgttgctggcggtatgaccttcacgtccctgcggtcagtgcaccgcgcgtggatcattggggtcgggggtgatccgggtgacaccgtcatcttcgacaccaagacgaagaaggttattcacgggccgactctcaattctacaaagtggtgccctgtcttgacaacagtgggggacaagatttatgccctgtgcaagactccctgctggttcacagaccccgatttcccaccctggttcgaggtactcgatctttccagagccaaagttgtcactgttgacgaccgctcccacctggagggatgctcctggattgagctaccgcatccaccttgctttccttggaagattaccccatttggttataccatgctgccagttgtactcatcacgtcttatgtggtggtcgacacctacatactggtatcattcaatcaactatggggcacatatgcatttgacaccaattcagtcgagtggcacaaagttgacaccaaggagctgccattcgttggccgcgccaccccacatggctctttattccttggcttgtcagagggcaatggatccatcaatgcttattgtatcagtgtcactactactgataatgatcgtgctcctaacttatccatcactatgctcccgttgaaatacatggataatgaagttgatgcagggccctgcttcttttccttggaggatggatgtttttgttcattcagtttttcgcttgataaatgcagttggactcttcatcccaagaagctcgaattgtttccaaaggaggcacatttaaacctgagaacatatcagacagagaacctttcatccctggaggttccagaggaaacattgttggctgtgaagccggagattgcagtccacagccattgggagcaggccttcaagatttcctgttcatcccatgggttcaatcaatctgcttccgtccttctcgtataagtcacacttatacctttattttagaaatatgttccttaagaaccttgtagctgcaaatataaatgtcatgaacttttctttataaaaaaaaaaaaaaaaagcggccctcgtttcagtggatattttccttgaactgggtaatgcgcgct

SEQ ID NO: 128102 - DNA, 1168 bp, Zea mays
  Clone ID: MRT4577_48301C.1
cattgggtacctcgaggccggccggggcccagatcccgccgacattctccaaaccaaccgtggcggcgatgaggaaggcgggggtgacctccgcctccagcggtggaggagaaggatggccgtgcggtggtggcctcaacctcggtgtgaagctgaacgtgctgctactgctgttggtggtggccaccaatctggtgtccctgtaccacctctccctccgcgccgccaccgtgccgcccgtccttctccagcagcaacgtgacggcgacaaggatctggtcctgatccggcagctggaagccatccgcgcgggcgtgtcgcagctgaaccacctccgctcgtcgtcccctcccccgccgcttccgccggcggagcttgtcctctactcccgcctcgcccccgtcgcatccgcctgctccgcgcacccggagctcctccaccgctacatgtcctacactccctacgcgctctgccccgacgacgccctctccatcgccgagcccctcctcctccgcggatgccatccgctcccgcgtcgcaggtgcttctcccccaccgcatccgcatcagcatccaaactcctccccaccgaccccttctccccgcttcccgacgccgccgtccgatggcccaaggaggcgaagtgcaaatcgttctcctgcctgccgccgtcgctgggcttcgacgtggcgcgcacggaggccgcacggttcctccgcgcgcgcgggcccttagacctgacggccccgcagctactgcggctggcctcgctgagccgggcagggcccatccggcttgggctcgacatcggcggcggcacgggcacgctggcggcgcggctcaagaagctcgtcaacgccacggtgctgacgacaaccatgaatctgggcgctccctactcggaggcggcggcggcacgcggggtggtgccgctacacgtgccgtcagttaagcagtgaacatcggggaaatgacacggaattcatccatcagccgaggatcttcttcgaagcaaatcagtgctagtgcgaatgtgcgatgcctgcagactcgcagcaatcagcttgtgttatccgactcgtagaatgtctgctgctctgcgtaaagtgttattaaaactacgtttaaacgatgttcataactctaattcgaggttgaaaccacgttt

SEQ ID NO: 128103 - DNA, 1328 bp, Zea mays
  unsure (1)..(1328): unsure at all n locations
  Clone ID: MRT4577_48302C.1
atcccgccngacattctccaaaccaaccgtggcggcgatgaggaaggcgggggtgacctccgcctccagcggtggaggagaaggatggccgtgcggtggtggcctcaacctcggtgtgaagctgaacgtgctgctactgctgttggtggtggccaccaatctggtgtccctgtaccacctctccctccgccgcatcagcatccaaactcctccccaccgaccccttctccccgcttcccgacgccgccgtccgatggcccaaggaggcgaagtgcaaatcgttctcctgcctgccgccgtcgctgggcttcgacgtggcgcgcacggaggccgcacggttcctccgcgcgcgcgggcccttagacctgacggccccgcagctactgcggctggcctcgctgagccgggcagggcccatccggcttgggctcgacatcggcggcggcacgggcacgctggcggcgcggctcaagaagctcgtcaacgccacggtgctgacgacaaccatgaatctgggcgctccctactcggaggcggcggcggcacgcggggtggtgccgctgcacgtgccgctgcagcagcggttcccggtgggggatgggaccatggacgtggtgcgggcggggcacgccgtgaaccgttggatcccggaggtggcgctggagttcctgtggtacgacgccgaccgtgtgctgcgcccgggcgggcttctctgggtggaccacttctggtgccggaggagcgacctggagggcgtctacgccgccatgctgcggaggcttggctacaagaccatcaagtgggtcgccgccgacaagagtgttgccatcggcggcaacagcagcaaggacgaggtctacctcaccgcgctgctgcagaagtccttcagttaggcagtgaacatcggggaaatgacacggaattcatccatcagccgaagaaggcgaagcaatacagtgctagtgcgattccggcagactcgcagcaatcagcttgtgttatcccactctagaatttctgctgcaacgtgcgtatgcgtgcaacaatgtaagcaaatggaacttaggctactctaacagatgcctcttcgcattctctatcttatcctctattctctgcttctcttctcaacaatggcttctacagttctacgttctctatcttatcctctattctctgcaaataatatcaacaatgtcttctacagttctacgttctctatttatttttcacactctactggagataatcttaagttccatgtaatcttatgtggccaaaatccaatgattaagaaaaaagtaatcctataccaatatatgaaattg

SEQ ID NO: 128104 - DNA, 906 bp, Zea mays
  Clone ID: MRT4577_48303C.1
cccacgcgtccgtttagaaactatgacagcaaatggatttgaaattgatgttgtcacatatggaacactcattaatggtctatgcaaggctggtaggactcaggttgctttgaagcttttaagaggcatgcgaattaaagggattagacctactccaaaagcttacaacccggtgatacagtctttgtttagacggaataatttaagagatgctcttagtcttttcagggagatgactgaggtgggtgagcctcctgatgccctcacatataagattgttttccgtggtctgtgtcgtggtggagggcctatcaaagaagcttttgatttcttggtggagatggtgaataagggtttcatgcctgagttttcatcttttcgaatgctagctgaaggtctattgaatctgggcatggatgattatcttattagtgctattgaactaattatagagaaggccaaattcagagaatctgatgtttttgctataagaggatatctcaagatccgcaagtattatgatgcattagcaactttcggccgtctcctagagataaacaaccctcagtggacgtatcgttgatacagcatgcctgagaatgtatcatgtaaatgatggagcagatgaaaaattccgcggttgctagattggcttaaacttttgcagcagtggtgtaatagatgttaatctcattgctctgtaggattgaagtcagctgaatttggaatgctctcttgcttttggagagctgctcatgtgccactgtgaatcgtcttttgacgctcctgtatatcttgggtagctagctaatgctcatatttttggtgctgctctttcaaatgatgctacatttatcattacttctcttttaataattagggagtctttaggattttttgttttcc

SEQ ID NO: 128105 - DNA, 337 bp, Zea mays
  Clone ID: MRT4577_48304C.1
ggtgccggaatccgggtcgcgcacgcgtccgaaaaaaaaaaaaaaaaaaaaaaaaaaggggtaaagaagcaaactaactaacaaaatgcatgctaaagtaataaatatattatagggcaaacttaatttattgggctggctgtcttttataaactgggcgactgtgaacacccttgcgggtcccaactttttctttctttctgcacttaagggggggggcccgccctcctaataacgggggggggcgtaataatcacctttcctaaccgaatcgcactttgaatgggtaatgggaccttccttggagatgggaattaacctcgggggggcgtattgg

SEQ ID NO: 128106 - DNA, 469 bp, Zea mays
  Clone ID: MRT4577_48305C.1
gcccacaaacatgaccagcataaaggtggccagcaacaaagagggggggtcccaaaataacctcctgggtggagtgaaaagacatccacactggtccaacacaaaacaggtgctgccgggggaaaccaaacacagcaagacttaactacaggtgtacaccctaacatgcaagggaagccctctacggtaggccccacatcctaaaacaaggggaacttggtaacggccttgatcccctggaaaactgggggattggcgacctccccggagaggactacgcgcacggacgatttgatttcacagaaaggaaggggggggtccttgagctacccccttaccttggagggcttacacgacaccttatctaaaatgcccttgatgaaggagttcatgagggccatggccaaaaaggaaatgccaatgaccaaatccacctctttaatcacctttaagaggtaaattttggaag

SEQ ID NO: 128107 - DNA, 377 bp, Zea mays
  Clone ID: MRT4577_48306C.1
gttagacggtccgggctgcatgtggcccagagtatatgattgggacccttgcacttattgaacaccaattgatgtaagaatgtaccacttacatttcgcttgcattgacaagagtgtggaccttgagccgtacataactgcgcgtgcccatggaactgttgttacagctccgttgcgctagccacgctctatttttagagactgtggcggctgtgctgtgtatggtagacaacattatgtttcagctactctagattctatgctttttgcacatcgattactatatcctgactctgctttaactaagcgagaacgagcgcatgcacctcatgacgttactgaaggttacgcagacgctctagtggcagcgtgcgctc

SEQ ID NO: 128108 - DNA, 585 bp, Zea mays
  Clone ID: MRT4577_48307C.1
ggcgattgggatcctcgaggccggccgggattccccttgtgttatccggaggcctccccgagtgaccaaacccctaccatcgaagagcgcgcccacaagagtttagggaggagcatagccaccgggatccagcaacatccccaacgctccgaccacaaagatcacctttggtgaatcgcggttgcacgatgggtgtcgagagaagggaattgggggccatgagtgttcgtcgcttgttgaatcactcgtcagagccctccaccgcgcgaaacctcaaactcgccatggagagagggtctcagttgcacgactacaggcgagctagtaaccgaggaacccggtgctcagcaggtggaaaactctaagcaagagctcattgaaggcgaagagcaggtaccaccggaggaggactactatgacgagttcgacgacgtctaggtgtcatctcctcgtcagcttgatggcaccatggaataatattattagttcattctattcatcatcagatatattgtaagacattttcgttatgtaataaagtttgtggcattcgtctccaaaaaaaaaaaaaaaaaatttgcggcc

SEQ ID NO: 128109 - DNA, 593 bp, Zea mays
  unsure (1)..(593): unsure at all n locations
  Clone ID: MRT4577_48308C.1
actnanaacgttactggattttcatttaccacccagaaaggacaccctgcggggcggtgttttttaaaacatacatgtgcgttaaccgtgtgtgacagcatacatgtaagcgagcgaggtcttgttcctgttgtaggtgaggggtgtatgtcctggggtggcacatcacccctttttgacaccatgaccaccactactaccaccaccatttgacaagagagtggttcttctgtctctccccccatccatattagagagagaaagtgggggtgttaaaaagagggatttttctctctgtttggtgaccccccaaaaaatttttttttttgtaacaccccccccggccacccccacaaaaaagggggggggtatttttttctttcccccaaaaaaaaaaagaaagccccccctcttctcctctcttttttttttttttcccccccccctttttaaaaacggggggggattttttttaaaaagagcccccccccccccccttttttgtgggtgtgaaaaaaaaaaaaaaagggggggccccccccggggggaaaatacttctccccccccccccttttttttgtgcccctcccccc

SEQ ID NO: 128110 - DNA, 632 bp, Zea mays
  Clone ID: MRT4577_48309C.1
ggcaggccgccctcgctcgctcgcccctttttatcctcgcgctccgcctcttcctgtccccacccacctcagccgccaccacccaccactgcttcaactcctcgctccttcggttttccctcccgcagcatctcctaccagccttctttgcccactccctgcgccgcttctccggcctcacccccactctgctctccttcaacctcctccttaagtgcatctgttcctctggttccaaggagcagaggcctgtatcttccaattgcgttgcaaatcctccacgatgtcattccggcttggaatcttacgccagataagttcacctactccactatcgtgtcggccctggctgatgcagggcgtgtggacgacgcgttggcgctggttcatgaaatggtggttgatggcattttggcggcagaggcatttaacccggtgctcaaggcgatgctgcgtacaggtgatgtgaatgaggcggccaagctgtttcggtttatgcagctgaagggttgcacactgacggaatcaacatacaatgtgctgctgcatggtttattattgtgtgggcgggcgagggacgcagcgggcatgatgagaagaatggagagtgaggggatgccgccagggttgat

SEQ ID NO: 128111 - DNA, 1128 bp, Zea mays
  Clone ID: MRT4577_4830C.1
gcacgagcggcacgagcgtaaacaaacagccactgattgctgctcgacggtctcccgtgatctgataataacaaaacctgtactcctgtaggctgtagcccaacgaggaggaatcaaattggacaaccctgtcgccctctcggtctccctcgagcttttcttgtgcgcagccgcagccgcagccgctgcttttcgttcgtcttcatcctacgcgagggcgaaacccacaaaccctctccctcccgtactccggccgacacatccaggggcgatgacgctgggtagctccggcgccccatcattggccctcacaatactcggatcgagcgtcgtcgttcctcgaaacttcaggctattagaggagctcgagcgtggagagaagggcattggtgatgggacagtgagctatggaatggatgatgccgatgacatctacatgcggtcatggactggtaccatcattggccctcacaatactgtacatgagggtcgcatctaccagctgaagttgttttgtgacaaggactatccggagaagccaccatctgtcagattccactcaagaatcaacatgacatgcgttaatcacgagacaggaatggttgatccaaggaagtttggtttgctagcgaactggcagcgggactacacgatggagaacatcctcacccagctcaagaaagagatggctgcctcgcagaatcgaaagttagtgcagcctccagaagggacattcttctaacgaagtgttcacttggcccgtcatgggatccaacagtaattgaaagttttatgggctaaaaaacagcgtctacatctggtgcccctgcctgtctttgtgattttttatgacttttatgttcttgtatcgtgaaccgcagtgaacaacggttgttgcaagttccagggatatctttggaagtggtaaacaaatgcgtcttatttctatgtaatattagaccccgtgcgtgtgtggtttcgaggtacagctccctatcaactgttgccgtgcattccgtcgatttgcttgacgtctttcgtccacatgtgcccagcagtattctctatgctcttgctttcctgtcatacttccaactggcactcgtaaaactaatattacaatttcat

SEQ ID NO: 128112 - DNA, 338 bp, Zea mays
  Clone ID: MRT4577_48310C.1
gcctttcttcccttcattgcaccagagccttggaacaggacctcttaaaaacgaccggggggacccaccccgcaagagtttctaatgatatgggaatgtaccaattatgcatcgatgaccgagataaacctgtggctcgtgaagaagacaccggcgagcttacgccaataacaccttaatgtcagtgcctagacctggaaccgctctggactgatcagctaatttctccaagcatttgctgtactgcgtggtgaaccttctaacggccacaaggagaccttcgtacctaggctgtctgacactctgacccggatgtgcgccacacataaaaggtttgg

SEQ ID NO: 128113 - DNA, 295 bp, Zea mays
  Clone ID: MRT4577_48311C.1
gtacaagttggcggtacccttggtagagacgcaacgcgtgtgaatattactgagagatgatgagatggcagacaactccacctcgatcgggtctatcatgcaaagccgctcgggaaggatacccctttaacaaacagccctcgtacatgagcgggtcaaaaatataatggcggctggacatgtctgacatctcaagtgttacagacatgctcttatgctccagaacttcccgggtggagcgaacgatctgcatcgacagtaaacttgctcaccctccttttgggctattcgctgt

SEQ ID NO: 128114 - DNA, 380 bp, Zea mays
  Clone ID: MRT4577_48312C.1
tgaactggtttatgctaccgtcatatttttagcgttagcttatgcccgaggtcgtgggtgcccgcgcgcggtatgacgagcgccaccgccatcgtcgcctggcatggacttgtgctgcgtactagcctcccccttcccaacccgacagggcgagccaccacgtcggtctcactttccgcgcgccccgacactccaacccgtctaatgattgacccgtctagcccgatgccgcggactcctggtcggagcccagtcatgctcatctagagctctacctaggcattcgttgcgggtggcattagcgaccaaaaactgctggtcgagaacaaggcgtacccgcaggcggtggtgtgctacactggaccctgacgcgcaccctg

SEQ ID NO: 128115 - DNA, 662 bp, Zea mays
  unsure (1)..(662): unsure at all n locations
  Clone ID: MRT4577_48313C.1
cactcctaagggcgattgggttcctcgaggccggccgggccgttctcgcacccgccggcaccgcccaagggaacatccacacccacttccatcagcacctcgacaactgccgggacaaccaccaaatcaacgacgataaaagactggctgccacaggaggcgactttctcggcgcctatgccaccgaccgcgtgagccgccaagtaccccatcaatctgtgggacgtacaaaacctccgcacaagaaaaaatcgtcctcttgcatctcaagacagactcgtcagagattgcagaggacatgcgaactgagtacacactcaccatgtcgcctacctacagaactgctcgtgaagggaggaacttacgctcatcaccgacagtcatgagtagtaaatgccaggagtacttcactcagcgctaatacttgtgcgacccctagatatgtacaacacctgcatgggaaatgacagcantcctgctgaacaatgagtacatctctgtttccagcatctcaatagtccgagcatgaacctcttgcattatgaactgcctcgatcgtcatctcagtataaaacattgaaggctggtttgtcagcttcgagaggccttcttaagatgatgctatatttgtgtctatcacaaaatgagatgagaaagcggcc

SEQ ID NO: 128116 - DNA, 431 bp, Zea mays
  Clone ID: MRT4577_48314C.1
gtccgggatttaggaccacaacgaccgcatcgagaaaggcgacgagcccatccgatcgctctccgccgaacgccgtgcatttttgctctgttcgttgtatcgtgtgcaacgtaccccgcgccatctagatcggtctcgatcacacatgcatatgatgctatgcaggcattatataatgttagcagatgatgatctataatgttagctgatgatggccggttttccatctgcatgcatgcaggcagatgacgatcgagcggatcggatgggcagacgccaccaaccccgcccgcccgacgtgaaacacggtgtcgattagcagggccgggtgggtggttgttgtcccgttcgcggggcaaccaacagcagcgggcagcggcgcaaaggatcccatatcctatcctgacggacgccgcccatatatgtcatgt

SEQ ID NO: 128117 - DNA, 260 bp, Zea mays
  Clone ID: MRT4577_48315C.1
cccacgcgtccgcccacgcgtccgcccattcgttcgttgacgcatggacggacgcgtgggggttttcgagatcttactcttaaatagatgcaataattctacatcggactatgaaataataatagccagtactataattattaattataactccatatattaaacatcaaaaaacataaaacaataatcctattatgttatccgatgctaatgaatccagagctaaagaataggttcagcactctaaattcttaaaagat

SEQ ID NO: 128118 - DNA, 424 bp, Zea mays
  Clone ID: MRT4577_48316C.1
aggggagaatggttaatggtttagtcctctagcagaacaagtaacaaaccccaccccctcataaaattttaacagactaatgcggccgtggaggaaaaaaatccccgcagaacaaggagtttataacgggcagccggtaggaatgaaagaaagagaaaaaaagctttttagcgcccctcggggggaacaaaaacgccttgctccaggggcaattgcaggtgcagtgctttttggacaagacgccattctgccctgcctagtgggggcactggccccccttctgaatgggggacgtcctgaacccggtggcgggggaaaggcccacgcctggggaacaaccggaggaagggggcttggtggtcataattatcccttcagcgcgacttaggtcttggaccaccacgccatatttttgtttgggggg

SEQ ID NO: 128119 - DNA, 200 bp, Zea mays
  Clone ID: MRT4577_48317C.1
gacctcgacttaatctctatgactctaacaccattgctatgactaactctaatcacactcatgagatgatcaaatcagatgcgcccgaacacttacatcctgattcatttaaggctatcaacgactaacgcattcccatgtactacagccccattattcatgtccagctgttcatccacttctctgtataatagcccaac

SEQ ID NO: 128120 - DNA, 182 bp, Zea mays
  Clone ID: MRT4577_48318C.1
tacgtcgcgatcgggaggcgtgacggtgaagctgcgggaatgtcgggctcggagctgagtctctaggatgcgcgaggtcggcgcgcgactgagtggaggctcgtgcgacgccggggaatgtaatgtcgcggaggcggtgagctaccgaggcgtgaccaggctttgccctgataggtggagtg

SEQ ID NO: 128121 - DNA, 148 bp, Zea mays
  Clone ID: MRT4577_48319C.1
aaatacttctttttttttttttatgactaggaacatactgcacgtacaaggtcagtagggtctcaatttacatatctactatacatagccctgcatagtctataaacgctaatatgcttaataagcatgaagagctttgccaaaatac

SEQ ID NO: 128122 - DNA, 380 bp, Zea mays
  Clone ID: MRT4577_4831C.1
cggctcttcttctccaccggcaccagaccaccacctactgtcaccgcgcggacccaaccaaccacaccgtagcggcagaatggcgggcaacggcgccatcgaggagagcgacccgatgaactggggcgcggaggcggcggagctggccgggagccacctggacgaggtgaagcgcatggtggcgcacgcccggcagcccgtggagaagatcgagggctccacccttcgcgtcggtcaggtggccgccgttgtcttcggcaaggactcgtccggcgtcatcgtcaagctcgaccaggaggaccgcccgcgggtcaaggtcaggagcgagcggatcctggactgcatcgaccacggcggacacatttacggcgtcaccaccg

SEQ ID NO: 128123 - DNA, 497 bp, Zea mays
  Clone ID: MRT4577_48320C.1
cccgtctacgacttcgtctgcttcctcccccactgggaacgaagggtaccggacgagccccaccctttctccttcttcctcactctccccgtcgcaaagctccgtgctttatgctctagcaaccctccttcagtttactagtcgcgatgctgtcactctcgccgagcaatgcttgctgccacggctttagtcggccgcactcgccggtcgatgttgtcatgcaggaatgtctgtggggccaggagccagtgggttccttcggttgagatcaactctaccttgcctctctgaattgcagaccaaggatgttcgtgttgatttaaccggatttctggtcttgctgttccgttttcagacgcagccaccaattgttcgctgaaatgcctagcttgggatgaaaatgatattacctgtagtttccacgttaccgtgcaagtatagctctgtagatttcaagggtcatacttcgggacttcttgctcagttttgtatcagaa

SEQ ID NO: 128124 - DNA, 1151 bp, Zea mays
  unsure (1)..(1151): unsure at all n locations
  Clone ID: MRT4577_48322C.1
cagcaacagccgggcccgggcatgatgatgagaccgccgaacatgatgggcggcgccggtttccccggtggtggcatggggccgggcatgggccagatgggcggcgcgccgatggnccaccctcaccacccgcacccgcaccagcacatgggtccgggtggcaatggcatgcagatgcagcctggcggtggcggtggcggtggcggtggcggtgccgtgcatggcatgccagccggcgccatgccgggacatgctgctgggttctaccaaggcggtggtggtgcagccggcggcggcatgccgtccgggccagagatgctgcaggcggccgggaaccccatggccatggcggcgcagcagcagtacatggcgatgatgcagcaacagcagatgatgaatggtcacggcgccggcgggtacccggcgatgggttacgggtacggccggccggcgatgcagtacccaccgccgccgccgtactactaccacccgatgccgcagcggcacccgcacgacaacatgttcagcgacgagaaccccaacagctgcacggtgatgtgatcatgtccctgtcatgcatgccaggaggcaaaggtcgctgcggcctgtcgaagctttttctcctgcctgctattcttccggaggagggagaagaccgatcatgggtcagcgtcaccaccatggttggaacaaagtccccggattggattggatctcagtatacatgcgacatgcatgagaagccccccctaccccttttttctccttttttttttctttttcactactactactagtatttctcttttttttctagcttgtttttcacctttactttctttggacaaagagggggaaaaagaagcaacttccttgaaggcgaaggtaggtatagtagtaattatcaatagtggtgggcataagacatgatggtggtggtggtggttgttcatggggtttatagtaaggagtagctcaagaaggtggctctcatggctccccccttcttgttgctccacaatgtgatgatggtatggaggtggcatggtagaaaagcttggtgaatctcaatgtgctctcgagtgccgtgtctgtccctagtggaatggaatgtctctggtgtccccccgttcaaaaaaaaaaaaaaaaaa

SEQ ID NO: 128125 - DNA, 899 bp, Zea mays
  Clone ID: MRT4577_48323C.1
gccagccggcgccatgccgggacctgctgctgggttctaccaaggtggcggtggtgcagccggcggcggcatgccgtccgggccagagatgctgcaggcggccgggaaccccatggccatggcggcgcagcagcagcagtacatggcgatgatgcagcaacagcagatgatgaatggtcacggcgccggcggcgccggcgggtacccggcgatggggtacgggtacggccggccggcgatgcagtacccgccgccgccgccgtactactaccacccgatgccgcagcggcacccgcacgacaacatgttcagcgacgagaaccccaacagctgcacggtgatgtgatcatgtccctgtcatgcatgcgaggaggcaaaggtcgctgcggcctgtcgaagctttttctcctgctgcctgctattcttccggaggagggagagaccgatcatgggtcagcgtcaccatggttggaacaaagtccccggattggattggattggatctcagtatacatgagacatgcatgagaagcccccccctaccccttttttcttctttttttttctttttcactactactactagtatttctctttttttctagcttgtttttcacctttactttctttggacaaagagggggaaaaagaagcaacttccttgaaggcgaaggtaggtatagtagtaattatcaatagtggtgggcataagacatgatggtggtggtggttcatggggtttatagtaaggagtagctcaagaagggtggctctcatggctccccccttcttgttgctccacaatgtgatgatggtatggaggtggcatggtagaaaagcttggtgaatctcaatgtgctttcgagtgcaaaaaaaaaaaaaaaaaaaaaaaaaaaaaa

SEQ ID NO: 128126 - DNA, 1154 bp, Zea mays
  Clone ID: MRT4577_48324C.1
gcagcagcagccgggcccgggcatgatgatgaggccgccgaacatgatgggcggcgccggtttccccggtggtggcatggggccgggcatgggccagatgggcggcgcgccgatgggccaccctcaccacccgcaccagcacatgggtgcgggtggcaatggcatgcagatgcagcctggcgctggcggtggcggtgccgtgcatggcatgccagccggcgccatgccgggacatgctgctgggttctaccaaggcggtggtggtgcagccggcggcggcatgccgtccgggccagagatgctgcaggcggccgggaaccccatggccatggcggcgcagcagcagcagcagcagtacatggcgatgatgcagcaacagcagatgatgaatggtcacggcgccggcggccccggcgggtacccggcgatggggtacgggtacggtcggccggcgatgcagtacccgccgccgccgtactactaccacccgatgccgcagcggcacccgcacgacaacatgttcagcgacgagaaccccaacagctgcacggtgatgtgatcatgtccctgtcatgcatgcgaggaggcaaaggtcgctgcggcctgtcgaagctttttctcctgcctgctattcttccggaggagggagagaagaccgatcatgggtcagcgtcaccatggttggaacaaagtccccggattggattggatctcagtatacatgagacatgcatgagaagccccctaccccttttttctcttttttttttctttttcacttctactactagtatttatctttctctttttttttctagcttgtttttcacctttactttctttggacaaagagggggaaaaagaagcaacttccttgaaggcgaaggtaggtatagtagtaattatcaatagtggtgggcataagacatgatggtggtggttgttcatggggtttatagtaaggagtagctcaagaagggtggctctcatgtcatggctccccccttcttggtgctccacaatgtgatgatggtatggaggtggcatggtagaaaagcttggtgaatctcaatgtgctctcgagtgccgtgtctgtccctagtggaatggaatgtctctggtgtcccccgctatttttttttaaaaaaaaaaac

SEQ ID NO: 128127 - DNA, 304 bp, Zea mays
  Clone ID: MRT4577_48325C.1
aacaaacaagggggccaggccaagccaaaaatttaacttttaggttttcccgccccccccaaaaaaccaataaagtttggcaaccccttttacaaaccaggggttacaaaaaacacagggggctcgcccatgggttggggccccaacatacaaaggggggggcctatccccaaaaaaactttagggccgagggaaacaaacaaacgttttatgcaaatttgccccacattttttgagaaagggggggggcataatttgggactagggaacccccaggaacttgggaaaccccggacccgggggg

SEQ ID NO: 128128 - DNA, 1891 bp, Zea mays
  Clone ID: MRT4577_48326C.1
cggcgggaagggccagcagaccaagggaggcggcggcggaggaggaggaggcaagggcgggaaagacgcgaacatggtgctgccgcagccgacaccacagcagatgcagcagcagatgcagatgaagggcatgaagctgcctcctgagctcctcatgggcatgggcggcagcaagatgccgccgttcccgacgcccgcgcctgcgcccggcccgccgccgccggcggccaaggaccccaagcccgccaagttcagctaccccgaggacgacgagttcggggacgaaggcagcgagttcgacgacgagttcgatgacttcgacgatgaggacgacttcgaggacgacggcttcgacgatgacgacctgtacggtgaccccaagatgatggcgaagcccgtggccatgccgccggccgccggcaagaaaggcgggaacggtggcaagaagggcggtggcggtgggaacgagatacccgtgcaggtgaaggggaacgcgcacagcggcggcggcaagaaggactcggccgcgaagcagaaccagggaggcgggaagaacggcggcggcggcggcggctcgcaggcgccgcagaacggcaagggcggcgggaacgggaaccagcagggcaagaagggcggcggcggcggtggtgggccgcctgccggttccggcgccccgatgatgggcggcatggcaatgccagcgcctcggccgccgctgccgcagcagcaacagccgggcccgggcatgatgatgaggccgccgaacatgatgggcggcgccggtttccccggtggtggcatggggccgggcatgggccagatgggcggcgcgccgatgggccaccctcaccacccgcacccgcaccagcacatgggtgcgggtggcaatggcatgcagatgcagcctggcggtggcggtggcggtgccgtgcatggcatgccagccggcgccatgccgggacatgctgctgggttctaccaaggcggtggtagtgcagccggcggcggcatgccgtccgggccagagatgctgcaggcggccgggaaccccatggccatggcggcgcatcagcagcagcagcagtacatggcgatgatgcagcaacaacagatgatgaatggtcacggcgccggcgccggcggccccggcgggtacccggcgatggggtacgggtacggccggccggcgatgcagtacccaccgccgccgccgccgccgtactactaccacccgatgccgcagcggcacccgcacgacaacatgttcagcgacgagaaccccaacagctgcacggtgatgtgatcatgtccctgtcatgcatgccaggaggcaaaggtcgctgcggcctgtcgaagctttttctcctgcctgctattcttccggaggagggagaagaccgatcatgggtcagcgtcaccatggttggaacaaagtccccggattggattggatctcagtatacatgagacatgcatgagaagccccctacccccttttttctcctttttttttttctttttcacttctactactagtatttatctttctctttttttttctagcttgtttttcacctttactttctttggacaaagaggggggaaaagaagcaacttccttgaaggcgaaggtaggtatagtagtaattatcaatagtggtgggcataagacatgatgatggtggtggtgatggttgttcatggggtttatagtaagcagtagctcaagaaggtggctctcatggctccccccttcttgttgctccacaatgtgatgatggtatggaggtggcatggtagaaaagcttggtgaatctcaatgtgctctcgagtgccgtgtctgtccctagtggaatggaatgtctctggtgtccccgttcattttttttat

SEQ ID NO: 128129 - DNA, 690 bp, Zea mays
  unsure (1)..(690): unsure at all n locations
  Clone ID: MRT4577_48327C.1
cggncgcgtgggtcgtttcgttcgttccaggagtaaaatactaaaatggcgatggcggcggcgaggagagcgctcctggcccacctccgcgtgccggcggtccaccctgcggcggcggcggcggcgggacggaccatccccgcggcacggaggctcctgtcgtcgacgacggaggagacgaaggggtcgttcctcgacaagggcgaggtcgccgaccgcgtcctctccgtcgtcaagaacttccagaaggtcgaaccctcaaaggtgacacctactgcccatttccagaaggaccttggactcgatagcttggacactgtcgaggttgtgatggcgtttgaggaagaattttcctttgagatccctgacaatgaagcagagaagattgactccatcaagacagctgttgacttcattgcctcacatcctcaagcaaaataagaggatttcctttttcttatttcaacgtgcgtttgcatccaggacctgtatgcgacacgggaccagttttctgtagcttgcctcagtagataggaagtcatttctatatctttctgaatctgttggaataaaacgtgtaccaaacgattttgtgttcttgtgcccccatgtgatgcgtgtgaactgtggaacacacggtgcatggaaaccctcattagtaaactaatccagaggtccatttgggatttc

SEQ ID NO: 128130 - DNA, 186 bp, Zea mays
  Clone ID: MRT4577_48328C.1
gctccttgcctaccctgcacgtctacaaaaattctaggccacaagttaagtctggtaatcatatatgtcatgcatgtcagctagacaaacatgttaggtttgccatttccacatgtttgccatttcctcgatctacaaacattttgttgtttccttttcaattagttcattgtgatgtatggacct

SEQ ID NO: 128131 - DNA, 208 bp, Zea mays
  Clone ID: MRT4577_48329C.1
cgtccgagctgcagtgcgtatagaggatcgtcgaattttatagtatgaagatggccatcgctctcgtcgcgtgcctggctctgtcagcagccagcgcctctgcaatgcacatgctctgcccctgcaccgctccgcatgatttgcaacagccacgactaccattcaacgcagctatcttgctgcctacccccagcaatttcttttcatt

SEQ ID NO: 128132 - DNA, 375 bp, Zea mays
  Clone ID: MRT4577_4832C.1
cgcgtatacttgcggagcaagcgcagacgcgggcgggggggctcacacacgcaaggcgggcggcggccctcgcttcgaagcacggatactcctactacaaggaggtaatgcagaagaacaagcagtacgtacctcagcctcccaccgctgacaagtgccaggagctcttcaagcagctctagcacacccgcctcgaaagcgtaccaacacgctatgagtcattcccgaaggagcttgatggtgtcaagcatgtatggcacaacaggaaggacctcacgggcgcggaccttggccttgcgagcttattgggagttgagctctatgcatggatctgcataggccagattgtctgcagaggtttcaccttgaccggct

SEQ ID NO: 128133 - DNA, 173 bp, Zea mays
  Clone ID: MRT4577_48330C.1
gggcgcgcgcgcccgggcaggcacgagccatatatattcttaaacagcataaaagacgaagagtacaacacttgtcaataacaattacttatcctttacatagccagttggcaaagctgcactgggggtgaacgttggctgacagttgtatgactgcactgtatgggatacac

SEQ ID NO: 128134 - DNA, 569 bp, Zea mays
  Clone ID: MRT4577_48331C.1
gcacggcgcgaggagggacgcttacctgaccgtccagatcgcgagaaaccttgtcgcgagcgcggccgctgatggtggaagccgagacggagcgacggacgacgacgacgcgaccttatctggtgtcggtcgaccagcagccgtccgcggctccgcccgacgcgatgtccccaaccggcagccgagcgcggattgccgaagcaccacactctcctcgctgattcgtgcggccgccctccgaagctccgcccgacgcgacgccaccactgcttcacgacggcaggtggcggagctcgttgcgcgccgcgcgcgtgcagacgtcggcgaacggggctcccgggacgtccgcgctggccagtcgtgtctggtctatggaagaaatagccgagcgaccagatattagatatccatctattttcctctagtcccctattgaccatgatattcttatgtctcgtttttttgaaaagagatggtgcaatgtgacgaggtgccctccgggttatttcaaggatgaaagcattgataaaattttgacaaaaaaaaaaaaaaaaaaggcccctagggcc

SEQ ID NO: 128135 - DNA, 367 bp, Zea mays
  Clone ID: MRT4577_48332C.1
ggaaaggaaaagggtttcctagaacctttacacccgggggccgcgggctcccaaaaggaaaaaaaacaaaactggggaaaaaccagcccttttttttttcccaaaaaggggcaaacccagcccatggccggggagccaaaacattaaaaacccccccccccccgggaaggggagcccccaaacgaaagcccccctctcctgtggggaacccccccacgacgagcggcccgacgggcgcccaacccccctccccccggaggccccggccgagcgggaagccctggggcaaaaaaaggacccccctggcggggatggcccaaaggttggggtccctcaaaagacccaccagggacccctggggggcccc

SEQ ID NO: 128136 - DNA, 1117 bp, Zea mays
  unsure (1)..(1117): unsure at all n locations
  Clone ID: MRT4577_48333C.1
ggtaccctcgggttcggccggnaaaacccaagcagagaggtgggagggagaggaccgagggagagagaggagagagagcgatcgagagatgaggagggagcttgcctcccccttagctactgccgccgctgccacggccggtgcctccgtctcggctgccgcctcgctccggggctggtgggacgatgtcaacgagtcgccccagtggcaggacggggccttcttctccctcgccgccgcctacgccctcgtctccgccgtcgcactggtatacaagttggtgttgctagatctccccggcttgttgtttttctccacctacaccttgctcgtgctcttctgggcagaaatataccatcaggctaggagtctcccaacggacaagctaaggcctgcatacattgccgttaacgccatcatatacgttgttcagctttgcatatggatataccttggaataaatgataatgccgcggttgagctggccagcaaaatattcattgtagctgtctcctttgttgcgcttcttgggttttcagtatatggtggaaggttgtttgtcttgctgagacgtttccctattgaatctaaggggcggcaaaagaagctgtatgaggttgggaccgtgacagcaatttgtgttacctgctttctgataagatgtgttgtggtcgcgctatctgcatttgatgctgatgtatctctcgaggttttggatcatccagtcctagatttcttctattatatgtttgcggagatactcccttctgcgctggttctcttcgtccttcggaagcttcctcccaagcgggtatcggcgcaataccaccctattaactagggagttctttgtttttatgatgttacatgctaagaactccggataagctggaactgctgaaaacctacatccggttgtattgctgtaatattttatggaagcatcccagggttggcaagatgcatcatcaccatcatgctctatgagaaaagagttttgagtggtgctaatgagtttgtgctactgctagccggagcatcacatgacatctccagcagagtaccataccattatttgaattgcatgngcattcttgacgcggacaaggccaatgat

SEQ ID NO: 128137 - DNA, 1590 bp, Zea mays
  Clone ID: MRT4577_48334C.1
agcaagatacggtacataatccgtcctaggtgtaacaatgctggaactcttttggcgcaagaacaggcataggcaatggcagacaccactacacatccatcggcatcaaacgcagataatgcaaccacaacacatcttatcaggaagcaggtaacacaaattgctgtcaacccgtccaccggccggccgggacctgctgccgggccccagccgccgcgcacgcccaaaacacacactgacgcgtgggcccaccttttcccttgttgcctctctcctttgtgcgtcttcttcctccctcgcgcaccgcaggcaaggcacacaagagaaaagcagagggggccagatgaggagggacctcgcatcctccttcgctaccgccgcatcctcttcctcggcagccgacgcgctccggggctggtgggatgacgtcaacgagtcgccccagtggcaggacgcggccttcttctccctcgccgccgcctacgccctcgtctccgccgtcgcactgattcagctcgtcaggatccagcgccgggtgcccgagttcggatggaccacgcagaaggtcttccacctcatgaacttccttgtcaacggggtccgtgctctggtattcggcttccatgtccacgtcttcctcctccgcgcaaaagtatacaagttggtgttgctagatctccctggtctgttgtttttctccacctacaccttgctcgtgctcttctgggcagaaatataccatcaggctaggagtctcccaacagacaagctgaggcctgcatacattgccgttaacaccatcatatacgttgttcaggtttgcatatggatataccttgggataaatgataatgctgtggtcgagctagccagcaaaatattcatcgtagctgtctccttcgttgcgcttcttggcttttcagtatatggtggaaggttatttgtcttgctgagacgtttccctattgaatctaaggggcggcaaaagaagctttatgaggttgggactgtgacagcaatttgtgttacctgcttcctgataagatgtgttgtggttgcattatctgcgtttgatgccgatgtatctctcgaggttttggaccatccagtcctagatttcttctattatatgcttgcggagatactgccttctgcgctagttctcttcgtccttcggaagcttcctcccaagcgggtttcggcacaataccaccctattaactagagagttttttttttttatgatgttacatgctaagaactccggataatctgaaactactggaaacctacagccggctgtagttggatgcttttgcttgtgctgttatgtttatggaagcatcagtgttggcgatgaatataatgacgatcattctatatggggaagtggtgctaatgaatgaacttttgaatactccttttatataaaaaaaaaaaaaaaaaactaaaaaaaaaaaaaaaaaaaaaaaaaaaaaaaaaaaaaaaaaaaaaaaaaaaaaaaaaaaaaaaaaaaaaaaaaaaaaaaaaaaaaaaaaaaaaaaaaaaaaaaaaaaaaaaaaaaaaaaaaaaaagggggggggccttttt

SEQ ID NO: 128138 - DNA, 1060 bp, Zea mays
  Clone ID: MRT4577_48335C.1
cgttcgcaggccctcggggggccgggaggagaggacccctcaagagaaaagcagagggggccagatgaggagggacctcgcatcctccttcgctaccgccgcatcctcttcctcggcagccgacgcgctccggggctggtgggatgacgtcaacgagtcgccccagtggcaggacgcggccttcttctccctcgccgccgcctacgccctcgtctccgccgtcgcactgattcagctcgtcaggatccagcgccgggtgcccgagttcggatggaccacgcagaaggtcttccacctcatgaacttccttgtcaacggggtccgtgctctggtattcggcttccatgtccacgtcttcctcctccgcgcaaaagtatacaagttggtgttgctagatctccctggtctgttgtttttctccacctacaccttgctcgtgctcttctgggcagaaatataccatcaggctaggagtctcccaacagacaagctgaggcctgcatacattgccgttaacaccatcatatacgttgttcaggtttgcatatggatataccttgggataaatgataatgctgtggtcgagctggccagcaaaatattcattgtagctgtctccttcgttgcgcttcttgggttttcagtatatggtggaaggttatttgtcttgctgagacgtttccctattgaatctaaggggcggcaaaagaagctttatgaggttgggaccgtgacagcaatttgtgttacctgcttcctgataagatgtgttgtggtcgcgttatctgcatttgatgccgatgtatctctcgaggttttggaccatccagtcctagatttcttctattatatgcttgcggagatactgccttctgcgctagttctcttcgtccttcggaagcttcctcccaagcgggtttcggcgcaataccaccctattaactagagagttttgtttttatgatgttacatgctaagaactccggataagctggaactgctgaaaacctacacccggttgtattgctgtaatattttatggaagcatcccagggttggc

SEQ ID NO: 128139 - DNA, 541 bp, Zea mays
  unsure (1)..(541): unsure at all n locations
  Clone ID: MRT4577_48336C.1
ncttccaaacctctcgagtctacattaccgttatctcctgcatccatgacgattagacgccttctcacgcggatgcggtcagggatcatggcctcgacccatcgcgaaccatagatcctgtgtttccctactcgggtgagtctactccaccgtgcagggtaaagcgctatggaagcatctccgctcccggcaagatggtggtcgaaccgctgggcggcagcctctcccgcgccctgccgtagaggagcaacgccacggagagcgatgagaaggggatgaatgagtgcctgaacgagatctcgagcgcgctcctacaggtcgatgtccagatcgagatgatcggagacatgcaggctaacatcaagcgcatcgtcaacctcgaggagcttgccgcaggcaccaacaactgccgcatcatgaagcaagatgtcttcacggaactctgcaccatgtgagatccggagaatccttctttcactcccagaaagggcaagacaagcgctctcatgttcgctgctctgcaaggtactgacaaaactac

SEQ ID NO: 128140 - DNA, 3055 bp, Zea mays
  Clone ID: MRT4577_48337C.1
ggccgggaaacccaagcagagaggtgagagggagaggaccgcgggagagaggagagagagcgatcgagagatgaggagggagcttgcctcccccttagctactgccgccgctgccacggtcggtgcctccttctcggctgccgcctcgctccggggctggtgggacgatgtcaacgagtcgccccagtggcaagacggggccttcttctccctcggcggcggctacgccctcgtctccggcgtcgcactgattcagctcgtcaggatccagcgccgggtgcccgagttcggatggaccacgcagaaagtgttccacctcatgaacttccttgtcaatggggtccgtgctctggtgttcgtggtcccctcgcatccggccgggcttcgcacaaaagatacaagttggtgttgctagatctccccggcttgttgtttttctccacctacaccttgctcgtgctcttctgggcagaaatataccatcaggctaggagtctcccaacggacaagctaaggcctgcatacattgccgttaacgccatcatatacgttgttcagctttgcatatggatatacctcggaataaatgataatgccgcggttgagctggccagcaaaatattcattgtagctgtctcctttgttgcgcttcttgggttttcagtatatggtggaaggttgtttgtcttgctgagacgtttccctattgaatctaaggggcggcaaaagaagctgtatgaggttgggaccgtgacagcaatttgtgttacctgctttctgataagatgtgttgtggtcgcgctatctgcatttgatgctgatgtatctctcgaggttttggaccatccagtcctggatttcttctattatatgtttgcggagatactcccttctgcgctggttctcttcgtccttcggaagcttcctcccaagcgggtatcggcgcaataccaccctattaactagggagttctttgtttttatgatgttacatgctaagaactccggataagctggaactgctgaaaacctacatccggttgtattgctgtaatattttatggaagcatcccagggttggcaagatgcatcatcaccatcatgctctatgagaaaagagttttgagtggtgctaaaaaaaaaaaaaaaaaaaaaaaaaaaaaaaaaaaaaaaaaaaaaaaaaaaaaaaaaaaaaaaaaaaaaaaaaaaaaaaaaaaaaaaaaaaaaaaaaaaaaaaaaaaaaaaaaaaaaaaaaaaaaaaaaaaaaaaaaaaaaaaaaaaaaaaagtttttttttcgggggggaaaaatttgaaccccaaatttttttttaagggaaaaaaaaagggggctttttttttccgggaaaaaaaaaccggaaaaccttttttttttatcgggaaacaacccaaagcagaaagggagagggagagagggagaggaccaagggagagaggagagagagcgatcgagagatgaggagggagcttgcctcccccttagctactgccgccgctgccacggccggtgcctccttctcggctgccgcctcgctccggggctggtgggacgatgtcaacgagtcgccccagtggcaggacggggccttcttctccctcgccgccgcctacgccctcgtctccgccgtcgcactgattcagctcgtcaggatccagcgccgggtgcccgagttcggatggaccacgcagaaagtcttccacctcatgaacttccttgtcaatggggtccgtgctctggtgttcggcttccatgtccatgtcttcctccttcgcacaaaagtatacaagttggtgttgctagatctccccggcttgttgtttttctccacctacaccttgctcgtgctcttctgggcagaaatataccatcaggctaggagtctcccaacggacaagctaaggcctgcatacattgccgttaacgccatcatatacgttgttcagctttgcatatggatataccttggaataaatgataatgccgcggttgagctggccagcaaaatattcattgtagctgtctcctttgttgcgcttcttgggttttcagtatatggtggaaggttgtttgtcttgctgagacgtttccctattgaatctaaggggcggcaaaagaagctgtatgaggttgggaccgtgacagcaatttgtgttacctgctttctgataagatgtgttgtggtcgcgctatctgcatttgatgctgatgtatctctcgaggttttggaccatccagtcctagatttcttctattatatgcttgcggagatactgccttctgcgctagttctcttcgtccttcggaagcttcctcccaagcgggtttcggcacaataccaccctattaactagagagtttttttttaatgatgttacatgctaagaactccggataatctgaaactactggaaacctacagccggctgtagttggatgcttttgcttgtgttgttatttggtcggtttgtgcactgcatgacatgacatctccagcagtaccataccattattatttgatttgcatgtgcattcttgccgtgtgccccttttcggttctagcgttttggcgctagcatgataaaaaaaaaaaaaaaaaaaaaaaaaaaaaaaatgtttgcggagatactcccttctgcgctggttctcttcgtccttcggaagcttcctcccaagcgggtatcggcgcaataccaccctattaactagggagttctttgtttttatgatgttacatgctaagaactccggataagctggaactgctgaaaacctacatccggttgtattgctgtaatattttatggaagcatcccagggttggcaagatgcatcatcaccatcatgctctatgagaaaagagttttgagtggtgctaatgagtttgtgctactgctagccggagcatcacatgacatctccagcagagtaccataccattatttgaattgcatgtgcattcttgacgcggacaaggccaatgatttatcgccttgttggtcccagtgacttctaaaaaaaaaaaaaaaaaagcggcc

SEQ ID NO: 128141 - DNA, 219 bp, Zea mays
  Clone ID: MRT4577_48338C.1
ctcatacctacgtacgcggctgcgtgtaaactcaaggccatccttggcagtgacggcgtgggcctcgcgggctagtcttgggggatcctgccgtaacctggggcggtgatactgtacaggtgtgagatactacaggacaacactcacgaagcttttcaggaacgtactgttcgagaccaccgctatgtctttcttagctgtatcccctacaacagctta

SEQ ID NO: 128142 - DNA, 773 bp, Zea mays
  Clone ID: MRT4577_48339C.1
gccggccgttccgggatcccgcgcaggggctgaaagcctgaaactgctcaagacgccaccgtcttcctccgcgatcttctgttctctgtctctccctctctctttcctctagctcccaaccaaccaaaccaagagtacgtcgtacgtcaagtgcgccgcgtgtgtgtgtgccagtaggctacagggcacggaggaacgccgtcatgagcttgatcagcatgatggaggcgcggctgccgccggggttccggttccacccgagggacgacgagctcgtgctcgactacctctgccgcaagctctccggcaaaggcggcggcggcggcggtggcggcgcgtacggcggcatcgccatggtcgacgtcgacctcaacaagtgcgagccgtgggatcttccaggtattccgtcaggttcaactttgcgctaccgtgtatcgatttgctgcaggttctatgttgcgcatgctgcatgcacacttgcacctatcaacaacaagagcccagcagccagcaccggccgtagaaattgaacttaattagtagttgcgacttgcgatagtaagtaagcactaagcaggaaggaagattcattgaaagaatatataggcccggcccggatcaatcagactgtaccatgcacaaggtgaatcacctaagaacgaaaaagatagaccattgaggttttatagatttattaggtatgtaaaaaagcgaagataattcatccggccatgtgtgccagaaggaaaaagtcgacgcccattttctctgag

SEQ ID NO: 128143 - DNA, 772 bp, Zea mays
  Clone ID: MRT4577_4833C.1
accacctttctcctcgaaaaaccgatttgaaatctactgaaagatggctgaagtagtagttcttgacaagctcgtcggcggcgactcgccggcagcgacaacattccgccctctgctcttgtgtctcctgaccatattcttcttcctgctgctgcgctacttgagtgcaggcgcaggtccgagcagggccaggctacctccctctccaccggggctgcctctgatcgggcacgcccacctcatcggcgcgctcccgcacgtctcactgcgcggcctcgcggcgcggaagggatgcgaggacctgatggtggttcgcctgggcgcggtcccgacgctggtggcgtcgtcggcgcgcgccgcgcaggcggtgctgcgcacgcacgaccagtcgttcgcgtcccgggcgcggtcccgtgtcggcgaggtgctcacgtgcggctactcggacgtggtgttcgcgccctacggcgagcagtggcggcagtgcaagaagctggtgaccacgcacctgctcagcgccaagaaggtgcagtcctaccgcgccgcccgccacgaggaggtagggctggtgatcgacaggatccatggagcggcagctggactggaggcagtgaacatgagcgagatcctgagcaagttcgcgaacgacatgctgtgccgcgccgtggcatgtaggtcattcagagtggaggggcgctacaggatattccgggacctcatcgcccaagctttcgacatcctgaggcgcatagacctggagagcttctaccct

SEQ ID NO: 128144 - DNA, 521 bp, Zea mays
  unsure (1)..(521): unsure at all n locations
  Clone ID: MRT4577_48340C.1
cccctcttcgagttttttttttttttttttttttttttttttttttttttttttttttttttttggacctaaagggttaagggaaaaaaaaaaaatggaatttttccccaccctccaaaaaaaattttaaaaggttaggggccttaccctcccaaaaagggctttttttcaaaaaaaaattgggcccctttttccaccgcgggaggaaccccaccccaaaaaaaaccttgggggttttattttaaaaattccggcccccccctccttaaatttttaaatttgccccaaaaaccaagggtcggttgtttccaaagggcttttttttagggaaaaacccccggggttttttttttccgggcggggttccccacaaaaccggtgaaacagggggagggttcccaaaaaaattagggccttaccctcccaaaaaaaggaggggcaaaagggcccccccacaaaattcctttgcagaacctggccttaacctgctanctttaaaaaagggggggaacaaggaaatg

SEQ ID NO: 128145 - DNA, 357 bp, Zea mays
  Clone ID: MRT4577_48341C.1
acgcccacgcgtccggcaggtggtacctttgatgtgtccctcctcaccattgaggaaggaatctgggagggcaaggccacagctggtgacacccatcttggtggtcgaggactctgacaacaggatggtcaaccacttcgtccaggagttcaagatgaagaacaagagggatatcactggcaaccccagggctctccggaggctgatgaccgattgtgagacggcgaagaggactctgtctttgactggccagaccatgattgagattgactcgctgtatgaggtcatggacttatactgcaccattacccgtgccaggtttgatgagctcaacatggacctgttcaagaagtgcat

SEQ ID NO: 128146 - DNA, 493 bp, Zea mays
  Clone ID: MRT4577_48342C.1
ctgagaatgaaggaaatactgtcgagtcgaagaatccaattgatgagaagtatggccttatccatgtgacttacctgatggagcagatcaaggctcagcttgttgtcattgttcatgacgaggattcgatcgaactggctgtgtggattacaaccctgtgcaagaagacggtggtcccttactgcattgataaaggaaaggctcgccttggatcgactgatcacaagaagaatgcatcactcttgcgtctcaccactgacaagaacgaggataaggctgagtttagtacgatcttggaggctattaaggcagcacttcaacgacaagttccatgaggtcaggacgaactgtggaggtggcatcatggcatccatgtcgcaggtcaagaccaaggcccgggaaaagctgatcgtcaaggatgctgcgatcatgatgacctacattgtctactgctgagtctgacgtgtactttgacgagcaagaactgaactcg

SEQ ID NO: 128147 - DNA, 184 bp, Zea mays
  unsure (1)..(184): unsure at all n locations
  Clone ID: MRT4577_48343C.1
gccggcctgcaccatccggtccttccccagntgaggtgacacgaaggggcgtccccggnccccanccaccgacccaccatgccaggcgaagattgtgacgccgaggggagggctacacaccgcgaccgccgccgacgccaccgccaacgagcagcccgccccaacaacgccagcgcgcacacga

SEQ ID NO: 128148 - DNA, 227 bp, Zea mays
  unsure (1)..(227): unsure at all n locations
  Clone ID: MRT4577_48344C.1
gccccccctngggttttttttttttttttttttttttttggnccgaaaaaaattactnntattcttgncctagccccaaactcagtacttgtacaatccggngcntgcctgaaacaacaaatcaaagaaatggcgacacngactcggagctacattttacattgacaacccattcttttcattcgccccactggnncaaaataagtagcctacctaccttaagcacc

SEQ ID NO: 128149 - DNA, 268 bp, Zea mays
  Clone ID: MRT4577_48345C.1
tacttcttaatatacgtggcctaccagcaagcgtgggggggttatgggaaaatacatcggggtgtagctcctgctgtgcctggagctggtatgaagtattcgatgccacaaaacaagagcagcctaactgcttcgagcctaccacagccataatcactctcatggaatggagggtacggaaatgcaaacaatattacgggaaatctcagaataaatcagggagctccctctgcgccaacaactttggaatttgatgaaactttgggta

SEQ ID NO: 128150 - DNA, 191 bp, Zea mays
  Clone ID: MRT4577_48346C.1
tcgatcttccaggagtacatcttctttgtggagtcttgcggttcgaaacaggagctagctcgctctcgcggccgccgctgatgaggtgcaaccagggatctgtcttcctccaactgttgtagaagggggccggtgacctccagggtgaagatgatcggggtcacctggggcccgtggccacggcattagca

SEQ ID NO: 128151 - DNA, 240 bp, Zea mays
  unsure (1)..(240): unsure at all n locations
  Clone ID: MRT4577_48347C.1
tcctttttattttcacaccacccagactcnaaacacgggggactttataaagttctgggaggcaccaatcacaacctctaactctcacctcacctgacgcaatgatcactacaacagtacaacatattcaccctgttgggctattccttacataaatacacgtgatgctctcatacgccattatctcaatatcattataaaggcttggattccgtcttgcaaccatataatgaaccaacc

SEQ ID NO: 128152 - DNA, 1171 bp, Zea mays
  Clone ID: MRT4577_48348C.1
ccggtcgcccagctccgaaaccattcgccttgtgtttactgtggaaacctcttctactgaaaagctcttgctaaacttatcataggctgtgtgaaatcaaggaatatgcatatactgtctaacttttttattatgtcatgtaaagatggtctagagctaattcctcctcaagatgtggttactgcttgcattcaaatgggatggttgcatgctgctcatgatatcatagatgacttggagtcagccgggattccagttgggattactggttacgtttctcttctgagagcatatgagaaggagaataagtcagaagaagtcaatggccttcttcaacagatacaaaagatagcatctaccatggatgatgttcatactgattcaccatttaccatcaataatattgccaaagtagtgaaatatgaaatgtccttcagtggttcatctttgtttgctgctttggctgatgaaattaaacattacaacccgggagagcacttggcattagagctcaataattcggttcttttcttctgcaaggcaaaaatgatggaagatgctctttgcacttataagtgtatgagagagcaaaatatcggacccacatctcatactttttgtcatatgttgtgtggttattcttcaatggacatgcttagggagatcaccatgctgtggggagaaataaagcgcagacatgaatatggagagctagatttgaatagggacttgcttgatagcttggttttgaattttcttaaaggtggatatttttcgagggtgatggagatcattagttacatgtcaaaacataacatttactgtgacaagtggaaatacaggcgtgccttcctgaagctacacaagaacctgtataggaatttgaattcattgcatgacaaaacagaagctcaaagtaaaaggattgaagatgttcgagctttcaggttgtgggcaagcattaagtagggacaacgaccaatttgatccctctcattttcaaattgggtaaagacacccctttgatgacttgtagtgcggtgccaagcaagcctgccttgttgccacctcaaggattactcctggcttgttgccctgaagcctcccttgagggaaaaaggcaaagaggcatcgatggtgttcgcagcacctgcagcgggggaagagggtt

SEQ ID NO: 128153 - DNA, 693 bp, Zea mays
  Clone ID: MRT4577_48349C.1
ttgggtacctcgagggccggccggggttatatatgggtgttgttgttaccacgagaaaaaaaaaaaaaaaaaaaaaaaaaaaaaaaaaaaaaaaaaaaaaaaaaaaaaaaaaaaaaaaaaaaaaaaaaaaaaactgttccctcgcctctcctgctcgggggtcgccagtcgcccccgttccctgggaacccgggtcccttggttcacccaacgccgccggcccacggttggcctggccccctcccccctcgcctgttctgctggggggctgttcgcccgtcgccccgtttccctggttcactccctcttttcggtctctgtcacccttctcacggaggaacaaaggatcaaaaatggctatgcaggccacaaggaggctagggtttttgagcctccaacgacgcctactccttccctctcaaaccgaggccccaagaatcccaaccgggggggggggggccttcctccactcccatgccaccagttttgggtacaagcaaattcgcgaagaggataaaagcaaattggttggaaacgtgttcagaagggtggtttccagttacaacctcatgaacgatctcatgagtgtcggcctgcataggctgtgaaaggacaggtttatttccaagttgaacccctttccggcgatgaagcatctcaatgtggctggtgaaacaggtgatgttgcttttc

SEQ ID NO: 128154 - DNA, 528 bp, Zea mays
  Clone ID: MRT4577_4834C.1
tcgagcggccgcccgggcaggtacaagctttttttttttttttttttttacaagctttttttttttttttttttttttttttttattttttttttttttttttttttttttttttttttttttttttttttttttttttttccaaaaaatcttttttcctgggtgggggggggttccatttaaaagggttaattagggaccctgggcgggaccccccttagggggaatttcaaaaaaatgggggggggtttttaggggtcccaacttgggaccaaagttgggggaaataagggaaaaagtttttccttggggaaaatggttttcccttaaaatttcaaaaaaaaaaacaaccggaaaaataaaagggaaaacccgggggggccaaagggggggccaaaccaaatttaatggggtgggcctaattgccctttttcaatggggaaaacttggggggcaagttgtttaaataaatggcccaacccccgggaaaggggggttgggtattgggggctttttccctttcttggt

SEQ ID NO: 128155 - DNA, 1303 bp, Zea mays
  unsure (1)..(1303): unsure at all n locations
  Clone ID: MRT4577_48350C.1
agcactatccagcactttcagataaacacaagagttgtatctgcaacgcatttgtacctgtcatgaaagccatgtggcctggtttatatggtaatgctnnnnntagcactcatgttatttcaaagagacggaaacttgcggttcaagcttctcgtttcatggtgcaaatggtgcaaacccaattattttcaaccgaaagtatggaccaagcttcnnnnngttctgaaagtgcttcaggtttagcagatgcgtcaaacaattttgacatcagcgaggaagggcttgctatccgtatagcactagaggtagccagttgcccagataagaagaccgcagctgggaaagcatatgctttggccctgtgcaaggttgtggtccttctaagattccggcaatcagaacagaaggccatcaagtgcatgagaggccttgtgaatcatttggctgcttcagtggcttccgacaaggagctcgggaaggagctagctcaaatggctgcacggcttagatcgcttgatgcctgtccagacgaagaacttgcacaagatgacgcagatgccatattcaagaaactaggattcgatgatggcttcaagttggacaccaatcaagcagtgcctcctacaccagcaccacggtcagtccggcctccggctcctgccaggagaagagcgagacaggcaccgtcctctagcgatgacagtgacgaggaagggggagaagctgacgtgcctgcaacatcggcaagcagggttccagccactcccagtatgactgctgctgcacgttctcagagagcaagcaagactgctgctctgagcaggatgtctgcgaaacctgctaccgcgtctgatgacagtgagctggacgggcagtctgacgtcacgagcgaggaggatgcatccgatgaggagtcgtcataggttgctgttgttgtctcgtgtaattgtggactggagtttctgatgacgttgttgagcggaagaaccaagtaatctaactaaattaattacagcggtgacatattgtcactgcattatgtatttctttcgtgttactaagtatgatttaaagccttcatttgagtttgaggtgcagcaatctgcacaggcggttttataaagagcaagtgattagttttaaataaaagtcgctgcggtgggttttttaatggtaagcaagactgctgctctgagcaggatgtctgcgaaacctgctaccgcgtctgatgacagtgagctggacgggcagtctgacgtcccgagcgaggaggatgcatccgatgaggagtcgtcataggttg

SEQ ID NO: 128156 - DNA, 278 bp, Zea mays
  Clone ID: MRT4577_48351C.1
cttttctagcgccgtgtttccatctcttctactccctacgcattgctccagcccgtggagtccctgggctagccaacgctcacacatggccggagctccactgcagctcgcgttcggctcctcctgcgtcgcgcccagcagttccctactcgccagccatctctcccagcgtcgcgtccctccgttctctctctctaccgcacgctgccggccttctctgcttccccatggcgcgtccggctcactgcgctcctctctgtcgcgtctcttcgtcctct

SEQ ID NO: 128157 - DNA, 264 bp, Zea mays
  unsure (1)..(264): unsure at all n locations
  Clone ID: MRT4577_48352C.1
tcggcgatggtcgtgggcgcgcgggcaagnnggcgggnaaggggtnnctgggcaagggggcggcgcccaagcgccccaccgcanagggtggnctgcgtgnacaacccatccagggtcttttaccatttctcttgcgatccgcagnngttggcgatgttgtggggcggggggcggagcgcatctccggtgcttcatctaccaggtatatcccggggggggcggcaagcatctctcctcggggaacggtcgatccgctgacggccg

SEQ ID NO: 128158 - DNA, 203 bp, Zea mays
  Clone ID: MRT4577_48353C.1
acgaccacgcgtccggcttggcttggctgcgctagcgcacaccgaacccgtcaccgatgcagcgtcgccgcagatccgccacgaccgaccgatcgatccggccggcggcgggcgccatggcctcccccaacccccaggccgctgcactgcaagccgaggctgacgctgcaacattagagagcctcaacgagcacacactcagc

SEQ ID NO: 128159 - DNA, 389 bp, Zea mays
  Clone ID: MRT4577_48354C.1
actaccgcgtacaacaacaccacacgcaaataagtaatacacaaaccacctcaaacctcaaaagctatttttttaaaaaactccggccgcacacccaccctaaattccacacttaagtttcacacaaaatcagacataacaagaaataatcctgcaaaaaacccatcgcctttacataaaaagctcactgcaccctaaactacactaaccaataacaacctaactaaaacaaataaaaatcccaacttaaaaactctaccaaacaaatcatcaccacacttgaaacataaacctcagaaaaaaccaacaatcaccaaagtccctattacaagataaaacatgtgaaacacctatctacaaaccttgacacattttgccgtaatgacaca

SEQ ID NO: 128160 - DNA, 115 bp, Zea mays
  Clone ID: MRT4577_48355C.1
gcgcacccaccttccaccactcgcttagccgctccgccgcgcgtacaagaggtggagataggatgccggctgggcacggtctgcgctcccggacgcttgacaactagctccgggc

SEQ ID NO: 128161 - DNA, 239 bp, Zea mays
  unsure (1)..(239): unsure at all n locations
  Clone ID: MRT4577_48356C.1
gggtggnttnccatcgcggtntgttctnttgtcttcgtcgttgggatcgctgggtcgnnttggtggctntcgttcaacggatggtntcntgcctccnntgcngatctntcngtggcgttgncttaggtctcaaaagtttgcgagttgggttattgaactatagngtnagctgtntttannatcgngtangnggcgcttccgctgccatgatgactntnatgggttcagttttanacgnc

SEQ ID NO: 128162 - DNA, 568 bp, Zea mays
  Clone ID: MRT4577_48357C.1
gaattttctaagatgctcactattccacgagtttcctacatgagttccgcccatttgggttagctagtatatctcaagccaggtgacttttgcgacaatgaaaggtccttcccatggcggtgacagtttgtgtcgtccttctcctattaatacgcggcagagtaccaggtctcctactgtaaaggatcggtgccacactgctttgtcgtggtagcacctcagagtctgctggtacctagctgattggatgacgacattcaaatgctcttctaacacgtcaacctcctccaatctagttgcttccgcttccgctatgcttttgaatgtcaacctaggtgctccaaaaattaggtctgctgcctctgatccatacactatgaagaatggagtgttcccatgcagtgctcggctgggttgggtccgcagactccacactacatacggtagttccctgatccatttgcctgtgagcttttcactcttgtcgaatactttcttcttgagcgcatcaagtatcattccgttagctttttctacctgcccgttagctttcgggtgcgccattgat

SEQ ID NO: 128163 - DNA, 3016 bp, Zea mays
  unsure (1)..(3016): unsure at all n locations
  Clone ID: MRT4577_48358C.1
ccccgcgtccgccccgcgtccggccacgcgtccgcccacgcgtccgcccacgcgtccgcccacgcgtccggcctcgttcgcttcgctttcccccaaatccaccgcgggctcgagctcggaggagaggagacgagacgacccaagactttctcacccccctttgcttcctgcgcaattcctgcggcagcgcctttctctctttcaatggacagcgactacgttgccagcctgctcatgggcatgggctcatccgcccctgcgctcgacttcgccgcgctggacgccgggttcctcgaaacgctctgcggcggcggcggcggcctcttcggggtgtccggggtcgccgcgggggccgggtgtggcggcgtgtccccggaggggtcgtcggtgtccgacccggcgtgggcgcgcgccagggacgatgacaatgtcaggaagcgcaaggcgccgcccacggggtccgccggcggcaaggaagcctgcccgggcaaggctgcggaggccaagggtccggacgggaagaggtgcagagtgggcggcagcgacagcccggtgaagccgaaggtagaggaggtggcggcgagcgacgcctcggttgaactcaaagcgcagaagaagggcaaggggaagaccgccaagccggcagtcgaaccgcccaaggactacgtccatgtccgggcgcggcgagggcaggcgactgacagccacagcctcgcagagagggttagaagagagaagatcagccagaggatgaagtttctgcaggacctagtgccaggatgcaacaaggtggttggcaaggcactcatgctcgatgagatcataaactacgtccagtcgctgcagcagcaagtcgagttcctgtccatgaagctcgccactgtgaacccacagcttgacttcagcaacctgtcgacactcctacacaaagacatgtaccaaccatgtggcccttcggcaaattcggtctttccactggaaagtgacggtgcagctttcccattctgtgaccaagcggatcttttccacagctttggttcgggttcggctgctatggaggatcagtgctctctaagcctgctagacacggctctgccccacgcggccaacccacagtttgcttttcaaaagcagcagagggacttctgggaggatggcctacagaacgccttgcctaccggtagtgagcaaagacaggaggaggatgggcttttagtacccaactttgatggccagttacatgctgaccagacaaaggttgagttctagtccctggtgatcctcccaaggttgatatttttgtatataggtggggtaccaagacctgtggcaagcaaagcgtctctctctctctgtgtgtccgaagctgaccatcattagagtctaggcctgcgaactgatttcgttccgtgataatgctgcatgtatggcatctcggttcttcccacagagatcatgtgatgtgatcgacctcgagaaattaaaagtagattgtgtactagatatggcgcaaatattacatgcgccatcttctaaagttgtactgattggtatgtaagggcgctgggtggtgttggaacggataccgtgtactgtttgttgcttttttttccctctagtattaatgattatgatgacgaaaaaaaaaattaacaacgcgcactcgcgcagagacactgcccatcaggatttcgcaaaagcaacaaaacccactcgacgtcgagggtagaagaggcctgcaaatttccgaagagctcgcggaaatggcgacggtgctgccgcttgccgccgcctcggcctcggccacgccgaggacttgcatctccggcggcccagttcccgcgcgattcctcgggacttgcatgcgtctccgcatccacatcccaccgcggggcgttgcctgcgccctcagaaggagacccaccaagtacaagactaaaatccagagtgaggaggatgtggtggctgcagaagatgtcatggatgatgatgacgacgaggatggtgcactggaagcacttttcaagcagctggaagaagatcttgacaatgatgatttatctgtcgatgataatgatatatcagaagaagatatggcaaggtttgaaaaggagttggcagaagcaattgaagatgtcagtggtgttgatgactcagcgggggattcgttgctgagctctggcgactatggtattgatgagcaactagatggaagcgaacgggcagagctgaaaacctggcaactccggagattggctcgtgcactgaaaataggccggcgtaaaactagtattaagaatcttgcaggggagctaggcctagataggggtttggttattgaaatgctccgcaatccaccaccgaagcttctactcatgtctgattctttgcctgatgaagtcccttctaaatctgaagtgaaggaaatagaaacccctagtacgaccactgttgacgaggttgataccagtgaaatcaaaccacagttggagcttccagtgcacgtcatgagtgcagaatggtctgcaagaaaaagactgaaaaaggtgcaacttgagaccttagaaagagtctacctgcgaagcaaacggcccacgaatacaatggtcagcagcatagttcaagtgacaaaccttccgcgaaagaccattgttaagtggtttgaggatagaagggagcaagatggagtccctgaccatcgtgctgcattcaagagatccctatctgagattggtgctagttcataacttcttcagataagcctttgttacggtgtttacttggaaccattacaaacatgtaaatatgagctttgaaattatgacaagttttgcaagctcaacatgcagtatcttttagattgtagtctaaaaaaaaaaaaaaaaaaaaaaaaaaaaaaaaaaaaaaaaaaaaaaaaaaaaaaaaaaaaaaagggcccccannnncnnnnancnnttanaaaaanananggggaanccccncgggaaaaaaaaaaaaaaaaaaaggcccctagggc

SEQ ID NO: 128164 - DNA, 227 bp, Zea mays
  Clone ID: MRT4577_48359C.1
ccggccgggaaccctagtcttctgcctctcctcctccagagctcgtcgccaccggccaccgccaccctcgattatttcgtcagttacataaacgtccgtagacagcaccttttctccgacatggggagggagtactacatcgcctagctccagaagatccaaatctatcgcgaccacaccacttttgatgcttatgctgtacgaaaataaaatgaacccgaaattgt

SEQ ID NO: 128165 - DNA, 405 bp, Zea mays
  unsure (1)..(405): unsure at all n locations
  Clone ID: MRT4577_4835C.1
acccgacgccagcagccccacccgccaccccaggcaggaagcgacgcccgccacgacgccgacaaggacagggccagcggcaaccaggacggccgggcgcggagcgacgcaagcaacgagcaccacgacgagggccgcgacaacaaccgagcaaaccagaggcacgcggagaagaccaacaggacgcacgagagccgagggacaaaagcnaaggaagagagggaggagcaaggcggaacaaaggaaggaagcccgaggacagaaagagcacaagaagcagggaagccgggacccacagagagacagcaagaaaagacggacaaggaccggacgagnagaggaccacgcaaggggagcgagaaaggaaagagcaagggggagcgaagagcaaaaagaaaggagagc

SEQ ID NO: 128166 - DNA, 818 bp, Zea mays
  Clone ID: MRT4577_48360C.1
ctccggctgctctgctttgtgagatgctcttcctcgtccggcggcaccgccgcctcgctctccccttctccagtctgcacgcacccgcacccgcgcccgctcccacactgccctcctctcccgacgcctcgtcggtgctcgagacgctgtccctctacgccaacgattggcgccgggcgctcgacttcttccactggtccgcctcccccgccggcgccaacttgcccccgaccgccgccaccctcgcccgagcggtcgacatactcggcaagcacttcgagttccctctcgccacctccctcctactttcccaccacgatcctggggacccggccttcctccgccccgcgctccgcgccctcctcaaccgcctcgccgccgccaacctcatcgacgacgccctccacgcgttcgaatccaccgctgcctccataggactctgcgatgaggtctccttccacatcctcgtcgacgcgctctgcgaccaccgccgcgtcgacgaggcccaccacctatgcttcggcaaggacccgccgccgttcccaccgggcacgaagacccacaacctgctcctccgtgggtgggctaaggcccgcgcctgggcgcgtctccgtcagctgtggttcgacatggaccgccgcggcgttgccaaggacctgcattcctactcgatatacatggatgcccttgctaagtcaggcaagccatggaaaggctttcaaagttttcaaggagatgaagcagagaggcattcgaatcgatacttggtgcttacaacactgcgatccatgctgttgggatggcacagggcgtcgact

SEQ ID NO: 128167 - DNA, 838 bp, Zea mays
  unsure (1)..(838): unsure at all n locations
  Clone ID: MRT4577_48361C.1
cggcgcgacgaggagcagcaatggcgtcgtccagccacaccctcctcagcgctgcggttctgctgtccgtcctagccgccgccgctgccaggaccaactggtgcgagccagggctggtcatcccgctcaacccgctccagagttgccgcgcgtacctggttcgccggacctgcggcctcggccgcggccccttcgtgcccctgccggtgctcaagcagaggtgctgcacggagctggaggagatcgtgccctactgccggtgcggcgcgctgagggtcatgatggacggtatgccgggcggcggcgtggacaggccgccctgctcttggggcgggcagctggagctcgcgccgaccctcgtgtcggaggcggagtgcaacctggtcaccatccacggccgcccgttctgctacgcgctcggagctgaaggaacaacgacggattaggtttccgtaaatgtatatgatgccgccggtgtgtactgaataataagggggaacaagctgtgctcttgttattttctttaatttgaaagtgacccatagggaaaaaaaaaaaaaaaaaaaaaaaaaaagattgaaaaaaaaaaaaaaaaaaaaaaaaaatttttttttttttcatggggtttgcagcttcaagaggaagttctttttaagtgaaatccacaacggctggtatccttttgctctacgtgtttcctttaattgtattcaaagggcaggtgggggtggtcttttggggtaatgggaatggggcttgacctccctgagcgcctgggtgtancgggcnggnctggggcggggccccgcccggggcgagttcccgccccctggggggg

SEQ ID NO: 128168 - DNA, 250 bp, Zea mays
  Clone ID: MRT4577_48362C.1
gttctagatcgcgagggccgccctagcctaaacctgtatgattgttgagatgagtagtctttcttgctgctgttaaaaaaagaacaaggatgacaacgagaaaatacaagatctaaagaagattgatagtgtcgcatcataaggccagggtgcattcccttatcccgggatccgccgtgaggtgctcctgctatccgtgcatgttggcctgttctgaagcattgtgtggttgacaaccccagcttgttgt

SEQ ID NO: 128169 - DNA, 524 bp, Zea mays
  Clone ID: MRT4577_48363C.1
gtaacaggcaaaattgtacatcaaattatatttcatgttacctgattatataaaaatgtaaagtgaaaatgatttatcaattccttttaacattactagtaaacaattcagcagtagatatgaggcacaaaatcttagtaaaatatgacacaggaagagcaataatgtaattctcacttaacttgtcatcatttgttatgaatatacaaagacaaatttctaaaatgttatatttactaagattctggcaatagctttatgtaacaagacacagcataccaggcctgccactcaattgtttatggttaagtctcagcttcaatatgaagctgttaaaaaaaaaaaaaaaaatcaaaagcttgctttgtttacatgctaagtatcttggcaagtatgccattaaacacagtaaggaatttaagatagcaagaataaagaattaataaaagctaaacattgcagcctaaacaaaattcttacaaaaataaaataactatcactggttacataaaattttcctgact

SEQ ID NO: 128170 - DNA, 421 bp, Zea mays
  Clone ID: MRT4577_48364C.1
cccgggtcgacccacgacgtccgaccacgcgtccgcccacgcgtccgcccacgcgtccgctagtgttggagagaagagaatacactacactacgcatggcaaaccagcaccagggccagggcatggcggcattggccctggtgctgctggtgctggcggcggcggcggccaaaacggcttcggcggtttcttgcaaccccgggcacctggcggcttcccccccggcattaatggccggcccagacccttccgcttcttgcggctccaacctcaaggcccaacaggggtgcttctgccatttcgtgaaaaaccccacctacgggcgctacatcaacagccccaacgcgcgcaaggtcgtcgcctcctgcggcgtctccgtgccgcgctgctagtactagtacgtgtgctgtgcatgcatgca

SEQ ID NO: 128171 - DNA, 334 bp, Zea mays
  unsure (1)..(334): unsure at all n locations
  Clone ID: MRT4577_48365C.1
ggggnccaaatnattctttttcaaaatttggtncaanaagggaaaaaaaaaaaatttaaaaanttnattattttnaaaaaggggggggggccctncaccaaaaaaacttaacccttggggtaaacaaaaaaactctgtttttaaaggggggggggggagggaccatgcccaaatttgggcgatggggcggagaacttgggagggaacaccgtcagggccgggcgggaaggtntgttaaggggggaccggggggggggccccagcctngtgggtggggccccgcggacgggggggggggtaaggggaggcgggggggaggggctggggggggggg

SEQ ID NO: 128172 - DNA, 374 bp, Zea mays
  Clone ID: MRT4577_48366C.1
ctatacgatacctctaccggaacagccctcagatggacctggagctgagctatcggttcatggattggttttcccaccatctcagtaactttggcttcacctggaagtgggccgaatgggtcgatgatgcgcaactgccaaatgcccatcccagcaagtggttcttgaagggcgccctggataaggaggtgagattgagttttgcccagagaattcagaagaccctccctgaaccctacctacccttggtaggccccgagaaagagaaagatgttcccgacttcaagtttcagaatcctgaaacaccgttctcgaaggagggccaggaaatcgccagtcttttgtgacggaaaggaccagatgagggagttgag

SEQ ID NO: 128173 - DNA, 646 bp, Zea mays
  unsure (1)..(646): unsure at all n locations
  Clone ID: MRT4577_48367C.1
gcgttcttcatgagtccgatgccnacggctgtgggggggggggggggagacggcggaggaggaggagacgatgagccataggcggaggaggaggaagaggagttcgaggaagaggaggacgagggggactcggggatgggctccgacgagctggacgttgcggagctgggcgagcccatcacggggattgccgggtcggggaccagagcatggccgtgccgttggagctctacgacctcgatggtctcggtgacgtgctctcactccacgcctggaatgacctgctcagcgatgacgagcgtctgcgcctcgccgccttcctgcccgatatggaccaggagacctttgcgcgcacactcgtcgagctcctcgcggggcaaaacttccacttcgggagccccctcgccgatttcctcaagcgcctcaagggcgggctgtgtgacccgagggtcaatctgtaccgccgcggcattcgcttcgtggagcggcgcaagcattactactggctgcagagctaccacaactccatggtacggaggctccgggagattaatgattgctggaagggccgcgagggatacagccttgatgagaggctgaggatgttgttcacttaagattatactagtaacatgcccgtgcgtta

SEQ ID NO: 128174 - DNA, 681 bp, Zea mays
  unsure (1)..(681): unsure at all n locations
  Clone ID: MRT4577_48368C.1
gccggccgggctcncgaagcaaacctaaccaagcctctgcgtttctcactttaaattccctcctctttgattcccattcttgattacgaaggctcgccctatgctctggcaaggccccccttcccaggacaagaatttgaagccctgtgatggccacctgtatggagtcccctatgcaatgatgggttctttcaaccatatccgaatctttgacctgcctagtttcagattcaaaattaccactacccaccgcttcttgatctgccgggccccatggacctctgctacatgcaagtacgagacggtacagaagaccagaataacctcaagagaatgactaatccgatggcacgacgagggcacgaggatatggcccgaccgctcgccgtcgaaagtgtcatggaaatgccaagaagcccaagatgtccttctacttgccaataccgctaccgaccactatgtacaaaggctcaccagcaaaatccagcagctggtccacgccggagcatgtggcgttcaagatcccgattctgacgccgtagtctgccaagtacattcctacgctgatggcacgatctcattgctcggataagtccatatcccaagcgggacatacaaagattgtgctggacgagagcttcggatactccaaatactttgcgcgcaagaactaccctggac

SEQ ID NO: 128175 - DNA, 444 bp, Zea mays
  unsure (1)..(444): unsure at all n locations
  Clone ID: MRT4577_48369C.1
attcggctcgaggaaagttctctctctttgactcacaaccctattgcgtgctttgcaatcgaccccgcttatggccaacagtaacctccctcgaagaatcatcaaggaaacgcagcgtttgctcagtgagccagcgcctggaattagtgcgtccccttcggaggacaatatgcggtatttcaatgtgatgatccttggcccgactcagtcgccatatgaagggggagttttcaagttggaattatctttgccagaagaatatccaatggctgctccaaaggttaggtttctgacaaaaatatatcatccgaacattgataagcttggcaggatatgtcttgacattctgaaagataagtggagtccttgccttgggattcgcactgtacttntgagtattcaagctcttctaagtgcacctaacccagatgatccactttctga

SEQ ID NO: 128176 - DNA, 324 bp, Zea mays
  Clone ID: MRT4577_4836C.1
atggaggacgcagcgatcgacgacagcgtccagagcgcctccgccgtgacggaggtgggcagcagcgtcactgcggcggtggaggaagagtcgcggcggcccggccggggcgccgtccgcggcgaggacgggcggccgacgatggcggacaaagaggcggtggacgactacaacggcccagtggaagcggagacgacgacggtcgtcggccgagacgtggacggcccatcctcaacgataaggctcgccgcggcgaggtccgggtacctgctgctagggtttctcgccggcgcggccgccgcagcgctcttcctgagcagttga

SEQ ID NO: 128177 - DNA, 1097 bp, Zea mays
  Clone ID: MRT4577_48370C.1
aaacagcattcataaaatatttcaagtcattttgggttcccaaattggagatgtggatcgactccatccgaaatctgccattagcaagtcaggagtcatgcggtgccattgaaggttaccatctgaagctgaaggtaaaagcatatgatgacgtgcagctggatgctcttcaacgtgtggactggctagtgcataagctcacaacagagctgcattcgagctactggatcaacctatttgcagacgaaagcgggtcatttcccgaggtgaaagcagactatatcgcatccacgtcatggcaaagggcactccagatacctgacgatgctgttaccttcgacgacaaggatcctcttgtagctagagtggtcagccagaaggaaaccagccagacacggactgtgtggagccctggttctgaattctctctttgcaattgctcgtggtcgatgcagggtaacctatgcaagcacgtgctaaaggtcaacatggtctgcggagcacgcaaagactttcagccctcgctgtcgttccagtcgttccagcatgttctgcttgatctgtggcagaaaccattggacgattcgttctcgcttgacctctcggtagcgcgggtcatgcagatgcaggagaagatcaaacatgtggctgagctcgccacctccagtggtatcgcccaagttgcagggaagttgccgatgcaatggacaaaaaagagagggagaagagtaggcgtcaagcccacaagcgcgctgctgcttcctcgttctaagggcagtttgcagaaggacttgaccccgaagaacagcaggaagaggaagaggctatctagatttaaagggtaaaatgcgccgtcttttcttgtggcgtctctgtaattagagtattagacgactactttttttgttttttgtttattttttgcctgctgtattccatttcctcaattacctgagaacttgctcagcgacttccacttcccttatgtctcctagttttaggaacaaatacaatagctgtgcaggctgtaatgcgaagccactggatgggtggatgttttgatagttgcaatgaatacctccccccccccccccccc

SEQ ID NO: 128178 - DNA, 710 bp, Zea mays
  Clone ID: MRT4577_48371C.1
gacgcctgcaggttccggtccggaattcccgggtcgacccacgcgtccgcgcgccttagcagcattgctgtagtctgagcgtgcgcatttctttctgtaggctccagaggacacgagcgacccggaagactttcctgccacactccagagctggtgtgaggggcatcgatggcggagacggcagcggagagcggtggtggcggtgactccggggttggcgcgtgcgaacggggggtggcgcccattaaagctcagtaccgcacaaccaaagaacggttccacgaatatctggatggagacaagcaggagggtgcatgccaggaagtgcccacaggagacccagctgagccaggggccaaaagaattcgcctggaagatgggcaggaaaatgggaagacagaggtggcaattgaatcccgtgaaaggcaggtgcccaagagggcccgtggccaaaacaaaagccggccccatgtgaagccagcacactacgacaaggacaggctctgcccgtccttcctccaggagccggccaccccatgtgcatttggagaccgttgccgcttcctgcacgatgtggggcgctacctggagaccaaaccggcagacctgggcccccgctgcgtgctcttcgaaacctttggccggtgccctttcagcatgacctgtcgctttgctggagcacacctggggcctgaggggcagaacctggt

SEQ ID NO: 128179 - DNA, 356 bp, Zea mays
  Clone ID: MRT4577_48372C.1
gctgggcagtactaaaaaactccccccggaagctgtttatggccaaacatgccttaaaacatgttgcccctgcttgaaaggggcaagccttgacaaacataaattaaaccctgggaaacacaaggaatacacacttggcctaataggcttaaaaaaacaaaaacggtggcttttgatgagttcacattggtgcgggtgtgaaaaagcctattaattaatatgaactccaaccttggaaggcactttgttgggggccgccagaatatttccagggtgtggacctgtttcctacccttggaaagggtgagggccaccggcatctggattgcgagcgtgatcggaacctttttgggctt

SEQ ID NO: 128180 - DNA, 310 bp, Zea mays
  unsure (1)..(310): unsure at all n locations
  Clone ID: MRT4577_48373C.1
ctgcagcgcagagcaagcgaagcaaccatcggcggngccattacgttttcctgactgcattcactagggagggnatactgcgcgataaggccatgggcgagggacccacgacgaaaccactcccactccggggttgcgcttgcgggtggggagaggagccgtgccgtgccgtcgaaaagactccggccggccagccaggccgttggggggcggnggcactaagttgacacggcaccggcaggcacgatcgctagctaataaaccgtgtgtgcctggcagcgagcgccagaaaaagcttgcgcgctcgtgt

SEQ ID NO: 128181 - DNA, 585 bp, Zea mays
  Clone ID: MRT4577_48374C.1
gaccaaacgggactaagattgttctgttcaactcaatccatacatgttctcgttctctctaacatcagcagccctctcagtaagcaggaggggggggggggggggggggggggggtaagtctgggggtcaaatggagggtttggggttttgattcgccacctcagcgtctccactcagctttcagtggtctctcgctcgcatctcttgatgacagcatagccttgtcgccttttgctccgtccttgccaccagcatgggttggcctttgcgtacgtggagaatgtgaaattatcttaccattgttaggggacggaagggagtgacgacgagtgaacccgtttttctctgctgaatcagagctaagtcttggtgaactattcccccgcagtttcgcctttgcagattgtgtagcagccatgtagcttggcagggctggagaatttttggagccattttctggatattcaggtttagctgagaatgaagacctcctcttgctgcctttcaggttatcagtagatgaatgttcttctttggatctctcttccacatcattcaccaaagcattttcttcgctgttgatg

SEQ ID NO: 128182 - DNA, 192 bp, Zea mays
  Clone ID: MRT4577_48375C.1
ggttcgcgaggtcccattttgctttcccccctgtcttgcagtgcgttgatgcacctcggggcttttgtggccctccgctgctacttaagctctccgcccgtacacggcttcatctctcatggcactcgctgtcttctgatagctgctgctatatctacttcactaacctaagaagcgtctgtaggtctggat

SEQ ID NO: 128183 - DNA, 700 bp, Zea mays
  unsure (1)..(700): unsure at all n locations
  Clone ID: MRT4577_48376C.1
aattcggcacgaggaacaacttttgaagagagagccgggctgcggttgaccggtatccgtcgaactactggatttcaagttgcttgttcaaattaaagattataataccaaacatcgggctctattaacggggacctcattccacactaatcttaatgagcttctcatgcttatacacttccttgagggagaaagatgtggaagtataactgatctccaagaagaggtcaaggatataaaccaagacaatcaaattgagaagcttcatggaatgctaaatccacatcttcttggaagattcaagaacgatgttatgaaagaacttcctgcaaaaaaggaatggattctacaacgtgaattgacaagataacacaaggagtactataaagcaattctcaccaagaattatgaacagttagcccgtcgcaatggaggacatacatgtctaataaacgttggaatggaggtgcacacactctgttgccatggattcatgattgatgaacctgatcttgaacctgccaatccacaataaggtttaaagacgcttctatattcatcaggtaagatgcagctgctgcacaagatgatggagaaactganagacaaggncatagatctctaatttattcacagttccatcacatgttggacttgctggaggactatttgaattacaggaaatggacttatgaacgca

SEQ ID NO: 128184 - DNA, 432 bp, Zea mays
  unsure (1)..(432): unsure at all n locations
  Clone ID: MRT4577_48377C.1
cccatgctggtggcaaggacggagcaaatggcgacaaggctatgctgtcatcaagagatgcgagcgagagaccactgaaagctgagtggagacgctgaggtggcgaatcaaaaccccaaaccctccatttggttagtgcaactatttgggtcggtggatggcgtctgcagtttgctcaacttatttacagggttttgggtcatgccttttgtgatgtatagctgaagtattttcccggtttgttttgtttcccagacccccagacttacccctttcctttttcttnttctctccttcttctttctttcttttttttcttctttttcttttttttttctttttttcttttctctttttcattttttttttttttttttcttttcttccccttttcttttttttttcttttctcctttctttttttttcttttt

SEQ ID NO: 128185 - DNA, 945 bp, Zea mays
  unsure (1)..(945): unsure at all n locations
  Clone ID: MRT4577_48378C.1
gtggaagttgcttcagatctagtcacaatcacaaatgaagaaaaagttgatgagacaccatctgttgttgctccagcggctgaaattatgccactgcaagacatcaacagcgaagaaaatgctttggtgaatgatgtggaagagagatccaaagaagaacattcatctactgataacctgaaaggcagcaagaggaggtcttcattctcagctaaacctgaatatccagaaaatggctccaaaaattctccagccctgccaagctacatggctgctacacaatctgcaaaggcgaaactgcgggggaatagttcaccaagacttagctctgattcagcagagaaaaacgggttcactcgtcgtcactcccttccgtcccctaacaatggtaagataatttcacattctccacgtacgcaaaggccaacccatgctggtggcaaggacggagcaaaaggcgacaaggctatgctgtcatcaagagatgcgagcgagagaccactgaaagctgagtggagacgctgaggtggcgaatcaaaaccccaaaccctccatttggttagtgcaactatttgggtcggtggatggcgtctgcagtttgctccgattgttttgcttgttatgtaaaaaagacgttatcatcattatccgcggcgatgaacgggttcagctttgttgtgatgaatctgctgggagtcaacttatttacagggttttgggtcatgccttttgtgatgtatagctgaagtattttcccggtttgtttttgtttcccagacccccagatttaancccccctccccccccccccccctcctgcttactgagagggctgctgatgttagagagaacgagaacatgtatggattgagttgaacagaacaattttagtcccgtttggtcaaatctgggctgcgttttaactgaaaaaaaaaaaaaaaaaaa

SEQ ID NO: 128186 - DNA, 315 bp, Zea mays
  Clone ID: MRT4577_48379C.1
agccgcgtactcctggggaacaggggaagcagacagagggctcaagctgaacagtgcagacaggcagcccacgcaggagccggaactggatgacgaacccgctcacggagggagagaccaacggaggggaagagacagggaggcggcggccggcgagggagacaagaaggggggctcgcacctaaccgcttgagagggtgaagtcgcctgaacctcggtggacaacgggcatcaagtctcgcgtggactcacgcctcccgatacactatcatacaagggcgccacgcgagaacccgacaaatcttgacaaccaca

SEQ ID NO: 128187 - DNA, 593 bp, Zea mays
  Clone ID: MRT4577_4837C.1
tgagtacttgacacgctcctgctcaggccgccggtcgctcttttgctctctcgcttcgccgccggtcgtcgagacgagagtggccgccgcctgaattcttcctagccgctcaaccaaccatcgaatgggccaagaacagagccagcccgacccggcggtgggggagccttctccgccggccgccgaccccgcgccggcgcagtctcctgccccagcgccctcctccctcgaggagctcgccgcaggtacacgccaaactctgaatcttaggcgccggtggcgttcagctcgtattcacgctgttccagcagacgcgcggccgcgtataggagtagttcttcttgattcgcggcagcatataggtcgcccgtcgcgttgctgggatttggggagcataggtggaagcagagctctagggcagctagtagcctagtattacgaattgttgcgggttttaaggtggacgagattgttcctgtgattctccagtacttggttgtgcagtgcagaccttgtactggatggtaaactggtgagtggtgacctctgacatcgtagaacatctaggcgttcatgccgaaatcgaggcagtc

SEQ ID NO: 128188 - DNA, 559 bp, Zea mays
  Clone ID: MRT4577_48380C.1
ccccccccccccccccccccccccccccccccccccccccccccccccccccccccccccccggggaaatttttggtttgttttttttttttgttttttttttttttcttttgggaatagcccttattcgtttgccccctggggggggggaaaaaaaaaaacggggggacccccttaacggggggcggaaaacccggaagggggacccccgaggccggggttccaaacgtttttttttccaaaggccccccgaagcaaagaaattttaaccgtttgaaaccccaaaccccccaaggaaccaggttggaaaaaaaccgggctgggacccttgaatttacccatagccggaaaattggggccacacgggccccctgcccccggggggagccccgggggggggggggccagaggactttcggcttaccccccaggggggggggggggggccccccccttgtgccgaaaaccaaaaccccgggggggccgcgagcccaaaaacggccgggccccccagggggcgccggattttgggccccccccccggggaaaaagccccccc

SEQ ID NO: 128189 - DNA, 268 bp, Zea mays
  Clone ID: MRT4577_48381C.1
agcctttgcagtccatccatttgtctttacgacaaacagtcactctttaacccaattttgctgtttcttttcttcattcttttcttttccaaccaagtaaacaaaaaaacccttcatttcaaccgtcaagatgcgattcactctgtctgttcccgctttcctggctctggctgccaccgcctttgcccagactcccgactttgaccccgtcaacagccccagctccaaccaggtcatcaccgccggccagcccttcaccatccagtgg

SEQ ID NO: 128190 - DNA, 471 bp, Zea mays
  Clone ID: MRT4577_48382C.1
ccggccgggatggctgtgataggtcctccatacaccacccaaactaagaaaactgcgaggaggtcgactcctttattctgcagcgtcggtgatgacgccagttcgtgacggcggggcggcggtagcggcggcggtggcagacgcaacggcggcggcgttccaagttcttgcgtacgtgagaaggcacctgcttcttctgatcgttgtgggggaaaagggtggagagggttttttttgaaaaagtggcaagggaaactgctcacagtgcgggagggccattttgcaattcttgcagcatccgttggatcagatatcaatagctaacgttccatttgtgcatttgtgcatcgcggctgccttgtgcacctgatacgacgccaagttccttccatgccactcagtcgtcttggctaagttaaatcttttttaaatgttcttttggacttcaaaaaaaaaaaaaaaaaagcggcc

SEQ ID NO: 128191 - DNA, 440 bp, Zea mays
  Clone ID: MRT4577_48383C.1
ccgaccccccaaaggagggaaacaacagggggaaaacaaacaggggccactaaataacaggccacccaaaggtttttttggggttaaaaggttggggaaaaaggaaattccggaaaaaaaaaaggaaaggaggagcgggacgggcttctcccaaccaaaacaagggaccaggagggccaagaaaagcttaaaaaccggaggggcccccccccccgcaaaggcctaaaaaacgggactggcctcccggggggaggccagcgcccccggggtgggaaaactttaaaaaaaaatcttcaactttggggcaaaaaacgggacgaccccccattaaaagggggggagcccccccaataaagggaaaaaaaggattgggaaaaaaaaacagggggggaaggaaaacttaaaaaaatttacaaaaccaaaaagggggccccaggggg

SEQ ID NO: 128192 - DNA, 1036 bp, Zea mays
  Clone ID: MRT4577_48384C.1
gaaagggcatggcaaggccatccacacaataaacatgcgtcccctcaaaagatggcatcagggaggaaattggggcagaaaggaggggagcagcctgtagtgcatctatctttacacctctgtttgttggtagcatcgtccaccactccctccactcagaaagaagccacacgcagacggcacatcgctttccatggtcgcctcccattaaaacacctgttatgtcagcttcttccggcatcgttgagatctcccaatctatgtgaaacgctcgtcagcgctacattaactgtaagtgttaagttagctgatcaatggcgcatttccaacaaacgcagtatgtttttcactgtctaaatacccagcagggtcatgtcattccaaccagatgctgttttctgcaaaaaaaaaaaggagtatcaaaaaggtgtgataaatgttgtttggggtatcatattcgttgaagtaagaacagatatgaaatgtctgctgcatttgcttgtgcggttttaggctatgaccatctgatctgatcgtgtatatggtggtgcaaaacaatttttagccttttaggatgagtaaactgctaggctttgccatgactctggaattaggaacacaagtgggttgacactgtgctgtcatggcggttgagtcattgactctctttgttttatcgaaaatcatgcgcggcaatcgcctgcaataccctttctcttcctgcgtctgcacactacctgtatctgtatgtacggaaactaaccagtcgccagccttctcatctggctgaaacagaccatgccttgcgccgccaccgagctcgtccatggcgagggaggcacggtcaaggtaggcacaacgggcaccatcggctcgctcatgacaagggagctggactccaccaaggtggcggcgccgcaggcagccgcggccgctcgtccgacgtctccagcagcagcaacagcaacagaaccggccgcgtgggcaccgtagaggcgtgcaagccgaggagggcctcgcggacgaacaccttcga

SEQ ID NO: 128193 - DNA, 170 bp, Zea mays
  Clone ID: MRT4577_48385C.1
agaaaagattcctagtaagggaaggaggtaaagatttgcccttttctatgtaggctggttcctacactcaacatttcctctgctccactttttgtacccccccgatttaagggcaacacccgggtcgatctcatccctccgccaaagatgacaacttttctattaccgaa

SEQ ID NO: 128194 - DNA, 2728 bp, Zea mays
  Clone ID: MRT4577_48386C.1
ggcacagcctatggtaagggcgtgaccgaggttgtcatcacgacgccggacgtcgtcgcagcagaggatggtcggtatctctgctcgtcgggacggcaaggctatgcaaataacaagggagacagagataaaagttcaggagtagcattgtcagtagattttgcgttttgtacagcttataagattttgtatccggcaggaagacagctgaactgattggaacccggattgtttatggattgctgcttctatgatggctgtcatggaagctgatgctaagccaagtctcctgatgaatttgatttggctcatgccgcaagaggaccaggggttccgttttgcaagaggtcattggcgcctataattacttggtgtcatgatccaagttggaatgttgttgagaaaaggtacagaaagtatgaactcttaaatatattggagttcagtagctcaaggagacggatgtccgtgatagtcaaagaaccagagggaaggatattacttctcagcaagggtgctgatagtgtgatgttcaaaaggcttgcaccaaatggaagaaaatatgaagaagaaacaagaagacacataaatgagtattctgactctggtctaagaaccttggttctggcataccgtgtcttagatgagaaagagtacaaggaattcaatgaaaaattgaacgctgccaaagcatctgtaagtgctgataaagatgaaaaaattgagcaggttgctgatagcattgaacgggacttgattcttcttggtgctaccgcagttgaagataaactccaacaaggggtgcctgaatgcatagacaagcttgcacaagccggaattaagatatgggtcctgactggcgacaagctggagacagctatcaatattgggtttgcatgtagcctgcttaggcaagacatgacacagataattgtcacactggaacaacctgacatcatcgcgttggagaaagatggtgacaaatataaaatttctaaggcatcaaagaaaaaggttatgagtcagatagaggatggaatcaaacaaattccaccttcaactaaaattagcactgcatcatttgcactaatcattgatggtaaatcaataccttatgctttggaagatgatgtcaagtttaagttcttggatcttgctatcaactgtgcatcagtgatatgttgccgatcttcaccaaaacagaaggcactggtcacaagatttgttaagcaagtaacacataaagtgactttagcaataggtgatggggcaaatgatgttggcatgcttcaagaagctgacataggggttggcatcagtggtgctgaaggaatgcaggctgtcatggctagtgatgttgctgttgcccaattccgctttttggaacggctacttctggtgcatggacattggtgttaccggcgtatttcagtgatgatatgctatttcttctacaagaatgttacttttggtgtcactctctttctctacgaagcatttgcatctttctctgggaagccagcttataatgattggttcttgtcactctataatgtcttcttcacctcccttcctgtcattgctttgggagtctttgaccaggatgtgtctgccaggctatgcatacagtatccacagctataccaagaaggagtgcagaatatattattcagttggtgtcggatacttggctggatgcttaacggtgttatgaatgctgtcttaatatttttcttctgcatcactacctttgaggaccaggtgttccgccgggatggtcaagttgcaggcttggatgctctaggcgtcgccatgtacacttgtattgtatgggttgtcaactgtcaaatggcgctctctgtgaactacttcaccataatccagcacatattcatatggggcagcattgcagtatggtacctcttcctcatagtttatggttccatgaacccgaggttctcaactacagcctacatggtcttcatcgaacagctggccccagccctctcattttggttggtgacactttttgttgtgctggcaacacttgtcccctacttcacgtatgccgcgatccagatccggtttttcccaatgttccacaacaagattcagtggaagcggtacttggggaaggctgaagacccagaagtggcaaggcagttgtcatcacgacaccggacatcgtcgcagcagaggatggtcggtatctctgctcgtcgggacggcaaggctatgcaaataacaagggagacagagatagaagttcaggagtagcattgtcagtagattttgcgttttgtacagcttataggatattgtctccggcaggatgacagctgaactgattggaacccggaatgtttatggattgctgcttctatgatggctgtcatggaagctgatggtagagcaagactacaaattgcttagataggtcacaactcacaaggaggccaagagatcctgttgtaaagttcaattttagcagttcaaggctttgtgttttccccccctgcttctcttacatcatagatgcttgtaaccagattggtagtttcgttgtttttattcctctttaccccccttgcctgccccctctcaactgtattttaaacaataatgtaaggcatcttgtttgagtggctttcatgctttatttgttggaaagaatcataattgagtgagtgatatagaatgtaaagattggcctctaatatttgtttcg

SEQ ID NO: 128195 - DNA, 419 bp, Zea mays
  Clone ID: MRT4577_48387C.1
ggggcaaaaactatacacacgtacggacccataaaatgcgtacgggagtttttattcaatcgggaaattaatcaggacatataccaacgaaacgggtagctagccagcttttttggggaacaaaaacgactagggacatttggtcccacaggagggggaaaaattataatcgaatgaacggccagctagctaggagctccacactccatggattaaaaactactacggacacgttttggtaactagccggccgaaaacgatccggaacaaaaaaaaaaacgtacgggggataaacaggtaagcttcacttccacttgggttaattttattggggggggggtttttccgggggggtagatagattttttcaaggggctctggacgttttactttggcaagggcccaagggagggcggttt

SEQ ID NO: 128196 - DNA, 173 bp, Zea mays
  Clone ID: MRT4577_48388C.1
ttttcgcgtacgctgacacgtgtgtgctgcatgggtcctgcatgaatgacagggggtcctaccaaaataccgtagtcttcgaggccatcaattacattcgtgttagctgacgggtcggcctatatgaagctatcaacgctaggtccacgtgcttgcgagccaataagtctttt

SEQ ID NO: 128197 - DNA, 136 bp, Zea mays
  Clone ID: MRT4577_48389C.1
atggagacctagttgatcgctcagccggtcgaatgtgaatatcagcgctgcagcgctctgcagtctaagtgctagaatatgttgccagtgatatgacacacacgacgcaccagatatctactgacttgaccgcctg

SEQ ID NO: 128198 - DNA, 726 bp, Zea mays
  Clone ID: MRT4577_4838C.1
cattgggtacctcgaggccggccgggtttttcttcgaggctagtcatcgctcaaatatggtgtgcatgcaactgtattcaaaagaaattgaatcccctcctggagcttccagtgcaacatctattctctcacgaaatttgcaaactcatgggttcgactccaaaaagtctagtgaagtgaaggatcttgtttggaaattttgtgcatggagggacttaatggctcggatgcatgatgaaagcttacgatatgttctgccagaccaagctatagctgcccttgccgttagtcttccaaagggcccaacagaggtgtttgctgtcatagcagaaactgacctaagcatttcaagtatgtacccttccttgtcatcaccgtcacctcttgttgtggctcatgtcaaagaactctgttatctgctggatgacatcactaccagcatggacagcatctttaaaagtttactagagaagtataaagatccaagtggattatgtcgactatcagtttataattataaccttataacacacctaagtttgaagcaaacaagtatgttttccgttgctccaagtggaaagaagttgacagcactgcctaataaaaaggtttcacgggatttattcattaaaaagttttcctgcaagtccccggtatatcacaattgcaggatttatgctagtgatggaagactactttgctactgtgaccgcaaaaaactggaat

SEQ ID NO: 128199 - DNA, 837 bp, Zea mays
  Clone ID: MRT4577_48390C.1
ccggggcgcagcttctactaaaccgtgaacgccacgcttggttttctggctcccagtcgcgcctccctgagctccatggtgcgcgctccctacccagccggcgtgcgctcatctctctgagcacctgcacgccgtggcttccctctcccatctcccacggtcggctccctccctgcttttctctccctatctctatccatggcgcgcggcttcgatttcaccacgtccagctctgccatggccgcgccggcttggagcttccatgaccgccgccctgccctgccttccatggttgtgcgcttgctctgctcggaatccctcccatggcgagctcgccggtcatccctgccccagctcggatcccctccctctgctcagcccaccgagtcaactcgcgccggcgctcctccttcagccacgccagccgccgagctccctccactcgtcttccctctgttctgagcgtcgtcgccttgctgctcgcccctgcgccctcctgctgctcggtgcccagccattcctctcttctccctcaagctcgcccttgctcgaacgtgttcccctgcgtcctcccctgcatcgcgcgctccttgctccaagctcgtcacgcacgcctaggcgctgcccatggtggccgcctgctctccctgcgtcgcgccaagtttctccctcgccatggccggtcgagttcttcccagccgtgaaactccctgcgcgctctgtttctctgcgcgcgcgtgctcgccggctgtgcagctcgtccatggcgcccatctctctgttcgcctctgtgcgcagctccccaagctcccatggctggcgcttggtcccaactcg

SEQ ID NO: 128200 - DNA, 457 bp, Zea mays
  Clone ID: MRT4577_48391C.1
atcaagcagctttgatgcataagcataaatctagccgattttatgaaacctacgagcttggttgtgcaaaaatctgaacaaaaatctccctcaacatccatgtgccagaaatctcaataaaaacagatctccttcgtccatctgaacatattgcatgaaaccttgagcatattgtaagtagggcaggactcctcagtctcagtgggcagagctacagctaagcgctttcgatcggacccgatacaagccatcttatggtttcagacatgacatatctgcacagcaagcaaacctaggaagcatggtcaaggccgccgatggagtcgaactcgacgtcgatgttgtcggggttggtgccaccacacgcaatcacgttgtcggtgagggagacaccctcgtgccctgaggccaagtgaggtgaaccctatctgggggaggggggaggcagatgtggata

SEQ ID NO: 128201 - DNA, 219 bp, Zea mays
  Clone ID: MRT4577_48392C.1
cgcccgagccaagcgttcggtcgatctgctctgcctcatcccggcatgctccgccaccagagtaccagaggcggcatgcggctaatcgctgaaaccgtactgctgcaccatagtcgtgaactaacattaaatggacttacaggcagatatctattgacatggctcaaactcaatcattggcatgagctgatgttgctcactctgatcctaatgaacctt

SEQ ID NO: 128202 - DNA, 384 bp, Zea mays
  Clone ID: MRT4577_48393C.1
agagaacgctgttgagcagggttgccgagacaacattggcaagcagcttgacaacagagcaggaaggcatacgctccacactgactacactggcacatcgttggagaagacacagcgcggaactgtggcagcagtcacaagttagctaccaaggtgagtagacagctctacgcattcagatggatgacgtggctgctaacgcacgagttgcagctgcgggacagcctcagcctgtgggacacactaggcggacgatccctgagggagcccaggctacacagttgaggctgtgcagcgcgaagctaattctcgcccggagacagctcttgactggggattgaactgatgctttcacggtggttcagaactacagactcacaaaca

SEQ ID NO: 128203 - DNA, 192 bp, Zea mays
  Clone ID: MRT4577_48394C.1
agagcttaatgttacaataatattcagagaacttattacactagcggcaagttttacaaaaataaaagtataaagatagaaatgaactaaggatcgatccttgctgccataaagtcaactgggaagacgccaccgtagatcgaatgcgaactcactcgatgggatggcgttctcttggaaccacatgtgtct

SEQ ID NO: 128204 - DNA, 361 bp, Zea mays
  unsure (1)..(361): unsure at all n locations
  Clone ID: MRT4577_48395C.1
agcctanagtcggcggccgctcgcggatctagaactagctcctgaccttactggatacataacaagaggacatgattcaacatgaacaggtcatacctaacagacaatatatccaagacaatgaatacaagagaatttgctttaaaaatgtgaaaaggcgcaagtataaaacagttatactgttataaaatacatgcgaggcaaaaagacagtcctgaacaaataagttaaatatgggataatacttttccaaaaaggatttaattcagctgaacttaacatcattctcaacataactaaaaaataacccgtgataacaaatatatagtgtttataaaatgaagacaaataggatgaccat

SEQ ID NO: 128205 - DNA, 962 bp, Zea mays
  Clone ID: MRT4577_48396C.1
aaaaatttcttatctggtggtcttcttgttcaatcctcatctcgatcggggaggccaccaaccacgaaccatatggcgggagggaaggtttactcgttcgaggaggtgaggaagcacagcgaccgcaaggactgctggctcatcatcgccggcaaggtacgtatatttcgtcaccggccgacgatcgactccgaccgtgtttgacgcccccggcctcgctcctgctgctgctgctctgctcaggtgtacgacgtcacgccgttcatggaggagcaccccggcggcgacgaggtcctgctggcgtccgtcggtaagtaaagtagtctcagactccagaccggtggtggtgactggtgagttggtagcgcttactgatgatatgtccacgactcaccgccgccgccgccgtcttcgtcgtgcgtgcgcaggcaaggacgccaccgcggacttcgaggacatcggccacagcgcctccgccaaggagctcatgccccagtactgcatcggcaaggtcgacgcggctaccttcccggccaagcccgcctacgtcgtcaccaaggacgacgccaggtcgtccgagaaggccgcgacgagcgccggcgcttgggccacgctcctgcagctcgccgcgcccgtcctgctgctggcgctggccttcgcgctgcagcagaactatgccagggccaaggcggagtagacaagatacagatagataccatcgttgattccgctgagtcgcggccgtgcggcctctttggaagcatctgaattacattttcttcctggcaaaattaactactcgtggtttcgttactttcgtaataatggttacattttcttcctggcaaaaaaaaaaaaaaaaaccgcctgggtgcataggaaggacttttacgctggttgcactaaaaatcaaaacacttcgagcactactttccacgaaaaaaaaaaaaaaaaaagcggcc

SEQ ID NO: 128206 - DNA, 407 bp, Zea mays
  unsure (1)..(407): unsure at all n locations
  Clone ID: MRT4577_48397C.1
cgcgctcctctacccactataaaagctttctacnactctcttctctctctctccaggggcacctttaaactgatcgaagacccataactccaccgccgacgacttgaccgcggtggtggacgaggaggcgtgcatgtacaccatgcagctggcgtcgtcgtccatccttcccatgacgctgaagaacaccatcaagctgggcctgctggaagtgctgcacaaggaggccggcggcggcaaggcggctctatcacccgaggaggtggtggcgcggatgcccgcagcgcccgactaccccaccgccgctgcggccatggtggaccgcatgctccgcctgctcgcctcctactacgtcgtccgatgccagatggatgacctatacggccggtacgagcgcctctactcct

SEQ ID NO: 128207 - DNA, 366 bp, Zea mays
  Clone ID: MRT4577_48398C.1
gtaacacttgaccggagacgacggatccatgtacggacgcccgaccgttcattaggtaataacaatgacggcggagaataagatctacccgccaactctacaagcgatatacggtaaccaaatcatctaaactgacggagtatagtgcaccgctgtgcagcacttgcactctttattctgatgaaaattcatattaatcacgggctggatctggcactacatgctgtagatgactgtcaccgcgcactacacgatgctgaccacgtcgttcatgactctacccaggatattgcacatcatcgcgacctgggcgagactacgcatcacgagggaatcaatcctgagatgatctactgcgtctcagag

SEQ ID NO: 128208 - DNA, 259 bp, Zea mays
  Clone ID: MRT4577_48399C.1
ttatcttatgggttttttttgagttccggcggtgcaataccacagttttgagggcgaatcgacaaaactatactgcgggagttgcaattcccgacgaactaccttcttccacaacaacgccctcggtgggagcttctaagaggtcaaccggtccatctactacatctgccacgtcatgcacggcctgaactgcccaatgaagacgggcgcccacgaccagatgtaccgcttgtcccgcacacttatccgaaacccagac

SEQ ID NO: 128209 - DNA, 326 bp, Zea mays
  unsure (1)..(326): unsure at all n locations
  Clone ID: MRT4577_4839C.1
taatgntttcaaagatttttttccattctacaaacggaagtttaagaagtaacacccgttgcctttcagaacatgtcccgcatattcaaagagggaaaccccacccttaaattccgggggcaggggggtttcaacaaaccgagcggggggcaaaaaaattttcaaaaacccaccaaactacaaaggattggaagccggtccaaaaaagagaacgctcgtatgggcctacaaaaaaaaaatttacgggggaaaaaagttcccccaaaaacggttgtgacaccttgtgggccaaaacaccaacggctgaaaaaaaacatgtccatttt

SEQ ID NO: 128210 - DNA, 269 bp, Zea mays
  Clone ID: MRT4577_483C.1
ggggccgaccaacccttccgcccacccttccaaggtaatcaacatcaccattttcaacctttgcccatccaaatggtcccagcagggccaattttgaggttattttccccacccccaatttaatccgaaaccccttcttggaacgtcgtaaaatggtcttgaatgtcttcaacccaaaccggccaaacgtttcaaaggacaagctccttggaaagctcgttaagctgtccaaggccaaaaaggacaatttttccgttttcggtttaaaa

SEQ ID NO: 128211 - DNA, 1088 bp, Zea mays
  Clone ID: MRT4577_48400C.1
agaagagagaaatgtttcaaaaagagctcgttatgacattagatcaagcttctacacagaatcaacgtcttcctaagggatatgcttatgttcctcgggattccttatcaaaagagaagctatggaatcgaaatacacagccacttaatccgcaggagcctggtggataggatcagttgaaatcaagtcggttcatttctctcgaggaaggtcatgagaaacttgtgcaggcatgttctttgcaactgaaaacgacaagcggcaagcaggggctggccagtgctattgccgcaagggttacagccaatccgtgatcttttttggacccaagttgcataatggtgcagactgaggtattcgtgtgaatgtatggtgtggcaccataacaagaaggctgcccccacccaggtaacgcgaatgatcagcaatatgggtgaattgacctacttgtgctataccaaagacagcgtgccaactgtatatatgagttttattagtgtgcagatttcataaaattgccctgtacattctttcctttgcaaatgctagtttagttgtgcaggagaaaaagaattataaatccgttttggttggataagaaaagaaatagtttggttctttatcatggttcagaagaaaatgcagtggtgcttgcgggcaacgttgggcagctgtttgcctgatacatgtactctgtaaggatggtgaaggtgccaaaaataaggtcatgtcactgcttttcgccaactatttgttggtgctaactgggaagtggtatcatacaggctgagaaactgtgttttagctcttgtcgccggtggtttccgagagccccctttttttaaggggaacagtggtctctttaccggtttttagatatcaagatagcaacaatgttgaagttgggctgtaagttcttaggttgagaaggtatgatagctgagctttttttttttcaatttacatgtggggtatattgtatatgagacaggtttttttcctgcttgccgtccagattataaccttggttgggcctgtttagtaaaaaaaaaaaaaaaaaaaaaaaaaataataaaaagataaaataa

SEQ ID NO: 128212 - DNA, 492 bp, Zea mays
  Clone ID: MRT4577_48401C.1
agctatctttcgatgcttctcgcgggcgacctcaccgccgacgacccggacgacatctccccgcgctccctgcccgatacatcgtccgatgggcagcgccggcgcaggaggcggtctaagcgcaagcgtgggttccggagccccccgatccaggaggcggtttcggagggggagcagcagccgcgcgtggagggcggcggcaactcggccgcggcgttcagggtcctggatctgaagtcgactgcggagacggtgtgcgagagctcggacgcggaaaggtctgcggcgagctgcgtgacctatgttggcgtggagctgaggcagaggagcgtctccgggggcgggagggtggtggcagcgtccgcggatgatgggaccagcagctgcggaagcagcacgcgggagagcgccgcagctgctgcggctgtggccgatgtggcaccatggcgtggcggcctgaggcaaatggcggcatgaagaaagagctggaga

SEQ ID NO: 128213 - DNA, 219 bp, Zea mays
  Clone ID: MRT4577_48402C.1
atattaatagtattctggaagatgtattaagaagcattttaaatgtcagttacaatatgagaaagatttggaaaacgagactgggactatggcttattcagtgatgactggattgagatgatgataagagaattctcgaactgcatgtattgtgccagtatgtcctgagtgttcatgattggtaccaaatttaatgaacgcgtgttctgtaatcaaact

SEQ ID NO: 128214 - DNA, 562 bp, Zea mays
  unsure (1)..(562): unsure at all n locations
  Clone ID: MRT4577_48403C.1
ggaaaacaagnaattgcattctcttgttaacggagtgagtacagtatactcattttttttttaaagaaaatgagtgtcatgagcaaactaaaaactacatgcatgtaggtcaggcttcttcacatttggccagttttttttatgtttacaaaatgtacataccgatatgatgcaatttcgttttcatctaactaatctaccattgaacactatatcttaactaatagtatgttcgtattctccaaacgttagtacatttattttgtaaatttgattccaggcatggtgttacacatacaggatttgacttattatattagaacgaactaaaataaaacaccttgcatgcattttaatttaaaaacagatcagttccgtttccaaaaaaaaagaggagtatatatactnttggtgtactttgtaggtacttcattagaaaggttaaaaaagaatcgagtgcgctgtgtttttaccgcgatgtagtaattatggtagtagtagtagcagctgtcaaattaaatttagtaccgatggtgaaggagctgaacatgttctcgagcgc

SEQ ID NO: 128215 - DNA, 584 bp, Zea mays
  unsure (1)..(584): unsure at all n locations
  Clone ID: MRT4577_48404C.1
cattgggtacctcgaggccggccgggatcatctcttaatcatcccttgcaagtatagtcatcgtcggctgctacaatacgtacgcctacaggactacgtgatccaccaacgggcatggggcgcgcagttcactgacaaggactacacggaccctcccccggcgccgctgatcgacgcgactgagatggagtcctggtcgatgtaccgcgacgtgatcgacgagtgcatcatcacgatgctgtacctcgaacatcaccgagaacatccgtgatgcatgactacctcagaatgacgcgcctccggccgccgcctacgctccgtgcttggtgatgtgggcgataagcatccaactgttgcttccctgaaatgatctgcctactcaacgactgcacctgctgcatcatttcagcgtcacatccatcgccgacattccctgtctcatgacttactgggacgaaaggatccctgctgctggcgcatgctctaatcagctacgcagggactttgagctacncgtggcctcgtacatcacagatggcgccatgtagatacttctacataagaggacgcctcgcctcatctct

SEQ ID NO: 128216 - DNA, 549 bp, Zea mays
  Clone ID: MRT4577_48405C.1
aaaaaaaaaaacaaaaaaaaaaaaaaaaaaaaaaggaaaaaaaaaaaaaaaaaaaaaaaaaaaaaaaaaaaaaaaaaaaaaaaaaaaaaaaaaaaaaaaaaaaaaaaaaaaaaaaaaaaaaaaaaaaaaaaaaaagggttttgggggggggtaccccccccccggggtttccggctttccttttcaaaccccccccccgaaaacccccccccgggggggcccaaaaccccggagggtttttccccgccacccctggtaaagggaaaaaaccccgggaaaagggggggggggaaaacccccttggggaacccaattggggaccaaaaggtgaagaattaagaaaggggtcccaacgggggggatttcccacacaaggggggggcattaggggaacgggctttccccttggaaaaaagggaccccgggggccaagaaagggttaaaaagtccggggggtaaatccaccggggaacaaaaggggggggcccaagccaagggggaaaatctaagaaaacctttggacacctggaaaaccggggaaaaggggtt

SEQ ID NO: 128217 - DNA, 656 bp, Zea mays
  unsure (1)..(656): unsure at all n locations
  Clone ID: MRT4577_48406C.1
ggccccctgacttcttcattctgaacaggccggcaattccccagacgagaaatgacaagctcgcgtatgatatgtaaaacccgagacatttgccttcttgattaacaaccattacacgcgagcaacgcctccatgcaataaagccagggcaacggcgaggcatgcccacgagagtatcaggatgccggacggaaacggcttggatttgccaactcgaaccgtaaaggatggtcgaatgcgaggaacaccttggcggttgcacgccgggtcattcgtcccatacccccttgctcagccagagcttaacatcgaccagtgggcnagaagggacccctgctaaactactgacgggcttaaaagaatccctatggtactggtcactataaacaccaatggtggcaccaacataaccgaagtgctgaaaggcgtaacaccacacgggaaccatgtccaaaaaggtatcggatgccctgaggcttgaacacagagtcaacagcaggatccttgtactcaaactggagagctgccactacttgagacccatcggaccagtatctccttgaccaacttgctacatcatgaaagggatgactgaatgctcactatgttggccataagctccttaggagccactgcatcaacattctcatagtcat

SEQ ID NO: 128218 - DNA, 439 bp, Zea mays
  Clone ID: MRT4577_48407C.1
aaatctaaggagaggggccctttcgctggaacggggtagcccttacaaagaccccaaaacactgaattttcttaagcagggggggcagcaaaagccttgacgggggcaaaaagcttggacccccttttggccaagctctcgctccggggggccctttgttccttcagcctctgggcaaaaagcttttggtactcaacagccccaaacttttttttaagtatccccttcttcttggcagcgattctagcccccttcctttgggggggcaagggggtcacaagccgggggatcttaagggccttgctgacctttttgccgtttttgggagagaaagtcccgcgggatgggttcacctacttggggacataataatccttggtaagggggaacaactttttgatcttgggggcccccttgggaccccccatccttgggtttt

SEQ ID NO: 128219 - DNA, 943 bp, Zea mays
  Clone ID: MRT4577_48408C.1
ttgggtacctcgaggccggccgggttcctctatagtcatgttttacaagaaagagcgctcttcctatggaacagcaatcacaccgagggtttgatcaaacacaacagcaaggttatactgcccgtagtcctcccagcattagaacggaacacgaaaggccattggaatcaggcagtgcagagcctgagtctaaatgtccgtaaaatattcatggactacgacccagcactgttcgaggagtgtcgcgagaagtttgaggaagaggaagctcaagaagccggcatgaggtcaagatgtgaggctagatggaagcgcctagaagaaattgcctcgtcaaaggaggtgaagtagctcgtcttgccgactgcccaggctgtagctcgtcagcagagttcctctagctatctagccttgctggctgcatacgagcagctagctctttctggcaggatcaagtagatgctgatgtaactgcccatggatggctgcttgcctcgtgttacttgcttgctttaccgaacattttacaggctgacatgtaaatacgaggtacatggtgggccgtgaagcttcaacggggactcaggttctggctgccgtgtgatccactgatgacagtatcggttttcatcatcagaggacaaaggaaaggatgtaaaatggtcattcctgctttactgagatgctcatgccacatgttaacgtctagtctgcggctcaatgtcttgatccaagcactgctagaagcacttgaaagacagtcgagcagcacttgttcttgcctgctgatggtgattttgctgaaatgtatagcatgctttgtgtatgatgaatggtaacttggagccatgtcttgtgatgatatgtaatcgtgttgtacatgtcttttccttcctttgatgtatacagaaatttggaatgaagtgctcattgattgatgttc

SEQ ID NO: 128220 - DNA, 297 bp, Zea mays
  Clone ID: MRT4577_48409C.1
ttccattcgtccggccacggatacgcttcctccatgggaataatgaacctgaacctaagcctgctgattgtaatttgctacacaggagaaccactgaaactcgtatgattcatctctcagaacctgaagtacagcgactgagcagacagtgagtactgtaccccacaatagaggaggaaatattaaccagaatggcctggcattcgaatctgtacagaatgaatctttaaacactaactgttcaggtgtattaaacatggccactacaggtacattgatgtctaaaatatctagcca

SEQ ID NO: 128221 - DNA, 510 bp, Zea mays
  Clone ID: MRT4577_4840C.1
atataaatgatgtgtccttatttaggacttttttttttttttggacatgatcatggttcatggtctgtttatacaatatggagttatttgatgaaatctatttccaggactggggaaaaaaaggggccaaatcacgagccatgtaaaggaagggcgcgccccgatcaatttaagaagagcttaatgaacgacttcatccgcttctggctcacgaagggattcaccatgacactgcggttgctcccgataagtaacctaccctaagaacctgttgcgggcaaggacaattctttactttatgaacagggaaaggggcgcctctatccgcggcttgctgttctcccccacccgctgccggacatctatctgcccggggacaagtttcttctgctccaccacggtggcgaacaccaacttgtagagcgtgctgactaacccgtcgaagcctctcactagggggttatctacattggccgagacaagggggtctttaaccccgagtaggttgcc

SEQ ID NO: 128222 - DNA, 707 bp, Zea mays
  unsure (1)..(707): unsure at all n locations
  Clone ID: MRT4577_48410C.1
ctctgccggtggccgcctggccgagcgcgagctcgttgatggcgtcccgcccgatcgacgagacccagctgccgaacgagacgtacaccaccgaccccgcacgctgcgcgtctagccactccacgcaggtctcatccgcctgccacatgcttgggttcttggatgtactgtcatgcgacagatcgtcgcctttggtaatgcaaccgtcgtcgtcgaagcctttgggtggcagtgacagtagtggtccgacttggaggacctgaagaacccgttgctgtgacacagtgccggcgtcggcggcggtggcttcgacggggaaggtgttgacgaggatagagcggaaactcttcgcacgctccatggtctgaagccagaaggtgaaccttgttttctgggacgccgcgtcgcccacgagccacggcaactccgcggtgctcaggcctagttgcgcaggcaatacgtggaggctgtcgctggtgcggtggtctccgtttactttgccttcttcaccaatgtctaaccttttggtcgatatgggaatgccgtaatctgagatcaaccccttgtcgacgagctccgggatggccgccacgacgcggtaagttgccagcatcgccggccagaagcccacggccgacacgccacaccgggtcgncaacagggatcgcccacgacgccaggacgtcggcgacgaggcacgccacgcc

SEQ ID NO: 128223 - DNA, 217 bp, Zea mays
  Clone ID: MRT4577_48411C.1
ttccctggtcggccgacaccttcggctacgcttgcgcacacgcttccagctaatattgcatcatatattttaatggcccgtgtagggtgttaactgcacaaggggctgtatggtacaaattaacccactctaattcggtccaattagttggcaaactccatggcaaatccccttttgagtatttgtggaccatttgatggcccatttgatattttaa

SEQ ID NO: 128224 - DNA, 230 bp, Zea mays
  Clone ID: MRT4577_48412C.1
gcttgcaggcgtccaccaacgatgtctggactattaatatggggaccaccactcttgcctgaatgttatactgcggcttcattactaacgctggtaggactgacactaagaccgattgtttctcctgccaatgcttcacgaaaattatcgacttggaccattatctgctgacctcctgggttggaggcgcaccggatcgccacctctgcgatactgatcctaagacccaa

SEQ ID NO: 128225 - DNA, 501 bp, Zea mays
  Clone ID: MRT4577_48413C.1
gggagccacaacggaaacagccataattattttaaataactcgggggcaatgcagggggattaaaaacccttacaacattagggggtggaaaccacacagtactttataacagacccacatgacacgattgcgggagcaactctgggccaatcacgggaaaaggggagcacactggcccgaggcggcggcataagcaaacttttttagtacttggcacccttgtcgccatcctcgccctcataaaactcaacaccgaccttcttgaaacccttcttgagcgccgccagggccttacgggcctcaaagaaataaccttccttcataccctaaccgacataccatggcacgaaggaccccttggggctacatgaggtcgaacttgtgggcgatgcgggagaacacctccacaacactggtggagttgggagaaatgcacacggaacgctggaccttggccaggtcgccaccaggcacaacgctaggagggtggtacttgatgc

SEQ ID NO: 128226 - DNA, 331 bp, Zea mays
  Clone ID: MRT4577_48414C.1
ggatggaattggtggtttacaatgaaacaatttacaatgggattttatgtggtatattcttggaaatctaaagattcacaatctcgaatgccatctgatgtgatttggcagaaggcagtggaaaaagggcgataagatcatttgatcataattgctttgcgtttgttttcgatagcatcggcctataacacgattcttgtgctaggatgatgtccccaaacatctccaagagcaggaacaacaccaacaccgggtttagtggacatttggttcattactatgactgaccagtggtacgttctaactatatctgtgagctcaaaagcccatt

SEQ ID NO: 128227 - DNA, 417 bp, Zea mays
  unsure (1)..(417): unsure at all n locations
  Clone ID: MRT4577_48415C.1
aaaaaaaaaaaaaaaaaaaaaaaaaaaaaaaaaaaaaaaaaaaaaaaaaaaaaaaaaaaaggaaaggaaatntgggggcttttgtggagtcccaattttacttccccttaaatccaactttatatcttttttatatggacacctaaataaaattcactgcccgggttttaaaaccgtatcaactggaaaaaccctggcttaaccaaactaaatccctttccagaacatccccctttccccatttttcataataccaaaaaggcccattcctatcccctttccaaaaactttctcaccctaaattccaattgtaacgcccctttaaacccttattaataacaccgtttttttttggttacccataaattaaactcttcattttcaagccctttttccccccttttcttccattttttt

SEQ ID NO: 128228 - DNA, 313 bp, Zea mays
  unsure (1)..(313): unsure at all n locations
  Clone ID: MRT4577_48416C.1
ttnacantantccccaccagaccnntgtttttgtttaaataggtaacccctcttgctgagtnacccggtnccgganatatcccggngtcgnacccacgccgtccgtaggnaagtacagctgcctacccaacctaccagccatggcagccacattacttactccatagcgccccgtaccaaaggcgagctgaacatagacgctgatacaacaaggaaggtgatacggtgcggcgggggtaccaacgcgagtgaccactactagtgaaaccgagggctcaatgcggctaccaccatgggatcttactacgtggcg

SEQ ID NO: 128229 - DNA, 616 bp, Zea mays
  Clone ID: MRT4577_48417C.1
ttttttttttttttttattattgtcaaacgtttatttcgatgatgtaatatacattatcaattcgtttgtgttgatcagattattctcatacataaatattaaaataagtttaaataaactaatgcaaaatataaattatacaaaaattaaagataatttaatatgttggtggtaatttaaatactgtttttccattcctttcatccacacatggcacacgaagtatattgaagtatatagttcccataagatctccggtagaatgtttggcctttttcagacagttgtaaaatgtcttatcacaaatgcaatgtgattttgtgtacatggaattattagtgacgttatatctggtggcatacgatctgactttggatgggcacaaatcatgagttctacaacacatatccaatttgacctctggtcccaaatcaaaaaatgttgtagcaagatctccaccgccacaccattttgtaccaggtagtattcccgagtacagcgaactggaggtagtcgtcggaacgccgtttgagttcatttcgtcaccactggtaacaccgcgtgcgtgcaacttcacctcttcaggattaacttggtgtggatccaacagatcgc

SEQ ID NO: 128230 - DNA, 185 bp, Zea mays
  unsure (1)..(185): unsure at all n locations
  Clone ID: MRT4577_48418C.1
ntgaanattcggatcgacatgccgggcctctcgctctacnaggtgatattnatggtgggggagtacacggtggtggtgggagggtatcacaagaatgttgagggctctgagggcttcatctgttactactgctactgtttgttgaatcagctcaatgtgagctcctacaacatgctggtggcgct

SEQ ID NO: 128231 - DNA, 804 bp, Zea mays
  unsure (1)..(804): unsure at all n locations
  Clone ID: MRT4577_48419C.1
aacgctcacttgccgcaggccacgcattcttggagatggacaggtacgcgcccgcgctcctctgcctctgcctttgcctttgcctcggcgcgctccgtgccggttccgccgcgcctaccaccaccgggacccccgacggctcggagctgtgggggtacgtcgaagtccggccaaaggctcacctgttctggtggtactacaagagcccgcaccggacgtcgacgcccagcaagccatggccgaccatcctctggctgcagggcggcccgggcgcgtccggcgtcgggctcggcaacttcctggaggtggggccgctggacgtggacctgaagccgcggagctcgacgtggctgcagaaggccgacctcatcttcgtggacaacccggtgggcgtcgggtacagctacgtggaggacgacagcctgctggtgacgaccgactgggagcaggcggcggacgccaccgcgctgctcaaggcgctggccaaggaggtgccgacgctgcagggcagcccgctgttcctggtcgccgagtcctacggcggcaagtacgccgccacgctgggcgtgtccgtcgccagggccgtccgcgcgggcgagctcaaggtcacgctggcaggtgttgccctcggggatagcttcgtctcaccggtggatttcacggtctcgtacgtgccgctgctcctgagcgtgtcgaggctggatgacaacgccgccggcgaagcaaacaagaggactcagacggtgaaggatcagatcgccgcgnggcagttcgcggcgtctcaggggtcgtggaacgacctgc

SEQ ID NO: 128232 - DNA, 1218 bp, Zea mays
  Clone ID: MRT4577_4841C.1
ctctgcttcgactctcttctccaactccgcctcggcgtcgtcgtgcgcttcgatctttcccatttccaaccggaggggaggcgtcggcgcaataataggaggcgcctttgtttcgcccatcgccggcatggggaactagcttcgtggctgggccccacgccatgcaaaccagtgagaccaccgggaccgcatcgccgccggctgttgagccggaggccgaggacaaggtggaagagggggcgcgggcgaatgaggaggcggcggcgaaggtgggcggcgacgacgaggatgactgggaatcggagcatgaggggaggagaggcaggcggcagcggtgccggcgaggcggtgcggcgggggacagcgccgtggccatggtgaagcgggagctgctcacgcgctgcttgacgtgcccgctctgcgaccacctgctccggcaggccaccaccatctccgagtgcctccatacattttgtagaaagtgtatctataaaaagctcaatgatgaggatctggaccactgtccagtatgtaaaattgatctgggctgcactccagtcgagaagcttagccgaggtcgaaataagctgctgcgggcagaccgtgaaccctgggcaacctgtgcgcaacttggtggagcggtggctgagggttggcccggcgcgcccgctgcacacggtgatcggctcctccgggggagattatgtgatggtgataagctatgggcggcccaagtccgcgtcctgttaaaaccatatcaccatcgacggcctggcgaggtcgattcctagttcgaacaagggttggtgccgccgccgctgccgccgccggggaagaggccgtcgacagataaactcaagcagcggtagcgggctgctctgccgcagcagctcgtcctctcaccggcgtgttctttaaggatctgttcgttcgttcgttgttgtcatacatgcacatgtgatggaagtcgctataatttggtagtacttggtaggctgtgagtgagaactgacgtttaggttggaggcgagatcgttaacctgagcttaagtgttgggggcgatgagtccgccgtgtatgggagaggcgctgctggttcagttctttttcctccgttttttttttcacttcttgaagggaaaaacacacacaaatacataatgtacctccgtttatttgtcctgaactaatatccagccgtgactgattcggatcgtt

SEQ ID NO: 128233 - DNA, 325 bp, Zea mays
  Clone ID: MRT4577_48420C.1
tcggtcaccatcatcatcagtaactaattgctggggattacaaccaaagggatgcgaagcatgaatcgagtcgagaagatggtgcaggtcggcacgtggctgaggaggcaaatcgagcggagcctcccggagtggcaggaccagttcctgcgctacaaggagctgaagcggtgcgtcaaggcccgctccggcggctgcccgactttgcccgcggaggaggccgagttcgtggccgagatcgacgcggagaccgataagatcaacgccttttttctgtaccaggaggaggagttcatcattcgtcaccgggagctgcagaaccaca

SEQ ID NO: 128234 - DNA, 411 bp, Zea mays
  Clone ID: MRT4577_48421C.1
aaaatcgtcattttgctgattagatacttaaatatgatggatttgccaactttctttatccttgtgatgaaaacggctgaaccaccagcagccttgccacttgtgacattaacaagtaacttgcactacctgacttgtgactagccatatcatatctgatttcttaagctcatcatgtttacacatgttttcttgtatatactagttttgtcatttgattctagtaagaagtgattttctaaagctgttgaagtatcataagcatataattatgatgagtttgaagtgatattttattttcatgtatctcatttttgcataaacatttatgtggtattatccaggttcaagattgaagcaagatacaagagcatggcagaactaaggtgatgtttcttgttgtagactcct

SEQ ID NO: 128235 - DNA, 336 bp, Zea mays
  Clone ID: MRT4577_48422C.1
atgtaccccttcgagactgacatccacatggtagcgagcgcttggaaaatgaaaaggtcgcatgcgcatccacggtccccaagaacaagcatgctgttggccggcggcagcgcacatagggccagtggcggccggggctacgaagatagcggattcctctggctggcccaacgggaagtgttgaccggcctgagcagcggcatcgccgacttcatcaggacggcacacctcttggacgcggagtaccaggagaagtacatggaggtggtcgagaagatgcgggtgctggataggttgaacccgctgaccttcttggcgaagcgtgaccgcctatga

SEQ ID NO: 128236 - DNA, 711 bp, Zea mays
  Clone ID: MRT4577_48423C.1
aattcggcacgaggctcgccccactctgtctcccgcaatcctcgccttctcgccccaaattgtcggggctctcggtcctcgcccacgctctctatggaaggagatcgcctccgctgcaccccagcactcttgccccggatcgtggtcgggagaggaggcgacatccgaaacacggtgagtggagaggatcccgtttggcccctgggtaggtcggcttccttgtgccccgaatctcggtcctcgcccaccctctccatggaaggggattccgtgtatcgcgagcggatcatggtcgggagaggaggtggcatccaaagcgcagcgagtggagaggatctagtttggcccctgagtaggttggcttccatgtgccccggatcccggtcctcgcccaccctgtgccctggatctcgatcctcgcccaccctctccatagaaggggatcccgtgtatcgcaagcagaccgtggtcgggagaggaggcggtatccgaagcatgacgaggactcctggtaggtctcattcataggcactcaagaataatagccttaatgcaggatgctaattgcatatgagagcggattgttggttctttgggatgtatctgaggaccatgcagtttctgtcagaggctatggggggattacgcatgaagggtcaaatcaatggtgctcagggggattttggtgcagatcaactaaatactactatt

SEQ ID NO: 128237 - DNA, 240 bp, Zea mays
  unsure (1)..(240): unsure at all n locations
  Clone ID: MRT4577_48424C.1
cgagaaggcaagcaaagccagcnaggaaggcaaggganccganggacaagcacgagcccngccgcgagaacggggcgggcaacgccggggcggccaagcngaggaggaacaaggacacgagggagcgggggggcangaagnncacagagcgaggaaacaggancgacgagaacggnggccgggagaacgggaaccaccgcncccngcggcaccccaacangaggcgggagaaggaggggg

SEQ ID NO: 128238 - DNA, 430 bp, Zea mays
  Clone ID: MRT4577_48425C.1
acccgtgcgagcatatactcttaggccgaaaaggggggacaccatcttttgtgttccactgaaacacaggcgatgctggggagggggcatagctcttggaacttggaaacacggagcttggggagctgctaagttgctacaaattccccagggatgagatctcaatcatccataggtcagcgcagctttgtttgctagggaacgtggactagataggaacagaatgcaaattttgaaattaatggacgcagttgatgagtacatccctgaacctgagaggcatcttgggagcctttttgagccacagaatatgtgctcctattacggtcgtggaactgttgttactgggcgtgaagaacaaggaacagtcaaaacttgtcaacatgttgagagcaaaaacctggcacatactgatcccttgaagactaca

SEQ ID NO: 128239 - DNA, 126 bp, Zea mays
  Clone ID: MRT4577_48426C.1
tcataactcagaatccagaatgcctaagcagatccacgagaataaggacttccttctgacggcacggtcgataggatgcgcagtcggtgaacatcaagaggagcatagatgtcgttaagttgaagg

SEQ ID NO: 128240 - DNA, 206 bp, Zea mays
  Clone ID: MRT4577_48427C.1
gctatgcggacgtgagctgagacgagtacctggcagcccgagggcgcccaacgcagaagagctgccatgcgctagccggctctgccagatgtcgtgccgtcgcccatggcaggctgccggagacgaatcactgtatttatgatgcgatcgggagcccactaaaccatgagggccactgtggatcatgctggaccctaactgctact

SEQ ID NO: 128241 - DNA, 615 bp, Zea mays
  Clone ID: MRT4577_48428C.1
gtggagggacagtgccgagctgggggtgggctgagaggtcacagaactgcaggtggagtcctgggtggagctgaccctactggggctgtcctgcaggagccaggccttttctgcatcctgacattgggcagtggggaccatctgtggaagcagagttcatttatggggtcccttcttccatccttgccctgctctgtgggaagtcatcctgccaactgattttaaagggctctttagctagctgttgccaaccttatagggttgagtcgcatgggacattgtttttcactgcctggggtgactggcagtttgaaggggacctctgacctccttgtagcatctgggaccttgtggagaccataccagtgcaatccctgcttagctcatcgtagagcaaagagccagcaccctgatagccctagggtggctggccaaggatggcatggggacaatacccagacccctttagccaccagcccctggcctgtgccttccaatccattagccatcacttgtgctcctttctaagatgcataacttgcaagtagtagcaaggagcagtgtccagacgccgatctggatttgacagcagaaatgatctcgtgtcgccattgt

SEQ ID NO: 128242 - DNA, 238 bp, Zea mays
  Clone ID: MRT4577_48429C.1
cccacgcgtccgcataaggggagcgtatgccaatatgaggatcgttaataatctttttggtggcagggctgatacctggacgatccatgttcttacactagacaacctctatgtttaccactcggcaatgaagtacaaatcggaaggtcatgacatgctcatcatcgctccctccgagtacagcaacggcagctctcgtgactatgactgcaaggaaccaatgctactgggtgtcaag

SEQ ID NO: 128243 - DNA, 2036 bp, Zea mays
  Clone ID: MRT4577_4842C.1
gtctttccatttccaccggaggggaggcgtcggcgcaataataggaggcgcctttgtttcgcccatcgccggcatggggaactagcttcgtggctgggccccacgccatgcaaaccagtgagaccaccgggaccgcatcgccgccggctgttgagccggaggccgaggacaaggtggaagagggggcgcgggcgaatgaggaggcggcggcgaaggtgggcggcgacgacgaggatgactgggaatcggagcatgaggggaggagaggcaggcggcagcggtgccggcgaggcggtgcggcgggggacagcgccgtggccatggtgaagcgggagctgctcacgcgctgcttgacgtgcccgctctgcgaccacctgctccggcaggccaccaccatctccgagtgcctccatacattttgtagaaagtgtatctataaaaagctcaatgatgaggatctggaccactgtccagtatgtaaaattgatctgggctgcactccagtcgagaagcttagagctgatcataatatacaagatgtgaggtcaaaattttttccattcaaaagaaagaaggttaatgctgaagaagccgaatctcctattatgctgcctgttaaagttaaagagaggtctatctcatcgttggtggtcaatacacctagagtaaccccagcagctttgacagggaggcgaacaagagcggttaccaggaaggctgccgcattgcgtggccttggtcctatcattgtggatcctttaaaaaaggacaacgataacccaaataagcaaactgataattcaagcttgctagatagcttgaacaaaatacctcaaacaagaagacagttattgtcgaatggggacacaacaagtcatctctctgttaaagataaagcaggtgataataaggacctggataagtccgagttctggaaacctttgaattgtcttgtagaagctgcaagcaaaacaaagcccctgacaagtgcaccaaggccagctttgaagggagataagcccagaaaatctccgagtagtgatagcgaacattctagcagaacaaagactagggagcctcttcagaagtccaaagctgaagttgacaaaagcgatcccgggccaatagtgatgcttagaaagagagggcggcctggccggaagaggaaaaatcccctacctgaaacaaatgcagattccactgctacagctatccaggccaggaaggcattgagcccaatatggttttcattgattgcctcgtttgaccagaaaggtgtccctcctttgcctcagatacctgcgcactatttgagaataaaggatgggagcatacccgcgtcatctattcaaaagtacattgtgcagaagctcagtcttctaagcgaatccgaggtcgaaataagctgctgcgggcagaccgtgaaccctgggcaacctgtgcgcaacttggtggagcggtggctgagggttggcccggcgcgcccgctgcacacggtgatcggctcctccgggggagattatgtgatggtgataagctatgggcggcccaagtccgcgtcctgttaaaaccatatcaccatcgacggcctggcgaggtcgattcctagttcgaacaagggttggtgccgccgccgctgccgccgccggggaagaggccgtcgacagataaactcaagcagcggtagcgggctgctctgccgcagcagctcgtcctctcaccggcgtgttctttaaggatctgttcgttcgttcgttgttgtcatacatgcacatgtgatggaagtcgctataatttggtagtacttggtaggctgtgagtgagaactgacgtttaggttggaggcgagatcgttaacctgagcttaagtgttgggggcgatgagtccgccgtgtatgggagaggcgctgctggttcagttctttttcctccgttttttttttcacttcttgaagggaaaaatacacacaaatacataatgtacctccgtttatttgtcctgaactaatatccagccgtgactgattcggatcgtt

SEQ ID NO: 128244 - DNA, 856 bp, Zea mays
  Clone ID: MRT4577_48430C.1
ttgggtacctcgaggccggccgggatcgtcattcacctcgccgcggcctgcccatcgtcccgtcgtcgaggcgaaccacggaagcagctgcagctagctagaagcctggaacgtacagaccgctgctcgatggcgcctgctgctacgacgcgagtgtgcttggtcgcactggtggtggctctagcgtttctcttcctcttggacggcggtgtgcatgccgcgtcggcggcggcagcgcagcggcggcgacaggttcggagcctgctcaggcgtctcaacaagcccgctgtcgcgaccatcaagaatggcaagtgcccagagaacacagtgccaatccggaggaccagagaagaggacgtcctcaacatccagagatatggcaggaagtggccatcgtcttggagcaacgaccctaaccgttatgacgacgtcccggacgcagcgagcgtactaagaggccaccagcatgcaatagcatctgcaccgggggatgacaactactatggtacccaagcaaccttcaacctgtgggaaccaacggttgagaggaaccaaggattcagtttggcccagctgtggattaccagtggatcctacgcaaacaacgacctcaatactatagaagcagggtggcaggtttacccaggtctgtacaaggatagccatacaagactcttcgtctactggactcgggatgcgtacaacacaacaggatgttacaacctaatatgctcagggtttgtacagacaagcaaccagatcgccatcggcgctagcaactcctatttttccccctgtctcatctatggtggctcacagtatgacatcactattttagtttggaaggacccaaagc

SEQ ID NO: 128245 - DNA, 905 bp, Zea mays
  Clone ID: MRT4577_48431C.1
cattgggtacctcgaggccggccggggtcagttactcgccgcggcctgcccatcgtcccgtcgtcgaggcgaaccacggaagcagctgcagctagctagaagcctggaacgtacagaccgctgctcgatggcgcctgctgctacgacgcgagtgtgcttggtcgcgctggtggtggctctagcgtttctcttcctcttggacggcggtgtgcatgccgcgtcgtcggcggcagcgcagcggcggcgacaggttcggagcctgctcaggcgtctcaacaagcccgctgtcgcgaccatcgagagcccagatggagataccatagactgtgtgcacatctcgaaacagcccgcgttcgaccatccttccctcaagaaccataccattcagatgatgccctcctgccacccacaacaaggcctcctctataacaagtcaaacgacgttgcgcacagtgctttgacgcaaacatggcatcagaatggcaagtgcccagagaacacagtgccaatccggaggaccagagaagaggacgtcctcaacatcgtccagagatatggcaggaagtggccatcgtcttggagcaacgaccctaaccgttatgacgacgtcccggacgcagcgagcgtactaagaggccaccagcatgcaatagcatctgcaccgggggatgacaactactatggtacccaagcaaccttcaacctgtgggaaccaacggttgagaggaaccaaggattcagtttggcccagctgtggattaccagtggatcctacgcaaacaacgacctcaatactatagaagcagggtggcaggtttacccaggtctgtacaaggatagccatacaagactcttcgtctactggactcgggatgcgtacaccaaaacaggatgttaccacccta

SEQ ID NO: 128246 - DNA, 241 bp, Zea mays
  Clone ID: MRT4577_48432C.1
aagatggggtttttttaacttcccggcgggaaaccaaaaccctggtcattttttttttggttcggtttaaagggggggcacccaaagcgaacaaccggggccccccccctaattcaaagggggaacgggcccttacccggggaccaaacccaacgggaaccccattcttttaataaaaaaaaaaacccggccacaaaccaggatgggcccacacaattttttctttaaccggcgccccccc

SEQ ID NO: 128247 - DNA, 489 bp, Zea mays
  unsure (1)..(489): unsure at all n locations
  Clone ID: MRT4577_48433C.1
gtgtacaccgacaatgccttatgtaagaagctaacccgtgcttactttacagaccactagaaactagcagttgctattctttttactgagctacaaaagctgaagagtatcattctgatccattatgtaagcgactaagggcatatcgataccacgcaacatagaatgaaatcatccgctttcatgcaaaccgacttatcaagatggtcaataaaacgcaccatcaccgggtccaacggccgcaaattagcatctttacagaacctcttgaagaggaccttgatgttcattaaaagcgacatattcatgggtctgttgcacgcatgaaggcctccataaccaggatgcgacggcaaaaacagctactcgatgaaaaccaccttgtccaatgactcgggctcgtgagaaangcggtaagcacccttattcaataagctcaatcgacggaatccccagccttatgaaaaagaacccggaattgtacaccca

SEQ ID NO: 128248 - DNA, 507 bp, Zea mays
  unsure (1)..(507): unsure at all n locations
  Clone ID: MRT4577_48434C.1
ccggccgggtcggtgtttctcgatgttattgaacgaattgatcttgcatggacaagcagtcctgaagctcaatgcttgatgaatcagatcgcttatggaatcttgtttgcttgatcgatcacaaggtgtcttcgtccttggtgtcactttgctcgtggatcggaggtgtcgcttcggggtgcaccaaacggctgggaccattcacggcacggatgccagatgcctttggtcttcaacactagtttgtcaggatttcctgtgaacactgaatcccatattttgttggaagtgagctattctacggtacagtactctctagtcttaaaatatttgatattacgcaccatttaaattttatcctgaaatatttgtcatctttatttttaatgcaccattctcttctcttaagacnnnnnanaaaaaaaaaaaaaaaaaaaaaaaaaaaaaaaaaaaaaaaaaaaaaaaaaaaaaaaaaaaaattttttaaaaaaaaaaaaaaaagcggcc

SEQ ID NO: 128249 - DNA, 204 bp, Zea mays
  unsure (1)..(204): unsure at all n locations
  Clone ID: MRT4577_48435C.1
ccatttatttgtgtttcatcttaccaggatcacctgagatagattagcatgtgggaagcatctactatgaagtatccgtaagcgcattaacctgctcgcctcttacagacaaatctctttctatacgcagttgaaactagagtctactactcttctgctctgatatcgaagtggagnacggaaagattaagtgccttttttctg

SEQ ID NO: 128250 - DNA, 747 bp, Zea mays
  Clone ID: MRT4577_48436C.1
ggttcaggtttaggctctggctttggttaggcatagtggtcaccttaggataggtagatgtatcgtgctgactttttaaatcattgctgacttttgagttgattgccctgctagtagggtatagtggttcctctaagtcaagtcagcgtgaacatgcagcatcgtcttaggtcgttgccgatctaaggcggctgcttcgttagtagggcatagtggtcacccttagtcaagtaagcgcgagcatgttgcaccgtcttaagccgtcgccgacttaagccaattgctccgttagtagggtatagtgctcaccctaagtcaagtaagcgcgagtatgttgcaccatcttaagtcgtcgccgacttaagctgattgctctgttagtagggtatattggtcaccctaagtcaagtaagcgtgagcatgttgcacagtcttaagtcatcaccaacttaagtcgatggctccgttagtagggtatagtggtcaccctgagtcgagtaagcgtgaacatgcagcatcgtcttaggtcgttaatgacttaagttgattgctccgttagtagggtatagtggtcaccctaagtcaagtaagcgtgagcatgttgcaccgtcttaagtcgtcgccgacttaagctgattgctccgttagtagggtatagtggtcaccctaagtcaagtaagcgcgagcatgttgcgccgtcttaagtcatcgccgacttaagccgattgctccgttagtaggaaatag

SEQ ID NO: 128251 - DNA, 459 bp, Zea mays
  Clone ID: MRT4577_48437C.1
atgggtggagccaagtggaaggaggaggagatggtgaagacgttgaggccgtcggtgtggctcacggaggacttccccctgagcgtcgacaaattcatgtcgttgctggacatcctggcctgccgtgtgtgcgccgtgcgctggctccgcgtgctgctcaccaccaagttcccaccggggactttcccagtaaaggtagtctgttctttggagcaaaacatcagccttatgctaaacccctccagattgcaatcacccaattgcatccaaatttgcagaagattaaacccgaacaagtttttggcaaaccatcatgctggtgcggagcctcccaggcacatggcacatccaccactgcacctcaaggccgttactgctctgaatgctcacccaggtgaagccctcatcactgtcgagaccgaggagatgtacaacgctagatctaggaacctcctctag

SEQ ID NO: 128252 - DNA, 569 bp, Zea mays
  unsure (1)..(569): unsure at all n locations
  Clone ID: MRT4577_48438C.1
cggncgcgtgggtcagcacgggggaggtggagtccgcgacgcgctacttctcggagctcaacctcctcgggaggcgcggcaagaaggccggcggcctggcgggcacgtacaggggcacgctccgcgacggcacctccgtggccgtgaagcggctgggcaagacgtgctgccgccaggaggaggccgacttcctgagcgggctgaggctgctcgcggagctccgccacgacaatgtggtcgcgctgagggggttctgctgctccagggcgcgcggggagtgcttcctcgtctacgacttcgtgcccaacggcagcctgtcgcagttcctcgacgtcgacgccgacaacgccggcggcggcagcggccgtgtcctccagtggtccacgaggatctccatcatcaagggcatcgccaaaggaattgagtatctgcacagcacaaggacgaacaagccggccctcgtccaccaaaacatctcagcggacaaggtcctgctggactacgcgtacaggcccctcatctccgggtgcggcctgcacaagctcctcgtggacgacctcgccttctcg

SEQ ID NO: 128253 - DNA, 291 bp, Zea mays
  Clone ID: MRT4577_48439C.1
atgaccgagcgtccttctattcctagatcgacagcaactttctaacgatttcgagcgccgcacgctagcgggctaaggcatgtttctcaacttttttcacccaccatccatctataatctcatccataccccacctctcgtctaaaaaacctaaattcaaacacacaaaaataatctcaaataacaacacaaatcataaaaaacggtcgtcccctcaaaataatccaaccttacttacacatacatacaatctccaaccttttttatagtatcaccaaatttcaatttaca

SEQ ID NO: 128254 - DNA, 444 bp, Zea mays
  Clone ID: MRT4577_4843C.1
cctttttaatatttttctcttttttttttttaactattggttttttttttttttttgtttttttttactggttttcacagttttttgggaaaaaaaaaacggggcaaaaaaaaggggggaaaacaaacctaaaaatttcacccccggggttcttctttttatacgggtggtttataaaaaaacctccccccgccggggctgctttgggccctgtggcaggacaacaatttccctggcaatagaggcctgggcaccaaccgggtgcccactattgatccgggggaaaaggtttcccataattggcccccaagcattgttccccccaattattgtttccgggggggccccctttaacctttaaaagggggggcgaaggctctcccccaggaagtggttccccaccaggtcccaaagaagggggaacatccggggttttggcctttg

SEQ ID NO: 128255 - DNA, 406 bp, Zea mays
  Clone ID: MRT4577_48440C.1
gtcgacccactcgtgcgagattcccaaaccctatctcctgatctctatggcgaaccctcgcgtcttcttcgacatgaccgtcagcggcgctcctgcgggccggatcgtgattgagctgtacgccaacgaggtgcccaagaccgtggataactttcgcgcgctgtgcacgggctagaagggcgtgggcaagtccgggaagccgttccactacaagggctccaccttccaccgtgttcattctcctagttcatgtgccagggcagctacttcaccctcggcaactgcaccgtcggcgagttcatctacggctagaagtttcccgactagaaggttttgcgcaagcacacctgcccctgggtgctctccatgtccaacggcgggcccaacatcaacagtgtccaagttt

SEQ ID NO: 128256 - DNA, 733 bp, Zea mays
  unsure (1)..(733): unsure at all n locations
  Clone ID: MRT4577_48441C.1
cttaacactaaaaccaagccatatatcgcaaccacatggtatcgccagtacaccctacattattctagcacgaggcagcaccgagaagcacacgatctaatctactcttattgtcagtctctccagaaagaagaagcacacccttgcctttattctcttctatgttcttgtctctagtgtggagtttttcctgtcatatctctgaactggactaccaaaacatctacactgcatcaagccacgttgtaagaacctcgactaagactaagaaaggaaacatcctataaagctcttgctgggtgattgttcaggcttcttccggtggattggtattggtagagtttgtttgccgtatctacacaggtagagaaccttgtttcataggttgggcctataaatagataagcgcgagagtactttaccggtaccggtttaaaggcattattcactcaattctgcattatttcttctggcagcaggttatctttctgcaacgcccaaacaaaggtggaacacgtacccagagatccgaaaagctacttctcaagagtccactaaaccacttgtcccaggcgcgggctaaatcactctggaactggaatcgcccggcgcgaatcaagtagtcgntatgtttgggattcaaggcaagctgggatcagaatctgcaggaagacagggaggatctggagccccatgtaggtgcggcctaagctgagctgctagcggcatcaac

SEQ ID NO: 128257 - DNA, 729 bp, Zea mays
  unsure (1)..(729): unsure at all n locations
  Clone ID: MRT4577_48442C.1
tcgaggctcggctcgggccccgggaacgtgaaacaaacacattttcccggtctcaaactcacagtacaggccgccgatattttctccttgttcccgaatcctgagtgaccaccggtccggtccaccatgggtctcgtctggttggtggcggccgccgtggcggtggtgctggcgtcgtgggcgttcaacgcgctggtgtacctcgtgtggaggccgcgggccatcaccaggcagctccgcgcgcagggcgtcggcggtccgggttacaggttcttcgccgggaacctcgccgagatcaagcagctccgcgccgacagcgccggcgccgcgctggacatcggcaaccacgacttcgtccccagggtccagccgcacttccgcaaatggatccccatccacgggcgcacgttcctctactggttcggagccaggccgagcctgtgcgtcgccgacgtgaacacggtgaagcaggtgctctccgaccgcagcgggctgtaccccaagagcatcgggaacccgcacatcgcccgcctgctcggcaaggggctcgtgctcaccgacggcgacgactggaagcgccaccgcaaggtcgtccacccggccttcaacatggacaagctcaagatgatgacggtgaccatgtccgactgtgccgggtcattgatgtcngagtggacgggcaagatggagaaagggggcagcgtggagattgagctgagccaccagttc

SEQ ID NO: 128258 - DNA, 615 bp, Zea mays
  unsure (1)..(615): unsure at all n locations
  Clone ID: MRT4577_48443C.1
aaatggtacagtaaatgagtatgatgttgagcaatgcaaaggaaagaaaaaataatatgattctatctctggtaccgtgtgttttcacatccctaatatttctcaaccaaaacaacaatgcacaaccaaggaaaacagaaaagaggctcacaatggtttataattgaagaacatgcaaacatagtacaagggtgtcttgtttggaatttataaataaagactgtcttgtttggagacgcgaaaatcattcaaaagtgaaacagttagcttgcattacgagttggattaaccaaggaagtcagtgagtagatcaaatttccttgaataataattaccttgtgaccgaagaaatacccagcaggatcacatgtaaagagttttggagttcctttctcatcatcaatgcccaaaatcatggcaactgcgtgggagagtataagggcggtctaaggctctaagcattaagatatataacagaaaatagtaaaacatggctataggttccaccactcccattttgntgtggggaaggaacaccaccctcggatattgtagtctcattgccctaacccacttcagatggtctctttggatcctactcggcccagatcctgg

SEQ ID NO: 128259 - DNA, 296 bp, Zea mays
  unsure (1)..(296): unsure at all n locations
  Clone ID: MRT4577_48444C.1
taacctccgccatcatgggtcgcatgcacgctcccgggaagggcctgtcccagtcggcgctgccctaccgccgtagcgtgcccacgtggctgaagttgacgtctgacgacgtgaaggaacaaatttacaagttggccaagaaaggcctgactccttcccagataggtgtgattctgagggactcacatggtgtggcacaggtccgttttgtgaccggaaataaaatcttgagaatccttaagtccaaaggccttgcccctgatcttcctgaggatctaaaancattgatcaagaaa

SEQ ID NO: 128260 - DNA, 305 bp, Zea mays
  unsure (1)..(305): unsure at all n locations
  Clone ID: MRT4577_48445C.1
acatgggctatantaatactttatcttttcctcccccaggatcgcctgacgcgtgggcagattcttcctcgacaacacccatttccacctctatctcgtcaactacccctttataaccactgactacatcacctacatattcaagttctacaccgtcctcgtccactttaagctcacttacttcacactcaattactccaagacccttctcttcaatacaaccctttaccgtctttttcatcaatgaaccctaatgaaatcccctgtcgtcaaacttaccctcaacatttcatataatccacctt

SEQ ID NO: 128261 - DNA, 285 bp, Zea mays
  Clone ID: MRT4577_48446C.1
ctggcatcgaagatggtgtgttctttctggaaactgtatatcttattggacttatccagatgatgagacacgcaagagtcccataggaaggataaatctggctaattgtaccagtcgtcagatagaaccagccaacagagaattttgtgcaagacgcaacactttgaattaattactgtccgaccacaaagagaagatgaccgagagactcttgtcagccaatgcagggacacactctgtgttaccaagaactggctgtctgcagatactaaagaagagcgggat

SEQ ID NO: 128262 - DNA, 159 bp, Zea mays
  Clone ID: MRT4577_48447C.1
ggcgctttcgataggtaaccgccgcttcttcttatcctcagttccaacccctttaccgagctcctcagatctcgtcatcgaccacgcgctcactgaaagcccaggctggtctggcagggcctcggcagccgcggccgcgccggggaaggcccactgcct

SEQ ID NO: 128263 - DNA, 436 bp, Zea mays
  Clone ID: MRT4577_48448C.1
tttcggaataccacacagccaaatcggcatccacaaccgtcgccatggccaaatccaagaactcgtctcagcacaaccagtccaagaagaaccaccgaaacggtatcaagaagcctaagacccaccgttacccttcgctcaagggaaccgaccccaagttcaggaggaaccacaggcatgcgcttcacggcaccatgcgcgctctgaaggaggttaaggagggcaagcgcgagagcgcataaaggccgacacgattacgagcgagcgacgatggcggttttcgattcctttatgagacatctggtcggcgtcaatggcattcggactttctttgacagcttcgaactcaagggatggaagcatgtggcttcacgcctaccgcaggcatgaacaatgaataagtcgagaagccaataaaaaaaaaaagaggtcccta

SEQ ID NO: 128264 - DNA, 3033 bp, Zea mays
  Clone ID: MRT4577_48449C.1
atgggagaggccgtcaccgccgcggagctgctgtacggcatgccgttgatccggtcggtggccggggatggcgccggcgccggcgttgagaccgccggctgcggtgcgctgctcgtggagctcaagcaactgtggggggagatcgggaagagccgggaggagcgggagcggatggtgcgggagctggaggccgagtgcatgcgcgtgtaccgccgcaaggtcgacgaggccaccggcgagcgggccgctctgcaccagtcgctcgccgcgggggaggccgagatcgccgcgctcgccgccgcgctgggctccgacagcggccctcagctcaaggtacgcgccgtcgcgcgcgcggtctccttccttcaggtgaacaaatggaccatgtcgctgaccgagcgcgtgtcgtcggcaacagccctgctggaagagctgagggcggtgaaagcagagcggagcagacagttcgccgacgtccggtcagagatcgagaagatcaccgccgagatcgctgggaggagctacggctacgagggctccccccgggccagcgaggtgggagaacacgacctgacgatcaggaggctgaacgagtacagggcgcgcctcacgagcttccagaaggagaagtctgaccggctccacagggtcctggagcacgtgacggaggtgcactcgctgtgcgacgtgctcggcgaggacttcatcgcgatcgtgaacgaggtccacccggggctgcacgagacgtccgaccccggcaagcccaccagcatcagcgacagcacgctcgccaccctcgcccaggtcgtggcgacgctcgccgccgagaaagccaagcgagcgaccatgctgcgagaggccgtggtgcccttggtggagctgtgggagctgatggactcgtcggaggaggagcggcggagtttcaggaacgtggcggccgttctgaaccctgacaagctggatgctctgccctccggcgtcctgtcagtggcgacgataaagaagacggaggaggaggtggagaggctgacgaggctcaaggccggccggatgaaggagctcgtgctcaagaggcggctggagctggagagcatttgcaggagcatgcacgtggagcccgatgcgagcaccgtgccggagaaatccattgcgctgatcgactctggcctcgtgaacccttccgagctcatggccagcatcgacgaacagatagcgaaagccagggaggagctccagtccaggagagagatcatggagaagataaacaagtggctgctggcctgcgaggaagaggagtggctggaggagtacaatacggacgagaacagattcagtaccggcaggatcgcacgcctcaacttgaaacgcgcggagaaagcgaggcttatcatcaccaagattccggccgtgattgacagcctgatgagccgtacactcgcatgggagagcgaaagaaagaagccattcctgtacgacggggctcgcttggttgccgtcttggaggagcacaagcaagccaggctcaggcaggaagaggagaggaggcgactcagggagcagaagaagctgcgcaccctgctgagcgagaaggaggcgatgccgcacctgaagcggcccggcagcagcttcggcagggcggccgagccctgcaaagtgaaccggaaacgggttgacgcgggcaggctcgcgtcctccggtggcagtggcaccaccaccagcagcagcagcagcggtggtggtggtgcgagtgcaaccgagctcatcaggccgcgttcctcggcggcgggcgcgggacagtgcggcgagttcttcaaggattttttggagggttactcgtgtcgaaaatattctattgttattgttaaagaatatcttattcagagaattggtgagcttataccatctcttctcttcttctattctatctatctatcttccggcaccggcaggctacggtttgccgggcagggggcaggattcagatcttggagtggcgcgcctgccgtgcacgatttcgcatccgcgaccgcgcagagttgggttggacgggacgacggaggaggaggtggagaggctgacgaggctcaaggccggccggatgaaggagctcgtgctcaagaggcggctggagctggagagcatttgcaggagcatgcacgtggagcccgatgcgagcaccgtgccggagaaatccattgcgctgatcgactctggtaccagttcacagttcctgctttactgatcgactctggttcagatggcttcattttttctaacgctgacgaaattctaccaggcctcgtgaacccttccgagctcatggccagcatcgacgaacagatagcgaaagccagggaggagctccagtccaggaaagagatcatggagaagataaacaagtggctgctggcctgcgaggaagaggagtggctggaggagtacaatacggacgagaacagattcagtaccggcaggatcgcacgcctcaacttgaaacgcgcggagaaagcgaggcttatcatcaccaagattccggccgtggttgacagcctgatgagccgtacactcgcatgggagagcgaaagaaagaagccgttcctgtacgacggggctcgcttggttgccgtcttggaggagcacaagcaagccaggctcaggcaggaagaggagaggaggcgactcagggagcagaagaagctgcgcaccctgctgagcgagaaggaggcgatgccgcacctgaagcggcccggcagcagcttcggcagggcggccgagccctgcaaagtgaaccggaaacgggttgacgcgggcaggctcgcgtcctccggtggcagtggcaccaccagcggcagcagcagcagcagcggtggtggtgcgagtgcaaccgagctcatcaggccgcgttcctcggcggcgggctcgggacagtgcggcgagttcttcaagggcgtgaggcggctctcggcgccgccgttcaactacgtcgccgtgtccaagggccgcagcatgtcctcgtctctagctctgtcctaa

SEQ ID NO: 128265 - DNA, 1339 bp, Zea mays
  Clone ID: MRT4577_4844C.1
agcgctatctcgagcctcgagggcttcccttatcctcactcgcgtagtcgcctccctcctcttctcttccgcggcctggtgcaagaccaagagggaggaggaggccacgatggccggcagcgtcagcaacggcagcgggaagagcctggcgcgctggctgcgggagaacgggttcgacgacgacgccgtggcgcgcatgtccaggcggtgcaggaacctgcacagcctcgacgccggcgaggccccgggcgtgtgggactacctcctgaccggcgtcaagatggagcggcggaagctgcggcacgtggtggccaagtgccccaagctgctcaccctgtccgtggacggcaagctcgcgcccacggtgcagtgcctcgccacgctgcaggccaggcccggggaggtggcgcaggccatcgccaagttcccccagatactgttccacagcgtcgaggagaagctctgcccgctcctcgccttcttccagacgctcggcgtctccgagaggcagctcgccaagctgctcatggtcaacccgcgcctcatcagctacagcatcgaggccaagttctcgcagaccgtcggcttcctcgccggcctcggcgtcgacagggaaggcatgatcggcaagatcctcaccaaggagccgtatatcatggggtacagcgtcgacaagcggttgcgccccactgccgagttcctcaagtcggaagtcgggttacaggggccagatctccagagggtggtcatgaccttccccgatatactgtcgcgagacgtggataagatcctgcggcccaatctggcgttcctacagagccgcggattcagcagggatcaggtcacggcactggtagctggttaccctcctgttctcatcaagagcatcaaacattgcctggagccaaggatcaagttcctggtcgaagagatggggcgggacatgggcgaggtggtaggttacccccagttctttcgccatggcctcaagaggagcctggagtaccgccacaaggtgcttaagcagatgaactcgagctgcagcctcagcgagatgctagactgtaaccacaagaagtttgccatgaaattcggtttggtcgcagcagtttaggtactcaacttttctctagtccaatccaaggtagtttgttttattctcaggtgaatctttccgtttgtaccgtcaggttgtgttgttcttttgaacatttgggcaatgataactaataattcaaggtcctttacaagtatcaaaaaaaatctttgaaaccctaagtacataaaatctctatggtctgtttgagagctgaaaaaaaaaaaaaaaaaaggggcggcc

SEQ ID NO: 128266 - DNA, 331 bp, Zea mays
  Clone ID: MRT4577_48450C.1
ccggccgggaatctatccaccgagcacgacgcacgcagagccgctgagatccgtcacactgcaagttttgaaaactgaactggaagatggcatcagcatagctttcccgtgaggaaaatgtgcacatggcgaagctcgccgagtatgcacagaggtaccaggaaatgcttgaggtcatggagaagggaccgaaaactgttgactcggaggagctcactgtggaggagcgcaacctcctgtctgttgcatacaagaacgccattggagcccgccgtgcctcatgccgcatcatctcctccgtccacaataaggaggagcgaccaagaacacg

SEQ ID NO: 128267 - DNA, 750 bp, Zea mays
  unsure (1)..(750): unsure at all n locations
  Clone ID: MRT4577_48451C.1
gtgacacgacgcccctctcctagcttctctgtcgtaccagcagcagcaaccaacccccccgcccttaaacccctcgagctcgcgcgagaggctgtgcgctcagccgccgatcgaattgctctcgctcgtcgatccatgggagaggccgtcaccgccgcggagctgctgtacggcatgccgttgatccggtcggtggccggggatggcgccggcgccggcgttgagaccgccggctgcggtgcgctgctcgtggagctcaagcaactgtggggggagatcgggaagagccgggaggagcgggagcggatggtgcgggagctggaggccgagtgcatgcgcgtgtaccgccgcaaggtcgacgaggccaccggcgagcgggccgctctgcaccagtcgctcgccgcgggggaggccgagatcgccgcgctcgccgccgcgctgggctccgacagcggccctcagctcaaggtgaacaaatggaccatgtcgctgaccgagcgcgtgtcgtcggcaacagccctgctggaagagctgagggtggtgaaagcagagcggagcagacagttcgccgacgtccggtcagagatcgagaagatcaccgccgagatcgctgggaggagctacggctacgagggctccccccgggccagcgaggtgcgagaaccgacctgacgatcaggaggctgaacgagtacagggcgcgcctcacgagcttccanaaagagaagtctgaccggctccacagggtcc

SEQ ID NO: 128268 - DNA, 462 bp, Zea mays
  unsure (1)..(462): unsure at all n locations
  Clone ID: MRT4577_48452C.1
ccccgcgtccgcccagcgtccgcccagcgtncgnggacgcgtgggcggacgcgtgggctgatgcgtatgctgaagagtgggaagaatggtgattaacggaaagttaccagacggcgtaccagacgttgataaagagagtcatcttagggcgccactcactgcctnttttgagggtggggggggagcttncatacttctcgggcggtccccagcccggtggcatgtttttcgcggtgtcgcatggcgtgtacgcgctgtgtcttggcagccgtgcgtcgttgttgaataacgtgacggtgcggtcgggggcgctgtacgcgctcacgttcgaggtgacgcggacttgcgcgcatgaagaggtcctgcgcgtggcgttggcgttgttgctttttgtgtccggcgacgtggcctggtgcactttctacagtgtgtcgtccgcctacacttgggcctgtgtttttt

SEQ ID NO: 128269 - DNA, 960 bp, Zea mays
  Clone ID: MRT4577_48453C.1
ggaccctcgaggccggccggaaaaatatgcagcttctccgagcccgatcattccaagctcgatacgcttccctccgcttgacgcgagacgcgcgggagcacgcgctcatggcgacgacgccggtgccggcgtctgcacttcctaagtcggaggcggtatccaagggctacaactttgcatccatttgggagcagaacgcgccgctcagggagccgcagaaggccgcgatcgccgcgctctcccacgccgtggaggagcggccattcctgcccaacctggaaaagaattcagggaaggatggtggcgtggctgtttcagagaaagaatctgctttagaggaggctggtgcaatggatgtcttggtgaatacacatcagttctacaagtggtttgcagaactggagtcagctatgaaatctgagactgagggaaagtatcgtctctacgagaatacattacaggaccgtgtcaacacatgtgacagtatccttaagctagttgctgatacattaaacttaattgaagaactgcagtctttgcactcaagcgttgccacgaagacaaaaactttgcatgatgctggcgaccaacttgtggttgaaaaacaaaggctgattgactttgcagaggcatttcgaggcacgctcaactactttgacgaattggaaaatgcaaggtccggcaaacatagttggcgtattacaaatatttttatgataggataaagtcctgtgatgataggataagccatgtgcctatgtcagcatggtatctagttagtagttataatcttatgtctactttagccccgtttgtttaggattataacacttccttacagttgtaacagacaacttggtcctatatatgtaatcataaccaaccatagttcagtgtgacataagaaatagaaaaaaaaatctgccccaatcctatgtttaactccaaaaaaaacccccc

SEQ ID NO: 128270 - DNA, 798 bp, Zea mays
  Clone ID: MRT4577_48454C.1
aacagattcagtaccggcaggatcgcacgcctcaacttgaaacgcgcggagaaagcgaggcttatcatcaccaagattccggccgtggttgacagcctgatgagccgtacactcgcatgggagagcgaaagaaagaagccattcctgtacgacggggctcgcttggttgccgtcttggaggagcacaagcaagccaggctcaggcaggaagaggagaggaggcgactcagggagcagaagaagctgcgcaccctgctgagcgagaaggaggcgatgccgcacctgaagcggcccggcagcagcttcggcagggcggccgagccctgcaacgtgaaccggaaacgggttgacgcgggcaggctcgcgtcctccggtggcagtggcaccaccagcggcagcagcagcagcagcggtggtggtgcgagtgcaaccgagctcatcaggccgcgttcctcggcggcgggctcgggacagtgcggcgagttcttcaagggcgtgaggcggctctcggcgccgccgttcaactacgtcgccgtgtccaagggccgcagcatgtcctcgtctctagctctgtcctaaactcgaaaccgcacaagtagcgaagacttgtcacgtgtgtgtatatagagtgccactgtaatttgtagccgtgttaccttttacacagatttttttggagggttattcgtgtcaaaaaaaatccgttgttattgttaaactatttcttgattagagaattgatgagtttatagtatctctacaaatatacccctcctcgttttgatcaatcaattaatc

SEQ ID NO: 128271 - DNA, 596 bp, Zea mays
  Clone ID: MRT4577_48455C.1
gatctataactagcggggctcgcttggttgccgtctttggtaggagcacaagcaagccaggctcaggcaggaagaggagaggagacgactcagggagcagaagaagctgcgcaccctgctgagcgagaaggaggcgatgccgcacctgaagcggcccggcagcagcttcggcagggcggccgagcccttcaacgtgaaccggaaacgggtcgacgcgggcaggctcgcgtcctccggtggcagtggcaccaccaccagtagcagcagcagcggtggtggtggtggtgcgagtgcaaccaaactcatcaggccgcgttcctaaacagagggcgcgggacagtgcggcgagttcttcaagggcgcgaggcggctctcggcgccgccgttcaactacgtcgccgtgtccaagggccgcagcatgtccttgtcgctggctctgtcctaaactcgaaaccgcacgagtagcaaagacttgtcacgtgtgtgtatatagagtgccattgtaatttgtagcggtgttaccttttacacagattttttggagggttactcgtgtcgaaaatattctattgttattgttaaagaatatcttattc

SEQ ID NO: 128272 - DNA, 471 bp, Zea mays
  unsure (1)..(471): unsure at all n locations
  Clone ID: MRT4577_48456C.1
gccaattggaaagttaaaccgggaaaaatgtaccccaggcatgacccgatactgggtccctcgtcatctttgtatggtagtgtaaactcggccttagtagtatctgtagcgtcacaaattttgccctctacgccctacctaccggcaggtttttccaatgcantgggctgtttcccnactctgacncagctatgggcttttactatatctgtcggactggctttaattagtgtcgtagtagtcttgggcctgctgtgcctgcaaccaattctgctagtgtccccggccttagcctctcttgttcgttctgttgtatttgtgtttttctattgaaaatttgactgtccngngcagtctccaaacccagcatgcnagcacccatctccttcnntctctgacataatacnagcnatgctgtccttcaaggtgctacttccccagtatgangngacaatctttatcccccatgta

SEQ ID NO: 128273 - DNA, 337 bp, Zea mays
  unsure (1)..(337): unsure at all n locations
  Clone ID: MRT4577_48457C.1
gttgatatntgtatatcttatttcttattttcaatatatgtaacttgccactattctanagtgttattttctgctaatgctgcgaaatgagcatattctgtattgctctcgtatcttcggtgcccatgactcctctcncctcctagactgtcctatccgtcttcttcatttggcctaccctagtactccccccttccaatttatatgtcgttttggcttntctagatatataatgtttattgtgtatctagacatatagaatatctaggtagacatgtagtatatctatgtgtatatcaaaagttatgtatctaganaccccanacggacagagggt

SEQ ID NO: 128274 - DNA, 301 bp, Zea mays
  unsure (1)..(301): unsure at all n locations
  Clone ID: MRT4577_48458C.1
ttttntttatttttttttttttttttttttttttttttttttttttttttactaatctaaattcacataatccccttgtacaggacaaaaacccaagcagtgaccgaagggcgtaaacataatgcccaatgcctgacgaacgcttgcaccacgaattggaacaaaatgtaagcggacacctttttagacacacaggggaaaggaactgatccaaaattagacaccctaattcattaacaaaattgataacaaaagccttagactgagatggcccccaacgaacttgtgacgaccgcgcaaa

SEQ ID NO: 128275 - DNA, 267 bp, Zea mays
  Clone ID: MRT4577_48459C.1
attcggggcggcacagacggaggaggaggtggagaggctgacgaggctcaaggccggccggatgaaggagctcgtgctcaagaggcggctggagctggagagcatttgcaggagcatgcacgtggagcccgatgcgagcaccgtgccggagaaatccattgcgctgatcgactctggcctcgtgaacccttccgagctcatggccagcatcgacgaacagatagcgaaagccagggaggagctccagtccaggagagaaatcatgga

SEQ ID NO: 128276 - DNA, 293 bp, Zea mays
  Clone ID: MRT4577_4845C.1
cgaagaaccgcagatccatcactgtggagcaacatataggcaacattttcatgtttagtaaagtggccaacacaattcttttcttccgcttggatattcgcatgggcctactttacatcacactctgcatagtgttcctgatgacgtgcaaaccccccctatatatgggccctgagtatatcaagtacttcaatgctattaccattgatgaggaactagaacgggacaagagggtcacttggattgtggagttctttgccaattggtctaatgcattgcccctatctatgctg

SEQ ID NO: 128277 - DNA, 2692 bp, Zea mays
  unsure (1)..(2692): unsure at all n locations
  Clone ID: MRT4577_48460C.1
ccggccgggaccgcaacttttattgcttgtcccgtcgtgcctgcctgccgcgccctcctcatcctcctcctccctcttcctcttgcgcgtcgccaccaccaaattctaaaccgcaatcccgccgcaatccgctccccgcgcgcgaaatcggctcacgcgtcctccgcttttcggctcacgggtcgctgaattgctctttctgctcgctcgctcgctgacttccactcaactgctcgcctggccgcctcctgctagtgcttcaatcgcccggcccccactcgcttgaaggcttccggaagctcgatcccttccgctcgctagctggctgcacagatcttcctcccgaggttcctctttctaccgtcgagtcgaatcggatcaccggagctatcggattcctcaaaatccgagactttggccgcccgccaccccgtctcagtggcggagctgctccgtctggtccgcctctgcctctctggcttgggggcgctctagggttcccgcgcgcgcgccccgtgatgctcgggaatggcgcttaaggccacggcgcagggcgccgcggaggcggccgtagcggccatcggccggggctacgacgttgtttccgacgtccgcctcaagtactgcaagggcaagctcgcggacccggacgcgcgactcattgacgtttcccgcgatggggtccaggacgtcctgctccccggcgggatcaaggtcgctgccgtccccaagtccgtcacgtgtgacaagggcgagcgcacgcggttccgctccgacgtcctctcctttcagcagatgtcagagctgttcaaccgggagctatcgaagaccgggaaaattgcctcacggcatgttcaatagcatgtttgatttttccgggtgctggcagaaagatgcagctaacaccaagtcacttgctttgcatggctggcacatttcgctatatacgctcgcactgtcaaaatctcgtattctactccgggatcatgttactcaggcagttccttcaacctgggaccctgctgctttggcaaggtttattgataagtttggaacacacatagttgtcggtgtaaaaatgggagggaaagatgttatatatttgaaacaacaacattcgtcaagcttgcaaccagctgctgtgcagaaacgactcaaggacatgtcggacatgagatttctggatggaaatggacagtatgacatgaacaacaagcatgtgcacgggaaggacaagcatgatgcaagagatcaacggctaagatttgtggaatcaagtccgtcaagttcatactgttcaaaggaggacttggtgatggtggttaagcggagaggtggaaaggaatgggacaaagatatgcctcacagtgaatggataaacactgttcaatcagaacctgatgttatctcaatgtcctttttacctattacttcattgttgagcggagtacctggctgtgggtttctgaatcatgcaattaatctatacctgcgctataagcctccgattgaagaactacatcaatttttggagttccaactaccaagacaatgggcacctgtgtacagtgaccaccctcttggtcctcagaggaggaaacagagcagtgcatctttgcccttaagttttatgggaccaaggctctatgtctgcactaatatggttgatgtgggtgaaagacctgttactgggatccgattgtatcttgaggggaagaagagcaacatgctggcaatccaccttcagcatctatgctcgcttcctcagatcctgcagctccaggatgatccatacaaccaccggtatccagaaccagaaccatatgaccgcaagtatgtggaaccatttggatcctggaagcgtttctcacatgtttacacggcaccagtggagtcggatgacgacgactccatcgtgacaggggcgcagttacatgtgagcagccatgggttgacgaaggtcctcttcctccgcctccaattcgccagagtcagcaatgctgcgctcgtcaagaatcccgagtgggaagggtcaccgaatttggggcagaaatctggcctcatctcgacgcttatcagcacgcatttctccatggcggctcagaagcctgcccctcgccctgctgatgtgaacatcaactcggctgtgtaccctggcggtccgccaacgccagtgcaggcaccaaagctcctcaagtatgtggacacggcagagatggtgcgcggaccacaggacacgccgggatactgggtggtctctggtgccaagctgcagctggagaggggcaagatatcactgcgggtgaagtattcgctcttgacagccatggtacctgacgaggagtatgaagaatgaacaagggtgggaggaactcagtctcaaaagggggaagatgggggctagctaatgtgcatttgtgcattgcaagtaaagagtttcagcatgcttctttggaaacctgacttatgtgcatcgcctcatctttcgattataaccattttctcggctgatcggcggctgtccgtagaatctttgaaattaaattcgttttgcagaaaagggagacagtacattctacacatgtatccgtaatgcagcgaggtgaaaacgatgatcgccttgctttgcttgctctggcattcttttaaaaaaaaaaaaaaaaaagcggccnnnnnnnnnnnnnnnncccgg

SEQ ID NO: 128278 - DNA, 193 bp, Zea mays
  Clone ID: MRT4577_48461C.1
gcgccgcccccctcttgctcaataaaccgggctcttgtttccgcggtctggtcgttcgatctgtgcaccaaatctgaggtgtcgagcgaccgcgaagcaacttcaatagacggcatggcgctcgtattgtataatggggctggaaacaaaaatgacttctaagcactcattgctgcggaatacaaaaggatca

SEQ ID NO: 128279 - DNA, 341 bp, Zea mays
  Clone ID: MRT4577_48462C.1
gccaggcgtctggcctagttgctcaaacatttcaacgccgccaagaagcacatcacgacgggtcttacgccagcttcgaaataccatgcctgatgacgtttctacacaccttagaaaactggtgtttcatttggaacccaacatcttgtagctgtactccctcgagatggtattgagcatactgtccagataccgcggctacaaacgcattggtgcaagttatgatgctctagcaatgcatgcaatgaatatagtgatgggaagcactgtcccaaaagctgaatttgttgaccttgaacccactgtcatcgatgaggtgagaactggcacctaccgccagc

SEQ ID NO: 128280 - DNA, 328 bp, Zea mays
  unsure (1)..(328): unsure at all n locations
  Clone ID: MRT4577_48463C.1
acaggcagacagacttaatacatacatacatacaattgaggcggaattatttttgaagaagaaggagcaaattacacgcgagttcccattgcattgggttgttgttgttgnggtgttnctactncttcattttntggcgggggggcctcaccgttnttggttggttnacanattttccaagcgtgcgcgccgcntgcctgttgtcggtggcgctntngntgttcctggcgttgggggtgctcgggggctcgcttggccttggcggcctgctggctcctcttctgctcccggccctcgggccggtgctgctcctggcctcccctggtct

SEQ ID NO: 128281 - DNA, 312 bp, Zea mays
  Clone ID: MRT4577_48464C.1
ggagccctatctatccttttgttggcacctcgcgggtcttccgaccgccccgtaccgcatacaaatcctatgctcactctcaccgccgcctcttccactgcaccccgagccaagatgaatgttaaaaagctcaagacgatggcacgtgctgtgcgcactgcggggaatggtagcatgcgcaaggaagaagatcgcagttcacaagactacgaccacagatgataaaacgcttcagagcaccctgaaatgaataggagtgaacaccattgctggtattgaaaacgtcaacatctgtaaagatgatgttgttat

SEQ ID NO: 128282 - DNA, 227 bp, Zea mays
  Clone ID: MRT4577_48465C.1
gggcgggaccctgacaaggggagccacccataaaacggctttcattttttttttcaacacaattatacacccctgcggagaaaaagaagcgaggaccggaacccccctttttaaaccaaaacgggccggtcccacgcccccaccaactttttttcctaaggcttaattaacacaagcaacagggggttccaagggcccggggggggcctatttttggggaccctaaa

SEQ ID NO: 128283 - DNA, 531 bp, Zea mays
  Clone ID: MRT4577_48466C.1
gccggccggtttgggaggccagggattccatagctaacgttaatacggcaccacgcagcgactctctcctcgctttttccgatcgcacatactcccatcgccagaggggcagacctggcagcccgcagccgccaaggatggacatgaaccgcggagtcatccccgaagcaccaccgcactcctcgtaggatacgtatcgcacgactgcgttgcaggcgcctgctgatgcttgggggcgggggactgcacagccgagagtgcagtcgcagtcgcgcccgtggccgcaatgatcccaggagtcgctgtggagcacatacgggccgcggatatggctggggtggtccgaatatacggtctcgtcctcccccgcatagtccaaaatgctgtcgatccagaggccgagccatactaccctatttgaccgctatgcccacctggctcgtgggcaaggctggggacgtgtgggtctagcagcaggtgtgcgcataggaatcggaggcgatgatgtccgtcagcaacaacgatcatctg

SEQ ID NO: 128284 - DNA, 593 bp, Zea mays
  Clone ID: MRT4577_48467C.1
aattcggcacgaggccccccctttttttttttttttttttttttttttttttttttttttttttttttttttttttttcaagaaccacccccaatatagggcccaaccaaaaaaggattccccaatcgggttcccccaaacatccaaggacaaaacttccccccaggtttaaggggcaaaactccccctgtaaacctaagtgaaaaaagtatgtgaaagccaaacctcccctcacgtaaaagttccctgggggggggcagggggaaaattctagggggggaaaggacgttggaaacccccccagcaaattttaaaaaatcggcaggctgaaaagccccacaaatgggggcccaaaaatcgggttaattggaccaacatcccccccaggcccccaaaaggagccatgacccccggcaaaaggaaggccaaactccttgcaagcaatcgcggtcatcatcataggggacctacccagggggggcccaaaattggggggaaaagctgcctttggccttgggatggcaatggcacccccccccccccgaaaacccaaacattgcaaaaaaggccgaaaaaaaaaatcctaaaatttc

SEQ ID NO: 128285 - DNA, 245 bp, Zea mays
  Clone ID: MRT4577_48468C.1
gtctggatggttccaagattatcaagacggtatctaaaacacttccccacaatctcagctgagtagacaacatcctccaagatgaagttgtggggaagcgtgtcagatacgctttggatggttccaagattatcaagattttattggacccaaaggagaggaacaacactgaatacaagctggagacactcagctgggtctaccgcaggctgtgtgggaaagatatggtctttgagtaccctatg

SEQ ID NO: 128286 - DNA, 397 bp, Zea mays
  Clone ID: MRT4577_48469C.1
ggaccagaccagcagcagcccaatcaaaccccgccccttactattcctcccgggcacgcgagaagccgggggcgggggggaggcaagacccgcgcccgccccaagcacgcggagaagaagccgccggcggcagcccacgagggcgcgcgggcgaagaacgaaagcagctccagccgccgcagcagggccaacaagcaacacaagcccccccccggcgacgccatccccttcgccaccacgcgcaccggggtccactacaccgccacggcgcccgtcgggcggatccccaacgccaccggatactccgacaacaagcacggcccgctctgggagcacaggtgggtctcgcaagtccacaacacacccatcaccgggaagaaccgcacccataagccca

SEQ ID NO: 128287 - DNA, 402 bp, Zea mays
  Clone ID: MRT4577_4846C.1
aatatgcccaaaccctagctccctatctcgatgtctaaccctcacgtcttcttcggcgtgagcgtcatcagctccccggcggaccggatcgtgatctagctttcctccaacgaagtgcccatgaccgcggataacttaactgcgctatgcactgccgagaaatgctttggcaagtccacaaagtcgcttcactacaaaggctgcaccttccaccggattatcacagagttcatgtgccatggctgtaactttacccacagcaacaggaccagctgcgagtgcatgtacggtgataagttccgctacgagaagcttttgcgcaagcacaccatgcccggtgtgatctgcatggccaacgccggtgccaacaccaacggctgccacatcttcatctgcactgac

SEQ ID NO: 128288 - DNA, 529 bp, Zea mays
  Clone ID: MRT4577_48470C.1
gtaagatagcaagaccaacacatgcattattaaatattatcttacatttgctatttttaaaatggcaatcataaccatcattgtccaagtatgaaacactaatcaaatttctctgtaaagagggaacataaagaacatctctaagtaaaagcgtgaaaccatcagcaagctctacagaaagatcgccaacggcttcaacatctgcttggactccatttgcacttctttgtgtagtcctcgttgaacggaatccccgtaaagaattagcaacatgaacagttgctcctgagtcaatccactaagtagattttgaatatcgtacatataggaattcatttacaaatatgataatattctcacatttctttgccatgaccattttcaagaacttgggatagtctttcttgtagtattccttcttcttgcagggaagacactggtctttctccactgtgaatttctgttgctgatgctgaggagcctttccctttgaggaggagttagcattaaaggtctttttcttggtttc

SEQ ID NO: 128289 - DNA, 1109 bp, Zea mays
  Clone ID: MRT4577_48471C.1
ctttcctagagctagcttgctccatttccgtcccgacttcttctaggtctagctaggtctagagagacgtctgcgtgtgtgtgggatccatgagcgcgagcaattccgggtccggggacagcatggagtggggacggggaaggtccaccaccaggacgaagggcaagagaggcggcggcggctccgacaagccgaggcagccgcagcgagggctcggcgttgcgcagctggagaagatcaggatccagagcgagatggcggagtacttgcaccaccctcttgcccagcagccgcctcatccgatccacagaactggtagcttcaactcggaagagttgcggctgtctcactcggtgccttcttcgtctccgtcctccaccttccatgccaacaacatgggtgtttcgtcgtcgtcctacccgatccatcgtcagactcatcatcgtcttgcgatggcatatggagagagatctgctggaggagacgacatgagatatggtgaatttcaaacaaatcccatcgtcagcaggtcaccaaataattactatggcgctacctttggttcggaagcacattatccacatccaagcaatgccacattgcctctcttcaaacctcgggaatcaatttgcttgaacaggccgtattattacgatctaaatcaaaccgcagactcgtcgtcgagcttagacgacgatcaggaggtagaccttgagctcaagctatgatgatacatgcatgctgctggccctctcttttaccataccctcccagttaagctacccatatatatactacctgattgtttttgccccaaaaaaactaaacgggcttgcagtagttttgtgtgaactgcattagatgcatgcatatatatccaagaaaaagatttatatatgcccccccatgtgcaaattttttgattgatcccgtacggtgtgtgacgttgtgtaaccgacttgcggaaacgatcaagcacgtacaagctgggtttatttggttgatatatgctggctacctaattattatctgtccaatatatataatatactcccatactgtgtataagtttgatatagcataaaattacgtgtgtgctggttatttcc

SEQ ID NO: 128290 - DNA, 410 bp, Zea mays
  Clone ID: MRT4577_48472C.1
gccggccgggcctgggacctaggtgccagtggcggcgcctccgcactacggcctcagtctatgcctccacctccatgctccactgcacggatccggatccggcaacgacgacctccctgcggtataatgaagggttgaccatgtacaccttcgatcggaaataatactcgagcagtgcaagcatgaaaacgaagctgagaagcttcagttccgtgttttggacacgcaacgaaggatcagtaagaggaagcgataagatcttagaggcttggacaacatgtctaatgatggaaaaaacttttatacccttaaaatatcttgtagtttgtgtgcataggactgagtgcatgattgtaatttttacaacactataaatagagatacaaaaaaaaaaaaaaaaaaggccccta

SEQ ID NO: 128291 - DNA, 249 bp, Zea mays
  Clone ID: MRT4577_48473C.1
ccggccgggaccttttggccattcactgagccacctagctagtcattactagctacgacttctgcaccaccagacaacaacggccatatagacttgcttcagagcgcgtctcatccacgtccccgctgctatgaaggacaagatcctcgtctgcaacctgtcgctgccttccatacagttgataccaccattgtactcgtcccataccccaacgccactgacgtgagactgatgataatccacgaaatg

SEQ ID NO: 128292 - DNA, 544 bp, Zea mays
  Clone ID: MRT4577_48474C.1
cattgggtacctcgaggccggccgggatgtctcttccctcctagacctaggtgccagtggcggcgcctccgcactacggcctccagtctatgcctccacctccatgctccactgcacggatccggatccggcaacgacgacctccctgcggtcagcggtctgcgacctccattgattcgcaccacatcgttcgccccttcctagcagtataatgaagggttgaccatgtacaccttcgatcggaaataatactcgagcagtgcaagcatgaaaacgaagctgagaagcttcagttccgtgttttggacacgcaacgaaggatcagtaagaggaagcgataagatcttagaggcttggacaacatgtctaatgatggaaaaaacttttatacccttaaaatatcttgtagtttgtgtgcataggactgagtgcatgattgtaatttttacaacactataaatagagatacaatgtcatgcacaggggacactttgtataagatcttcaaggcttcatgattcaaaaaaaaaaaaaaaaagcggcc

SEQ ID NO: 128293 - DNA, 305 bp, Zea mays
  Clone ID: MRT4577_48475C.1
gtctggttgtcactagaatttcctcatttggcatgcaataattacaattgatttgcctggtactctgattgaaatgggaaagttgagtgcttacatatgtcgatccacaatatttctttattgtcaagggcagagataaagtgaattgtgtggattcacaccaactgcaccttcagatctcttctgggtcgtttcatttcaaaaaatactggccatatccccctatatatctggtaaacatagattgaggactagatagatcaggataaacaaggcgtgttaattgttgacaaatataatataag

SEQ ID NO: 128294 - DNA, 557 bp, Zea mays
  Clone ID: MRT4577_48476C.1
ggggtcactgtcctcacctctcactaccaccaccactgcttcccgccacatatcagctggagcagcagcgcgagcatagcttcggtcggtcgatagcatcgatcgatcgctcagccgtcatgtcgcgagatgagcaggcgctgctctcgacggatatcgtgaaccgaggagtgcagccgtctgggcccgacgccggctcgccggacttctcggtgtgcgagcgccgccgcctgccggacttcctgcagtccgtgaacctcaactacgtgcgcctcgggtaccactacctcatcagccacggtgtggacctggacaccatccccgtcatcgtgatggagggctgtgtctagatggacagcctcatccgcgacgagctgtgcagcaaggtgcgtggggaggccacctacaatctcgccaccgtgctcgacttcctcgccgtcctcgccttcagcatctccgactagatgatgtccagcaccatgcccgagaaccttatcgacttcgcatgctacaagccggacgacgaggtcaaggtggtcaaggcgtacttcatggac

SEQ ID NO: 128295 - DNA, 707 bp, Zea mays
  Clone ID: MRT4577_48477C.1
ccggccgggggaaatataccttacggccagaccgcccaacaacagcttcaccctagccacaaccgaccaagcactacggacggaaccgtagtcagttacccgccgcccactccatggaggacgaggccatcttaacgctcatggacatcgacgactcgccgatcagcgctgcggtggccggcattcctcgacgaggaggacggggaaggcgagatgttcttcgccccagtaccgcgcggtccgcggcggcactagcaatgcttgcgggaacctccactccaacggtgtgctgacagcctccactgggccacactctacgaaggaaaccactactgagggaactgtctagctatatctgaaaaccctgacgcccgtaaccggaaccaagtgcgacggagttgcccctcgggcgaggagaaggatagctcatatcgcacgaaggaatgatgcaacaatctactataggtgaattctttgctcgcaggtgcaacaagatcatcattggacttggacctcaatctgagagacaatctcaatcttctgtgcggtcgattactgtgcctctgtctgatcaattgatggccagaatgccctttttggctgctgatgcagttgcggcaggaggacgccggcatctcgtcgacctgtcggcgatcgcgccctcagcgggcaactggcctcaggaacaggactccaacatcccacca

SEQ ID NO: 128296 - DNA, 322 bp, Zea mays
  unsure (1)..(322): unsure at all n locations
  Clone ID: MRT4577_48478C.1
acccgtccccagggtacacggtcgccgcccctgccctaccgcaggagggagcgttcgccgccccgccccgccctccgtctcccgtaggctcgccctccgcgctccgtctgacaaccctctccggagaaatgtctgagcatatctttgaggacacattagtggtcactagagtcgacccttatggcaaaaagttcgatagagttgggggggggggagctcatagcnagcagttagatatgtatatacaaatagatgtaggaagaggtgaccatcctatgtattttgccgagaaatacaaaaaggttatagagggtattgttaa

SEQ ID NO: 128297 - DNA, 446 bp, Zea mays
  Clone ID: MRT4577_48479C.1
cgcggaagttcccagcagccgctatctgcctctgtgcgagcaacgccaagggccaactccgagaggcccagccgccgcccgcaagcgcccagcaagcagcaaccgctctctgcctctctgcgagcaacgccaagggccaagccactgccttctccaatctccagctctcccaggtgacgcacaagcacaagctgcgagcctgcgactctgcgagcaacgccaagggccaagtctgacggcgcgctgcgcgcacaagcaaagggccgcgcgattctacttctgctgttttttttctgactaccaattatattaaatggttctattgtaatgttccaggcatactaccctaggctcaaaaccaagcctacgtcccttcccctcaaatccaaagcccacaacccggggatcggctccccgcgggccgcaccaacgccttccgccccggc

SEQ ID NO: 128298 - DNA, 277 bp, Zea mays
  Clone ID: MRT4577_4847C.1
ctggggtgtctgaactctgtcggccctgcttcctgccaggacgtggcctcttccgatccttttctctcagacactggaggtctcttctgccattgtgctggtcccatcccaagaattgtaggacagagaccagactgggtcggcggacacaaagtccatccaggacccaggccgcagagggagcaggaagagatgctgatagtttgatctagaaaccagcagctactggctcaaattcaggttctggcgtcgaatagcgactttcgagttctctaaa

SEQ ID NO: 128299 - DNA, 239 bp, Zea mays
  unsure (1)..(239): unsure at all n locations
  Clone ID: MRT4577_48480C.1
agaaagggtcatgagagcaaccacaacctcagagtgtactgttcccacggaaacagaggcagttcaacttctaccacgataacacgaccacagggggaagcacttaggcgacctcctcgatcttgggggcagcggcgctgccgccggcggccggggcgtccgggtgcatgtccggcggnagtacccatgtccgcgccagctgcctgggacatcttggcgatcatggggttgcagatgcc

SEQ ID NO: 128300 - DNA, 631 bp, Zea mays
  Clone ID: MRT4577_48481C.1
ctcgaggccggccgggatcgccctctcgccgtctgacttctgctcctccatttccgcctctgtcccttgcaagttcaatctcgcctccaaccactggctaaagagaatccccacatcaacattgtgcctattgcgctctctgactctggcaagtctaccaccacaggacagctgatctacaagcttgcaggtattgaccagcgtgtgattcacaggtttgagaaggaggttgctgaaatgaacaagaggcccttcaagtacgcatgggtgctcaacaagctcaaggactgagcgtgagataggaatcaccattgatatcgctctgtggaagtttgacatcaccaagtactactgcacggccattgatgcccctgcacaccgcgacttcatcaagaagatgatccactgacacctcccatgatgactgcgatgtgcttatcattgactccaccactgatggttttgaggatgacatctcctaggatggccagacccgtgtaaatgtctctccttgcgttcacccttggagtgacatacatgatttgctgctgcaacaagatggatgtcgaccactactctatactccaaggtgcgctatgatgagattgtgatagaagcctcatcctacctc

SEQ ID NO: 128301 - DNA, 332 bp, Zea mays
  Clone ID: MRT4577_48482C.1
cattgggtacctcgaggccggccgggatcgttctcctcgatctcgggcgaggcgagatatccccacggagccctgagcgagcatacgtgatggcaaatgtgacgctcgcatctgtgacccatgtggtgttaagtatccccctcgacttcacgctcatgctgctgagattcgctgggctcaggctcggccggcgccgaccgcagcggccaaaatcgctgaatcgcatcccgagaagcatcggcactcgatgccgacgccgagcgacggcatgcggttcatctctcggcggaaaaactccgtcgcgttctggccaatgcgggggtcatcgagcc

SEQ ID NO: 128302 - DNA, 315 bp, Zea mays
  Clone ID: MRT4577_48483C.1
cagaaccattccagattaaacacaaaattgttggttttactacagcatggggacaccccttaaacacacacattggcagaggggagcatcaaccaccttactggggaccaagcataaataggttgtagctcgcaggtctttctactcaactaagatcactgtccggcaagaccaacttggactgcctgcgcagtgcctaccttcttgccggcttaatcctcagggagtttatcagccttccgcatcctgagcttgtgctggagctgaaactcgggaatgggctgcttcttcctctatagagccttgcgcatgccg

SEQ ID NO: 128303 - DNA, 503 bp, Zea mays
  unsure (1)..(503): unsure at all n locations
  Clone ID: MRT4577_48484C.1
ggcctgccctttggtgttttttttttttttttatactggtagttaggatatattactgggatgcagtcaaaggaaaattgatcaggttacatcgtaaccagcattcattcagctcttgtaaaaaagaaaaaagggaaaagtaaaaggagnagaagggagacacacatttgtgggggggagtaattcacgtacgccacagttttgcccaggatcgatccagcctacagtagggatacacacacacaacgaccacgtatatgtgaaaattgaattaagctggtcaaaaggttgtgtttgcgtttgcacgttttgcggtcatgtcatgtgaagaggaggcgcttgctgtgtgctttttgactggatccgcccgggagtataggccaactgctagctgccgatcgcatgcaatgaatgatcactaagcgcctgcaggcattatcagacccttttgtggcttgtggattgtgtaaatttcaagcatgacggaaacgggtggtctgccc

SEQ ID NO: 128304 - DNA, 1585 bp, Zea mays
  Clone ID: MRT4577_48485C.1
agctcggaacccggctcgttgagctgttcagatgactggagttcacattcatcttctgctggcaacccagacataccgtatgtggttgtctccaagtcatcaattgtgactgctgtatgcaaggagattcttggctgctacaggaagttacttggcattcctgatctgttgaatcaaccaaacatgtcaattctgaagcaacttttgcagactttacagccaactgaaaattttgatgatgttctttccgagttccaaccatctcttgctccttgcaatgttgattacctgtattgtggagcatgtaaaatgttggaggatattatggattcagtgtcctcattttcataccttctgtcttctgatgtgttaattactatacaatcaatcgtaaattctgttgttgtgttgttggacaaatctggggaaccaaatggaaaaaatatacacatgggatgctccaaagcaatcattccctttctgcgaaagcgtcttggatactcagctcataagctgctcagtgctgatgtccctagcgaagatgctggaaaaggatggcagactaaaggtgatcttatacagaagatattgcaaatatatctcaggaatagtgactctacttcagatctacttgctgagataggtcgtgaattgcctaaggaaccttcgctcaaaacaaaagataaccaagatgtatcgtatggttttccaacattgtgttcctccactattacctcttggtaccgtgtgcttcacgaggagaacacagggagtttaaacaagacgatcaaacaagcactgaaggctagaggatcagttgatactattcttcaagagattcagaaatcagtggatgcatttgtctctctaataggaatgtgcaagtcccacgaaaaggtttctatgcatgcaatggcagttaaacatggggggaaatttattgacacatttctgaaagccttcaactttctagagagacatttcgagcaacataatgacaccatagttaaaatgctaaaacaactccagaaaggaacaagaataatccaatccatatgctcagatgctaagggtaacaagcggacaatcgtggcaagcaaagtacctcctgcaaagagatccatggagcggttcttgttccaggtcaaggcgctgctacacagctgctccgccgagaaggaattccagatgggcaatttgaagcacaaggacttgcaaggccatgtggtgagctctcaggcgtatggaaacgtggatgaggaagatgaggagcagacggagatcgactccgaccttccagctgatgagcatgataatggcaatgccatggaggaggatgctgtggaaggtagcaacgagacgccgatggaggaggaagaggaatagtggcataggtaccaatctgtacatctctttctctctaagccggccaaaaatctgtccccaaaattaacagttttgtgtgtgcatttagtgtagaaaaaaagataggatccccatcagaatctaggttgcaacgtcacttgtaaatatggatgtctgaacaagtagtttatatattgctagcagtggtcgtttcacaccc

SEQ ID NO: 128305 - DNA, 295 bp, Zea mays
  Clone ID: MRT4577_48486C.1
caccaacccaacctggcagcacaactccttcgcctcgtcggcgctcgagaggctgcatgtgagcatgcgtctgcaccggcgccacgaggctcgcctcgacgacaacccgccgccggcggccttcaccttgtacaactacgacagcctcggtgcgccgctgtggccgagcctggctccctcgtcttctccttcgccggcggcgagtgagagctcagagatgctgccgcggcagcagccaccggccggtgctactcccactgctggttactccgccgggctctggtggactcacatg

SEQ ID NO: 128306 - DNA, 756 bp, Zea mays
  Clone ID: MRT4577_48487C.1
gttgattacctatattgtggagcatgtaaaatgttgggggatattatggattcagtatcctcattttcataccttctatcttctgatgtgttaattactatacaatcaattgtaaattctgttgttgtgtgttggacaaatccggggaaccaaatggggaaaaatatacacatgggatgctccaaagcaatcatttcctttctgcgaaagcgttttggatactcagctcataagcggataagctgctcagtgctgatttcccaagcgaagatgttggaaaaggatggcagagtaaaggtgatcttatacagatcatattgcaaatatacctcaggaatagtgactctacttaagatctacttgctgagataggtcgtgaattgcctaaggtgggccatctcttcttctcgagtgatgctctcgagttatgcatatgccaccactctgccttaaaaagaacatctggcaatattctgaatccagccgaggagtgagcataaaaggtttagcaattaacaaataatctatgttcaatgggcatgagtgaagaataattagtaagtgcttttcactggctgacttgatagcaaagtagtgtaaaaataatggtaaaagtggttacgccttataaactgggacgtagggagtactgttatattagcaagtacaaaagcattccccgctaacactgtttgtgtattagaagtgagcagtctgtgaaatagaaagtgacatccatttgctattgttaggtgc

SEQ ID NO: 128307 - DNA, 570 bp, Zea mays
  unsure (1)..(570): unsure at all n locations
  Clone ID: MRT4577_48488C.1
gcctttctctcttctggcgtccgcgtggtgtgtgcantttcacttgtacctgctnnttcatctccccgctcttttctttcaccctggctcccgcgccttagtggctgggaaaccaaagaaaagccgggggtggcgggctgaccaagcagcggggcgggtgccgcgcccgcccggcccgccgcgaaaccggaagcaggggccggccgttcggatccaggcccgttttccggggttccctggcgaggcggccgcctgaaggcgttgcggggccttggggaacctgcaggccctggcccggggcaacatcgtgcggcggcaggcggcggaaaccctgcaatgcatgccccccctcgtccgggtccaggcccgcgcgcccccctgccgggcaattggttcgaagcaggtcacgggccatccggatccgccgccgccggaaaagtccagccaggcggtggcccccagccccggccgttccggctctttgaaggcaaccctttcaaggcccccggccgccaaaaggctggccaggaaaaggccgaaatcctgcggaaggacctgcttgacccgttg

SEQ ID NO: 128308 - DNA, 106 bp, Zea mays
  Clone ID: MRT4577_48489C.1
gtagtgctcattttgacggcacgcgggattacacttgctagaaatttcacagatgcagcctcaagcgtctcgccgagccctatccttaacgatgcgtttggggaaa

SEQ ID NO: 128309 - DNA, 394 bp, Zea mays
  Clone ID: MRT4577_4848C.1
aacacccccggcagcacgcacacgaaagctcaaaattcttctcgagctcttttacccgaacacacagcgaactggatgatcacataccagttttgggggtgaacagagacgacgcccgctgtgccgtggcccatcttcggctaaagcctttgcactccgacacgctcctcactcacagcccatctgataaatcaaacaccctaaccctacataaacgcgagtactacttccagttgaaggccccaacttaatcctccctttaactctccaataaacaaacatacagatgcactcacccgaggcttgaaacacacacacagacacacgcacacacatactacatctgcctgcgccgtagaagcacacactcacaccgcgcaactgtgactactac

SEQ ID NO: 128310 - DNA, 193 bp, Zea mays
  Clone ID: MRT4577_48490C.1
gtgacgctggccaccggggagacggcagcagagtacgctaagcaggcgcggtgaaaggcaaggacgtgacgctgagcaccggtgagacggccgcggagtacgccaaggccgcggtcgataaggcgaagcatgcggtggtggcatcggggaagacgacggtctggtacacgcagcaggcggtcgttgaaggcca

SEQ ID NO: 128311 - DNA, 429 bp, Zea mays
  unsure (1)..(429): unsure at all n locations
  Clone ID: MRT4577_48491C.1
gggggggttttttttaaaaacaataacagttggggtaacaatattnacctttaacaagcaatccaatcttgggacaattttttctcaaacaaacccttttgagttcaattcagccaggacaactatttttttngatataataatantacttgtgttttgaccggggatnnntaactaatttcnccccacccctancactttatctccttaanaccattananaaatanantaatntctnattantnncaccatccttntaatattctaataccacanactcatcatccttcatnnactcaccaacaaaaaattnnanntccttcancttnctaannanaaacttnnttncaccctctacacccttttttaactcatcctctttctttttctctttacccaatttttcaacaanancaaccaccttcaca

SEQ ID NO: 128312 - DNA, 2137 bp, Zea mays
  unsure (1)..(2137): unsure at all n locations
  Clone ID: MRT4577_48492C.1
gaccctcgaggttggccgggagtgttgccttctcctcccccttctccttctcccgtccactcagcgtgcctgactgcccgtgcgcgccctcgctcagtcgctctcgcgcgcggcgacaactgagccaccgccgacggtccaactcttcgtcggaccctttgccggcgacgagcacccaccaggggtttcatggtagcgtgacctgtctcggcctagaaaatgtatataaagaaggtcgtaatcgaagggtttaagagctacaaggaggagatatcaacagagcccttcagtcccaaagttaacgtagttgttggtgcaaatggatctggcaaatcaaatttctttcatgctatacgatttgtcctgagtgacatgtttcagaacctgcgaagtgaagataggggtgcccttctccatgaaggtgctggacactcggttgtatctgcttttgttgagatagtgtttgacaattcagacaatcgtattccagttgataaagaagaggtacgcttgcgcaggacaattgcttcaaagaaggatgaatactacttggatgggaagcatgtcagtaaaactgaagtcatgaatctgctagagagtgctggtttctctcgttctaatccatactacgttgtgcagcaaggaaagattgcatcccttaccttgatgaaagattctgaacgactggatcttctcaaagagattggtggtacacgtgtttatgaggatagacggaaggagagcttgaaaataatgaccgaaacagccaacaaaaggaagcagattgatcaagttgtccactacttagaggaaagactgagagaactcgatgaagagaaagaagaactaaagaagtaccagcagctggacaaacagagaagatcacttgagtatactatattggaccatgagcttaatgacgcaaggaatgaattagcttcggttatcatccatcgctgataaccgaagaaaaatttctgaaagtatgtcccttgcggacaatgaagtggtggatgtccgagagatgatcaagagttttgataaagaaataaaagtctcaactaaagggataaatgataccaaggcgcaaaaggaaggtgttgagaagaggcgtactgaagctctgaaggtagttgctaagattgaacttgatttgagagatataaaagataggattgtgaatgagaagcgagcaaaggatgaggcagcgagggatttgcagagtgtgaggagagagagtgaaaagtcaaagtctgaattggctgaaattagtaaggtgcatcaggccaaactaaaggaagaggaggatatatcgaagagcattatggatcgtgagaagcggctaagtatattgtaccaaaagcagggaagggcgacccaattcgcaaacaaagctgctagagataagtggcttcaaaaggaaattgaagatctcaagcctgtacttttatcaaataaaaagcaggaaggtttacttcaagaagaaatccagaagcttaaagatgaaatcaatgatttaactaactacatcgagtctcggaaaagcgaatcaagtaagttagaggaaacacttgcgaaaagacataatgactataacgatttgaggaagcagagagatgtgcttcaagaagaaaggaagtcatattggaaggaggaatctgaggtgacagctgaacttgataggctacaagaagatcttataaaggcacagaaaagcttggaccaagcaactcctggggatatcaggagaggcctgaattctgttagcagaatcattaaggaccatggtattactggtgtttttggtcctgtattagaactggttgattgtgaagagaagttctttacagctgttgaggtcactgctgcaaatagcttgttccatgtggttgtcgagaatgatgacatatcaacaaagatcattcaaatattaactagagaaaaaggtggaagggtgacatttataccattgaacagagtgaaagttccagatctcagctgtccgcaaagtcctgattttgttccattgttgaaaaaattgaaatatcgatctgaccatcgtcgtgctttcgaacaggtttttggcaggacagtcatatgccgagatctggaaactgcgactnaagttgcacgtagc

SEQ ID NO: 128313 - DNA, 395 bp, Zea mays
  Clone ID: MRT4577_48493C.1
gcccagctcgtaatctcggtatagagcttgtgcgggttctactaggccacaacctgggacctcgtttgcatgaatggctgggaggacacagctcctacaattgatcttacgtagagcatgaaacataagcgctcacactttcatgggccaactagcgggccctaaggcctagatatgcacccactgatcagagagtccatccattctaccactgcactgtagtgaggtagtagatcacgaaccgtgagggaagagactcaacacacaataaccggctgagttacattccaggagaccgcgcgctctgaatcatacgtagcagtaatcacacttaacgtctatgcacaataaggcgaggacgagagcgtcttcctttgctggtatgactacttttg

SEQ ID NO: 128314 - DNA, 473 bp, Zea mays
  Clone ID: MRT4577_48494C.1
ggggggaaccaacaacccggttggttttttaagggccaaaatgggtttagcaaaaaggggtcacgggttttaattgccattttttaaaagaaaaaggtttttttaagggggcattggaacaacaattaagaaacagggggggtttacaagggatgataaccattttccggggggggggggaaagggcccaattccacccacgggtcccccttggttttttacaggggctttttttaaaaatttaaaccctcccgtaaaaaggtccaaaacctttaaggggacagtttggaaacattcatgctttttggggttagattttttaacaaagaacaggggggtttttttttttttggggagggggacccctttttggtccacattcaacctaccgggtttaacgttttgggcttttaagggcccttcttggttttttttcttggcaaaatttaaccgggttttttttttttaggggg

SEQ ID NO: 128315 - DNA, 536 bp, Zea mays
  Clone ID: MRT4577_48495C.1
aacccaaaacccaagcccggggcggggggggaacaaattaacctaccccccaaattgggcccaaggcgcccttaaccaacaaagggttttttttacttaacgaaaatcgagcccaactcccacttaacaaaaaacccaagggttttttttgggtatcccaccgggggtgacaggggcgggggctttccattggttggtttgaggggccccccaactggaatggccggcccactttgggggggggggggggaaaagtaaaaatattaacctaaaattggggcaatcaacaacccacaaaggcccagcttgaaattgggtgaaggacccgctcaagggttcccccttgagggccggatccttttggtcttttccatggaccatttcttcagccctttttgagcggcccccccccgcaaaaagggggagggaggggggtcataaaaggtcaacacattaatggcggtctcgggtaaaaccggaggtggttagccccaggacaacgcacaacgcacaccccctgggcaagcaacaaacct

SEQ ID NO: 128316 - DNA, 755 bp, Zea mays
  unsure (1)..(755): unsure at all n locations
  Clone ID: MRT4577_48496C.1
atttccagccgccggttgctagtttcaggtcgtacgccgacgtcctcaagtcgggtgttcttgctggagttagttcgcaagccgacgtcctcaagtcgcgtgttctctccggtggaatggcggatgcagagggctggcgagtggttgatcaccggcgccagcaggttcgtggtcgtgcctcgggtcctggtagttggtcttttcgcggtcggagcaattgggaggtgcgtggccgcagttctgggcatggacgcggtggacgtttccatgctcctgcggcgtcgcttggctctaatgacagggcggtggtggatcatagcagaggtggtcaggctgatgcggctagaaatcgggttgccgttgtcgcacccggggttactgacaaggggaagaaacgccgggaagagctttgttgcgaaatatgtgaagataaccatgttccggaggagtgtccggtgtttaatggtcccaagccgcaggcagctctttgcggttttgcgggcggtgagtctggtttctttcaaattccaacatggggatcacatgctgcaattccgaggtcggatggtgtcactgcatttataacagtgaaggaaggtaatgtttctgctgacctcgtcaagtctgaactctctagacttataccagtgaagtgggaattggtcggtccagaagcacgcagaacgggtnttctggtaccttttccatgcagagtcgagctccaacgcatgattgctatgaaatatgttcatacg

SEQ ID NO: 128317 - DNA, 1009 bp, Zea mays
  Clone ID: MRT4577_48497C.1
ttcgcggtccagaacgccgggtccaagaccttccccgttacgacatgttcgactccaaccaggacggctgcgtccggtgctacccgcacgtgaccggcgccctccgcagccaccgcgacctgggcatcgaccctgcgcgcaccgcgcggaactacaccatgctcgacttccgcctctacatccgcgagatctaccgcctgccgcccgcaggcgtcagcatcccatacaaggaggcgaacagcaacgctgcggcagctgcgcccggcgccccagctgagcagctgcagcggaagccacggctgatgcttatcaaccgtggccgcacgaggaagttcgtcaacttcccggagatcgtcggagcggtccagaacgctgggttcgaggtcatcccgatcgagccgcgtagagacctcagcgtggaggacttcgcccggaccgtcgactcgtgcgacgtgctcatgggcgcgcacggggccggcctcaccaacttcttcttcctccgtaccaacgcggtgatgctgcaggtggtgccgtgggggcacatggagcacccttccatggcgttctacggcgggccggccaaggagatgaggctgcgagatgtcgagtacagcatagcggacgtggagagcacgctctacgacaagtacggcaaggacaacccggtggttagcgacccagagtccatacacaagcaagggtggcagcttgggatgaggtattactggatagagcaggacatcaggctcaacgtcacaaggtttgctcccacgctgcagaaggtgcttcagatgatcagggaatagaggaaaatgagatcaatggatcatatgttacattacatttattattcatgcttagagatgaataggattaatcttgtttttttacatttggtatattggcctatacatggaacaattatccatatgcgtcaatcttaatccgtggtttctgttggatttaaaaaaaaaaaaaaaaaaaaaaagtcgacggccgcgaattccag

SEQ ID NO: 128318 - DNA, 301 bp, Zea mays
  Clone ID: MRT4577_48498C.1
gagatctataaatgccggaagcacgtagaggaataagtctatgtcaccaccaacctattgaaggttgaagatattatgcccctaacctatccaaaatcatgtaaacaactgtctgtcacagtttgaggtggttttgtctatgtggcgtggtgacaccgtatgtctatgtggactttgacctggacaaacttgcttgtggcattccaactcaatttgtaactgcacatcactctagtagtctttctacttccatcagctttagggtccgtttggatttagatatattgcaccccaattccag

SEQ ID NO: 128319 - DNA, 516 bp, Zea mays
  Clone ID: MRT4577_48499C.1
cctcgaggcggcgggcggtttcaacatacatatgccgctgccctgaaccgagactacagcgctctggctcgactcgcctcacctcacctcagactcaccaactactcttttgcaccaccaaggatctcgtcgtcacccgccatgtacgtctcacacacgacatcctccgtcgccagcgacgctccaacaaccggggaacaccgaatggcgactaccatcgtctggggctgataccagggcagagtacagtgctgggcgaccattccacgtaccagcactgcgaatgtatgtaaacaaccgtagcttcaccacgagattactcaactgagcgaccatgcgtatgcctgtcgctctggatcagctgctgatacacgagtccttacacattatggaccctatttcctccaccaacacacgatccagattgcatgaccaactaccgctagacgtagctccaacttgagtacgtgtgctagcttatcagacacagaacatgttgcaagcatgcatgatctg

SEQ ID NO: 128320 - DNA, 379 bp, Zea mays
  Clone ID: MRT4577_4849C.1
ggcgcagcagccgccgtcgttctcgagccggtgcgcggggctggtgaaggagcagcgggcgcgcttctacatcatgcgccgctgcgtgaccatgctcgtctgctggaaggaccgctcgtagccgcggctagcttccagggccggccgccggcgaagaagctgggcccctcgtcctcccatcgtcgtttctccgtccgtccgtccgccaggatcggagagtcggtcacggggctggacgctgaagcaagccgagggagggacacggggaagaaggcagattaggtgatgtgtgtatagctcagtctttggttaggacgagtgctcccttcccttttttttttttttttgacctcccatttctgggacgttttcttggttt

SEQ ID NO: 128321 - DNA, 298 bp, Zea mays
  Clone ID: MRT4577_484C.1
gttcttaacatcattaactattctacggggcttccagggattaacttccaaaccgggcgtggaacattcgggcgcaaaggccacagaagcttattctggctataggacactgaagcacccacaccggacgcttctgctcatgccaaggcacagaaaaggactcttgcaacagtcaatactgatccctggccaccactaacacacactcgtttatgtgacttcgcgcattctttttcttcactgacctgtctaccggtgactgaagactacatgtcgctccagagggtgcccgtcatcg

SEQ ID NO: 128322 - DNA, 711 bp, Zea mays
  unsure (1)..(711): unsure at all n locations
  Clone ID: MRT4577_48500C.1
ccaccatcttctgcttaactagctacagttcaccagccatgacgagacgcgctgcagccacctttatgctgatgctctcgctcccgacagcggccctcatggtcgccgccgacgacgtgggcgtcgacagcatccgcctccctaccgacggcggcgaaggtctcgcaacgagcaaaggaggcgagaagcagacactatcactcccagtccctgaccaaatagtggcgccgagggagcagaacgtcggcgacgtcctcgaagaagaggagaggccgtgggcgtgctgcaacagcaccgtgtgcaccaagtccttcccgccgacgtgccggtgcctggacgaggtcgaggagtgcgcccccgcatgcaaggcgtgcgagccgtccgggttcaacccggccttccacgtctgcaacgaccagtaccacggcgacccagggccgacgtgcgccaaggaggagaggccgtggacgtgctgcgaccggaccgtgtgcaccaagtcgttcccgccgacgtgccgctgcctggacgaggtggaggagtgcgcccccgcgtgcaagcgctgcgagccgttcgggatcaaccccaaccgccacgtctgcaacgaccagtaccacggcgaccccgggcccacgtgcggcaaggacgacgacgacgatgaccaccccagcggntctccatccctcgccgccgccacacagatgcggttgctgc

SEQ ID NO: 128323 - DNA, 741 bp, Zea mays
  unsure (1)..(741): unsure at all n locations
  Clone ID: MRT4577_48501C.1
agaaatttctcccgggaggctaatccttccctccagggggcagcctcccctagccgccggccgtgctgcccagctcacattccgtctccgagcagcagcacgctgaagccgccgtcgcgtcctgctgctcctagcgccgccgtccccccgggaggctcgttcttcactcctggggtggcccccatccccttcaactcgccggcctcccctcgctcttcctcctctgcttcccctatgctcggatggaagaccagcagggtgctcaccgcctcaccccccagggcgcgtccctgctcctctgctcgtcgacctaggggatgcccaaccgtcgcccctctcctgctcctcggcggcatggctgccgcccctagctccggcgaccacgacggcctcctctcccgccgccgtacggtgctcatccccacgcgcccgcgagtccccgcactcctctacgccgccggctgcgaccgcaccgccgcccccagcttcggcgaccacgtcgacctcttctcccgccgccatggtggctgtccctctccttcgccgacccccctgcgcctgcacgaacagaggangaggtcgagggcggggctgtccgccagatccgcgccgccgttggcggatccgcctgaatccacgccgtcgtcgcgtccagggcgggccgtcgcctccagggcaggcctccgtggcccggacctccccgtcgacctaggcagcgtgagcatgcaacccacgtcgccc

SEQ ID NO: 128324 - DNA, 365 bp, Zea mays
  Clone ID: MRT4577_48502C.1
ttgatgctacattggtgctttcatgcaagaggtagataccgcacagcattgaggccacgaatgctcacaagctcctatagctcacctcatgcccccaaacctctcaccaaccgtgcagttggatgcgtgcaaaccccaattgatcaaccctacaggatccaacaggcaatcacaacaggcatctcaccattatcacccttggtcctccaacaaccgtgcagcccaatgacagcagttacctttgctccatttggtggcacaaaacatcagggcacaacaactacaacaacttgggctagcaaaccttgctgaatactctgagcaacatcagtccattccattcaaccaaatggcatgcttggaac

SEQ ID NO: 128325 - DNA, 403 bp, Zea mays
  unsure (1)..(403): unsure at all n locations
  Clone ID: MRT4577_48503C.1
gtctatgctgttgaggagaaaaatccggggaatctaggtgaagaagagacagaacccgtccgtcgcttaccaggtgctgggtgaaaggctcaaaccgactatcgttgtcgcttaatgccgatcgagtcagcttaagtcgtggtttgactcgctagggggttgttgcgacccgcgcaaaccttgccgagaccaacaggagcagggaagggggcgcagcaagacacaacaagatgggatccagagcaagagagctgaccttgtcaagacagaactgctcgcggagatggcggctgaggagacgcggcggcggaggtgctcgcggagatggcgggctgaggagacgcggcgatggaggtgctcgcggagatggcggctgangagacgcggncggagtgctcgtgga

SEQ ID NO: 128326 - DNA, 356 bp, Zea mays
  Clone ID: MRT4577_48504C.1
gccaaaaccatgtccatgggaagtgctgagttgtttcaaagaaggtcggaatttatagttggcatcctgcagagactaggcaccaacaacatcatgagaaagcaagaagggtccatgagtcacagaaaaatggactgcagacatgctcttgctattcccgaaggccattttgataacttgatagactacaagcgaagcaactttaatccattagctaagctgaggaatggtaaaattccatcctcttatgcaagtgatgaagcatgtgagttcatggctttaccatcaggatacaatcagggccctggaagtattgttgatcagaaaaatgacttatctcatgggggtagtggagc

SEQ ID NO: 128327 - DNA, 269 bp, Zea mays
  Clone ID: MRT4577_48505C.1
cttgactgatagactccttaataaagcacctattttcactaagccacttaaaaaggaaagcatccccatatccatagacgattcttcaaatgactaccaaaatgatgctgatgccgattccgatcaagaactaatggacgatcccgatttatacgaccaaccagagcattctaattactttgatcttgccatcgtcaaaaagcttaattataaagtaatgatcccattacctgacgaccaagagaccaaaacaactgaatacggggctc

SEQ ID NO: 128328 - DNA, 171 bp, Zea mays
  Clone ID: MRT4577_48506C.1
acttgagacgctccacgtggcccatcatttcaaagactccggcgagcaagcctacaaggggttcgccctagctgacgtcttcggcgcctccaacttcaacgacgagcgcttccaagatagcggctgcgttttccggagttactaagggggctatctcaccgccgaccactc

SEQ ID NO: 128329 - DNA, 113 bp, Zea mays
  Clone ID: MRT4577_48507C.1
attcggcacgaggcacacccgaccatatcacagggacagacactacacgatggggagcgccagaatcgttggcctcctcgccaccctcctatgcgctgtcgccgtagtcgcgt

SEQ ID NO: 128330 - DNA, 322 bp, Zea mays
  Clone ID: MRT4577_48508C.1
gctcatcaccctgaacgatacacccccgaggcggaggagccagcagcagccgcctgctggaagatgacggacctgaatgccgcatctgcactcgaggtggacggaggaccaagacatcctcgccgaggaggagcgcctcgacatcatccgcttccggcatgactgggacaagacctgaatgcagatggatgaagggctagaaacaccacctgagaccataaagaactttgaggagcatggaccttgaggacatcacaaaggaccctgacttcaccaccatgcatgagctgcacgacccttcgagagagatgctcatcttccg

SEQ ID NO: 128331 - DNA, 357 bp, Zea mays
  Clone ID: MRT4577_48509C.1
acaaacgcaaatacttgaagcacctctgcaagtgatgttggtgggtaaacacccaaaccttaccccggggggccaggacacaaacaaaggttttttaaaaccaaaacctggctcgacagccaaacagatttatgctagcagggcagaattcctcctcctggacaccgttatcaatgccggcctttggggggacctactcgtagaacttttccaggggggccaggtcctagcgtgcctgggaaaactcccccttctccatttccttggcgacttgccaaagcacgaacccccccttggggtacatgaagccaaactttcttttgttgccgaaaaacacctcaactactctttgggggt

SEQ ID NO: 128332 - DNA, 323 bp, Zea mays
  Clone ID: MRT4577_4850C.1
accggggcgggacccacggcgcgagccacgcgagcggccaagcgaacgcacgcgggcatgcgacggcacacccctcctatagagggacctaaatggagcccactggccgccggcgcacaacgcgagcgccggaggagcacgagcgggccccggagaagtctgactacagcccataggctaccggcgaggtaggatatgctcggagcgggcaataccgcatcctccttccaaccactgcccaggcttaccgccaatgcacactcctctaccggtgcctaaagctgggatgctgtggcgaggaacgccaaagcagccctgtccat

SEQ ID NO: 128333 - DNA, 245 bp, Zea mays
  Clone ID: MRT4577_48510C.1
tttgttttttgttttttttttttggggaaggatagacaggcctccatcaatatttgggagaacatataggccggggtggggtgagagccaagcaagccccacctgatgcatgccataaatcagggcctactataatttcacattgtataaggccaatagggtaacactcccccacagtctaattgggagcatctcttacatttaggctggatcgaacccctgaaatagcgaggcatgaagaccct

SEQ ID NO: 128334 - DNA, 285 bp, Zea mays
  Clone ID: MRT4577_48511C.1
gttctagaaaaaaaaagaacaccgccggacgtgggcaaatgtttcgacagctatcaaaatgcctttgccaatatgtccacaacagggtacaacagctgactcacgtcacattacatagtatcagccaacgctgttttcacccagtgagcatatgcgccgccgcttgcttctcacacaggagcgactgggtcgcgccctacaaaacttgctgctaatgttacagacaccggacacagcgcacggggctctggcaggggcgcgcagatttttacaaaggggaccgcc

SEQ ID NO: 128335 - DNA, 494 bp, Zea mays
  unsure (1)..(494): unsure at all n locations
  Clone ID: MRT4577_48512C.1
gcggcgaccanggagcncgccaccgncgccgcngcagacgcctttgccgccgcgcgcccgcacgggccnnnccccncnccccgagcagncgcgggcggcggcgcggggaccagncncncgcncgccnccaccncccacngncncnccacgnccncgcgacggcggcggcgcgggcnccccgncaccncggccgccggggagcnccgcgaggccacggccgggggcggagacncgcnccgngncaccaagacgccgcagccggganccagggcnaagnncagcgnggaggngccaacnnccagcagggacgagagcgaccaanccacgcnacaggagcacgccaaacgcgacaaggacccagggaaacggcccgggaagaccaaaccagaaaacgcncccacaaaccacggacgaccgcaacagggacaggaggccacgaaagaagccaccnaaaaacaaacgcgaccacaagcaccggacccggcagaggagag

SEQ ID NO: 128336 - DNA, 815 bp, Zea mays
  Clone ID: MRT4577_48513C.1
gcagctgcaccgggacgtaccgcgggcagcacggttctactcggagggtctcgacttcagtgtaaacgtctgcacgctccgctgggccgagctgcagtcggggccgctcaagctcgcactcatgcacaccaacgacagtaatcttgcatcgcagagagtctattcttcaatgctctccttcactgtaccagacataaacagtgccgtatcgaagctaatggcattgggagccgagttggatgggccaatcaagtatgagatccatggaaaagttgcagcactgcgatgcatcgatgggcacatgctaggcctgtacgagccagcttgaagaactcgtgtcacaacgaaagtattgagaagttccattaaccactcactgaagactgatgtgtatgtccggcaaaagatctttccgcgtaagacaacttactgggtctggtgtgcatgaagtggcagaactccttttgttagcaaaatcacgagagacacggtggatggtttgcagtctaccattctcttcctcgtgctgctggttatgatacacatttttctcgaactgaatgtgcctagcaggtcgtcgtggtaagctgaagccaggtttcagtggtcctgctcggtcatggccttgcttcatggcattgtgccagtacatctaattcaagtttcagttgtagtttgactgacattacatgtgtgcgtagtttcaatttgcaattcaagtgcaggagtgctctgcccctgatcatccatgtaattgaaattcttctgtaagcatttgttctgacagtataattgtggaccataaagttgctgtt

SEQ ID NO: 128337 - DNA, 347 bp, Zea mays
  unsure (1)..(347): unsure at all n locations
  Clone ID: MRT4577_48514C.1
cggccgggaganaatgcatgtgtgcatgtgtcgttctgctctccgtgatcctcctcttcttctattcttctacgcgggcgatatgcgacgctccgtgcgggccctatatccagatggcctaactgcgccgcatcctgatcaaggtcatcatcctcggggagagtgggggagggaaaacttccttgatgaactgatatgtgaagaagaagttcagcaatcagtactaggctacaatcggggtggatttcctcaccaaggaggtgtagttcgatgagagggtcttctctctgcaaatatgggacggtgctgggcaggaaaggcttatgagcgttgtgtcaggagtcaac

SEQ ID NO: 128338 - DNA, 703 bp, Zea mays
  Clone ID: MRT4577_48515C.1
ataaaacttccccaagctcctgacatgcatgtcgagatccagcgtcgctctcattctatgctagaggctaccactactgggattggacttgactctggcgatggtgagactcgcctgcgcccattaacaaaggaatgcccttcctcttgccattcttctgttggatcttgctgggcgccacctcacagactccctcatgaaaattctcactgacaagcgttactccttcacaacctcagacgacaaataaattggacgggacataaacgacaacttaacatatatagaccttgactatgagcaagagtagcaaactgtcatcaacagctcttcagttgaaaacatgtataaactacctgaggtacaaaaaatcaccatggtcgcacacatatacagcagcactgaggtcactcttccagcctgtcgatgattggtatagaggctgctggaatccatgagactacatacgatgctatcatgaagtgtgatgctgatatcacgaaggacctctatgctaacattgtgctcatcggtggctctactatgctccccgagatcgtgtgatcgtatgaacaacgatatcacttcacttgcactatatgcatgaagatcaaggcttatgacccgcctgagaggaaacaccatgtctgcataacattgtcgatcctagcctcactcaacactttccaacagatgaggatat

SEQ ID NO: 128339 - DNA, 1965 bp, Zea mays
  Clone ID: MRT4577_48516C.1
ggaaaaaaaccaaacctttgcggtccgatgccgcctgcgcagctgcgctgttgttttttccatcgagcggctgcttcgtctccattgaccaggcagcggggcgaggcgaggtcagagcgagcgagctgttggtgttggccgggtcgtccctgcgctcgggagcgctgccgtcgtgccttgtcgcgtgacacggcggcaggcggtttcccaactacgctgggcacccgcagcccaaggctttcaaacacacgcccagagcgcccgcagaccagccacacgtacttcggctgccgctctcccatttgtctcacctcgctctcacgcctgcctgcgtcaccggaagcgaccccgcgggcgagcgatccgatccccttcgcggcctcgtcaacgacgccgagcattctgctgcagaacactgaggaatggctgaagaggatgtccagccccttgtgtgcgacaatggcactggaatggtcaaggcaggtttcgctggtgacgacgcgccgagggcagtctttcccagcatcgtaggcaggccacgccacactggcgtgatggtgggcatgggccaaaaggatgcatacgtgggcgacgaagcccagtccaagagaggcattctgacgctcaagtacccaatcgagcacggcattgtgggcaactgggacgacatggagaagatctggcaccacaccttctacaacgagctccgtgtggcgcctgaggagcaccctatactgctgaccgaggctcctctgaaccccaaggccaacagggagaagatgacccagatcatgtttgagacgtttagctgcccagcaatgtatgtgtccatccaggcagttctttccctgtacgccagtggacgaacgactggtatcgtgctcgactctggtgacggcgtgagccacactgtccccatctacgaagggtacacgcttcctcatgctattattcgattggaccttgccggtcgtgacctcaccgacaacctgatgaagatcctcaccgagaggggttactccttcaccacgaccgccgagcgagagatagtcagggacatcaaggaaaaacttgcctacattgctcttgattacgagcaggagctggagacggccaggaccagctccaccgtcgagaagagctacgagctgcccgatggccaggttatcacaatcggcgcagaaaggtttaggtgccctgaggtgctattccagccatctttcattggcatggaatctcctggcatccatgaagccacgtacaactccatcatgaagtgtgacgtcgatatcagaaaggacctgtacggtaatgtcgtcctcagtggtggctccactatgttccctggcatcggtgaccgcatgagcaaggagatcgctgcgcttgcccccagcagcatgaaggtgaaggtggttgctccgccggagaggaagtacagcgtttggattggtggctccattctggcctctctcagtaccttccagcagatgtggatctccaaggaagagtatgatgaatctggtccaggcatcgtccacatgaagtgtttctgaatttctggagctgtatatctgttatttacttatattttcagttagttgggattctagattgtcccatggtttctctagcattctcggttctttctggatcattgaagggctgttggccatggagcattgtgaaagatggttaggtcgactgatgtactacatgaagaaacatgtgtaacttcagtagtacgtatggtcaggtcagtgttttttttttcaagaccaccagatcagtgcgttcctgatatgcgcgatctgggtttctacacgacgcaagggtgccggctgtcgcgtgtcgcccatgcagtttgagtctttgagagttcagttggtttatgcacttctgtacgtggtcatggaatcattcgcatttgcgccccgccgtggcgtggttgttgatttatacttggat

SEQ ID NO: 128340 - DNA, 1829 bp, Zea mays
  Clone ID: MRT4577_48517C.1
cctcgaggccggccagagcgagctagtgagctgttggtgttggccgggccgtccctgcgctcgggagcgctgtcgtcgtgccgtgtcgtgacacggcggcaggcggcttcccaaccacgtttggcacccgcagccaaggctaaaagcacacgcccagagcttcccgtcgatagatccccccagccaagtcaacgacgccgagcattctgctgcagaacaccgaggaatggctgaagaggatgtccagccccttgtgtgcgacaatggcactggaatggtcaaggcaggtttcgctggtgacgacgcgccgagggcagtctttcccagcatcgtaggcaggccacgccacactggcgtgatggtgggcatgggccaaaaggatgcatatgtgggcgacgaagcccagtccaagagaggcattctgacgctcaagtacccaatcgagcacggcattgtgggcaactgggacgacatggaaaaaatctggcaccacaccttctacaacgagctccgtgtggcgcctgaggagcaccctatactgctgaccgaggctcctctgaaccccaaggccaacagggagaagatgacccagatcatgttcgagacgttcagctgcccggcaatgtatgtgtccatccaggccgttctttccctgtacgccagtggacgaacgactggtatcgtgctcgactctggcgacggcgtgagccacactgtccccatctacgaagggtacacgcttcctcatgctattattcgattggaccttgccggtcgtgacctcaccgacaacctgatgaagatcctcaccgagaggggttactccttcaccacgacagccgagcgagagattgtcagggacatcaaggaaaaacttgcctacgttgcacttgattacgagcaggagctggagacggccaggaccagctccaccgtcgagaagagctacgagctgcccgatggccaggtcatcacaatcggcgcagaaaggtttaggtgccctgaggtgctattccagccatccttcattggcatggaatctcctggcatccatgaagccacgtacaactccatcatgaagtgcgacgtcgatatcagaaaggacctgtacggtaatgttgtcctcagtggtggctccactatgttccctggtattggtgaccgcatgagcaaggagattactgcacttgctcccagcagcatgaaggtgaaggtggttgctccgccggagaggaagtacagtgtttggattggtggttccattctggcctccctcagtacctttcagcagatgtggatctccaaggaagagtatgacgaatctggtccgggcatcgttcacatgaaatgcttctgaatttctggagcagtatatctgttgcttgcattttcggttagttgggatgcaagtttgtccggtggtctctctagcattcttcgttctttctggatattgaagagttgttggctatggaacattgtgcaaggtggtaaagtcgattgatgtactgcatgaagaaacatgtgcagtacttcagcagtatagatcgtcaggtcagtttagttttttcccccaacaacagtgccatattaggatgttcctgatgtgcgcagttggtctgggtttttacacaacgcaagggtgtcggctgtcgcccgtgcagtttgcgtctttgtgagatctgggtccgtttctgcactccagtacgtggaacaggtttcgcatttggtggccagtgccccagcgtggcgtgcgtgttgatgatttgtacttggagctatttgttctattcctttcatgaaacagatattatcgtttgtacaaggat

SEQ ID NO: 128341 - DNA, 2197 bp, Zea mays
  Clone ID: MRT4577_48518C.1
gcacgaggtccggcagccgccctccgccaaatccgcccgctggagccctccgacagatttttatcatcgggcgcccacgcgtctccattgacccgggcaggggcgaggtcaagagggcgaaccgttggccgggtcgcccccgctatcatgccgtgctgtgacacggcggcaggcggcttcccaacgacgctgcgtgcgcacccgcgggccgcagccgccccaggcgcctgcataccagtccaaccaggcggcctcgtataaagaggttccccacttgggctgccgctctcccatttgtctcgcgcctcgctctcacgctcgcgtcaccggagctctccagaaccgaaccccaactgcccaagggcgagcgatccgaacccctcggcggcttcgtcaacgacgccgagatacattcaaatacattctgaatatagcattctgctgcagaacactttgaggaatggctgaagaggatgtccagccccttgtgtgtgacaatggcactggaatggtcaaggcgggtttcgctggtgacgacgcaccgagagctgtctttcctagcattgtaggcaggccacgccacactggtgtgatggtgggcatgggccaaaaggatgcatatgtgggcgatgaagctcagtccaaaagaggtattctgacactgaagtacccaattgagcacggcattgtcggcaactgggatgacatggagaagatctggcaccacaccttctacaatgagcttcgtgtggcacctgaggagcaccctatactgctgaccgaggctcctctgaaccccaaggcaaacagggagaagatgacccagattatgttcgagacattcaactgcccagcaatgtatgtggccatccaggccgttctttccctgtacgccagtggtcgaacaacgggtattgtgctcgactctggtgatggtgtgagccacaccgtccctatctacgaagggtacacgcttcctcatgctattcttcgattggaccttgctggtcgtgaccttaccgacaacctgatgaagatccttactgagaggggttactccttcactacgactgccgagcgagaaattgtcagggacatcaaggaaaaacttgcctacgttgcccttgattatgaacaggagctggagactgccaggaccagctctagtgttgagaagagctacgagctgcccgatggccaggttatcacaatcggtgcagaaaggtttaggtgccctgaggttctattccagccatccttcattggcatggaatctgctggcatccatgaagccacgtacaactccatcatgaagtgcgacgtcgatatcagaaaggatctgtacggtaatgttgtcctcagtggtggctccactatgttccctggtattggtgaccgcatgagcaaggagattactgcacttgcccccagcagcatgaaggtgaaggtggttgctccgccggagaggaagtacagtgtttggattggtggttccattctggcctccctcagtacctttcagcagatgtggatctccaaggaagagtatgacgaatctggtccgggcatagtccacatgaaatgcttctgaatttctggagcagtatatctgttgcttgcattttcagttagttgggatgcaagtttgtcccgtggtctcgctagcattcttcgttctttctggatattgaagagctgttggccatggagcattgtgcaaggtggtaaagtcgattgatggtactacatgaagaaacatgtgcagtacttcagcagtatagatcgtcaggtcagtttagttttttttttcaacaacagtgccatattaggatgttcctgatgtgcgcagttggtctgggtttttacacaacgcaagggtgtcggctgtcgcccgtgcagtttgcgtctttgtgagatctgggtccgtttctgcactccagtacgtggaacaggtttcgcatttggtggccagtgccccagcgtggcgtgagtgttgatgatttgaacttggaggctttggagctgtttgttctattcctttcatgaaacagatattatcgtttgtacagggataaataataaattgtttatccttcaaatgttttagatactgttggaacaaacttcgtttaattataatctcttggatttaattcgagtaaaaaaaaaaaaaaagggcggccgctcgcgatctaga

SEQ ID NO: 128342 - DNA, 427 bp, Zea mays
  Clone ID: MRT4577_48519C.1
accagtgcctgcgtgttcaccttgcgagacgctgtccgtatacgatcctcgtaccgactaggtattgcgctattaccggtaccgtatcagcctcacctctctctctatgaatacactgaccactgccaccatgggcactatgccatgacgcagtgtaaggcacaaccgcttccttctactatgacacactgcagttcatggaatgaacggaggataagataccgtggccggacaggtccaacattagcgacatgatcttctggacgccgttgggcctgattccttacattgatcccacgaagaccatgcctatgtactgatcaacaatccgttgactacacttcagtcacgtggccttttttttaggatgcaaccatggcgggtagaactgactactgcgcttctgccactgttgttcccaatttga

SEQ ID NO: 128343 - DNA, 682 bp, Zea mays
  unsure (1)..(682): unsure at all n locations
  Clone ID: MRT4577_4851C.1
ggtacccttcggnttcggcccggggtaggcgtgcacagcacctttgttctgcctccccgcgcatcggctgctgccgcgcgcaaatccgccgtgcccccggtcccgcaaatccgccgcgccagctccgcccgctcgattccccacccagcgcccgcattccccgccgccgtcctcgcggatggaaggttgcgcacacggatggaaggttgcgcacaaggaggacgcagacgaacacagctggaaggttgcgccaaatcgtgcatccgccgcaacgcccacggatgaaaggttgcgccaccaaatcgcgtggatggaaggtccacctcctcctcctcctctccccaaatcgtgcatccgccgcgccctcaaatcccgcgggcgttcaactctttctcggtcaccgtcaatggaaggtcccaatctcttctcgccattaccgcgcccgccccgtcaattcccatatctcttctcgccattctctcggagcatccactgccattcatggacggcagacgattccatcctctcggttcatgaaggtgctcttcctgcgcctcggcttctccggcgtcgcagacatgaagatccgccgctccgagtggggcggggccctggtcgcgccgcgcaggtccggttcgctgtcggcgcgcatcagcgccgcgctgtccggtggcctggtgct

SEQ ID NO: 128344 - DNA, 529 bp, Zea mays
  Clone ID: MRT4577_48520C.1
gcggggaaatggaaaggaataatatatagggaaaaaggatgtttggaaaaaaaaaaaaaaaaaaaaaaaaaaaaaaaaaaaaaaaaaaaaaaaaaaaaaaaaaaaaaaaaaaaaaaaaaaaaaaaaaaaaaaaaaaaaaaaaaaaaaaaaaaaaaaaccctccccgaacagaccccccgaccaggtccccggattattccacaattccccccatcatttccaccaatggacatcaaacaccctattccccccccctatagccccccccaagcccttgcggggatcgtcttccaacacccctttgcccaattccaacaccattccttgccccttttaaccatccaaaccatcgaaacacaactaaagcaacagtttgtcccccctttgacccacctacccccaaaaaaccccttttcctacttgcaccaacaaccgctttgcatccaccccacatgctctggggaacccccccgtttcccaccaccaactacagttgccccagtttctaccagctcttaaccaactagcc

SEQ ID NO: 128345 - DNA, 394 bp, Zea mays
  Clone ID: MRT4577_48521C.1
acacaaataggctactccacaagatattggtagtcatcggcttcatattcaatactccacccagatgggcgcagcatttgcttgctttacagaatatctgcaccatggaaaaacacaactgacaggctctatgcgggtagagctagttgattcagagaaccatcattgaaaccatggatgcgtattatattaaaggtgcgagccaatttaatagctggaatcaagcttacttgatgtgttcaccacaccggttatactggtacgagcctttcttatatgcctaaccttgctcaggggcttttggctgagcattgtttggcagcatgtgatagtctgcttacataacaccatacgagcgcacacgcatttattcttgctgatgccgctttgagcg

SEQ ID NO: 128346 - DNA, 462 bp, Zea mays
  unsure (1)..(462): unsure at all n locations
  Clone ID: MRT4577_48522C.1
accaaaaaaaaaaaaaaaaaaaaaaattaaattaaaaaaaaaaaaatattataaaatttaaaaattttttaaaatttttattttttttaaaagaaataaaaaagaaatatgggggggctgggtggggggtccntttttaccccccctttctttcaacttaataacttttttatactgttccttaaattaaattaattgtccttctttttacaactttttaactttaaaaaccttgattttacccaatttaatccctttatacacattcccttttttccatttttgtaaatacctaaaaagccttaactaatttcctttccaaacattttccacactttaaatccaattaggaccctccttttcccctcccattaaacccgttcattttagttgttactctctattttcaccctacttttcttcatttttttacccccttttttttattttttttcttttttt

SEQ ID NO: 128347 - DNA, 107 bp, Zea mays
  Clone ID: MRT4577_48523C.1
tggtgccctctaaacaacttggcgtgaccaaagccataggcgcctactaagctacatgctcttgcggtaaccgttgctaacacgacaattatccctcaatgctcaca

SEQ ID NO: 128348 - DNA, 397 bp, Zea mays
  Clone ID: MRT4577_48524C.1
cctggtcttttttttttggtgcatcgaccagatgatcttctaataattctgacatctcatattacaagctcggtcgaacatgctactcgagtccatacagcggcatgtcagcaatgaattaacacacgcaatactatgcaggttctagcggctctttatcatatgcttatatgactgatcatacttcaagcttattaccaaatcttgtaagactccaactaacgaaacacgttctgcattcatactttccaagaccactggcactgagagacttatatttcacatctacatcgtgccatctgcaccatcaaggccaagtaccatgccaatacttgcctgtaaccaaccccaggcgtacaaagcccataccctgacattcgtgatcactcgaccacac

SEQ ID NO: 128349 - DNA, 371 bp, Zea mays
  Clone ID: MRT4577_48525C.1
gtgacaggggggcttttttttaccaacaaagtggtaaatcggccgtacaacagtattacatagttgaagggtcatgccggacccacccctgcccccaaaacaggtttttttttctttttatctacggaaacctatcaaggcgcttaagggtgcaaagcaaacaaatcaatcgcaatctgagcaacccttctgtccaaaggttttatcgatcaaaacccacagagcctctttttttactgttatatggaacttggcctaaaggatgtgcctttgcctttgatttccagcctccacagtgatttcatcctgctgcgttgttgagttgagatagctcaaagtttacattctgcccacgaatggaaatacaagga

SEQ ID NO: 128350 - DNA, 781 bp, Zea mays
  unsure (1)..(781): unsure at all n locations
  Clone ID: MRT4577_48526C.1
attgggacctcgctccgagcggccacgaactctctccccttccacccgccacctcgcctcgccatggcagaccggccaccgccggggccacgcgcagcagccctgctgcccagcccggccaccgggcttggccacgcggcgtcgtcgacggatcgccagcactcgctgctcgggcgcgccgtccagacgctccacgcccacggctccacccagctcctgcgcttcctcgcgctagccgtcacgctgaccgcgctcctcgtcctggccagcgtcacgctcacggccgcgctcgccgcgctggtcctgctcagcccgctcgtgctcctcaccgtcccgctctgggcccccgtagcggtactggcgctgctgacgggggccgcctcgctcgtcgcctgctgcgccggcctggccgcggtcgccgcgggcacgtgggcgcaccggtacttcacggggcgctactccgtcggcgcgcaccgggtgcagtccgccgatcagtacgcccgcgggggcacggtcgcggacgtggccagccgagtgagggggtactacgacgcctacgcgcgagagtacggcgggtacccgccgcgcccgcactctcgggtcaaggacgccgcgcccggggcgtagcttgtgtgtgccggcacggcatggttgatgaattatggggtctcgggactggggttcggatcacacgtctggagcgggctctctctctctctctctctgctccctcgtgctgtacatatgtttncgtcgttctagtagcagncgtgtttcgcta

SEQ ID NO: 128351 - DNA, 803 bp, Zea mays
  unsure (1)..(803): unsure at all n locations
  Clone ID: MRT4577_48527C.1
ccggccggacagctgtggtgtngatatctaccaggcttctcacgcatctttggtcgttgtcagtgtgtcctcatttacttcccgttctcgtacctgttttcgttctcgaggcttggctaccggctgtcgacgcctaccatatttgacccatacctttcgacactctccttaatcacacttgcgttaccgacatgcattctttcacggtgtatgcgcttggcgtggcagttgctggccttgtcgtatacgctgtattggacgctgtcgccaagtacgacaagcgatacaatgttcagaacatgcctggaccacggctggtcccgtggattggtcgtattcacgaccttcccatcgagtttatgtggctgaagttcaaggagtggtcggacatgtatggccccatctaccggaccaagatgttaggcgacaactttgtcataatctcagacgaaaagcttgccgaggaaatgctggtgaagaaagccaaggtgtattcagaccgacctgagatcaagtcgttgttcgatgcgaagagcacatatggttccatggagtatctgccccttatgggcaagaatcagtactgggctcgtcagcgaaagtttacacactcttacctgaccggcgcaaccaatgtgcagtacaatggtatcatggagttcgaggccaagcgatggatggccaggcttttggagaaccccgatgacttctctgcctccctcgagacatgtgctccaaggtcatgtgccaactgacatgggatgatgcctcacttagtacccctcttacccctagcgcggggg

SEQ ID NO: 128352 - DNA, 383 bp, Zea mays
  Clone ID: MRT4577_48528C.1
gggcgacgtggatgagctgctgatgtcgcgtctcgaggatggcgacacctgccagggcgagagtggagtcgcgatgacgctggccgtcgacacgaagcgcgcagcgctgagtgtatgcgctgagatgcttgtctacatgacgctggtgttcaacgagttgaggaatacgctcgagaagcactgtcagtggaggtatcagatccgatgagcatgtgcatgctcggtgctgatgcattctctagcaagcgcgtccggataaagacgctggtgatttgtggtgtggtgacacatgaatgaatgatacgagaggcttgttcccacgtccgtgtacgaggactatggaatagcaaatctggtgctaccaacgaggcattacctatatg

SEQ ID NO: 128353 - DNA, 122 bp, Zea mays
  Clone ID: MRT4577_48529C.1
gcatcgggctagtcaaggctcaacatgttcatgaggtaagagaattcacatgcgttgccagtaagactaatgcaaaccatagtgacgacccgctaaagacaacgtctctattatttgaccaa

SEQ ID NO: 128354 - DNA, 206 bp, Zea mays
  Clone ID: MRT4577_4852C.1
acgcggacgcgtgggggcgctggagccgggcgttagctgctggcgcttacgccactgcagggtggttagctacaacctgggcgaggacatgaagtttaatcaaaccggcttgcaggctgtggccacttggccgttttcgtaacgccggccgccgttgggcctgggcccctgtcagcgtaggggcgtacgagtccgcgtcggggggg

SEQ ID NO: 128355 - DNA, 1164 bp, Zea mays
  Clone ID: MRT4577_48530C.1
cgccccgcacactctatgacgacggcggctcttagcccccttacggaagcaagaggacgtcagcaaggactcgacagctccgacagctgtccttccctcaggctccagcgctcctccgacggccacgacaccacacgaaccgggtgccaaaacctccccggctgccacgatggcatgtacttagggcgctagctctcctccgctagacacgttagcactctgctacaccccccattgtacacctggatcctctccttacgcctataaaaggaagcaccagggccctcttacagagggttggccgcgcggggaagaggacgggacaggcgctcgcgtgaggccgctcgctcccctcccgcgtggacgcttgtaaccccctactgcaagcgcacccgacctgggcgcgggacaaacacgaaggccgcgggatttccgcctctctctcgctccggccgcctttttccccccttcgcgctccgtctcgcgccgacccatctgggctggggcacgcggcgacatttcactcgtcgacccagggacccccggtctcgaaacgccgacactatgttaactcgcaaacatatgcatggcataagccaataaaaggcaagaatggatgtttccattatgtttattggatttagtcgtggtcaacaattgttccaacaacgtaagtagtcattatgtttgaagtggagtttttagcaagcagtattcaattccggaagccattaacgtgagattaacacttctgacctgctacttaaatcttcttatttttcattttgccaggatgttataactaatgttgtggatgcctttcatgcacctacttcggacgtggcaagtatgcgctattgtacgctatcagcaagaacatggatggaatcaaaacagaaattttgttaacttatgatgctggagtcgaaaggcaaaaccatggccgagttgattgtgttctctgagatcagatgtggcatagatagttttttttatatatatgtatccacatcaaggtactaactttatgtaatttctacttttggattgtggcattgtgccgcttgtttgcagaataacatgcaatgcgctctgtacatcaatgtgtgtcaagagtggacccgtagatttgtcattagtggaagctataaaattgttactagc

SEQ ID NO: 128356 - DNA, 305 bp, Zea mays
  Clone ID: MRT4577_48531C.1
aggggcctacaaaggaaacctttgggtaaattggccccaaaaacacttggggttacccattggcaaacgatccattttgggggggaattaatggggggggaaagaccccttgaaaaaaataaaaaaaagccgggtttgttcttatagggccaaaaaaaaagttgtacacattctgggggggggttccagcttcaattggagcctgcaattggtggacacttgtttaccaaccaaattttacttggtggatgccggccttgccgcctaaatggattgcccaacaacagtcacctaaaggggggttg

SEQ ID NO: 128357 - DNA, 968 bp, Zea mays
  Clone ID: MRT4577_48532C.1
cgccgctacgagccgccggccgggacctttatcccaccagctctagcttccttcctccatctctacccatgccttcgtcttcgtcgtcttgcagccccgcaacagtcgttagcttagagcatcgcacctcatcgttccaccgtccgtccgtccgctcgttcgcgtgatctgtttgagagttggggaatggaggcctacgtcctgttcgcgcccgccaaggaggtgatcaggttcgaggagcaggaggaggacatcggctgcccgtccgagtcgtccgcggcgcgttcaacgtcgtcgtcctcctcctcgtcagacggggtggacctcgccgacgacgccagctcgtccgggtccagctgtcacttcgagatggcctccctcatgacgcagctcccgatcaagaggggcctgtccaagttcttcgacggcaagtcgcagtcgttcgcgtcgctggcggcggtcggcggcctcgaggacctgcccaagccgccggcgaagcggctcaagacgtcgcggagctgcggcgtcggcctcgaggacgcgcaccgccgtggccctccctccgcgaccggcaggaagcaggcgtccagggctcggctgacgccgccggcgctcgcctcggcgccgagaaggctggtgcgagcatcgatgacctgcccaggccgccggcgaggcggctcaagacgtcgtggagctgcggcggcggcccggaggccgcgcgccagcggccggattcgcctgcctaccagtaaaatcactatcacataattcggctgttacttgttagttggcgcggaacttgaaaagtgaaatggccagagatttgacccgagtttccgcgtgtaaatattttcgcaagagagctaacatgttacaaaggtgtccttttttcaaaagccaacagcctaccagcaaagcctcctccccctgattcggctcctacttgcttctttgcgcgctgcccttcc

SEQ ID NO: 128358 - DNA, 702 bp, Zea mays
  Clone ID: MRT4577_48533C.1
cagcgtccggtcgtcttgcagccccgcaacagtcgttagcttagagcatcgcacctcatcgttccaccgtccgtccgtccgctcgttcgcgtgatctgtttgagagttggggaatggaggcctacgtcctgttcgcgcccgccaaggaggtgatcaggttcgaggagcaggaggaggacatcggctgcccgtccgagtcgtccgcggcgcgttcaacgtcgtcgtcctcctcctcgtcagacggggtggacctcgccgacgacgccagctcgtccgggtccagctgtcacttcgagatggcctccctcatgacgcagctcccgatcaagtacgtacgccgtacgcacgtactcgccgatggggcgggcattgctgcggcgctccttcctgattacagagatctgatcctggcgggtgtgctgtggtctgacgccgcgctgcttttatttgggtgtgcaggaggggcctatccaagttcttcgacggcaagtcgcagtcgttcgcgtcgctggcggcggtgggcggcctcgaggacctgcccaagccgccggcgaagcggctcaagacgtcgcggagctgcggcgtcggcctcgaggacgcgcaccgccgtggccctccctccgcgaccggcaggaagcaggcgtccagggctcggctgacgccgccggcgctcgcctcggcgccgagaaggctggtgcgtgc

SEQ ID NO: 128359 - DNA, 319 bp, Zea mays
  Clone ID: MRT4577_48534C.1
ggctatctatctggagtgccggaaccgttgcagggtatgtaacaccggctttgggaccttcaacgtatattaacatgacttatttgcaacctcattaaagtacattgggaatataccgtgagtataactgacatagttgattcaaggcatgacctctacgcgactatcagctactcataacgaattcatgaggtacaaatcaagtggtcttgtataatacaaagagactggatttgctggtatgatgttaacaaaagacattacagaaatataatatctggagggtacatttcttactagaaaggaacaagtttcatat

SEQ ID NO: 128360 - DNA, 558 bp, Zea mays
  Clone ID: MRT4577_48535C.1
taagctaaaataagctacccaatactagctaatttcagcttatttatggtcttaaagtgatattttacactcacaccctaattacaacttttgacaaaaaaaaaagttgagtcactcatgattcatgaagttggccaccaactgcgcactggatgggggtaaaaacgccagcacagctatacttatctcgattcttgacagaaagcgatggttcaacttccaatcctggcaagttgccagagtgtgcagttttcagctacctcgttcttgaatcataagctgggacacaaatgatgtgcttgccaacttgtgactgcttggatctggggagttctgaatacagcaacatcaagtttgtcataaaatccaaaggatttcttaagacagatcaaagtgaagcttcgagaactcctttgaacaataattcaatgaaatatggataatccaattgaactgagcaaactattctggtggtttgttcgattaagcaaacactctagtcaaaatttccatggcgtaaatgccaaggcaattatagtcaagtttcatatttttctt

SEQ ID NO: 128361 - DNA, 2347 bp, Zea mays
  Clone ID: MRT4577_48536C.1
cattgggtacctcgaggccggccgggactagtactatacgcgctccgtccaatccttggcctcgtcatccgcaagtcccactactacagtgcccgccgccgctgcgtccaccaccacctcctttcccaactcctccgcgtacccccgccctctccggcggcccgcgtaaccacccgcgcagatggcgacggcggccacggcgtccgcgacggcggcgacccgcttcacgctcctagcgggcgccggcctccgcagccgcatcacccgcctccccaccgccgtgcggttccagcgccagcgggggctcaccaccaccgcgctcctgaagaccgccgacctccagcccaaggagcagggcaagcccgagacgctcgactaccgcgtgttcctcgtcgacggcgggggccggaaggtgtcgccgtggcacgacgtcccgctgcgcgccggggacggggtgttccacttcgtcgtcgagatacccaaggagagcagcgccaagatggaggtcgccaccgacgaggccttcacgcccatcaagcaggacaccaagaagggcaaccttcgatactacccgtacaacattaactggaactatgggttacttcctcaaacatgggaggacccaacttctgcaaattctgaggttgaaggagcatttggggataatgatcctgttgatgttgttgagataggtgaaagacgtgccaatgtcggggacgttcttaaggttaagccattggcagctttagcaatgattgatgagggagagcttgactggaaaattgtggccatttctttggatgacccgaaagcatctcttgtgaacgacgtggatgatgttgagaagcattttccggggacactgactgccatcagagactggttcagagactacaagatacctgatggaaagcctgctaacaaatttggtctgggcaacaagcccgcaagcaaggaatacgccctgaaggtcattcaagagaccaacgaatcatgggaaaaattggtaaagaggaatattcccgctggagagctctcgttggcctgattttggcccatgggaagccaccacattcttttgaactgctttcgtgagcatgtcgttttgtatgctgtgaccatgcttcttcgtttgcattccaaacctttttacgaactgtttaataaaaatgatcttggccgcacgcggcacgaggcaaacacttgcgccgccactgcctcacaggtaaggccgccatggtctccggttcgggcgtgtgcgcgaagcgcatcgtggtggacgcgcgccaccacatgctgggccgtctctcctcgatcatagccaaggagctgctcaatgggcagaaggtggtcgtcgtccgctgcgaggagatctgcatgtcgggcggcctcgtccgtcagaagatgaagtacctccgcttcctccgcaagcggatgaacaccaagccgtcccacgggcccatccacttccgcgcccccgccaagatcctgtggcgcaccatccgcgggatgattccgcacaagaccaagaggggggaggcggctctggcgaggctcaagacgtacgagggcgtcccgccgccgtacgacaagaccaagcgcatggtcatccctgacgctcttaaggttctgaggctacagcctggacacaagtactgcctcctcggcgagctctctaaggaggtcgggtggaactaccatgacaccatcagggaacttgaggagaagaggaaggagaaggccaaggttgcctacgagaggaagaagcaattggccaagctgcgtgtcaaggccgagaaggcagccgaggagaagttggggtctcagttggagattcttgcccctatcaagtactgaggagctgtgctttgtcatcagttttggggaacatctagtctttgttttaagtgttcggtaacagtttgtgacagtataatctggtaaaccgtgttatttttctgccactcctatttgaacacattttctagctggtcaatgaactgtttggtcgatcttgttcagatgtctggttcgcattcgcattctgagagatttcatgtctcgtgctgactcaagctgtcacgcccatgtgcttcttgcacacgattatcaattcagtagttgtgattaaccaaatttttatgtgtactggcagaacccagttgcaattgcaatgaagctcgatgttgctctatcagatcagatcccagttgcacagtcaataagactttatcacttgtagttctatttattttagaagaatttaaattgcagtcaataagactgtcacttgtagttctattcattttagaagaatttgaatttactaataaagtaattttccatc

SEQ ID NO: 128362 - DNA, 306 bp, Zea mays
  unsure (1)..(306): unsure at all n locations
  Clone ID: MRT4577_48537C.1
gtggcaaccgtccagccgccaacgccctacgtagatcagcttgactctgcaaactaccagcgccgaacctattgctagccaacacttcatgggagaccactgagggtnnactattggccaccgccacccatggctttgctgaggaggtcaacactgccctaccgaacctgatgtcatcgtacctacgctacatgatcatgcgatatgaggggcatgaacccaactggacctcgagatgtatggatttcacccatgctcaagatgatagatgctctctgaacggcacccactagacaacactagctt

SEQ ID NO: 128363 - DNA, 603 bp, Zea mays
  Clone ID: MRT4577_48538C.1
attaggtgaccgtgccgatgtacgtcgaacccgcgtccgtctgcgggttgtagggagcgcgcacttccgtgatgtcggtctgttcgtaaccgtactccaggaatccgctgaggtagcggctgagcttcgcgcttgacgccgacggtaaatttccgcacgttcgcatcgaagctcttgaactgccggcggagcacgtccaggttgctccagaaagtgaccggccattcggcgaggtagggttccttgaagccgaccgagaatttgtactcgaggcgcttgaagtccgtgtcgccgcggccgtagtaatcctggagccggcggttaattacggcgctcgcgttcacgctgcggttccagccgcggaggttctggtagccgaactcgaaaccgagccgcgcgccgagatcgttccggataccgggcaccacgtcgaaggttccgggatcgctttcgtgcacgtacacgaccacgtccttgacgttgtccgagcccggatggtccaccgtgttcacgtgcacttcgccgaagaggttgagcttggagaggttatcctcggcttcggcgaggtggggtttcgtgagcacgtcgcccgtgatgaacggg

SEQ ID NO: 128364 - DNA, 256 bp, Zea mays
  Clone ID: MRT4577_48539C.1
gttattgggctcattaaaatagtgtactgatggcaagaaaaaggcatacactcatctggattccatgacctaaaacaccaagtgaaggctgactcctgggtaactgctttcgacgtgaatagcgtataattgggcgccatacagtcatagttcaactcttatgtgcacacatttatcttcgtaccgacaacaatacatcatacttttgtggacgacatacacatcgactgtgtatcttctgtacatgaatggtctc

SEQ ID NO: 128365 - DNA, 289 bp, Zea mays
  Clone ID: MRT4577_4853C.1
agatggccgggtcccggaatcttgaaaggggtgtaaacagacaactgagcaaccagggatgtaaattggggggattaaacagatcactgggcaacgagtaatggaaattggagggactccctccgtttctttttagttggcgctgggaaaagatgctcaaaaacacctgaaaaccctgggccatgtctgaaaacaaacagaacttgtttttcgcagggaacgtcttcagtaagccatatccaggtgtttgaacataaaaaccctcgtcctgtaattcccggattagagg

SEQ ID NO: 128366 - DNA, 475 bp, Zea mays
  Clone ID: MRT4577_48540C.1
gtcacgtttaatcatgacgacaagttaccatcacagttttcggatttggtttgagcgcactgaagatgacgctgtaattgtatgatagagactgccgcctacaacgcacggtggaccgtcgcgtgcctagcagcaacgacattgaactcgtcccagagactccacagataaaggtcagctggattaggaaatatggttatccctccatcagctcgggctcctgctatcaccaagatcctcacagccgcatattttgaagatgcatttcataaacagtattgaagagcactgaggtcattcacacaccaacagccatggtcgcatgccctgcgatctttcaggagaaactcctgaggccatgcatggaggtcgacacgggatgttgctgccgctgtacagatatgggaagttgctggcatagcgctagctgttcaactggatccctgccgtatatgtctccatgtcgatagaccag

SEQ ID NO: 128367 - DNA, 310 bp, Zea mays
  Clone ID: MRT4577_48541C.1
gacaggttggggccaacctaccggtcatatttcctattattattacttgcagatttgatgagaacgacagcacacgccagacatcacgcgtacaggacggacattcacgaactcaaatccaacgcaactagaccaaccggcccgtcgacacggtataaagcacgcggtgacgcgaagctgagcgtctgaaacgattggcccggctggggacggtcctgggtaacaccgcgcagtcgcccccgagggaccaggcatggatcattccggagacctcccgatctgcaccgtgaccctggcgatacccttgccc

SEQ ID NO: 128368 - DNA, 291 bp, Zea mays
  Clone ID: MRT4577_48542C.1
tcgtttatttttggttggaagcttgctctagtaggttccgccctataaacatgaaactggatggctgttgcaaaatgccaaaaagcgcttgaatttctctcttacatctacaacgtggattatacaggttttatgtgaaaacgttacgtgcagttggatgctgcctgcttcaactatgttaagttggactaacagggcaccggtacagagttgcattttgagcagccctttaacaacttctgtcagctaaagatcactgaacgaatttattaactaggtttgacacttact

SEQ ID NO: 128369 - DNA, 113 bp, Zea mays
  Clone ID: MRT4577_48543C.1
gcgcagggccccgccatcccactctgtctaagcacactgaatgggaggccgcgtgcaatcggccacttgaatctgccaccgtccccgacatctcgtgagtaggagctaaagga

SEQ ID NO: 128370 - DNA, 655 bp, Zea mays
  Clone ID: MRT4577_48544C.1
gatcttgctgcatagacgcgccgccgaggcgaggcccagagcaaaccctagagaaaccccgaggcaagcacaacaccagatggcgtccgccggcggcgacaccaaggggaggaagcgcaagttcctgccccacggcaagccggtgcggaagggcgcgtacccgctgcgccccggcgtgcagggcttcttcatcacctgcgacggcggccgcgagcaccaggccacccgcgaggcgatctccctcctggacaccttctacgaggacctggttgacgggaaagtatttgatgagaagcccaagagcatccctgacaagccgctgaacaaaaagataaagtttgacgactctgattcctctgatgacgaggatgaaggtcatccagtggaggaggctaacaatggaaatgatgcagaaaaaggtgaagccaagtcatctgagcagcaacaagaggtacctggtgccttggaaattgccagcaaggaggatgaagaacaagtggaaactgctggtggatcagcgccaaagaagcaacgtatagaagatcctctggtttctgaacagacagaaccaaaagcgcccactgatgaaacaacagagactactgatgatactccaaaagagtccactgataaaccagcagagactactgatgat

SEQ ID NO: 128371 - DNA, 218 bp, Zea mays
  Clone ID: MRT4577_48545C.1
aggtgaaaaagctaaacaagcaggcacaaaagatgaccccaccaacacagcgcccagagcatctgagggagggctagacaggaagaccccgcagaagacataaacaaagcacaggaagaactatcataagggaagataatacaaatacaaggccaacgaagtagtcagggcacgaggtaaaagacagaggcgaggggaccaaacacagggggagaagg

SEQ ID NO: 128372 - DNA, 416 bp, Zea mays
  unsure (1)..(416): unsure at all n locations
  Clone ID: MRT4577_48546C.1
cgggnncgacccacgcgnccttctctaggggacattattagataaccggggtaggggggggtttttttttgcccgtgacaaactttatcagccactgtagtagggtctacagaccttatccttcgtttagattcagatttcagagggacggtttatatttgcaattaggaggactatgtagcttttacattggttgggccgcnagggggttccctcncttctgnannggaannnaaaaactgaggaggccactatcactttcaaacccccacaaaaaaaaaaaaaaaaaaaaaaaaaaaaaaaaaaaaaaaaaaaaaaaaaaaaaaaaaaaaaaaaaaaaaaaaaaaaaaaaaaaaaaaaaaaaaaaaaaaaaaaggggggggccgcccaaggggacccaagcaaacgaccgcggg

SEQ ID NO: 128373 - DNA, 390 bp, Zea mays
  Clone ID: MRT4577_48547C.1
ttgagctcactagatggcggccgcccttctcttttttttttttttgggtttttttttatttctctctgggttttttttcccctctcttcttttttccaggcaaagagaactcacagggaacccccacgaaacaattttcttagagaattggaaccggggcccaacccaacaaaaggggctcccccaaatataagggcattgctcccccactggatatcccccatcactggaggcacttccaccaggaccgcaccctggggggggacccaacaggcccaaaaaatggatcaatggtcctcgaggggggcccatacccggggaaagatccccccccaatggttcccaccggaaggggcccccacatgggggaaaaaaaacctggtggggggg

SEQ ID NO: 128374 - DNA, 522 bp, Zea mays
  Clone ID: MRT4577_48548C.1
agacacgcaaacttgcacgtcaaaccttgattggcattttcatcgcagcaaatgtttgcagaatcacatctcatatatactacacagtcaaaatttcaataagaggttctacaaccttcatttctcttttggcagctgtgtactagtaatagtggtctaaacacagcacatcttgactcgtttacaactccatgaccatgactaccgcgtgtgctccccatcccccattgctagcctccaaacactgccctggatggaaggaagactaccaacacttggaagtcttccttcttgtgcatcggtttgttggtcagatcttcagttgcacacgccctgtcagtttactgaaactttggtgccttgacaaggtacacacccctcactaaacctttaccaacatctccaacctccttaaggatagatgtcggctcgggagcagcctcatcagcctcctctctgccacgcttctttgggttctcccatgtaagacccacagcgtctcctccaactgaaccataccac

SEQ ID NO: 128375 - DNA, 171 bp, Zea mays
  Clone ID: MRT4577_48549C.1
tcgcccacacgttcgcggacgccttggactggtcctaaacttttaaaagatttgctttggaaagagattagagtgaccaaaaggttttggggggttgtgctcagacctgttggaacacagagtgtgttcaaggaagagcatactcttgtgcacagaaaaaggaagggtgtg

SEQ ID NO: 128376 - DNA, 754 bp, Zea mays
  Clone ID: MRT4577_4854C.1
ccggccgggccttcctcttatgctgtgagcgtcgtggggtcgtggggaggaagacgatttcgagggagagaggcaaaggggagctcgcccgctccaggcacccattcctctcgaacccgacatctctcttgttgtttcgagaaacggagcgcgtgcggcgttcgtcggcaacgttggcgtccatggagagcaccgcgggtccgaggaagaggcagaaggccgcctcggcctctggatccgtggccccgtacttgccccaggagctcgtacggaacatcctcctccgcctgccttccaggtccgtcctccgcttccgcgccgtttgcaaggactggctccggatcgtctccgaccgcgagttcgcggccgaccacaaccgccaccagccggcgatgcccctcgtctccttcctccgcagcgccgccggtagcaagagggggcagacggactgctgcgtcgacgcatttgacctcagcgccgacagtttccggtccgtcgtccggttcgccgacaaggggacgcggtgcagcagcttcgacatccacggctcctgcgacggtctcctccttctcagcttcgatgcccgcttctacgtttgcaacccggcaacgcaccagtggacgcgcctcccggcgcccctccgcgcctcgtggctcgccgtcttctaccgccacgagcctaccggagagtaccgggccttgttctaccggcggcagtggcccggcacggactactacatcatggtggcggattc

SEQ ID NO: 128377 - DNA, 355 bp, Zea mays
  Clone ID: MRT4577_48550C.1
aataaaaaataacataaaaataatcaataaaataaaacaaaaaatacaaaataaattaaaaagggtacagagaatctaataaagaagataaaaatagaaaaacaaaatacaaaaagacaaaaaaaactaaaatataaaaatatggggcgcccattttaagttcctccatgtttacgtgcttggacttactcagtatatcatcttttatggtgaacctaattttaattctaatgccctctctttaaaaacttgatacctggtaaaccccttggttcaccccattttttcccctatcagtaaataccttttttataagctgacgttttctctaaaaggccctctcttttggcccttc

SEQ ID NO: 128378 - DNA, 329 bp, Zea mays
  unsure (1)..(329): unsure at all n locations
  Clone ID: MRT4577_48551C.1
gctccgccttgcgccgctgcgccgtcaccgtccggagctgctcctccagctccacaacccgcttggcaaggtggtcggcccgctccttggcggcgcgggagacggagcgctcggagaggaggcgcgcgcggaggaagtcgatggtcatggccgtcgtcgcgtccgccgccatccccatttgccgaacccgcgtggtgtagtctagcggactccgaagccgcgcacccgcgccgcgcgtccagtcctcagtcctcagtcctcaccgcggcatcccactctgctttagtgctttcttctcatctcaggactcaggtctcgggagactcgtn

SEQ ID NO: 128379 - DNA, 897 bp, Zea mays
  Clone ID: MRT4577_48552C.1
cgagattcggggccacgctgaggccacggtgcctcctgtttataacttgagccccttgggattgcttgacacagaccaaagaatgcatgcatatatcctggacttttattacacatgtcatccaccacactcggatagagctgagggcccccaatttgaccaagcattccctgagaccggtgtgagctcgagtccaccagcaagggaaacatctgaaattgaagaagtcggagactgggacaacgagttgtatgaaagggttcaaagtcatctgggggcatcaacatcaagtgctttgttctggaacactccagggaaggactatggtacagaagaaaacactaacagcaattggtgggcacatgcccctgcatatccttctggtccccagggtagcttcatcgagcctccagattttggaaatcgatacatgacaaatcctcattccagtaatcacagtggcggtacatcggagggaagcacgtcggatctagagcagagcaatagcagaagcagaagttcctggaggagccctcaagcgttgtccaagacaagatatatggacgactctgatattgaggaagggctaagcctgcactttgctgatgtccatcagaaggatgaagacgatagacacccggtcagggatcatcaagatcccgcaccatctggtcttccagtaagaataatacctagaagcagtgaccctgtgtaagctggttaaactccacaggattatcacataaaaaaaaactccacaggattagttgatgcatgttaacggttgtattttgttgtttgaaccacatcaaaatcaaatgctgcgtctcgcccgtgaactggcaaaacagccacagattcttttgtacaggccagtaatgatagaaacttctttta

SEQ ID NO: 128380 - DNA, 376 bp, Zea mays
  Clone ID: MRT4577_48553C.1
cagaccgtccgaatccggggcgaccaccgtcgcatacttatctactcatttttaaaacccatcaaccagagggggtgatataagcctcgggtactgactctctctgcgagcgccacctacacgcatacaaactgtggctgcggctgccaaccaccgccgccggttcatctaccgccgcacaagcatctgccacctacggttcacctgccacctacggtgcatttcccaccgccagtccacctgccgccgccggtccacctgccaccgccggttcatgtgccgccgacggatcatcttgcccctccaccatgccaataccctaattaaacagccccgcctcaggctcattcgcagccacacccatgcccgtgccaac

SEQ ID NO: 128381 - DNA, 196 bp, Zea mays
  Clone ID: MRT4577_48554C.1
tttcttttttttttttttttttcagcacacaccaaaatcaaaacttttctgaatggggagcacaacccacccaaatgatgaaggaacaccaaagatacccccgagggcctgcacacgcgtgagtaaaaggaaactggcccccaaaacaatatttctctacccgccacgggaaatgaaaaaacaaaaaaggcctagc

SEQ ID NO: 128382 - DNA, 933 bp, Zea mays
  Clone ID: MRT4577_48556C.1
ttttgtcacgactttgttaatgagccagctcaagtcgagctcgagccagctcgttagctcgaacgagcaaaccatttgtctgcaaaacaaagcctgcacttgtgttggatgaactaataaatgataaactgtgttaatttggtgttgaattgacgtggtatgtgaaattatgagtattattactcttttctagtgtaagattggtctagaattaactagtaattgattatatatatatatgtatattatttttttgttctggctcgcgagctaaacgagccagctcgagctcgcaaacgagtcaagccgagctgattctctagctcggttccttaacgagtcgagccaaaccagttcgttaccttaacgagccagctcgagctcgactcagccgagccgagctaactcaatatctagccctagttacaacctatgccatccttctgcctcgaacaatactagagtcatatggtgtgatttctatgccatggctggtgtcatacccatgtgtatgttgtagccgtgaaaagtcattcaggctcagtggttcactatgagcctgggtttagcaatgatgactctttggcttcagattcacctgttttcccacctacctgctcaggagcctgtagtttccctctcatattgtttgtacaatcatactaccatagttatgtaacagattgggaactttgaattctaaactagcatccaaagtttagcaacgatgccacagattcaaaaattttacacagtgatcagacgaggaaaataatgaggttgccctcttgctcctgtccctccctgcatgtcgaccttataaaggttaattgccctagtcctttgtgtttgctgtagttcctgtatgaaagttatttgcactagacaatggcaccatcctgatttgccaaaaaaaaaaaaaaaaaagcggcc

SEQ ID NO: 128383 - DNA, 1364 bp, Zea mays
  Clone ID: MRT4577_48557C.1
aggagaaaaacaaacatgcccttgagatttaggatcgtggtactggctagtggggtccttctcggatttgaaaataatgttttcctgattttatttaagggtactggccagtagggaacaaaatccaggcctttcaatcccgcgacacacagacgacctgcttgccaacatttttaccgctgaacagaccgacgaaggaagccggcccactctccagcccaacgctcatgtcttccacatacacgatcttcccgtctctgtaatgcctggtgatgtcatcgacgaactgcgggaacaggtgcacgtaatcgctctggatgaaccccttcatctctatcctcttgcttatcaaggagaacaggttgtggatcccggcaggggcagtcaccccgtgctgggaaaccatgccacacaccgcaatgcggccatgtactcgcatgttgagtagtacagcatcaagcatcggcccgcctacgttctcgaagtagatgtctatgccttcagggaagtgccttttcagggcagcagtcaagtcaggctcttccttataattgaaagccgcatcaaatccgaatttttcctttaagagctcaaccttctgatctgtcccagcgcttccaacaacatagcaaccatggagcttcgcaagttgaccaacaatttgcccaactgctcccgatgcagcagaaacaaaaacaaactcccctttctttggtgaacagatctcatagaatccaacataagctgtaaagccaggcatgccaagaaggcccagatgataggagagtggtatgtcgctttgctggatcttcctgagctgttcaggattggtgatcagactgtagtcctcccatccagtcatcccggaaacaacgtcaccggcactgaatcctggatgagtggagtcgaccaccctccccacgccaaacccttcaataggcttcacagatcaaggaattgctcaatcagcgcacgaatcgcccacccgactttgcagcctgcagcttcagcagctaaccaaaagagtccaagcgggcaagctccccaaaaaaatgaaaagggaaacgagggaagctcactgatccaggtttgaagggcgggatgtaggagttgcggaagtcccgcatcctgccgcgcatgtaagggtcgcaggataggtagaggttcttcaccagcaccgcggggccgccgccgccctcggggacgcgcagctccacggcgccgccgtcgacgagctccatgtcttcctccctgggcgcgcggtcgatgtacccgcgcagcaccaccttcctgttcctcgccactgcctgccgctctcgctccatgccgctgtcgccgcccgcccgggagcacgtcggtttcgc

SEQ ID NO: 128384 - DNA, 462 bp, Zea mays
  Clone ID: MRT4577_48558C.1
cctctctcccccccgcgcttccctgcctcagcggatcctcctccctttaccgaccccgaccccttccgcaggaagaaatcacccgacacgggaaatggaatatcggctgacgatgacaatgacaagcgtgtgctcacgatagctgagctgcacatcaagatgaagcaccacttccgaactctccagaagaacgacaccatgaaccacaccgctacgtaccagcgccaagatcgcactaccatctacgaggattccactgacagcctctccaaaaatgacagccgatacgcgatctaccatgtccaccttgccaccgcagaaaatgtccagaagagcaggatcgtcaacatcctatgctccccatcctccgccaaggagaagagcaagatgctttagtgcagctcaaacccgatattctagagcgccctcattgacattcaagtgggaactgcagggtactga

SEQ ID NO: 128385 - DNA, 241 bp, Zea mays
  Clone ID: MRT4577_4855C.1
gaaacggtatttttcatggtacccctaaagaattttcattaggggttgggaggattaaccaaccactttttttaatttggttttacctgccaaattccggttccccaccaaattcccccatggaaggggtgttaaacccccattgttgtaggcaagggggcctttggtcaaaacatttgggattccacccggggttttcccttccctgtgcacccctgggaagaaggggaagaatgcctaa

SEQ ID NO: 128386 - DNA, 437 bp, Zea mays
  Clone ID: MRT4577_48560C.1
gggggggttttttttttttttttttttttttttttttttttttttttttttttttttttttttttttttttttttttttttttttttttttttttttttttttttttttttttttttggggcaaatcctagcccaatccatttcataaggggggggggggggccccttttttttttgggggctaggcctggtccaaaaacagggcggacccttttttcggctcatggtcattggcaggggtttttctagccccccgatggggaaaaaaacgggttttttgttcccttggaacaaactattttacccctaaggggccattggacccggggaaagctttttttttttaatggaaacaataataaaattagccggaccccggggcggacccgggggcggacccctgggcggccccgggggcggacccttgggcggcccct

SEQ ID NO: 128387 - DNA, 256 bp, Zea mays
  Clone ID: MRT4577_48561C.1
tattttttttttttttttttattaccaaggggcgttttttttaaagcaaaaagccatgggccaataagctacacggttcgtcaagcattgttggctaacgcacaagagcactcacaacgacgttccgagccaattcacacaagagctataagcaaagcctgatttaaatgttaaaataaggggacacaaaacccgtcgttaaactcttgcgttgcacggcgcgcctactctacctgtacttactattggagggatc

SEQ ID NO: 128388 - DNA, 438 bp, Zea mays
  Clone ID: MRT4577_48562C.1
ataaaaagggcaggctcgatctcgattattgccaacctccggttccgctcccgggtttacacccccgctctgttcctttttggattcaaagcgacagccccccaaaaataaacaaacgcgagctcctttgttaaatacaacggccagaaaaccactagtagtagtagtagtctacctagcgctgctacacaggacgggcgggatcttaattaacacaatgcttcccattgatcaaatctgatttgggccctttccgggtttttaccgccgggtgacaacccccacccccttcgggggggggcgcattaaacccttcaccaagtgggggatgcacaccttgcccacgggcccgggcccccattcggggcgggagccccccgccggacatgttcttgcgcacctcggggcggatcattttctggattgggggaaccaact

SEQ ID NO: 128389 - DNA, 208 bp, Zea mays
  Clone ID: MRT4577_48563C.1
agcattcttctgttgttgttttttgagaaatgggtcgttttttctttacgggacatgcgtaatcactgaaaaggtgactgcccacctgtgcccaccaaactgaataaactcaactagataacagctgcgatgatggccacaagccgaatccggcatgaaccccctaagggattttattgggggggactttggggggggcggctttttt

SEQ ID NO: 128390 - DNA, 398 bp, Zea mays
  unsure (1)..(398): unsure at all n locations
  Clone ID: MRT4577_48564C.1
actaccgcatggcgtcagctgacaccgggcgctctacgtctttacgngcttcacggagatcacgtcctcgtttctgctcgaggccatagtctccagaaataacccgcgcgatgagggaggagcacgatcgccgtcgctcctacgccggcagcaagggcagcgatggcgactttgtccccgcctcctaagtcggggatcccgccgcgggacgacctggacgctaagtggctagcgagcctcgacctctccatccgtcgagttgactactcctccctcgacgaggtcttaaaggatctcctcctcttccgtatgcctactactcgctgggcatcagtaactcttgtttgtgtggagtggataggggctggatactatgtatgatgatattcgttgagaga

SEQ ID NO: 128391 - DNA, 176 bp, Zea mays
  Clone ID: MRT4577_48565C.1
ggattttacttttcttctcaagggcgcttatgggcgggtacatgttctgcgacccggacatactgcaccgcaacatcaagttcacctacattctactggacgacaacttataggctcacctggccaacttcggctaggccaggctcatttgcgcgttcaagacccacgttaccacc

SEQ ID NO: 128392 - DNA, 339 bp, Zea mays
  Clone ID: MRT4577_48566C.1
ttttataaaaaggcaacgacaatatattattggcccgatccgaaatcactactcactctttatacttcaccagccaggcagccatattgatcgatcttctgcgacatacaaatgttgatcggttggcggtggagtgtttcataaacacaaagcgctttagacaaattaaaaaaaataacaacctgtcatatcctcttcggcccattattatcgcgtgttgtgttccacacatcaagcacctaggacgtctaggctctaggggctagagttttgcgtaaagcaagcactccaggtgctttatattcgctgctttcatgcatatgagcacgcggacgccgg

SEQ ID NO: 128393 - DNA, 224 bp, Zea mays
  Clone ID: MRT4577_48567C.1
aggagaaactgcctatcaagcctgggccgcaggggtactacattgacagcactgaagctccgccttcattgtccatggacgacgcggggcatgtcgtcaccgtggacaggatatggtcgctttcctcatccggcgaccctctcctcgcatcctgcccgcagatcaaggacctctgcctctcttttgctctattcaagctccagctccggcggttcattgggtgc

SEQ ID NO: 128394 - DNA, 479 bp, Zea mays
  unsure (1)..(479): unsure at all n locations
  Clone ID: MRT4577_48568C.1
gccgggnttaggcctgttcggtgagcttgttcccggtccggatcatggccagatgcccgtggatcgctcctatatggattgaaacccggtcacaagaaaatatgtgttcgattaattcacgtgtgggctgcatcccggacgaaccctgcctttcctcgtcaccctcgccaggtaaccacgcccgacctctactggatgaaaacattctcgtcgagcgcacgtgaaggagccacggggcgacgcgcgcgaagggcaagcggcggctgtggcgactgtggccgcgacggtgtcaaggacacgagatgcttcactccggcgtcaatctcctctgacggacactttctcgttggcaatctttatcctccctgtctcttatatcgcgttagggttcttgatttggttcttgctcttctttgatctgaagtatttgggatattcgggatggtggtggattccatatgttatctggagtatttggc

SEQ ID NO: 128395 - DNA, 790 bp, Zea mays
  unsure (1)..(790): unsure at all n locations
  Clone ID: MRT4577_48569C.1
ctcttcctcttctctctcggcgacgactgggtggccgtagctgcctcctacgcctggtgccctggtcttcttcgggccattcgccggccgcgagcaccaccaaaagggagagcttcccaggtagagaaacagtttctccgtactctagcagatggcaaggataaagcctaagcaattgctaatccaaagcaaaacaaagaaggctccatctcgaatcagctactctactatcatcacatggaacttgattgtcatattggttgtgctatctctctatgctacctacagccattggcatcaaagttgttgaataagtagtgcaatatatatttctgctcagcattcctctattgatgagttcaacctcaggtctacccaagacttcgaaatggagcttcatgaagctgagcttgctgtgagaccggaggatccaaaaatgataagtagaccaagatatgcggtaatgaacaccgcaaaaggcccaattactatagaaatatacaaagatgcttctgctgacgttgtggatagatttatcaacttgtgcaagagtaatcatttcaaaggaatgccatttcggcatatcataaaaaattttgtaattcaaggaggtgattttgatttcgatggagcttcccaagaatggataaccaaagctaaagctagtggaaaaaatgatctcagtccaaaacatgaggcatttatgattgngactgcnaagaatcctaatacaaaggatttgatttgnttatcacgacggctccaattcctgacttgaatgacaagcttg

SEQ ID NO: 128396 - DNA, 180 bp, Zea mays
  Clone ID: MRT4577_4856C.1
tctctgggaagattcatcacctcctctccccatagatctatgtaccaaggactgccatataataataggtttctgtgagtgagcccaagcagtccagatgacatctcctaagaactatgtatgctgcttaacctctgatgttgtacagccttgtcatttgttttgtctccccttaccggt

SEQ ID NO: 128397 - DNA, 1456 bp, Zea mays
  Clone ID: MRT4577_48570C.1
gcagttaatcatctttgtagtagagagaagcattatgccactacttaacttctgcatggccgggatcccttgctaccctcgaggctggccgggaaccaggccggtccacctgcaaccgtgacggttcttgttcttcttcccacccagcctgcgctccctcttcctcttccccttctctctcggcgacgactgggtggccgtagctgcctccatacgcctggtgccctggtcttcttcgggccattcgccggccgcgagcaccaccaagtacgcccacctcatgaagggagagcttcccaggtagagaaacagtttctccgtactctagcagatggcaaggataaagcctaagcaattgctaatccaaagcaaaacaaagaaggctccatctcgaatcagctactctactatcatcacatggaacttgattgtcatattggttgtgctatctctctatgctacctacagccattggcatcaaaggtctacccaagacttcgaaatggagcttcatgaagctgagcttgctgtgagaccggaggatccaaaaatgataagtagaccaagatatgcggtaatgaacaccgcaaaaggcccaattactatagaaatatacaaagatgcttctgctgacgttgtggatagatttatcaacttgtgcaagagtaatcatttcaaaggaatgccatttcggcatatcataaaaaattttgtaattcaaggaggtgattttgatttcgatggagcttcccaagaatggataaccaaagctaaagctagtggaaaaaatgatctcagtccaaaacatgaggcatttatgattgggactgcaaagaatcctaataacaaaggatttgatttgtttatcacgacggctccaattcctgacttgaatgacaagcttgttgtatttgggcgagttatcaagggagaggacatcgttcaggagattgaagaagtcgacactgatgagcattaccagccaaaggccgccataggcatcatcgatatcgtgctaaaacaggagccttgagcctggatgcacatgatgacgttaaccacatgccgacggacttttctgtagttggaaaatctatctcatcgagttggtttttgttttggtgccttattatgtgttgttgcgtggaaagcagttgtgacgcttgttccaggagtcgttgcagcagcgtttgtgtataaaatatattcacagggtttttggctgtcagcatgcgcgagcatatgctgctacaccttgtatcgtggttgtggtaacagtaagcaggctattctctgctattgctaccagtaatcggtttgggccttacgatttgcgaatgaatccaataaaatcagcgcacgtgcttctggtcaaaaaaaaaaaaaaaaaaaaaaaaaaaaaaaaaaaaaaaaaaaaaaaaaaaaaaaaaaaaaaaaaaaaaaaaaaaaagcggcc

SEQ ID NO: 128398 - DNA, 403 bp, Zea mays
  Clone ID: MRT4577_48571C.1
agcacaaaaaaacccccccttgtttggggaagcattgggggcccaagggaaaaaaaaaaaaaaaggtgccgggtcaccacaaggggttaggggatggaacaacagagcacaggcgttttggaagtggcgatgggggccaaaggggagaaaaattaagggggggggccggagcaactaggggttaaaagggagcaacctggtttttaaaaagaaaaaaatccgcccctggaggggcaaaaaaagggggttttcggggggggacccccggaacaggccaaattccccccgagatatttcccccaccttgaccggtttcgggaaatggaggggggggggccccttgggccccaaacccaagggcgggggatggccccggcaaaagaaacttgacccgaaccggggg

SEQ ID NO: 128399 - DNA, 486 bp, Zea mays
  Clone ID: MRT4577_48572C.1
aacaaaaaaagaacaagcccccagttttttttcacaccattttattctccatacatgaggggcactaaaaacacgggcagtactgaattaaaaactaacaaaagcctgccgtttttttaactttggggttcgttgttaaacccagggctcagggggaggaggggaaaacggagttggctttggctgcccccacaccggagggggggggggggattccggggggggagggggggactccggcgccggtttgttattctcaggccccgggggggactccggccccggtttgttgggctcaagccccggggggtaccccggccccgggaggggggccttggggaaggggtctaacaagggctttttgatcggggagcaaaaaaacccggaccccccctccggggacggggagggcattttgccagggacggggaaaaaggggccccctgacatgggcccaatcttggacggctcctgcccaaggaaagg

SEQ ID NO: 128400 - DNA, 714 bp, Zea mays
  Clone ID: MRT4577_48573C.1
aacaaaaatgttgcgctgtttttagattcagctcaaacccactacatctgattaacgaatactaatttagacttttcgtcaatcacatgttaaatatcgcaatctattccactaatccatttattaaaataaaataacagaagtagagaattagctcaccctaaaattatctgacttgaaactacgaaatcgatggcgctatccggtccgcgcacaacaccaacacctgacaagcgttgcattggcggtttcctttcgtcttctggcgcgaacgacgacacagagaaactgcgtcgcgaggagaagctcattagtattccattgacgaatagatagcgcgcgagtcacaacgggaaggagctcaacgcgtcgaagaaggcgaaggcatggtcggcgacgttgctgtacatgacgcagagatgtacgatggcgacatggatagtgttgggtgtggccaaatccgtgcagagctccaaatcgacggccactaggacgagctaggacaattagaccaggcgacaacgacgagctggagcattggtgagctcggcagatgcgaccaaggaaattggtgagcgcacgtgggtgcgagcagcacggatttgaagcgtggagaaattgcccacggcaaaacgaacagacaaaggagcgctcgtgagctctatggcagaatcggcggcagccgacgccagagtgcatggcgagggagctttg

SEQ ID NO: 128401 - DNA, 598 bp, Zea mays
  Clone ID: MRT4577_48574C.1
ccggccgggtgtacctgattcattggcccatggctgtaaagcctagcaagcctcacttcccaatgaaaagggaggacattgtgccgatggaccttagtggtgtatggcaggcaatggaggaatgccatcgacttggccttgctaaaatgattggtgttagcaatttcacaacaaagaaattgcaggagctgcttgccattgcaaaaattcccccagttgtaaatcaggttgaattgaatcccacttggcagcagaaaaaactaattgagttctgcaatgacaagggtattcatgtgacggcttattctcccctaggaggccaaagaatctctaaactgaatccagtacgacaatctgatatattggaagagattggaaaggctagagggaagtcagtggcccagatttcactgaggtggatatacgagcaaggagcaagcatggtggcaaagagcttgaaaagggagaggcttaaggagaacattgaaatcttcgattgggaattgagtgacgaagatcggtttaagattgatcagatagcacagcgcaagttggtcacagtacagaatctcctgtgtcctgaaggtatctccagtgt

SEQ ID NO: 128402 - DNA, 301 bp, Zea mays
  Clone ID: MRT4577_48575C.1
cggacgcgtgggtttgattatttgttgtctttgtagtccttatttggtgtcgcatttgttaggtgtgtgttacatgaagaccatatgtgagctagcgatggcttcttgaggtgatggctgtgtttgtacatgaaaaccatatgtgagctagcgatggcttcttgaggtgatggcttctatgagatagctctatgaggccagggtcgtcactgggggatgaaggtcctgaaaaatatagttactgctctgtacatgtgccggtacatttcattcaaaaaaggatggcacaaggacatggcct

SEQ ID NO: 128403 - DNA, 552 bp, Zea mays
  Clone ID: MRT4577_48576C.1
tacggtttatgattctagccggcgacgctgttcatataacatccctcgagaaggacgcctgcttctcgccgatcgatacgatggccgtcttgtccgacctccacaccggcgacaggctgaagtccctctaggctaacctcgccggcaaaacctatgtggtctggtgacgtccattactaacgatgacattaagggcttcgacgtggtgccgtggaagcctggcgctgactttgctaatgccgaccgctggtacgagaccgtctatgcggatgaagacctaaagattccctggtaagcgactgatggagtaaatctgcctgcgggatcagctcctgcggaaggtgctcctgctgatgatgctgaggatgatgatgaccttgatctttttggtgatgaaactgaagatgacaagaatgcagttgatgagcgtgctgacgttgccaaggactgttctaataagaaagacagtggtaaatcctccgaccttatggatgtaaaaccatgggacgatgatactgatatgacgaagctggaggaggctgtccgcaatgt

SEQ ID NO: 128404 - DNA, 193 bp, Zea mays
  Clone ID: MRT4577_48577C.1
actgtctcgtgtggccgccgtctcccgagcggaacgtctagccatcgctctggcgaaggggcccccatgcgaggagggaaggcgccgataccagacaacaagaagacggataacgtgacgaaccctgtattcgtgaagaggccgaatctatgctgcatcggcggcgcggaggcgcacacgaatgacctgcacc

SEQ ID NO: 128405 - DNA, 397 bp, Zea mays
  Clone ID: MRT4577_48578C.1
tcgcgatctagaactagtgccatgctcgccatcctcggttacttcatccagggctcgtcaccggcgttggcccgttccagaacctgcttgaccaccttgccgaccccgtcaacaacaacgtgcttaccagccttaagttccacttgaacgttggggcattaacatacctggtggcggcgccgccaggtggttgctgtgggaaggttgatgcctgcctgttgtaaagggacccggagcggtgcatcgggcatgattcatgcctgggccggctggtgtctgttacaacaaactagtattggtcttattgagacccggaactgtgttgcacatggggaatcaatgtacaattcctccctctaaaaaaaaaaaaaaaagggggggcctcgcgatctataac

SEQ ID NO: 128406 - DNA, 333 bp, Zea mays
  Clone ID: MRT4577_48579C.1
tttttggggggtttagacaacatacatgggcagtacgaacccatattgggaaaaaaactgctccatgcatccaggtacagagctccaaaccagtatacagtacatgacgatcttggatattattcacttgggacccccaacctttcgactgggcgactggacctgacaaattcccaacctaggacccaatagagtacgcagacaccttcaagtcttcagttccgcgctatgggcgatatagttggccagatgcaacagaggcgccttccttctctatgtcgaaacaagcaagcttgctctaacggcatcagagagcaactcttccgcgaactc

SEQ ID NO: 128407 - DNA, 362 bp, Zea mays
  Clone ID: MRT4577_4857C.1
aaacagaaacaacgggggaataccaaaggccccccaacctggaggggaggcaaggcccagcggggcgcaaaagggaacgccaaaaccccaagaacagggccaagggcccggccacccaacgaaagggccgggaccccacccatgggaaaaaacacacaggcccgggacattagaaaaaaaccccctagcagcccaaagagggcggaaaagcccctcccccggaaaggggggcccattttttggtggcccgcccaaactttcccggccaccccctaggggcgggggcaacccccctattactcggggacgccgggaagcccaccggggccccaaaaaccccggcacaccccaaacccccaaaa

SEQ ID NO: 128408 - DNA, 746 bp, Zea mays
  Clone ID: MRT4577_48580C.1
tttcccatctcaccactgttcttgtcgcacggccttgcaacgcgaaactgggcaaaagattgattgtaatttgggcagtacaagaacgaggagagagcgactccatccacggctattcgaccagcttgttcagcgaccaaagacgacattcccaccctcaggattgtgcggggtcatcggtcagacgcacatacgaaccatgtcttccgacgccgactactcggcgtttctcgacaaggcgaaccaagacacggggtcaggggacgtgaaagaagcatcgcagaagagctatgggaccaagagcgtcaacacggcagttccaagcggactcaaggaagtaaaggagtactacatcagtgaatctgacgagccgtttgagcccgtggcactcgagtttgagggcagtagcgtgtctagtgaggatctcgcgaagctccttggaggcaacaaagtagaggaagtcaagggcactgggtttgagtcacaatacaagggcgtgattgacgcggtgaagctggcgaccaacggtacagtcaaggtgttccgtgttgagctggaaggcacgcgggcagagtactacgttgtaggtgtggacgagaaaggaggcaggattgtagggcttaaagcactggctatcgagtcgtagtggggggggcggtagggaccgggcatatacttagcacaaagcgaacgtgatgggcaagccagcaaaggcgcgagggtcattgcgcgaataaagccgattg

SEQ ID NO: 128409 - DNA, 500 bp, Zea mays
  unsure (1)..(500): unsure at all n locations
  Clone ID: MRT4577_48581C.1
gaagggagggccgggcggcgggcccggaccggaccggaaccaccgggccggcgcgccctcccctcggcgggcggcccgcccaaaacaggggggngggtcacactcggaaacaaccaggccgacccccaaaaaancaaggaaccaaaacaaaaaaaagaggggcagacccaccagcccagcacaggcagggaagaaacaaccaaagggcgacggcccacggcagcccgaaaacggaagaacggaacaaaagggcccaaaccgggcgcagcccaccaaaggaaagcgaacaggggagnacggccagaaaaggacaaaccacccaacgagcagcaggcaaaaaaagggccgagccccggccccggcaaggagcaagccacacaccgcgcaggccagagaggacacgagccgcccagcaaaagcccaaggcacggaaccacggcagcgaggaacccggcacaggacgggaacccngcaggaagcggacccaggagggccaaaca

SEQ ID NO: 128410 - DNA, 295 bp, Zea mays
  unsure (1)..(295): unsure at all n locations
  Clone ID: MRT4577_48582C.1
tcggaanacccggggcgacgcactcgtcctcccactcttcctctcatctacatttcttttctcaccttagtctacatagaataccgtccgtttttattgtagcgcaaggaccactccttctcctatctacccccttacctcgtgatggacctccttccgcaccagacgtgcaacctgctcaagacctctttctttctttgcctcgtgctctatgacgcgcgcctgttctcttcgctcatgtccaacacctttaactacatctacaccagcacactgctcaagatcccttacctca

SEQ ID NO: 128411 - DNA, 628 bp, Zea mays
  Clone ID: MRT4577_48583C.1
aacagatttctaaaaggagaggtcatctctaaaggctacccacatccactggcatggccgggggtccctgagcgctcgtggcgggatcggactccaaacatgctggtggtcgcatgtcaactcctacgccagcgcctcacggtcgccacgaatacgacaatccggacgacagctaccgacctggccacaccgacgcgcgcttgacatgaccccctgagacctcacccgggtcttcccagcgccctgcacaacaacgtgcatgaggcgctggaaaacgaactgcctggcgatctcttggaatttgcgcaatgccaaatgggatgctcgctgtgttgcgcacgaagctcagccaacgaacacccatctccgcaacatgatcatcgacctcgacatcatcgccagcattgccggcgtctacgatggcaagaccttccaacaccatgagatgcagcctgagatgatcggccactatcttgcaaaggtctccatatcctactatgcggtcaagcacggaagacccggaattgacgccactcgctcctcacggcttatccctctgaaatgagctctgatccatatctgtagcgtcccagagccgaccaatgacattggcctttcacattgatgc

SEQ ID NO: 128412 - DNA, 292 bp, Zea mays
  Clone ID: MRT4577_48584C.1
caaaggagatctcccattccaaacggtctttagtttccaaaatgtttgttttccccctgaactattttttacccaaatggcttgttactgattccagatgaggttagacccctttttttatacgcccaggccatttctcgaacccagttgtttttttcccacgggtttgctgcctttttttttcgatacaacagtttttttctctttgtgcctaatttgattattccccagggccgttttttactgctttttttttttccagccattgtttttttctagcccgctttttggg

SEQ ID NO: 128413 - DNA, 330 bp, Zea mays
  Clone ID: MRT4577_48585C.1
aatgggaaacctgattatttttaggttctaacatataatatttttaccatttacattctttttttccataacattcttaatagaaggcgaacgcctttttatttcaatcgacagcgatttccattattccctatcaggatgagctacatgttttcccatcctatgctacttgatttgcctccaataattttttttgatttataaaaaaacaccattttggaggcgcaagggtaacttatcaacactatttattaactatcttgtaaatactacaacaaatgcttctttgaaaataaatttgagaccatcatttttgcatttttattatat

SEQ ID NO: 128414 - DNA, 1758 bp, Zea mays
  Clone ID: MRT4577_48586C.1
tcaagtcaccttctgtaaaacagtacaagcgttacgtactgatactcgtgtccaagaacataaacttttggagcgatacctagaacaaccctctccattttagccttgttttttggtaagagccatgggcaaagaagtgttgtcagggagctggacttgttttgtggaatgtttccattaagagccaaccccccagaggattgcaaacacagaggtttgtattagtgcagaagtttccctctgcgatttttttttccccttgttttcctaggggatcggtgtctttggttgtaccgggctcctatgttccgacctgtttgctctcttttcttcccccgttcacctcgcgtgcgccacccacctagggtgaccgccgccgcccttcgcccagccgcccgggttgcgctttgccggcgacgagcgcccaccgcacccccaccatattggtcactggaggattgctgccgttggtaaggatgagcaaaggcccagttccgtttgccaacatcgggaagagagcaaaagatcttctgtacaaggactacaactttgaccaaaagttttctttgtcgacgtctagcggctctggtttgaatctcacagccactggtgtaaagatcaacgaagacttcattggtgatatacggacacaacataaaagcagtagaactactattgatgtcaccgttgatagtgattctaaagtgtcaaccacagtcactgttgatgaagcactaactggtttgaagacttcattcgccttcaaggttcccgatcacaagtctgggaagcttgatctgcaatatgcgcacaatcgtttttcattgaactcgaccattggtttgacatcagcacctttggttgaactggctgcaactgtcggcacaagtgaacttagcattggtgctgaggttgggtttgacagtacttcagctgctgttactaagtacaactcaggaattggatacaacaagtccgatttctcagcttccttactactggctgataaaggggagactttgaaggcatcttacgttcatttgttcaatccgaccaatggagctacagttgcagccgaggtaacacacaagctgaagaccagagagaactatttcacagttgggagctcccatgcccttgatccttcaacattgctaaagatgagattcagcaactccgggaaggtcggtcttctctgtcagcatgagtggaggccgaaatctcttgttactctttcagctgagtatgatctgaaggtggtaagtgcgccttcaagaatcggcatggccatatccctcaagccttgagctgggttaagtcaccttctataaaacagtacaagcataccgtctcccaagaacacaagctttggagcgatacctagaacaaccctccattttagccttttttattttgtaagagtcttttgcaaaggagtattgtcacttgtcagggagttagacttgttttgtggaacgtttccattagagccaactccacacgaaggattgaaaatacagaggtttgcattagaacagaagctccactgcgatattttcccatgttttgctagtcgacgcaaaaaatgattttttggaggtgatttgaacacctaacatcttgagtcgatggtggttttaacagctctggaaatcaacaagggccatttgtacccagcaacagcagaattagttctggaaattggttattttgatgaaaaaaaaaaaaaaaaaagcggccctcgagcttgtcttggag

SEQ ID NO: 128415 - DNA, 588 bp, Zea mays
  Clone ID: MRT4577_48587C.1
cccctttcgagtttttttttttttttttttttttttttttttttttttttttttttttttttttttttttttttttttttggacccccaagggggtaaactttatttttgaaaaatctatttgaagttttgaacccaacaaattacaatttttcacaaatataaactttttgcaaatcaaactaagcaagatttttttccacattttaaccaaatatcaaaaagggaaccccattttaaaaggatgtcccaaaacacacaaacatgaagccccagggggccagttttgtcgacaccctcctccatttggttaatcgacaaaaaaacagcccaaatttcatctccgtcacttggaacctggttcgggcagggggatctcgtaatgggactccccgccttttgccactggagctggtgaaaaggggaacacttccttttccttttcctaatccgaatccagggggaactgggacataatgggcatcccctccatttggacctccttgtccaaagcactgtacccgctcggaggtcggtttgacctgaataggactgctgcgaaagcggccgccccggcaatcacaagcag

SEQ ID NO: 128416 - DNA, 378 bp, Zea mays
  Clone ID: MRT4577_48588C.1
aaaagagaaagccaagatccactaccggaagaagaaacagctcatgaggctacggaaacaggccgagaagaacgtggagaagaaaattgacaaatacacagaggtcctcaagacccacggactcctggtctgagcccaataaagactgttaattcctcatgcgttgcctgcccttcctccattgttgccctggaatgtacgggacccaggggcagcagcagtccaggtgccacaggcagccctgggacataggaagctgggagcaaggaaagggtcttagtcactgcctcccgaagttgcttgaaagcactcggagaattgtgcaggtgtcatttatctatgaccaataggaagagcaaccagttactatgagtgaaa

SEQ ID NO: 128417 - DNA, 308 bp, Zea mays
  Clone ID: MRT4577_48589C.1
gtgtaagaagcaaggaatattccacgggacctgggggctggactgcagggggaaaaaggacacaaaacggggcaaaatcttaaatttcaggtgctccacagagagaagacaacattgactcagggagaccccgggctgttgggccattggaatctaaaatacaggtggtgttgagtgcggccgattctgaaacatggctcgtcccaatgttctgggacttcgtaaaaaaaacaggtagcgaacgcctgtcatggtgcttcaagacaataggaagtgacctctaacttggggtgagaaaaggcttaatg

SEQ ID NO: 128418 - DNA, 1178 bp, Zea mays
  Clone ID: MRT4577_4858C.1
tgatgccgtaacacaaggctgaatttttgttcggtctagccgacccgacgatggcgtccagcgacgggaaaccactgccaaccccggcctctgtgggcggcggcggcggcagcagcaccgcgccgcccgggcagccgaccacggtagcgtccaaggtgctggacatgggcgcggcggcgatgcagtcgttgcgccccgtgaagcaggcgaagcagcacatgtgcacgttcgcgctgtacgcgcacgacccgaagcggcaggtggagacgcaccactacgtctcccgcctcaaccaggacttcctccagtgcgccgtctatgactccgacaaagccgacgcgcgtctcatcggtgcgtgcaccgtgcaccccatcttactgtcatcttcaattgattctttggcatgtgctcacgcccaagaaggacactgcatctacatggatcttttcttttaactgcatgcaggcgtggagtacatcgtgtcgaggaagatcttcgactcgctgccggcggaggagcagcggctgtggcactcgcacgcgcacgagatcaagtcaggcctgtggacgagcccgcacgtggcggggctgctggagaaggcggagctggaccacatggccgccacgttcggcaagttctggtgcacctggcaggtggaccgcggcgaccgcctgccgctgggcgcccccgcgctcatggtgtccccgcaggccgaccccgccgcagccgtgcgccccgacctggtccggaagcgagacgacaggtacggcctctccacggaggagctccgcgccgctagggccgacgtcgaggcgcccgccgaggagcacccgggccaggccgactactggctccgccaccgcaagggcttcgcggtggacgtcgtgccgcacgagatgaagcgtcacgcgccgtttccgtgagccgtgaccaaccggtgttttacagtggcgcatgtgtaataaaaccaaacgatccagcaggcgtctccgtccgaactcgtgaatggcacgcgtttatttgtttttcagttcatgatgttcaaatcggcagtacgcatgtgttatggatgcgtgtgtattggatgaagtggatcggtgagaacagactttagcctcgcaggtgttaaactagaactgcaattacacccttcccaattacaagtgggattttctttc

SEQ ID NO: 128419 - DNA, 452 bp, Zea mays
  unsure (1)..(452): unsure at all n locations
  Clone ID: MRT4577_48590C.1
acgtngcgtgcacgcgtaccgaacttatccaccacctgaggttcttcttcctgtttcttttaacggttctgaccacctgagggaggttttttacaagcagatgggctcgaccaatcaggacattgtcgccctgtctggtgggcacaccttcgaaaggtgccacaaagagcaccctagggttctacggggcctcgactacataccctttgatctttgacaactcttacttcaacgaacttctgactggagataaagatggccttctttatatcacaagagacaaagccctgctgagagaccctgtatttcgccatcttgtcaagaaatatgctacggatgagaacgctttctttgatgactacaaagaggcccacctcatgctctcctaactgcggattgctgatgcttaactagaccctatcctggataatacattctgctgcatgtggtct

SEQ ID NO: 128420 - DNA, 559 bp, Zea mays
  unsure (1)..(559): unsure at all n locations
  Clone ID: MRT4577_48591C.1
aatttgggacatcacccttttgattgcatcttttataaaatttcggcagcatctcctttgaaagattgcataaacgaggggcaacagtgtataaacatatatcatgacaaaaaacatactaagcattattaatatgctagcaaaggaaagttaaacataacaacatgaactgaattaaccagtgcacacgactagaaaaaaacaaacatcatttgacatcgagtttctaattaaatcatggctgcaactgggcagcgttattataatagtgaaggtggacgtgctgctacttccctcattcccaacatgaatcaaataccttcatcgaagaagaaagatgtactaggcatgatccggagtgtagccaccaattcttggagaggaacgacgatgatgggcgacggtatgccctcatctcccctctcttctcttcttttttcttcctctcttctcttggggcaaggcacaaaagggtgacggctgctagcccacgcgtacagccgttgctgcnngtaagcagcaggcgtcagcgtngacagncggctggaatggaagaaat

SEQ ID NO: 128421 - DNA, 500 bp, Zea mays
  Clone ID: MRT4577_48592C.1
cttgtgataaggacgttatttggaagggaaactttccggcctgacccaaagcaaaactacacacgcctctggccctgttttgggaacccatgccagcacctaatgagaactgatctagtagtttggagatcaccggatacaacccaaataaaagtgggtagaattttcctccttacgttacttaattgattggatgtgaagggcagaaacttgaccagatcctgactgacctggaccgctagcaaactgctcttgttcgcaatcatttttctccatttaaacaccgactgagccgtacttatttccgaataataagatctggatctgttcgtagccagatagcacaccagcgccagcaatggcacgaagaatgttaacaccagcacccttgaacatggacttgaggccttacttcttaaggatctgctggaatgccttcaatgagctctggtacttgacagactgaccacaagtcatcatcatgcttctgcggacaggat

SEQ ID NO: 128422 - DNA, 297 bp, Zea mays
  Clone ID: MRT4577_48593C.1
cccacgcgtccgcccacgcgtccggtggcatggggttcatccagtcaaatcactctgtgaggatgtgcggcaacaccatgatcagttttaacatgctggaggctgtacgtatcaactggtgtgaagaggttcttctatgcctcgagtgcatgcatttaccctgagttcaagcagcttgacacaaaagtgagcttgaaggaatctgatgcctggcctgctgagcctcaagatgcctatggcgtggagaagcttgcaaccgaggagctgtgcaagcgctacaccaaggactttgggatc

SEQ ID NO: 128423 - DNA, 786 bp, Zea mays
  unsure (1)..(786): unsure at all n locations
  Clone ID: MRT4577_48594C.1
cattgggtacctcgaggccggccggggtagcaagatcgttgcacaccgctcggaagagaaatgattgccacgaccggcggcagctcggcgaaggcggcggcggtgggcggcaaggcggcgcgcgcctgtgacgggtgcctgcggcggcgggcgaggtggtactgcgcggcggacgacgcgttcctgtgccaagggtgcgacacgtcggtgcactcggcgaacccgctcgcgcggcggcacgagcggctgcgcctgtgcccggcgtctccgctgcagacgccgccagctcgctcggcggcggcagcgacggcgactaataagcgcgagcgccacgacgaggtggcggtgcccgcgtggttcgggcgcaaggcgcgaaccccgcgcggcgggcacgccaaaagcgtcggccaggtggcgttgtcgcggcgcctcgtcgtaccgcatgcggctggcggggactcagactcacccgatgagcgaaacggcggcgaggaggagcagctgctctaccgcgtgcccatccttgaccccgccctagccgagttctgctcgcccccgcctctcgaggaccccgcgaagccggatcctgcggcgccgctggcccagttctgccccgtcggcggccatttcaacttcggcccgaccgacgccgagctcagggagttcgccgcggacatggaagccctcctcgggcacggnctggacgacggaaacgaggaggaatcgtcgttttacatggagacgctgggcctcctcgaccaatggaagtgggcgacgatgccacgc

SEQ ID NO: 128424 - DNA, 175 bp, Zea mays
  Clone ID: MRT4577_48595C.1
cgcaagcttgcccatgaaacttttcaccctgtgattgatccatttctataacggatgaagggctgacatggaccggccatggcaatctgaaggacccagccactgtttcttccgtcggctatgactgcgaccaagtgcgcatagcatttcacggggggggcacgaacaaggcgct

SEQ ID NO: 128425 - DNA, 403 bp, Zea mays
  Clone ID: MRT4577_48596C.1
cggacgcgtgggagctgatctagagatggcagccacaaagcagacgatctgctgcatgcttcttacactggtgcttgcatcaaatttcgtccaagattgcgaggctaatccttccagtctgctttgctggaccctgttaggtaagatgatatcttgctctgtctggtccaagcaggacatagcacattgcaagaatgagtgcaagcagaagagctacgacgatgggatgtgctatgtcacacccggtaaagtcaagcttgtctgtctatgtcacatacccaactgcaagtgatgatgctaaaacaatagcaacgctgaaaccgagctaataaatttgtactgtatatataagaatgggggatgaccgtctggcaatgaacttcctggtttttccccctttgtt

SEQ ID NO: 128426 - DNA, 251 bp, Zea mays
  unsure (1)..(251): unsure at all n locations
  Clone ID: MRT4577_48597C.1
tcgggcctactgcattttcttcaaggatttttactgccgccgcgttncattcatacacgggggggggaagtacaagtacgcgataggctacatctgatttaatcaaaaagaaacattctaaaaaaaccttcaatacatgttagtctagctgatcatgtctacatcatttaaatgggaaaaaatttgtgatttcgatgaccacctttatgatattagcaaggattggtcgaacccaatccttctngactgaa

SEQ ID NO: 128427 - DNA, 641 bp, Zea mays
  Clone ID: MRT4577_48598C.1
cattgggtacctcgaggccggccgggatcgcaacctcaggtgcatatccgctcccctacctctccagaatctcccgtctccgtcctatcgtatctgctcctcacctcgccgtgagtcatggggaagatcaagatcgtgaattaacggttttggaaggatcggaagggtcgtggtcaacgtcgccctgcagatggaggatgtcgaggtcgtcgccggcaacgaccccttcatcaccacggattacatgacctacattgttcgagtaccgacacacgtgcaccgggcaagtggaagcacagacgacatcaccctcaaggactccaagatgcttctcttcggcgagaagcggtcaccgcctttggcatcatgaatccccacgagatcccgtggggtgaggctggtgctgagtatgtcatggagtccaacggtgtcttcactgacaaggacaaggctgatgcacatctgaagggtggtgacaagaatgttgttatctctgccccaagcaaacatgcacccctgcttgttgttggtgtccatgaggacaagtacacctccacatggtaacattgtttccaatgatagctgcaccacaaactgccttgctcgccttgctaagggcattcatgacaactttgggatta

SEQ ID NO: 128428 - DNA, 289 bp, Zea mays
  Clone ID: MRT4577_48599C.1
cccgattgttactgccgctgcctccccaacgctgagacacatattatatggatattagcccgggcaccaggcaggcggagcgggcatccttaaaggcagaaccgtggcacttgaaagaattcgcacgccttaccaatggggtccaagtatccatagcaggtttacgctgaaaatgagcggggcccttaccattgagggatggggaccacaatcattagattccgaacagcggaatcagaaccagcgctttcagtcacgctgggcctaaagggcgtaagatcccgacctt

SEQ ID NO: 128429 - DNA, 1190 bp, Zea mays
  Clone ID: MRT4577_4859C.1
gccggccgggtcgggaagacccgtgtgccccgctccgtcctacgccaccgccgccggattcgctcccacctccggcggtcacgcccgttaccaacacccccacctcgcgtcgtccgccagctcctctctgccgcggcgcaaccatctccatctcccacgattacagcgaccacaagaccagcgacgcctccaccaacgagaaggatccattcaattcatccagtccacgcacacccccgtctttgactcgcactccgcttccagatctaggcgggccgaggaacgatgaacggaggcgccgccccaccatcagctgcggccgcggcgacgccgcctcaccggcggctgccggactttctccagagcgtgaacctcaagtacgtcaagctggggtaccactacctcatcacccacctgttgacactgatgctgctcccgctgatggccgtgatcctcctggaggccgggcgcaccgaccccgaggacctgcggcagctgtggctccacctccagtacaacctcgtgtccgtgctggtcctctccgccgtgctcgtgttcggcgccaccgtctacgtgctcacccgcccccgccccgtgtacctcgtggacttcgcctgctacaagccgcccgcgcacctccaggtccggttcgaggaattcatgcgccactccaagctctgcggcttctccgacgacgcgctggagtttcagcgcaagatcctggagcggtccgggctcagcgaggagacgtacgtccccgaggccatgcacgcgctcccgccccagcccacgatggccaacgcccgcgccgaggccgagaccgtcatgttcggcgcgctcgacagcctgttcaggtccacgggcgtcaggcccaaggacgtgggcgtgctcgtggtgaactgcagcctcttcaacccgacgccgtcgctgtcggccatgatcgtgaacaagtacaagctccgcgggaacgtccgcagcttcaacctgggcgggatgggctgcagcgccggcgtcatcgccgcggacctggcccgcgacatgctgcaggtgcaccgcggcacctacgcggtggtggtgagcacggagaacatcacccagaactggtacttcgggaaccgcaagtcgatgctgatccccaactgcctgttccccgtgggcggcgcggcggtgctgctgtcgaaccgcggcgg

SEQ ID NO: 128430 - DNA, 344 bp, Zea mays
  unsure (1)..(344): unsure at all n locations
  Clone ID: MRT4577_485C.1
catcgtggnttatcttttttttttttttttttttttttttttttttttttttttttaaaaaaaggaaaaaacccccattatatatagggacccccaaaaaaaactaccgccggtttggtccgggtgatttatttgagtttaacgtttagggcgacccacgggttttcctgacatattaaaaccccacaaaaacatggaacccacctcccacgggaaacacctcctcttcaacaacaaaatgaggccagggggtggaaaggatgggccccatggggctcccgttgcccaccccaatggggaaaaaggggcccgccatcctttgggcgtaaaacccaaaatcctcc

SEQ ID NO: 128431 - DNA, 629 bp, Zea mays
  Clone ID: MRT4577_48600C.1
cagttgtatgaatgcaagtatggtgacacactcttgcgtggacaacatgtattagctagtggtagtgagtctaaggcaaaagaggcatgggatgatatttatggggatgatgatattgtactaggaagtagttctactcctattgcatctactgtagcatccatctctgatctgtcttcttacctagacagtgatactgtcacccaatttggtgcagacttcaacattcttaattggtggcagaggcataagcttacttatcctattcttgctcttcttgctaaagatgttttgactgttcctgcttctaccatatcttcagaatctacatttagtcttgctggcagggtgctcgaggagcgacgacgacgactaacaacagatatggttgaggtcttatcctgtattaaggattgggagctagcagacaagcatatgcagaatactgtcgaaaacgatacgaaggaacttgaagcaacctatgagaacatgtaccttgatgttgaagacagagacaaggacaaagatggagaatcaagacctagaagaagttgagtttgtagctgtctctgtggctgtttcattgtggctgtttacttcaatgtggctgtttacttatctattgatgt

SEQ ID NO: 128432 - DNA, 521 bp, Zea mays
  Clone ID: MRT4577_48601C.1
tcttcctttttttacaaaaacgccaggcaaaacaccttgtggaccttcaaagaagacgaggcggaactccaaagctcatttacttggcgaccataaccactaaagcttaaaaccactacaaccattaaacttttcaaatcttcattctcggggaggttaacaaggccttccatttcttcaatatataaaccaccagctcttcattctcccctggaaccaaaccgctggggcacacatatgcacacagggacatccggaagatccaatgattccctaacctgcagaactgatggaccccccaaaatctctgaactaattcaccaagcaaacgcccggatgattaatgttcaaccggataacccgctcatttttagccaagttactgcttactaaattgaaggcaagcagtttggagaaatccaccagagctcctagttgacaaatagtaatcccacggaccctaacaaaggtcccatgtactaagggcttattcatatacaccgggcaagttttttctggga

SEQ ID NO: 128433 - DNA, 569 bp, Zea mays
  unsure (1)..(569): unsure at all n locations
  Clone ID: MRT4577_48602C.1
gagaaagtgacttttacagaacagacatccctgaactgaataaaggagtaatagcttccccaatttcaaactgatgaataaacaaatagaaaatggtgtcaagttctaacaaaatggtgtcaggttctaacaataccggtcagaatagaaattagcaggttttacaaaagaggtattcctatacgctgccgcctgcgggtaagctgaaacatcaacaggtcaaaaactcggtagtcggattattttagatggattgccttcataacatcttcagtcaagatatancggaaaaaacactaaatattatatttgaggttgccaggatgaaatattgtttatgttcagttacatatttgaaatataaaattcaataagttggttattagtggattctcttttaatcaaagtactaatacattttgttacatggcttcccatttcttggtaatgcttggcaaaacttcttaattgactgataccctttttaaaattgcagtgctactggacacgagcactaccagctgtgaaggttcgcttttgggaactgtaccagtccgtctaggttactc

SEQ ID NO: 128434 - DNA, 272 bp, Zea mays
  Clone ID: MRT4577_48603C.1
attcccttcagaaacgaaataacccaaacgatacgtcctgtatatttcaacatatttatgcaacatctgcatagaaatcataaactgtcattcggactgctattggaatccgcaccgtcttcgggccgttgtaccaagtaaggctgccaaacgtgtagtccccttgtaacctccagagaggcgataagttcacctgaaacgtggcggctttgtttgtcgcgttgaacacaagaacagacggcacgacgtcgatcttgactccagctgggctc

SEQ ID NO: 128435 - DNA, 298 bp, Zea mays
  Clone ID: MRT4577_48604C.1
tgtctagaggcgcaccaagccaagcgcacggggaacatcctatcagcactggctaccatgatgtaataccagcttgcgcttgttgcgctctgtgcgctcgcagcaggtgcagacattattccacatggctgacatgctccgactgcaataatcgaatacatgctcctaccatgttctcgaatgggctccgaactcacaaatctacgagctgataggttacaactagctatctcggtgagcgagttatcaaaaccagttgaccgattgctacagcaatacttgtcacatttaacggtac

SEQ ID NO: 128436 - DNA, 300 bp, Zea mays
  unsure (1)..(300): unsure at all n locations
  Clone ID: MRT4577_48605C.1
ccccttcgcctgcgaggggcggnaggggagtggtagtggtagggtatacaggagtgctctgcccatgggagaggcggagcaacaacgccatgttgtggggggctggggcaagaagcgcccgcgctgtggctgaagaagcagaactagaggtcgtttttttttttgcgcgctaggatagggattgttgggggggggggatgcacatngggggcacggagctttttctggggggggggaaatggactacaagcgttgagagtttggtggttgtatggacctgtgtttctttttgagtcgggg

SEQ ID NO: 128437 - DNA, 263 bp, Zea mays
  Clone ID: MRT4577_48606C.1
cggctcgaggtgatttgaagtacctctgttcatagtttcctggtataaagttggttaaaatttcatctgttaatagatcattaggtaatataatgtatgggttttctattggttttttgcagacagtagagggagattttgtaacaagggcttgttacacagtgatatggtaatgataaaattgcaatttatcactccttttcatgttaataatttgaggactggataaaaggtttcaagattaaaatttgatgttcaaacct

SEQ ID NO: 128438 - DNA, 826 bp, Zea mays
  unsure (1)..(826): unsure at all n locations
  Clone ID: MRT4577_48607C.1
cattgggtacctcgaggccggccgggacccgcccccgtctccttttcccagctcatccgcactcagtcgcgcctgagaaagagagagacagagagagtggctcaccaccccgcgccatagccacactcaccactcaccaccaccacaccactgttattacttcgactacttaccgccccccccctctacatcccctcccctgaagtcgcttgcttgctgctcaccgggcaatgtcgcgacgctaccccaccgcagagctctatgaagagcgagagcgcgacttctaccgcaacggcaaccgcagtgaccgcaactatgacgagctcgacttcgagttgcgccgcagtggtgtaggcgctgacccccgccgcagcatgcctgacttcttgcgcgaagactacaatcgcccaaccgctggtccgctggtaatgcgaggccgtgacgacgacagcttctctaggtctggaccccgcagtgctcgtggttttgacgatgacgtacgctcgactcgcagccgtcccccaccaccagcctcgtcagtgcgcgaggttgagcgcgacgacatcacaatccgacgccgcgagccagtcgcgcggtccccccgagcgtgatgacatcgtcttccgcccgtggtgatgggcccccgngtccgatccgtcagccgacctgccccacgtcaggtggaatgatgacgaagtgcgtttccgaggccgcactagcgacgacatcgacatccgcgcttctcgcagcgagatcagtcgccatggnccgcgacgtgtctgctgagcgaggctctatccgcttccaggaaaagacggcacctttg

SEQ ID NO: 128439 - DNA, 384 bp, Zea mays
  Clone ID: MRT4577_48608C.1
actgttgaaaaaaaatgtttaatttttttggggaattgttttaaggggggggccaaatgatgaaaaacccaacttaataatgtttttttaatgttttaaaatttaaaaatgtttatgcaaaacccaaaagatgaaacgttgacagatttaaaaatgagataacaggttgtttagttacattgggtgaaaaaagagtaaaaatgggagggttccaatttgttaaaggttaaaaaaaatttttttgggccgtgaaaaatttgaaggcagggaacttattccttggtgttggaaaatgggaggccttcccatttccctaaaattgggaaaaaaagtcctggaaacattttggggggaaaaggaagcgcgggggggaggggggccctt

SEQ ID NO: 128440 - DNA, 726 bp, Zea mays
  Clone ID: MRT4577_48609C.1
aattcggcacgagggtccgtttgccgtgcgccattgcccattgcgccctgcgccccctcccttggccaagttgccatttgccttccctttccctccgcatcggcccatcccagtatcccaccctccccctcccactcacggcagctgccattgtcgccctgtctgcccccctccacgctctccctatccaccacagcacagcacagcacagcgccacgcacgatctcgccggtgccaccgtgctcccccaccttcaaatgtcgggcctccttccaccggcgccccgcggcacggagcactgagcgcagtccggtccggcgctgccccactgcgacaaggaggacgggcaagcgccgccagccgcgcggggcctctgctccgctcaccctcgccgcggggagacacacggggtaggtgcggtgaggacgctagatccgcgcgcccgaccgtcccagccgcctcccaccgcaccgccgccggcggttccctcgtcgtcgcgcgccagcgcagctgctgcagtgcaggaagggacggtgtgaatgaaaggcgctcaggataaaaggcacagaaagaagcaggacctccaggttctcgggcccttcccgggatgcctggggaggatgatcaacatgttagacctcagcaatgggcgtggttgctaccaagatgctcactgagaaagcgcatagagatgtttctccggccgggaaagaccggagtaatact

SEQ ID NO: 128441 - DNA, 137 bp, Zea mays
  unsure (1)..(137): unsure at all n locations
  Clone ID: MRT4577_4860C.1
gtggttttagacaatcatataagaaaattttattntnggaagcacttncgggggggaaacacaactctttttgcatgctttcatcactcnnngcatgctnncatcannnaggacatttacttggtgcnttcaagtat

SEQ ID NO: 128442 - DNA, 588 bp, Zea mays
  Clone ID: MRT4577_48610C.1
ggggggtggggttttttttttttttttttttttttttttttttttttttttttttttttttttggttttttttttttttttttttttttttttttttttttttttttataaaaaaaattaaaaaaaaatctagcaaaactaaaaaaaggggggggggggggactttccaaaaaaagggtaaaggggcgaaaaaaaaaaacttaaaattttgcccccaaaacccaaaaaaaaaacgagccctggaaaaaacccaaaaatttcccccaaatttttgttaaacctaaaaaggggaggtggggaaaaaaccaacccaagctttaaaaaagctcctttaaacataccttcacggaacccttaaataaaaaaaaaaaaggggaaacgggaggggcccaaaaaaaattgctttaaggccaaaattttttaaggccctttcctttttggaaaaaaaaaccaaggttaggaaccacctttggaccctttttttgggaaaggaaaccttcccttgggctaaaccaagcctcctaaggctgggggggcccctaatggggctctaaaaaacctttgaaaaaacctagggaaacccccaaa

SEQ ID NO: 128443 - DNA, 253 bp, Zea mays
  Clone ID: MRT4577_48611C.1
attcggctcgagcgaattactgctcaatgttttgttgctcgcagcaagccaatcgatcacgagagacacccatgatctcaactgccaccggatgcagtactacgggcattatggaatgtttgccgcgcaatgggctattgctcaactaagacatcacagtataagaccaagcggggaagtattcacggcccacttgaagcaacatgatgctcgtcttggagaagggttcctatcttcaaggtttgagcaccag

SEQ ID NO: 128444 - DNA, 323 bp, Zea mays
  Clone ID: MRT4577_48612C.1
tttaactcttgtagccgccgcctcgtgctcctattcaacaaggcgatctagtacctgatccaccgccgccagttcttgctgctcccgatccaccacctccagtttttgctgctcccgatccaccgtcgtctcctcatttcaccctgcgccgtgttccccttgtcgtactcagcacagccgcccagttcgtacgcgatgcctgaaggagttccgcttgccgggaagcgtcctgcgccttcgtcgaagtctggtgcggcagcgattggacgacgaccggcaactcttccttccgccgtcgtgccgacgtcccaaggtcctgttcg

SEQ ID NO: 128445 - DNA, 1214 bp, Zea mays
  unsure (1)..(1214): unsure at all n locations
  Clone ID: MRT4577_48613C.1
agaagnaagagggacgtcatcaaaaaggggaagtgctgcggaagctcaagatacccctgtatcgaagaaaaacaaaatgcttgacaaaaaccttattggctcaagaattaaagtttggtggccagatgacaaaatgttttatgcgggtgttgttgaatcattcgatgcctcgtcaaagaagcacaaggtttcgtatgatgatggtgatgttgaggtactagctcttaagaaggaaagatgggagttcattgctgaggaacaagacgctgatcctgatgtggcatctaatatgccacgtggcaggaaagctaaagggagctcggttcaacaaatggagggaaaaacaggaacacctcaaagtgatgttaagaattctcccaagaagagagggcgcccaaaaggtgtgcgctccagcaataatatgccaaatgctgatagctctgtgactccagccagactgaagggaaaaagtgtcgagaaggatactgaagagacacctaagactggcagtaactctaagaaggaaggtgcaaagccctctcgatctactggaaaggctaaggattctgttgtcaaggcaagcagcaaggatgaggctgatagcaccgacaactcaaaggatgctgctgccagtgaagacaaggattcaaaagatgaagtgaaatccagtgaagctatcgatggatccaagacaaatggcctttcaaccaaaaggaagccagatgagaatgaaggtgagtcatcagaggaggagaaggcgtctactaaaactactaccagaaagaagcgcagaagaaagagccgcaactagttgcccagaagctatgcagctcatcatctaagtggcgttccgcccttgcagtctcaagtctcaaagatgttggcatgaggcatgccatgtactgtacgctttatattcactggaccggttaccagcttagcgctttggtagttggccattatgagtcagctcgtagttatagcagtcttaaactctcaataggagctgtaatgtttggtcttactttttttttgtttctccttgccaacggctgtgcctctggcaaaaatggatttgattcttgcttgggttcaagcttttgtgttaaaacgtgatgcagtttgagttatctactggcaaacagaaatacgttcctcttaaaaaaaaaaaaaaacaaaaaaaaaaacaaaaaaaaaaaaaaaaaaggtagaaa

SEQ ID NO: 128446 - DNA, 1075 bp, Zea mays
  Clone ID: MRT4577_48614C.1
gtaagtgtttagtattatggatgtgctatcttgatcacattgcacacttagtagcttatgtgaaactacctaactgttttatgcacagtgatgttaagaattctcccaagaagagagggcgcccaaaaggtgtgcgctccagcaataatatgccaaatgctgatagctctgtgactccagccagactgaagggaaaaagtgtcgagaaggatactgaagagacacctaagactggcagtaactctaagaaggaaggtgcaaagccctctcgatctactggaaaggctaaggattctgttgtcaaggcaagcagcaaggatgaggctgatagcaccgacaactcaaaggatgctgctgccagtgaagacaaggattcaaaagatgaagtgaaatccagcgaaggtatcgatggatccaagaccaaaggtctttcaaccaaaaggaagctagaggagaatgaaggtgagtcatcagaggagaaggcttctgctaaaactactaccagaaagaagcgcagaagaaagagccgcaactagttgctcagaagctatgcagctcatcatcttaggggcgttccgcccttgcagtctaaagtctcaagttgctggcatgggacatgccatgtatgctttatattgcctggaccgttttaccagcttagcgctttggcaatttgggcatcatgagtcggctcgtagttgtagcagtcttggcgtgtttggatcaccgccgctggcaccacgccgcaccacacttcgcgcgtcgcagttatggcggccgaatcagccgccgtaccttaggcggggtgtggcgctagacgccagcgtccaaacaggcctttaaactctcaataggagctataatgtttggtcttacttttctttttagaatctcgttgccaacggttgtgcctctggcaaaaatggatttgatgcttttgctctgcttaaagcttttgtgccaaatcgtaatgcatttcgacttatcttctggcaaacaaaagtatgctcctgttatgaagcgaatgtttcagatgaaaaaataaaaaaaaaaaaaaaaaaaaaaaaaaaaataa

SEQ ID NO: 128447 - DNA, 222 bp, Zea mays
  Clone ID: MRT4577_48615C.1
cccacgcgtccggcaagaccttcgtcatacccatcgccacgctgctcctggaccgcatcggccgtcgcccgctgcttctggccatcggctgcgggatgaccatcttccgtcttcacgcgtgccacgtgcttgcacatgagggacctgcgcccctagggtgaggtctcggcactgggcgcgggttgcatcgtcggctattgtgtcggttcgtggcttcgttct

SEQ ID NO: 128448 - DNA, 1029 bp, Zea mays
  unsure (1)..(1029): unsure at all n locations
  Clone ID: MRT4577_48616C.1
ccgatgtttntntntgggnnnnnntttttntttctnaagggggtntttnnnntntntttttnnntnttttttttttttttttttttttttttttttttttttttntttttttntttttttttttttttttttttttttttntnntnnnntnntnnntntntnnnnnnnnnnnnnnnnttnnnnttttttttttcttttttttttttttttttntttntttttttttttttttttttttttttttttttttttttaatttttttttttttttnnnttntntttttttttccctttttttctccccttttcccccctcctcccccccctcccccccncctccctcttccctttttcttttntttttttttttttttttttttttttttttttcccccccccccccccccctcttttnntttccccttttttttntnttttttntttttnttactaaaagaaaaaaaatcctntaccgcggtccgcggaaacgattccccaccccgccccgcgacttccttctacgctggttttttaattaattcgctttttttttttcgctacgctgtggttttacttggcatctgattaatcggcacacacgttttttaaattntttttttttagtttntnnttttttctattttatgtttcgatatctttttaattttcntttnnttttnttttttntaattnntattttnnttttttttttttgcgttttctcctcggtcnnnnnttttttttnnttatnccnnnnnnnnnntttttatnnnttcnntttnntnnttttttatttttttttttattttttggttttttttttttttttttttttttttttgttttttttttttttttttttttttttctatttttttttatttttttttttttttttttgttttttttnnttnttaatnttttttttttttttaatcttnnttttttttttttttttggttttntttttttnttttttttatgttttnnntttttttttaattttttttttttttttttttttttttt

SEQ ID NO: 128449 - DNA, 494 bp, Zea mays
  unsure (1)..(494): unsure at all n locations
  Clone ID: MRT4577_48617C.1
cctcattattccaattgattattttaaaggctcgccagcctttcaaaacccatacaacgtcaatattgatgtcaacccaggcagggtataagagacaaactctggccgattggccaaccctgctgcctaccatccatgccaaacttccccccacccaacgtgttatttcttttataagaacatacaacaagatccaggtcttccctctctcagagagtgtaataaaccggcagcaggattgacaatttccatctttcaactttttacgttgccggggatcacactgtgatacatggccttctttgactggaaaagctgaacctgccctatcctctcagggatcggctgtccctcctgcaataccaacaaggacttcatatggaggtctcatccttttgggctttagattccattcgggaacatttgaccagntgacatccacttcaacaagcttgttgtccaccgagaatgccattttgacatatgtttgagcc

SEQ ID NO: 128450 - DNA, 426 bp, Zea mays
  unsure (1)..(426): unsure at all n locations
  Clone ID: MRT4577_48618C.1
tgggtggctgtcgtttggtgcctcgcgcgcgcaagagataaacctaagttttaccgggatagttgcgagcgagtttcccttccagatattttgtggtagcctctgcggatgaccattcacgggtgcggattctcgattctgtcgagatgataaagccccgttgtttatatcctcttttccttttttgtgcggtcgtgcctggcgtgtctttggactagtggagtgggcatgtggcgccgcttccgccgccgccgctgcagcactgctcgttcgtcagaatagtatagggtgcagttgcgtggagatccacccgctcgtggattggcttctcctgcgggttgcaactggcaagttatcccggccttggttggatgtgttatctcggtccattntgntagatttggattcgtacgcttcgtgctggtg

SEQ ID NO: 128451 - DNA, 753 bp, Zea mays
  Clone ID: MRT4577_48619C.1
cattgggtacctcgaggccggccgggatgcgacgtagcgttctgctactgcggggtgaggctgcggcggcctgcgtgcgcggcgccgcaggaccgcatggcaaggagactggagagggactgcgcgctgccggggctcgccggctgctccaggtgcctgcgggcgctcagcaagctgggtgggaggagcaacgccacgtcgtcggcgaaggcgaagcaggagcaccgcgaggactgccacctcatgggcctgacatggctgctgaaccggaaccccacgcggtaccgcgaggcggccacggcggtcatccaggcgctcatggcggccgacgaggccggcgcgggccacccggccacctgctcgctccccgccgacgatgagctaccagtggccgtcgcctcctcgcagattaacggcgccacgtccgcatcgatgtcctccgcccatggcagtctgcttctggtcttcctcgctgctgccgtcatcgtcttgtcctgctgatcgtaatagaatgcttccaaatcgatgtgtcgcatcgcatggtctctttattactactagtacgtacctttttttctttgttcggtctagttgagacaagatttagaattaagacgctggttttgggtggacctcgttaatgatgtaattatatatttgttccttcgtctaaggctatttttaatggtggtttcatgcacaaaaaatagtgtgtcacatcagatttttttgtgacatgacaaattatttatg

SEQ ID NO: 128452 - DNA, 2375 bp, Zea mays
  Clone ID: MRT4577_4861C.1
ctcgaggccggccgggccgggccctctccgcaatagcccgtccccgccgccggattcgatcccgtctccggccgacgcgaccatttcccgcaccgccagatcctctcggctcggcccggccgccgcgcacctcccgcgattacagcgaccgcaataccagcaacgcctcctccacaaacggggccggccggggagggaggatccattcagccagtagtccacgcctttgactcgcactccgcttccagatctaggcgggcgggccgaggaacgatggacggagtctccgccccgccgccccaccggcggctgccggacttcctccagagcgtgaacctcaagtacgtgaagctggggtaccactacctcatcacccacctgctgacgctgacgctgctgccgctgatcgccgtgatcctgctggaggccgggcgcaccgacccggacgacctgcgccagctctggctccacctccagtacaacctcgtgtccgtgctggtcctctccgccgtgctcgtgttcggcgccaccgtctacgcgctcacccgcccgcgccccgtctacctggtcgacttcgcctgctaccgcccgcccgcgcacctccgggtccgcttcgaccagttcatgcgccactcccgcctctgcggcttctccgacgacgcgctggagttccagcgcaagatcctggagcgctcgggcctcagcgaggagacgtacgtccccgaggccatgcacgcgctcccgcccccagcccaccatggccaacgcccgcgccgaggccgaggccgtcatgttcggcgcgctcgacgccctcttccgctccacgggcgtcaagcccaaggacgtcggcgtgctcgtcgtcaactgcagcctcttcaacccgacgccgtcgctgtcggccatggtcgtcaacaggtacaggctccgcgggaacgtccgcagcttcaacctcggcgggatggggtgcagcgcgggcgtcatcgccgtcgacctggcgcgcgacatgctgcaggtgcaccgcgccacctacgccgtggtggtcagcacggagaacatcacccagaactggtacttcgggaaccgcaagtccatgctcatccccaactgcctgttccgcgtgggcggcgcggcggtgctgctgtccaaccgcggcgcggaccggcgccgcgccaagtacgtcctcaggcacgtggtgcgcacgcacaagggcgccgacgacagggccttcggctgcgtgtaccaggagcaggacggcgagggcaagaccggcgtgtcgctgtccaaggacctgatggccatcgcgggcggcgcgctcaagaccaacatcacgacgctgggcccgctcgtgctgcccgtcagcgagcagctcctcttcttcgccacgctcgtcgccaagaagctgctcagcgccaagacgaagccctacatcccggacttcaagctggcgttcgagcacttctgcatccacgcgggcgggcgcgccgtcatcgacgagctggagaagaacctgcagctgagcccggcccacgtggaggcgtcccggatgacgctccaccgcttcggcaacacctccagcagctccatctggtacgagctcgcctacatggaggccaagggccgcgtccgccgcggccaccgcgtctggcagatcgccttcggcagcgggttcaagtgcaacagcgccgtctggcacgcactgcgcaacgtcaagccgtcgcccgatagcccctgggaggactgcattgaccgctacccggtggagctcgtcgacggcttccccacgcagcaatagtaccttcttttctctatattcccctcccacccgtccgtcccccagcttgtcgtcgctgcacctgcacctgaacctgaaccagaaccagaacctgcggtaagtttgagtagtcctgatgatgattgctgtactatttgtctgttcagccatattgctgccagacgattgtcatttagtggtggtccaggcggaggaagggggccgttccttctcactcttactaccagaaaggtcatgcatgctgatgacgaggaagggagtgccttactctagcgcgcgtgtgtgtgtgtgccgatggacggatccatgcatctagtctctgtttgtagtgttcatttggaaaccttgctcttgctcttgctcttttttaactatatatacatacggacataccgcatgcctgcctttgatgagcttgtcgtatgtatgcaccatggttcgttcgttgctgttttccttcgtcagattatatcttgttaatttcgtaatctctgagggttcgttgatcttgttcagacaggttgtttcacttatctctctatcagtttgttcggtttgtaaaaaaaaaaaaaaaaaagcggcc

SEQ ID NO: 128453 - DNA, 244 bp, Zea mays
  Clone ID: MRT4577_48620C.1
gtcgctgtcatgctcatcttcgaggtcaactaatcctaacaaggaaaagatggcgacgacggcgtccatgcttatgaacaggtacgagctcgggcgcacgctctgacagtgcaccttctgcaaggtgtacctaggccggaacatctcgtccagtcagtgcacgtgcatcaaggtcattgactatgagaacgtgatgagcgtcagcatgatcgaccagatcaagcactagatctccgtcatgcgc

SEQ ID NO: 128454 - DNA, 265 bp, Zea mays
  Clone ID: MRT4577_48621C.1
gggagatctaaacttgggcatgtccaatcccaagacaaccaggggcacgcatgatctctcaccccatatcgtgcagacttgagcctaaaacaaaagatcccacagctaacaactggggcagagctaaaaaacctccaacacgaagaacacccaggaaaaaaacaaaggtggcattcgcaaacagtaaaaatctatgggtacagccaggtgggatttcctaactccgggatttcctcctaaaatgggggcttggggggggtaaccc

SEQ ID NO: 128455 - DNA, 682 bp, Zea mays
  Clone ID: MRT4577_48622C.1
aattcggcacgaggctccgggatagccctaattcatacgactacgaaggcagcctcgtcaagcaaaattacacaaagaagaaatatacttgatgtatgaactttgtgtcagctatgtattcagtaatttatacgtcgtcgcaacgcacgggcacataactattgataaattatgttggcaacaaaagcaatttggaattcattatttttgtggacatgcattaatgaaatcaacacagtatagaaagtgaagactaggaaaggtgcagcagaaactccagctgtgtcatacctcaggaatctgaagatttgccgtactcaagccatgctgctccaatacccttggcggtttgacgaggctatctctcagttggatacacttggcgaggatttatacaaagatagcaccttaatcatgccagcttttgagggacaacttaacgcttatggtccgctgacagcacaacgttaacgaaccggagcacctgaactagcagtcacgtctgcaatatacacaccagcaaaacactcatgtaacactaaacagttcatgcatatccttgaccgaagacgatgttgcaaaggtttcagacatcagcttttggcgttgacaagaaacaagatgacgagtacaaatgctcctgatgagtacaacgccagtgtattaagtttgcttttgtact

SEQ ID NO: 128456 - DNA, 551 bp, Zea mays
  unsure (1)..(551): unsure at all n locations
  Clone ID: MRT4577_48623C.1
cgccagtggtgatggggatatctggcagaattnncgccctttcgaggcggggccgccgcgggcaggtgaccaagcttttttttntttttttttttttttttttttttttaactagaaatttttttttttgtttatatatgtagttatactctttggtttgttttctaaaaggaacctggggcgagaccacactaagggggaaaaccaagggacggggggggggtaataacggagccgagccccggcccagggcaggtttaaggaaagtggcagccgtttgctgggggaaaatggtgggccccaaccttggcccaaaaaatggggaaacgggggcccaagggggaaagcggggggggcctaaagtgcgaacaaactcacaacaagtggcttgcggggaaaggccggggggcagccgggggggccgtaaggccaagtgaattaatgaatctgccagcgcgcttagagagggggaaaccggatggggcccttttccgaaagaagggtaaaaaactcggtgaaaggggggttaaggatggggcgatctttagcat

SEQ ID NO: 128457 - DNA, 202 bp, Zea mays
  unsure (1)..(202): unsure at all n locations
  Clone ID: MRT4577_48624C.1
tccttttcgncagggaagacaatgatcctattagtttgaatagnnnnagaaccttacaaaaaaaaggctgccccaagggtcagaagaggcccattagcctaaggggagaacccccacctcaaacccaaaaaaaaaaagacccgcggggatttcatatttatttgagagcgcgatttttcatatttacaaaaaggtgtgcacc

SEQ ID NO: 128458 - DNA, 1634 bp, Zea mays
  Clone ID: MRT4577_48625C.1
cacgcaaaaggtccgaccacgaaccaataattatactttgtaataacaagatctttatcatggttaaataagcagtgtgctaatttgactccaattcattccacgcagaataaacttggaactgactagcaacatttaatttagctactggttaaactctctatcaaccaaggtcagtacgacgggaacacgaaattctttccaattccctgccctcaactacatctctagaccaactgtaaaaccatccacagctactcaacaggatactcatgcacgctacatccgaaattaggagttaaataagaagcctagtatcaataagtgcgctggccctgcaatcgaaacaatctcatggcatatcctttcaaccgctcctacaaccaattcgtcagggaggaacagaagggtgcacagttcgaaggattagtcctgtattaagtaatttaattttcctcggaatggactctgcaaaaatacttctttatcgcgttcttatcaagatctccaacttatgttgtcatcactattctgcacagggttttgatggcagagaccatcagtctccttttaacagcaaattacaaggattgaagctagaactaggaagtgttaactaataagtccattccccatctcatcggttttggaactcttgtgcttactcttcttgtgcttatgcacatctgctgaatcttcagttccctcgtgcttcctcttcttttcatgatgtttctttgaatcagaatcatgatgaccactcttatcttttttcttatccttgtctttgtctttatctttgtccttactccgatccttatgccgatgtttgtgcttcttatgttccttgtctttgtccctctctctgtctttgtgctttttatgcttcttctctttgtccttggactcgctttttggtttacccgaaatagtcggtatacccttttcagtagagggcaaaatcacaggagctgtttctcgaagttggaacgcttgccccagtgtttccatatcgaagggctgaatataagcaggtttatccctcatatatgcattctgaacaagttgatccaactccattccttctccttttcgaatttcagtgtctcccacaatattgtgaagataatgtgtatctgatattgccagtggcaaaggtttcttgcaaaagaaatcatggtgtggcagcagtttgtagtggttgatcaaatcaacagcaccagtgagctcccttggcccatttccaaacttcttgtcatcagaatccatcagtttggagcttgagctatgcaaagagcatcttcaccggtatagcacggaacggtctcctggccgggacaggtctccgcgccaccccgcgccggtccggtgccagtagagcgcgagggccggggtggtgccagtagagcgcgacgcctacccggtgaggggagcgaagacgttcgggtgagaggcggggctgggaccctgcgcagtgtgccccgtccgtagctggcggcgagaacgccggcggtgagggagcgagcgggcgagagaggggaagggagggtcgagaaccctcgacgacccccgaagtttcgcctatagcttgccttctcccggccggcctcgaggggtccaatcgcccggcctcg

SEQ ID NO: 128459 - DNA, 369 bp, Zea mays
  Clone ID: MRT4577_48626C.1
gacagggaaagagaccgagaccgagattgggagagggacagagatagggagagggagagggagattgagaggtacagctagagccatatcgatgtcatagacggcctctctgtgccaaaaatcacaattgtacccttgcttgtcgatgctctgcgttcaatgactcatcttccgttggatgtacatcttattattgtggaaccttagcaccgagtccccgattttatcaaggcttgtgctcatattgatagtgtccactgttaacagacattttccattcattttcaccgaacagtctatcttatttaaagtctatgagcctagtcttgatttgtttttaattcatctacttccctcactgttatttat

SEQ ID NO: 128460 - DNA, 232 bp, Zea mays
  Clone ID: MRT4577_48627C.1
ggagcactagcagtgacagactcgtatcctgccttcttgattagaccctaaaactaatactagagtcgtctgcggcaacaagcggtacgtacgtatacgatgaagagcaggagcagcactctgttggtgatcctagttctccaggctcttctgctctctgcggctgtggccaaatgacctgcaggtacgtcgtgcttgccgagatctcatctagctggctactagcttgatt

SEQ ID NO: 128461 - DNA, 192 bp, Zea mays
  Clone ID: MRT4577_48628C.1
aaaactatacaaatttatttaatttaaccaactaatttccacaccaaataatttaatttcggggtcccaggccaaccaggtatgccaaaaaaacaggaaaacagtggggccttagttcttttaacacccccaaacaggaccatggttgcaggaggctaattgcctaaggaatacgagaggttttactaccaa

SEQ ID NO: 128462 - DNA, 356 bp, Zea mays
  Clone ID: MRT4577_48629C.1
ttccttaagcagtggtaacaacgcagagtaccgcggggtccgcaaaaaccgatatgtcatcctccccaaggactttgaaaagggctaccgaaccaacgtgaagaagcccgagacagactttgatttctacaaatgagtcaacccagagtgttgaactcgtttctttctgcaaatgagtgaaggagagtgttgaacttgtttcttggatatcaatcgattatcttttaccatcagctgaggtcatggatagtggccatctcttagatcgaagttcctcaacaaaaaaaaataaaaaaaaaaaaaaaaaagaaactctgagcagaaaaaaaaaggtgctctgcgttgttaccactgct

SEQ ID NO: 128463 - DNA, 434 bp, Zea mays
  Clone ID: MRT4577_4862C.1
tcctcttagcgcccgccctttttttttttttgatatatgtttttcttcatttcttatcccaaaaaagaaagagctcaatctctttaaaaaattaatcacaaacaactttttcacttcattattatcacccttttaatatctcctccaaacaataactagccaacaacttcctccacatcttgcacctcatttcaatacccttctacaactgcttcgaatcaaaactcgcggtccaaccccttcggcccatacttcgtcacatccttaccctcaccaacgtccatcctggccaccgtcaccgttagctttctcttcacccgtacttatttcatcctcaccatacttttccgtcgacacctacctttacccgcgcaccgcctcgccattccttatcatcctttctctcccaactggctctcccctctgttctttca

SEQ ID NO: 128464 - DNA, 345 bp, Zea mays
  unsure (1)..(345): unsure at all n locations
  Clone ID: MRT4577_48630C.1
ttttatattttttttttccttttgtttcttttggggggaaaacccccggtgttttcccccaatccaagaatnaanaagggcatgggcccatgggttagcgaacccagggaaataaaaaaaacttagataccggaccctttttttacacactttcaccattcaagacatgggtgacgaccgaaaaggggcttataccacaactaggcgagccttttggggatgactcccttgacggagccccccaaagggaaggggcccacgaccaaacaaacgaccctgaatgcctgaagggggacccacgtccgggtccacgggaagaccccgcgctggacgcaaaacattttg

SEQ ID NO: 128465 - DNA, 314 bp, Zea mays
  Clone ID: MRT4577_48631C.1
ggaaaaaaactggaacttttttgtattgatgaacaatccatgtttgggcacaataacattgggcctttgtatgtgatgaagggggggggaaaggttaatgtatttttttaaaaaaagtcaggcaacagaaggactggtcattactatgctccatgtgactagaaccgctatgttttgcaccccaaccggactgcctactggtggatctttttgttaattctggtggtggagggcccttttggcttccatttttttgaatgccggggaacttattttgtcccccgtggactcctttgggaccagtttaataacct

SEQ ID NO: 128466 - DNA, 1736 bp, Zea mays
  Clone ID: MRT4577_48632C.1
cattgggacctcgagccggccggggaaattttcccttctcagagcacatgggaaacagacacatgaacgctcaaaagccgcagagaaatttcggaggccagtagtattcgtatcgaaatccgataggtcctctctgtggctgaaacctggaagtaaccctcgaccgttcgaacacaacacagctgtataaaaaaaaagggctcctttgctatctcctccacgctagatcgatgatcaggaacgtacaaagggttcagttcagttttcagtgagtcggcatatgggcaactgcagcagcagcagcggcttcttctctcttccgaaacgctactcaaactcaacaatggcatggtctcggtcgacgatgagggcgggactcacgaagggataaagaccattccggtgcagagagcctgcgagttcaccacgaactccgtgctctgcgtctgcatcgtcacttggaacatgaacagcaagatgtccgcggaagatgtggcgaagctggtgagctccgacaggaagttcgatctgctggttgtcgggctgcaggaggcgccgaagccagacgtttcgcgggtcctgcaggaggcgttggcggggacacacgtgctgttgggtcagaagagcatgcagtctctccggatgcttcttttcggttcaaggagctcggagaagtacatcagagagatgaaggtggacaaacacgcggttgggggctgcgggggtatcatcgggaggaagaaaggagcggtggccatgtacatcaacttcagcgggatccggatggtcttcgtgtcctgccatcttgcagctcacgagcacaaggtggagaagaggaacgcggagttccagcacatctcgcagtcgctcttcgccaggtacggcgcgccgacgccgtacgcgcagtctgccgacataacggtgtggctgggcgacctcaactatagactccaagggataagctcgacaccggcgaggaagatgatcgaggagaaccgccagagcaagctaagaggcagagaccagctgctgcaagaggccgagaagggccaggtgttcagcggctactgcgaggggacgctgtcgtttaagcccacgtacaagtacgacgtcgggggcagcgtctacgacaccagctacaaggtacgagtgccttcgtggacgggcaggatactgttcaaggttggccagtcttcaggcctggatgcagtgctcagctcgtacgaatcactcgactgtgtccggagctccgaccacaagcctgtgaaggcgcatctctgtctcaaagtacgcagtgatggtgatgctgactgatatccagctggcgcaggagggtttcaactggcggttacttctgcagattaacatgacatgctaattaagatgaaaatgttctagtttggaagggtgattatactctagtatattttataacatggcgctcttagcttgtgggccaattgtttcaggtctacgacaccagctacaaggtacgagtgccttcgtggacggacaggatactgttcaaggttggccagtcttcaggcctggatgcagtgctgagctcgtacgaatcactcgactgtgtccggagctccgaccacaagcctgtgaaggcgcatctctgtctcaaagtacgcagtgatggtgatgctgactgatatccagtactggcggttacttctgccgattaacatgacatgctacgatgaaaaaaaaaaaaaaaaaaaaaaaaa

SEQ ID NO: 128467 - DNA, 471 bp, Zea mays
  unsure (1)..(471): unsure at all n locations
  Clone ID: MRT4577_48633C.1
cggccttagcgtgaaacgcagacgaggtacaaagctataaaaaaaaaaaaaaaaaaaaaaaaaaaaaaaaaaaaaaaaaaaaaaaaatttttaaaaaaaaaaaaaaaaaaaaatttaaaaaaaaaaaaaaaaaaaaaaaaaaaaaatttttgttcttggggggggccccccctgggggggatttttggaaatttcctccccccggggggggggttttaccttctttttggggggcccatttccccttttgggggggccctttccattcccggggccgggtttttacaacgccgggttgggaaaaccccggcgtttccccatttattggccgttgggtttagccccttttcccaggggtgggtttttccgaaagggccccaccctgnggcctttccaaagttttccccatccggattggcaatgggaccccccttttggcggctctttaacccgggggggggggggggttcc

SEQ ID NO: 128468 - DNA, 600 bp, Zea mays
  Clone ID: MRT4577_48634C.1
gagatgaaggtggacaaacacgcggttgggggttgcgggggtatcatcgggaggaagaaaggagcggtggccatgtacatcaacttcagcgggatccggatggtcttcgtgtcctgccatcttgcaggttaattagttttcaatcgccaggccatgcttttttcgatcgtcagggggggtatcttgcaggttagttgccatctcgaagtaacaaaggtgtaataaaaaacccgcagctcacgagcacaaggtggagaagaggaacgcggagttccagcacatctcgcagtcgctcttcgccaggtacggcgcgccgacgccgtacgcgcagtctgccgacataacggtgtggctgggcgacctcaactacaggctccaagggataagctcgacaccggcgaggaagatgatcgaggagaaccgccagagcaagctaagaggcagagaccagctgctgcaagaggccgagaagggccaggtgttcagcggctactgcgaggggacgctgtcgtttaagcccacgtacaagtacgacgtcgggggcagcgtctacgacaccagctacaaggtacgagtgcctttctggacggacaggatact

SEQ ID NO: 128469 - DNA, 506 bp, Zea mays
  unsure (1)..(506): unsure at all n locations
  Clone ID: MRT4577_48635C.1
ttgggtacctcgaggncggccggcacgctagatcgatgatcaggaacgtacaaagggttcagttcagttttcagtgagtcggcatatgggcaactgcaactgcagcagcagcagcttcttctctcttccgaaacggggaagcaagctactcaaactcaacaatggcatggtctcggtcgacgatgagggtgggactcacgaagggataaagaccattccggtgcagagagcctgcgagttcaccacgaactccgtgctctgcgtctgcatcgtcacttggaacatgaacagcaagatgtccccggaagatgtggcgaagctggtgagctccgacaggaagttcgatctgctggtcgtcgggctgcaggaggcgccgaagccagacgtttcgcgggtcctgcagaggcgttggcggggacacacgtgctgttgggtcagaagagcatgcagtctcttcggatgcttttttcggttaaggagctcggagagtccataaagagatgaag

SEQ ID NO: 128470 - DNA, 287 bp, Zea mays
  Clone ID: MRT4577_48636C.1
aaaaccaaatttgatagccctgggtcagttttcccaatgggtctgaaaattatgtggggcccctgggtcgggttttttttatttgcaagctcggttcaaaaatttagcttaattagaagactcccttttgccttctgaaaagggggacccgcccattttgttcgatgatttgggaagaacaatgaattggttgctccctcttgaaccttttcaagggcagggttttcctgttttacggactggggttttggggccccacttattattcaaagagaatccctgggggg

SEQ ID NO: 128471 - DNA, 673 bp, Zea mays
  Clone ID: MRT4577_48637C.1
aattcggcacgaggctgacgtgcccgccgtggcgatcccacccgtccccctaccgcttgaacttgtggcggccgaaggggatggtgaacttgcagtcgatgcacccgacccggcataggagacctcccccctcaccataagtacgcgtggaccaccgtactataaccatctagaaccactaccgtacacagatgaagaccattcaacagcgcaaggacaggcgctttaaataggagagacagatacatccttgtaaagtagccaaggatcatcgcacacgatttaataataaatcttgaccaaaaagatactcaatacatgccacttaaaaggcacaaactttagtgaggatgactctgagctgctcactattattgggataggagatactgtagaggggtgattgattactgagaagacctccagctacatttatgacactgaaaaaactcactatctctgatatggttgacagcatccaactgaaacatgtcatatccactagaaactatttgccgcaagttgctagtcactgaatagataagctttactattcttagcaagacaccgactatctaaacctaattatggagcacctcactggccgagatatcatgaccctgatcatgatagatgataacttgactgctcatgttgcgagattatacattga

SEQ ID NO: 128472 - DNA, 228 bp, Zea mays
  Clone ID: MRT4577_48638C.1
gatctaaggaaagtggatcagcatgagcctcatatgcagctaaatgatcaactagaacagaaaattgctctacatactctgctactgagcctatctgcctaatgtgaaataatgtgcgtattaatgattcatgtcggtcactgccaaaacgatcatgaatttgggcacaaaagacaggccaaggtaactgacggattcggcgttctgtggactgcaaccagctcgccg

SEQ ID NO: 128473 - DNA, 594 bp, Zea mays
  Clone ID: MRT4577_48639C.1
gttgttgtcttttaggtttggttttaggtcatgaatctttagatcagtgtcagggttgtcgtttgggaaaacagatttatctttcctattattatggcgagtcagtctcaagtgtccttttgatcttgttcactcagatgccctttgtttcaaagggggttcataaatgttatatactttatatagatgtttttttctcgccacacatggatttactttatgaagaatcatagtgaggctttatccatcaataagaccttctctgctatggtttgcactcattttgacacgtctattcgtgtctttcatgctaactctataggagaatatctttatgatactctaagctagaatctttctgagcaaggtactcttgcgcaattttcttgtcctggtgctcatgctctaaatagttttgccgagtgtaagcatcgtcatcgtctcatgctcatgctcgcctcctttgttcccctcacttctaggttaaggatgtctctactgccacctatctcactaacattcaacattctttgtctcttcagggtggtgttccttttgagcatctttgtggcaatgtgtccgactactccagtc

SEQ ID NO: 128474 - DNA, 505 bp, Zea mays
  Clone ID: MRT4577_4863C.1
ctcctccccacccacccagcaccactcccccctccctcccttctccggagcggaggagagagcagcagccagcgcggcctcccgcgttggtgcgtgctagagctgggcctcggggttcgcctgtggactccgcctgctctcttcccgtgctggtccggagcccgaccaccacccgccgccagccatgggcgggctcgaggagatcaggaacgaggccgacgatctggagaacatccccatcgaggaggtgttcgagcagctgaaatgcacgcgccaggggctcacctccgatgagggggcgcagcgtgttgaaatctttggtctcaacaagctctaagagaacacggagagcaaagtcctcaagctcctgggattcatgtggaatccgctgtcctgggtcatggagatggctgccatcctgcccaccccgctggccaccgttgttgccaatcccccgcattggccggatttccgccggaaccacccgttctcctggccaccaact

SEQ ID NO: 128475 - DNA, 107 bp, Zea mays
  Clone ID: MRT4577_48640C.1
cgcacgcgtccgacgaaacgccgctgcctcggctcatcccttccctcctcgctgcatcctacctccctggtgaccgtcacgttcaccacgttcgcccgctcattcag

SEQ ID NO: 128476 - DNA, 617 bp, Zea mays
  Clone ID: MRT4577_48641C.1
gtcgacccagcgtccgccccgcgtccgagtcgattctcttctttcttcctcgcacattggttctacgaacgtcgacaaaaacccgactctcctctcttccgaccttctgtctcgacttctcatccctctcgatatactcttcccacaatctcgagtcgacatacacacatacacacgtgtaggatactggacggggagcggtccatggatgttattgcaagaatactgtaatcaatactccaggagctcgcatgctgacttgttgatctttagatcgaggttggccacggcaagaaggctattgtcatttttgtccccgtcccatccctgcagggcttccaccgggttcagcagcgcctgacccgtgagctggagaagaagttccccgaccgccacgtcctgatcctggcctcgcgccgcattctcccccgccccaagcgctccagccgctcccgcaacacccagaagcagaagcgcccccgttcgcgcactctgactgctgtccacgacgccattctgaccgacctcgtctaccccgtcgagattgtcggcaagcgtctccgcaccaaggaggacggctccaagaccctcaaggtcatcctggacgagaaggagcg

SEQ ID NO: 128477 - DNA, 549 bp, Zea mays
  Clone ID: MRT4577_48642C.1
ccggccgcgatgacgattgccagaacgcgcgacggccgccatgatgcgagactacctcaagcaccggatgacatctctgctgtactagcagcccgcactgatgccgttatcgtgtgctgacagctgtgcagatcctctcagtgcattcgcccgacgaggagtagatgggggacgttgagtcgccgcctggactgctggagcccttggtataatgaggaatctggataagccgaaaccaggatgatcctatatcgagactcttcctaggcgaatataacagctacctggacctaaataaccgctggtgatccattcttacgatgaacaagatgctctcgcccttgtcctaatcttgattcaccgtgagttttatccccaacaacatctccatatgatccatcatcagctgggattacgccaattgatgtagacatctggtgccgtactatatagtctgcatgcaatacgctgcttgccggataccacgcatgtatgactgtacgattggatttgtacatgtgagacaatgcaccacgtggtacttgtgaa

SEQ ID NO: 128478 - DNA, 189 bp, Zea mays
  Clone ID: MRT4577_48643C.1
attcggctcgaggggcgtgacacccgtgtatttctattctggacgcttggctggtacaaagcgggcgcctgtttatgacaaagcacactcccagcacagaggaactggcgatggcactctgcacaagtacaaaaaggaggttggctcatgctgcctgcatgctgtaatcaacatgactgcagcgtttaa

SEQ ID NO: 128479 - DNA, 324 bp, Zea mays
  Clone ID: MRT4577_48644C.1
cccccacgccaccgtcaaactccagctgcggtctcccgcggcagccccgccccgctccccattcctccccccacccaacctgcgaccgctcccgctcaagaagaaaaaacccgagcttggcgagccgcctgccggacggagagctggtggtcggcggaggggagcggacggcatggcggggcacgcggcggtgcgtagctgcgtgcagacggcgctcaaggcggccaactccctcgtggggctcgccgggatggccgtcatcctctacgcgctctgggtgctccgcgcctggtcccagcaggacgccgaccacctccccgcccc

SEQ ID NO: 128480 - DNA, 247 bp, Zea mays
  unsure (1)..(247): unsure at all n locations
  Clone ID: MRT4577_48645C.1
ccgcaangcncgcaagcgccgaagcgaccctccaacccccggaccacacaccaacggggncgncggcaagagaaaacgcgggggggcaaccccacagganccaacaggcaaacgcagcnggcaacagaccgnaagcacccggngnnccaccaacaagcaacagcccgagaacaacagaaaccannagcagcangaaaaggcacaaaacaagagggcacaacaacaacaacaaccggggggagcaaac

SEQ ID NO: 128481 - DNA, 331 bp, Zea mays
  Clone ID: MRT4577_48646C.1
gcggtgactgtaagccgctggagtacaagctctcggcctggcacctcataagctgcgggtgcatgtgccaaggccgcgacttcacccgcagaaacggcaccggcggagagtccatctacggctagaagttacccgacgagaagctcgtgcgcaagcacaccgtccccggtgagctatccatggtcaacgccgggcccaacagcaacggctctcagttcttcatctgcaccgtcgcgaccacttggctcgactgtaagcacgtcgtcttcggtcaggtacgctagggcatggacgtcgacaaggccatctagacagtgggcactcgcaacgg

SEQ ID NO: 128482 - DNA, 320 bp, Zea mays
  Clone ID: MRT4577_48647C.1
ctctctctccgaaggctccttcctctcccgaatccggtgctggattgaggcaagggctcccctccacgcggcgcgtgccaccccctcctccggcgccgctctccaccacgcggcagccccgcctgtctttctcgcccgctcgctgtaccacccccgcaaggcggcggcctcctgcccgctcgccgtcgccgacactccctcgtcgagaaaagcgttcttgacgtgcccgctgctgtgccactggaccacagccgcgccgccgcgcgccattccctccttcgcgtcaacagccccagccctcatcgcgtccgagcaggacc

SEQ ID NO: 128483 - DNA, 1837 bp, Zea mays
  Clone ID: MRT4577_48648C.1
aaaaaaaaaaaaaaaaaaaaaaaaaaaaaaaaaagaaaaaggccgaaccaaataggcaacacactagggacctcggctttcgcccgacacggacatcccctggcccctgccgctccccacccatctccgatctgcgattccttccagccgacgcctccgcatccacctccccggagccaccagcggccagccactggccgtccaaccatcgtccccaagcggcgagttgcggggtgtggcgaagatgatcagcaggcagctcgtgctgacctacctctacctgctgatctacatctgcctctcttcgggcgtcatcctgttcaacaaatgggtcctttctccaaagtacttcaaattccctttccctatcacgcttacgatgattcacatggcattttctggaatcgtgacattcttccttgtccgagtttttaaggttgttgcacccgtcaagatgactttccatatatatgccacatgtgtgattccaattagtgcctttttcgcttcaagtctgtggtttggcaacacggcgtacttgtatatttccgtggccttcattcagatgctcaaggccttgatgcctgtagcaacatttataatggctgttttctgtggtactgacaaattaagatgggacctcttcttgaacatggtattggtcagtgttggtgttgtagtttcatcttatggtgagatccactttaatgtgattggaaccttgtaccaagtcactggtatctttgcggaagccctcaggctggtcctaactcaggtccttctccaaaagaagggcttaaccctgaatcccattacaagcttgtattacatagccccttgcagtttcatcttcctgtttattccatggtatttactggaaaagccagaaatggacgtgactcaaattcaattcaactattcaatatttttcctgaatgcactttctgcattcgcattgaacatatccatattcttagttattggaagaactggagctgtcaccattcgagttgctggtgttctgaaggactggatacttattgctctctcaactattatcttccctgaatccgttattacaagtctcaacataattggatacgcagttgcgctctctggtgttgtcctgtacaattatctgaagatgaaagatgtcagagcaaaccagcttccagcagataataattctgatagggctacaaaggacaagaagtcttctagtatgttcaggcctgacaattccatggacaacagtgatgggactgtagcaggaggcctggcatcagaagctgcagcagttgatgaggaagcccctttgatcccttctgcacgcctctcctacgttacacggacccaaacaggcagctccagtaacagataaccatggtgtacctgttctgtgggttgaccaccatatatttttgttccggtgaacctgaaagaggtgctggtatacgtgtggaaaagaatatggttaaggaagctcctgcaagtcgcacctcatctcataccatgacgacacctggatgtctcctctcgatgtacctttttcgctaggcgtgtatatttcggggagatacctagaggtggattagagaacttgaagagataggctataacttttgcttagtatttggagaaacacgttaggccatgtgttggctatagtatttccttaaccaaacatatggaaatggtgttaaacgttagatgttgtgaagcacttcataggctctaatttgagtgttagtgttgtttccttttcggttctttcattgttcccttaagtactagcggattaccaagtgtgcatccggcaaattttgcaattgtctgg

SEQ ID NO: 128484 - DNA, 628 bp, Zea mays
  Clone ID: MRT4577_48649C.1
ggctctgctcccctctcctttttcatctcattcggcgccgcggcaccccctgctcgtcactcgcgatggcccggatcaaggtgcacgagctgcgcggaaagagcaagacggatctgcaagcgcagctcaaggagcttaaatcggagctctccctcctacgcgtcgccaagatcgtgcgcacctccatcgctcgcgtgctcaccgtcatctcgcagaagcagaagtcggcgctgcgtgaggcgtacaagaagaagaagcttctcccgctcgatctccgccccaagaagacccgcgccattcgcaggcgcctcaccaagtaccagctctccttgaagactgagagggaaaagaagcgtgagaagtattttcccatgcggaagtacgctatcaaggcctagattagtgaaagaacagcttttatcctatcaagttctgcccagaagtttcttgagtttgatgtaccgcacatctatcgtcattacaatggaatgatgaaaacgaatatgttttcggcttctactccacacagtctttgttggcgatgctacacgtcttattaatgaattcttgtccatgtaaaccttcgtcggtgaagtttcatgtctcatgagttttaaaaaaaaaaaaa

SEQ ID NO: 128485 - DNA, 255 bp, Zea mays
  Clone ID: MRT4577_4864C.1
gtcctaaaactaaaccacaaaaaaccccggacgggggatgaaataccaattgacccccaatccattcgctttgagccctggcgctgctcataccgaggttgaacccaatccaaacctcctgcaccagggcggcctctaaaaaaaaaacaccatggggtcatacccagcccaacaactacgaaaatgcacccttgtgccttgggaaaccgtaccggaccgaacaaggttacctagggcgaggggcccctcccttta

SEQ ID NO: 128486 - DNA, 509 bp, Zea mays
  Clone ID: MRT4577_48650C.1
gggcaaaaggggaaatatatgccccccgttaaacatcctataattatggaggggagcttcaaacttggataatgcggcgtacgtgctaaaactagcttgaattcacaacttgaatggccccccccaacaaagcatggggaaaaaaaaagggctgggtattcaaaaattaaacggcatgttcggctattattaacctataatcccttgtaaaaaatccggccggaaagcgcgcttactaaccccgccttgaacccgggatcccgcgggagcgtgacccccatgtgctccgggaggtttttccttgggaacttcaaaaacggcccggccttttgtttttgtaacggaaggggccccgggggtcacccggccttcccccccgggggggcggacaaccttttgggggggccttaatgctgcggtgggcgggcctgtttttgctcccccttttacgggggcaccaagacggggctttgacccccgctgcgcttaactttttttttcaccgggca

SEQ ID NO: 128487 - DNA, 997 bp, Zea mays
  Clone ID: MRT4577_48651C.1
gccggccgggtcgggagacacgactctcggcaacggatatctcggctctcgcatcgatgaagaacgtagcaaaatgcgatacctggtgtgaattgcagaatcccgcgaaccatcgagtttttgaacgcaagttgcgcccgaagccttctggcggagggcacgtctgcctgggcgtcacgccctctgcttccctctccattttttcatctcattcggcgccgcggcaccccctgctcgtcacttgcgatggcccggatcaaggtgcacgagctgcgcggaaagagcaagacggatctgcaagcgcagctcaaggagcttaaatcggagctctccctcctacgcgtcgccaaggtcaccggcggggctcccaacaagctctccaaaatcaagattgtgcgcacctccatcgctcgcgtgctcaccgttatctcgcagaagcagaagtcggcgctgcgtgaggcgtacaagaagaagaagcttctcccgctcgatctccgccccaagaagacccgcgccattcgcaggcgcctcaccaagcaccagctctccttgaagaccgagagggaaaagaagcgtgagaagtatttccccatgcggaagtacgctatcaaggcctagattagtgaaagaacagcttttatcccatcaagttttgcccagaagttttttgagtttgatgtaccccacatctttcgtcattacaatgttgagttgtatgatgaaaaaatgttttgcccagaagttccttgagtttgatcaactgcatgatgaaaaaatgtgtactttttgtttgttgaaatgtgctttccatttttcagtttcctcttggtcatcacgatttgtggaatgaataggggtcgagtcttgttcaatgttacgtgcattggacaccaagttgaattgtagccaatgcttgaaatctgttgtcatgatgtgggtgggggacattggaaactctgtaaaatatttggtgtcatatatcaaattgttttgctct

SEQ ID NO: 128488 - DNA, 705 bp, Zea mays
  Clone ID: MRT4577_48652C.1
ttgggaccctcgaggcctgccgggctcgctctctgctcccctctccatttttcatctcattcggcgccgcggcaccccctgctcgtcactcgcgatggcccggatcaaggtgcacgagctgcgcggaaagagcaagacggatctgcaagcgcagctcaaggagcttaaatcggagctctccctcctacgcgtcgccaaggtcaccggcggggctcccaacaagctctccaaaatcaagatcgtgcgcacctccatcgctcgcgtgctcaccgtcatctcgcagaagcagaagtcggcgctgcgtgaggcgtacaagaagaagaagcttctcccgctcgatctccgccccaagaagacccgcgccattcgcaggcgcctcaccaagtaccagctctccttgaagactgagagggaaaagaagcgtgagaagtattttcccatgcggaagtacgctatcaaggcctagattagtgaaagaacagcttttatcctatcaagttctgcccagaagtttcttgagtttgatgtaccgcacatctatcgtcattacaatggaatgatgaaaacgaatatgttttcggcttctactccacacagtctttgttggcgatgctacacgtcttattaatgaattcttgtccatgtgaaaccttcgtcggtgaagtttcatgtctcataagtgaaccgatctcttcgttcgctttg

SEQ ID NO: 128489 - DNA, 1242 bp, Zea mays
  unsure (1)..(1242): unsure at all n locations
  Clone ID: MRT4577_48653C.1
ccggaattcccgcgttttcccgcgcgcagcacgggcttgcctgctagtcccacaagccgccggcaccggcgcacggggagcagaggcagagcagcgctcgccgcagcaagcgtgccctgcacacaacagaccagccaacgctccagcggcagacgacggcagcaggtccggccaccttccgcgcctcgccccagccagtggcgttcacgccttccgccatgaaggccgccgcggtccactccgtcccgccgccgtccgccgtgacacttgtgtcagtggtggcgcggcgcgcgctggtgccggcggccctgcgcggcaacgcgcggcgtggcgcggcgctggtggcgtccgccgcgcccgatggccagatgaggaggagcccgggcccggcagtggcgaagttgaccgacgtgatgtcgcgccccgtgcaggtggccacgccggggcagcggctctcggaggtggacgacgccttcttcgccgcgcggcagtactccggcctgctgcccgtggtcgacgacgacggcaggtgcgttggcgtgatctccaacaaggacaaggccaaggcgcccaatggggtcggttactcgctcgttcgatcactcaccgcttcaattagttaagatcgtaagaggcatgaaaaagaaaagcactcaatgtctaatcttttcatgctttcttgtcgtgacgacgatgaatgaagatggagtcaactgtaccccccccccccacatctcctgcgataacgctgacactctacaagactgtcttgggtaaacacgtttttcgtccactcccctctaccttttttaaccaaccaaacatgcatgaacaccaagcttgaagtcgttaggccagattgttaccccctttatttcgtgtagtgatctcagccagagaggtatagttaatgctaccaataatggcgatgaagagcgacagcaaaaagctaggnntgtttaatactggaatccnnctgccaataccaagacagaagtagatggtgtaaactnttaatggaggttacctgaaacttanntacgggcnntgattggttcnngcaagaaaaagaaaataagccgggcnngggtcgcgagcctggaccagccaggnntacgcgntgttttgggcggtatcagctgnatgcagaaaaataganntgtaaaataaattattttgcatctacnnncatggtaaccaaccatctaccatatacaggtanaccaaaccatgtgattgcat

SEQ ID NO: 128490 - DNA, 1517 bp, Zea mays
  Clone ID: MRT4577_48654C.1
cattgggtacctcgaggccggccgggggacagagatgcttcccccccccgtgccggcttgggcagcagttgggctcgctcggcccgcctccttcccgagcacgcacgccgcctcgcttccaattcttccccccctctcctcgtccgctccgctccgctcctgcgttgccgtggagtgccgcccggggctccattccattccacccgtagcccggtccccccgcgccgccggcgcgccggttccttcggttcccgggatcaagatgattggttcattcattaccggaatgctaacgcttgttctcggatacgcgtaccctgcatacgactgctacaagacagtggagctgaacaggcctgaggtcgagcagctgcggttctggtgtcagtactggattttactcgcgtttctcaccgtactggagagagttggggaaagtttcgtatcatggttgccaatgtatagtgaagcaaagctcgcatttatcgtgtacttgtggtatccaaagacacgggggactgcctatgtatacgagtcattcttcaagccatacattgcaaaacatgaaactgagattgatcgaaatctgctcgagttgaggacaagggccggtgacatggcagttctttatttccagagggttacaaactatgctcagacaaggtcttatgaaatcttgcagtatattgcctcacagtcaccgactcaaagacaggcacatcagcagcagcaacgcccaccaccgccacggactcggcaggtcaaccctgcacctccacctattcccgcaccctccgcgcctccgatgccaccacagcctgcccaagcccaagttcctcccactccaccaaggcccctagttccagtggttcctcctggcgcagtgcctcctgccccgccaccaactgctcctgaagccaccgccaccaacggtcttcaggacaccgaaaccatgcaggtcgacccacctcgtgcttcactgagcggcccaccactaccacctgaggagacgctcatcgaggaggcgatccggctgacacggggccggctcaggaggcgcttggctgggggatctggaccaccgcaaaattagcgtcgatcaagatttccatctcacgcgaattgcaccacactggtctggttcttggtgattgactgagaagagggggaatgctgagttggttgaacagagtttgggtttcctcgcatgcgttctccgttgtacgaactggaaccggtttggtctcgaattgtgaatagtatcccagaaacagaagtggatgatcaattcaattcacagggtagcgctaggaaatatggttgggaaccatcttctgcaagacgcgaaggcgcgacatgtcatgagcatttagcaacgatgatactactggtcacagtagtgtagtctggaatccaaatgcgaagaacaaaaaagaacagcgccatgtatgtgctgcatacttgtagttaacgactactatgcaattagtccttatatgcaatcagcgatactatgc

SEQ ID NO: 128491 - DNA, 145 bp, Zea mays
  Clone ID: MRT4577_48655C.1
agaacatttgcatcggacggatccagaagatagcctggaggacttcttcatagcattgtttgtcaggaaagcaggacctacatcagaagaacctagtgaagataccacggtagaagtaagaaccaaacaaacacgcgggaagcga

SEQ ID NO: 128492 - DNA, 295 bp, Zea mays
  Clone ID: MRT4577_48656C.1
attcggctcgagtgccaaccttttcttgcacccacctggccccgacgtctggggcggggtcattacaagcctggggatgaatgaccccctcctggtctcgtggggacgaccgtcaaaaccaccgagtcccccggcggagggctccgttgggcaaggcggggcagggtcctggcccgagcctgggcctctagcgcgcccagggtagaattgcccggaaagcggaaagcagggtgctcgtcgaccgactgccccacatggagacgcggcagctcataaacctgcaacccctccgggc

SEQ ID NO: 128493 - DNA, 453 bp, Zea mays
  unsure (1)..(453): unsure at all n locations
  Clone ID: MRT4577_48657C.1
cccagcgtccgntcatgcccgggcatgggggcatgcatcgtagaagacacctgaattggattgggctcgtgctaccaaaagatggttgagaaggtagatggtgagaatgcaacaatgggaagtagcacctttaatactccagctcggaagagacttattttgactactagcctgattcagtatattcttcctgttgtaccagctagacttcttgccgcaaatgttactaattccattgaggccattgtataccacatttctaaatccgcactcagtgacgcatgtgacactgctctatctgttgtgaatgacacgctaccgaaccagagcagcacttctggtaaggaaggctcaagaatcctatcagaagttctggaaacatatgagtcgaggcttggcaagctggaaatttccttgttaagctctgaaaaggcgacgacattgcatgatctg

SEQ ID NO: 128494 - DNA, 289 bp, Zea mays
  Clone ID: MRT4577_48658C.1
gagggatccacatataaagccattttaaggttcttcttttcagccaacttctcaagcaagaggtctatggtacatcagcggattgctatatctcctgcagtgagttcacactacagtggtgctgtgcctctgacatgctatatatgccgctctcaacgtcggcgtacgagccatcgtcaatataccgcttgcatgaagactcatgtattcaactctatcagcgccaaagaggtttcatcttgtacgtcatacttctacaacgcgcatctcagccagacccacatctatg

SEQ ID NO: 128495 - DNA, 573 bp, Zea mays
  Clone ID: MRT4577_48659C.1
ttttttttggaccataaaacgaccccccttttttttttttgttttactggacaatttacgcccccagaaatggtgatactaaaaacagagtcgggggcgaccccgtggcgcaaaaaaatcctcccccccccaaattttgttttgggggggggccccaccatcacaaaaaggggacacaacgggggggggggggttttgtctttttaagagcccccccaaagccaagagattgggggccctggggccccaaccccccccgccgtggttcttccccacccttaaaaacggggcccccttttcctggaaaaaaactgggcccgcgtcgtatattttgcaaaacccaagggaaaaggggcgcaaattgggggtgaccccgcccccctacaccacggtgtaaatttgacccctttttttttccccctctttctttgggaaataaaacaagaccccttttgtgtttttggaaaacaccaaaaacccctgggtccccaaaaaaaaaccttttttccccgacaaacccttttggaaaaacgtgccccacccccgaagggcccccccggggccccccccctg

SEQ ID NO: 128496 - DNA, 350 bp, Zea mays
  Clone ID: MRT4577_4865C.1
atttttgccacccacgccgacagttcttcgcctggacaacccaccttgataccaaggaggatggtgcacactgagaaggagctcgacgaagtgattgagcagatgatgctggaggtgcagaagatcgaggcagaagaggttgaggtgatacgagcgatgacgaggctgacaaggatgacgatgttagggacgcggatgatgatgaactggatggacaggagggcgatagaagtggcaggactaagcaaagtaggagtgggaagatgagctgctaggccatgccgaagcttggcatgaaacccatgattgctgtcatgtgatcacttggaagaaaagcaggaatatgcttt

SEQ ID NO: 128497 - DNA, 677 bp, Zea mays
  unsure (1)..(677): unsure at all n locations
  Clone ID: MRT4577_48660C.1
ccggccgggaaggtaggccagcgtgcccttgggcaccacctgcacgctgtcgttgatggttgagcacccaaagtcggacaccttggcgacgtatccttcgccgagcagaatgttctgcggcttgacgtcgccgtggagcgtcgggtgcggtggcgagtgcaggtgcgccagggcctcttcaggcgggtcggcagcgtcacccggcgccgaggctttccgtggagcaggtcgctcagggtcccgttgggcacgaactcgtacacgagcatgggcgcctcaaaatggaagcagcagccgaggagcctgacgacgtttgggtggctgacgcggcagagcacgaccagctcctgcacgaacccatccgtcctgctcctgtcgatctgcttgcatcgcttcacggcgacggtggtgattgcattttcggcagcagagctgccgaggttggccttgtagacggtgccatgtgctccttccccgacgatgttggccttgtggaagccacgtgtggccttcgctagatctcctctgtcgtataaggtgaaggtggatgttgttgtcatctgtttcgagaattcgcaacaacgtccggcctccgtgctgctcaaagtagccttgtcttttcttgctcgncttgtggcggaaaacttcggtaaaaaaaaaaaaaanaatttgcggcc

SEQ ID NO: 128498 - DNA, 398 bp, Zea mays
  unsure (1)..(398): unsure at all n locations
  Clone ID: MRT4577_48661C.1
ataaaggggttgggttttttttttccaaacccaagagttttttccaacacaaccttgcattgttacaaccgatccccaatgaaaaaagctgcaccctaaagctgcacacccactaacacttcctgccaacccggaaattgacccccccggcttccctggggagcaactcggagaactggccccccttggcctggaagaggacaaccctgccgaacttgccctcgttctggcccccggactggttaaaaaaggcccctttgaggaacagggggtccggggacttccacacccagtttttgtacccgctgaactgggggaccccccggtgggacaccttcttaaacctgctgncatacacggcccgaaaacggttgccctggttgaaaaagggggggttc

SEQ ID NO: 128499 - DNA, 364 bp, Zea mays
  unsure (1)..(364): unsure at all n locations
  Clone ID: MRT4577_48662C.1
ctctctttttttttaatataaacttaagacttattcgatttaattcaacaaaacacagaccaggtataagattgtatngagttcctaatcaacacacagaccacgtatatattaaatctaattcccagcctcctggatgatggtccataacatcagtgggaatcccgcatcttttcgacgggtttgtgcaaatatgatctccgttgcaccagatctcctgatgggtcgatgcccgcagcacgaatcaaaactacaccatgcgggtgcaacacattcgatggatgcaaaccttccacgcccatactcctgaacgaagtaatggcagcttttgacagatctaactggccggcaaatcatgtgacat

SEQ ID NO: 128500 - DNA, 1401 bp, Zea mays
  Clone ID: MRT4577_48663C.1
gcaccagagaagctttcgttccttcgtcctcctccctcccgcggccacgccacgcctcccccccccagcccctctccattgggtcccccgaggccggccggggcattccccctcgatcggcctccctcccccaagatcctccactcgatcccaaacaaaccaacaaatccatccatcgcacatggacgcgttcttctcggcctcctccgcgtcggcgccctacggctacggcgccggcggatggagctacgactcgctcaagaacttccgccagatcacccccgccgtccagacccacctcaagctcgtctacctcaccctgtgcgcggcgctggcctcgtcggcggtgggcgcttacctgcacgtggtctggaacatcggcgggacgctgacaatgctcggttgcgtcggcagcatcgcctggctcttctcggtgcccgtctacgaggagaggaagaggtatgggctgctgatggcggctgccctcctggaaggcgcttcggtcggacccctcgtcaagctcgccgtggaatttgacccaagcatcctggtgacggcgttcgtggggactgccatcgcgttcgcgtgcttctccggcgcggccatggtggccaggcgcagggagtacctctacctgggcgggctgctctcgtcggggctctccatcctgctctggctgcagctcgccgcctccatcttcggccactccgcaaccagcttcatgttcgaggtctacttcgggctgctcatcttcctgggctacgtggtgtacgacacgcaggagatcatcgagagggcgcaccgcggcgacatggaccacgtcaagcacgccctcaccctcttcaccgacttcgtggccgtcctcgtccgcgtcctcgtcatcatgctcaagaacgcggccgacaagtcggaggacaagaagaggaagaagaggtcgtgagcgtcgagaacggaagctctcccacatgcataggagtaactgccagggttccttcctggggtggaagtgtggaactgagcttgaatgttaagaagtgttcctttgttctcttcctctcttgatgactctgtaaatagctatgtcaatctggttaagtttggtttggttgcatgtgcctgtgttcgctgccctttggatagaatgcaaattaaagatgttgctattgcacaaaaaaaaaaaaaaaaaagcggcccctgtgcctgtgttcgctggcctttggatagaatgcaaattaaagatgttgctattgcactaagtttggtttggttgcgtccgcctgtgttcgctgccctttggagagatcatatggaacatattcactgacatattgacatgcacatctgtggaacgcatatatgcgcgcggagcggcttaatgaacttgaagaacttacacgctgc

SEQ ID NO: 128501 - DNA, 1536 bp, Zea mays
  Clone ID: MRT4577_48664C.1
cccacgacacgactcgattcccagacccatatccatccatcaatccatccgcagcgggcaggcacacacacaggcttttgcgttggcagggatggacgcgttctactcgaccaccgacttctcctgcaggtcgactcgccgatgggcggctacgctcggacatgcgcccgctcgatcggcctccctcccccaagatcctccactcgatcccaaacaaaccaacaaatccatccatcgcacatggacgcgttcttctcggcctcctccgcgtcggcgccctacggctacggcgccggcggatggagctacgactcgctcaagaacttccgccagatcacccctgccgtccagacccgcgcaattagcatttcgtatttttttaaaaatatatatcagtcgctggtttcgtgcgttccagaaattctcctgcgggttgcgtgtagctgatgcgtaattccctgacgtaatctatgattcgcgcgcgtcgtgttccttgcatttagaactgcaactgtgcggatgccaccgattcgattgattcgtcactttaagaacatgatccggttagaacagcaagatatgataaatcgatttgaatccaaatctgaccatctggttcggcttggttgcctgcaggtctacctcaccctgtgcgcggcgctggcctcgtcggcggtgggcgcttacctgcacgtggtctggaacatcggcgggacgctgacaatgctcggttgcgtcggcagcatcgcctggctcttctcggtgcccgtctacgaggagaggaagaggtatgggctgctgatggcggctgccctcctggaaggcgcttcggtcggacccctcgtcaagctcgccgtggaatttgacccaagcatcctggtgacggcgttcgtggggactgccatcgcgttcgcgtgcttcaccggcgcggccatggtggccaggcgcagggagtacctctacctgggtgggctgctctcgtcggggctctccatcctgctctggctgcagctagccggctccatcttcggccactccgcaaccagcttcatgttcgaggtctacttcgggctgctcatcttcctgggctacgtggtgtacgacacgcaggagatcatcgagagggcgcaccgcggcgacatggaccacgtcaagcacgccctcaccctcttcacagacttcgtggccgtcctcgtccgcgtcctcgtcatcatgctcaagaacggggccgacaagtcggaggacaagaagaggaagaagaggtcgtgagcgtcgagaagggaagctcttccacttcatgcataggagtaactgctggggttccttcctggggtggaagtgtggaactgagctgagtgttcagaagtgttcctttgcggcacctttttctcttcctctcttgatgagtctgtaaatagctatgtcaatctggttaagcttggtttggttgcaaaaaaaaaaaaaaaaaagcggctgtgcctgtgttcgctggcctttggatagaatgcaaattaaagatgttgctattgcacagct

SEQ ID NO: 128502 - DNA, 613 bp, Zea mays
  unsure (1)..(613): unsure at all n locations
  Clone ID: MRT4577_48665C.1
ccgcgtgcttgtgccggtctggtattacggggtcgccctttgcgttcggtttgtgtctgttgtcgtgcgcttcggtctgtgttgtgttgtgctccttggtgtcggtttgttggtcgtggtcgtggctctttggtttttgtggggttgtgggctagccgggcgccgtggtagctgctgcttgtgttctggggatgccttcgttggtggttgggttcggtccctttcctcccgcgggggagttgctttggtgctcttggtgctcgacaggttggcggtgtgtgctctttccccccctgttttcggtggggtttatttctttcnntttgggggttttttggggttgtttcttttccgggcgtgtttgtctgggttttgtttttattaagaaggggggggggtttcggggtttttggtttgggtttcctgggtggcgccgccttttttttttttttggggggttttnggttttttttttgttgggggttttttttttttttggtggtgggggattttttgtttttttttccttttttttttttttcggggttctcttttttttttttcttttgggtttttttttttagggtgttttcccttttctcttttctctttt

SEQ ID NO: 128503 - DNA, 1165 bp, Zea mays
  unsure (1)..(1165): unsure at all n locations
  Clone ID: MRT4577_48666C.1
agcccaacgccatagngcctagccggttgacccaccacgacacgactcgattcccagatccaaatccatccatccatccgcagcgggcacacacacacacacaggctttgcgttggcagggatggacgcgttctactcgaccaccgcctcctccacgtcgtcggcgccgtacggcggctacggtggcggcggcgaaggctggggctacgactcgctgaagaacttccgccagatcagccccgccgtccagacccatctcaagctcgtttacctcaccctatgcgtggcgctggcctcgtcggcggtgggcgcgtacctgcacgtcgtctggaacatcggcgggatgctgaccatgctcggctgcgtcgccagcatcgcctggctcttctcggtgcccgtctacgaggagaggaagaggtactggctgctgattgcggctgccctcctggaaggggcgtcggttggacccctcatcaagctcgccgtggaatttgacccaagcatcctggtgacagcgttcgtggggactgccattgcgttcgcgtgcttctcttgcgcggccgtggtggccaagcgcagggagtacctctacctgggcgggctgctctcttctggcctctccatcctgctctggctgcagttcgccgcctccatcttcggccaatccactagcagcttcatgtttgaggtctactttggtctgctcatcttcctgggctacatggtgtacgacacgcaggaggtcatcgagagggcgcaccgcggcgacatggactacatcaagcacgccctcaccctcttcaccgacttcgtggctgtccttgtccgcatccttgtcatcatgctcaagaacgcggctgacaagtcggaggacaagaggaggaagaggaggaggtggtgaaaatctgtgtgcgaacacagcactcaagggaagggaaggaactggtgcgtctgaaatgaagctcccacataactaggtgtatacatatataggagcgaggagttactttggggtggaactgaactgtgcaagtgtcgttcctttgttttctcttgcctgttgaatgagcgtgatgatacttgtcctaccctgtgaatgaatatgacaatctggttaagtttggtttggttgcaaaaaaaaaaaaaaaaaaaaaaaaaaaaaaaa

SEQ ID NO: 128504 - DNA, 904 bp, Zea mays
  unsure (1)..(904): unsure at all n locations
  Clone ID: MRT4577_48667C.1
ccggccgggcatttgtgatggaagctgtcaagggtaatatattttctctaaatatttagcctaaaaaaaaaaaaaaaaaaaactcctttaatttcagcctgcctttccacaccgccttttccctccctctcaatcccagataaaccatggggggtaaattaagaatgactcacaattagcatttcctcgcatctttctagctacctatctctctctctctctctctctctctcgtagtctcgtgtgcggtttgtatctagctaggtataacaacagcccacccagcgtgggtttctagatcgacggctggtctagctagccagggactaggaccgatcgatggcgtcgtttggcagcgacgaccacgtgccggcggccatggcggtgaacgatctgatcgaggcgcgcgacggcgtggcgaggctcaggatcttgctgctgcagctggacgagcagcgcgcggcgtgggcgcagctggagatcgacgccgtgctggccaagctgtccagcgcgatatcggcgttggatgcaagcgaagtaggccggagccgggccgccggaccggacggtgcgaggccacagcgacagcagtcggggaggtcgggcgggaacaagaggaaacaaggttccagcagaagcagatcacagcgcccctctgacaagaagatcactgctacgctggaagacgggcacgagtggcggaagtatgggcagaaagagatccaagactcaccctatccaaggagctactacaggtgcacgcacaaggcggaccagggctgcaacgccaaggaggcagtccagcgctgcgagacggacgcgtncacgtacgtcgtcacctactacggcgagcacacgtgccgggacctctcgtcgatcccgctcatccaccaggcccgcgccg

SEQ ID NO: 128505 - DNA, 1186 bp, Zea mays
  Clone ID: MRT4577_48668C.1
ccggccggagaaagtttcgttccggtgatatacgactctcggcaacggatatctcggctctcgcatcgatgaagaacgtagcaaaatgcgatacctggtgtgaattgcagaatcccgcgaaccatcgagtttttgaacgcaagttgcgcccgaagccttctggcggagggcacgtctgcctgggcgtcacgccgcattccccctcgatcggcctccctcccccaagatcctccactcgatcccaaacaaaccaacaaatccatccatcgcacatggacgcgttcttctcggcctcctccgcgtcggcgccctacggctacggcgccggcggatggagctacgactcgctcaagaacttccgccagatcacccccgccgtccagacccacctcaagctcgtctacctcaccctgtgcgcggcgctggcctcgtcggcggtgggcgcttacctgcacgtggtctggaacatcggcggtacgctgacaatgctcggttgcgtcggcagcatcgcctggctcttctcggtgcccgtctacgaggaggtaagtcagtccgtccgcccgtgatccgtcgtgtcgtccgttcgtctctccttcgtcagttgacacaaccgaaactgtccattgcgccttcgtctctcacactgtgttgccctgtttgtgcgcgtgcgtgtgtgcagaggaagaggtatgggctgctgatggcggctgccctcctggaaggcgcttcggtcggacccctcgtcaagctcgccgtggaatttgacccaagcatcctggtgacggcgttcgtggggactgccatcgcgttcgcgtgcttcaccggcgcggccatggtggccaggcgcagggagtacctctacctgggtgggctgctctcgtcggggctctccatcctgctctggctgcagctagccggctccatcttcggccactccgcaaccagcttcatgttcgaggtctacttcgggctgctcatcttcctgggctacgtggtgtacgacacgcaggagatcatcgagagggcgcaccgcggcgacatggaccacgtcaagcacgccctcaccctcttcacagacttcgtggccgtcctcgtccgcgtcctcgtcatcatgctcaagaacggggccgacaagtcggaggacaagaagaggaagaagaggtcgtgagcgcgtcgagaagggaag

SEQ ID NO: 128506 - DNA, 297 bp, Zea mays
  Clone ID: MRT4577_48669C.1
tcgttggagccctatcccaatgtcgttcgggctttcaacaactgctacatctctcgcgagctgagcgctttctttcccgggcatcatgcctcctgttatgctgttgaatatgcatctaacatgagtattcttaatggcttgtggcttcaagaagcatcatcttcttggctatctgatcctgaggaatgtcatggtcaattatctccaaccctttcctgctgctcctggttagctgcgccatctccttcgccttgttcattacttttgtggcgccgtttgatacgattcttactcact

SEQ ID NO: 128507 - DNA, 432 bp, Zea mays
  unsure (1)..(432): unsure at all n locations
  Clone ID: MRT4577_4866C.1
ctgcagnnaattcgccccttnagcccgtggtccccgcggccgnaggntnncggccgnaggtaccaagccctttttttttttttttttttttttatttttttttttttttttttttttttttttttttttccctccccggtttgccctttttaagggccattccccccccactgccggccctcccaagcggacccaaggccggacccaaccctggcgaaagccgggcccagggggaccccggggggaaacaacaatccccccacaattccaaacacaaaaccacccgggaaaaaaaagggaaaccccagggggccccaaagagagagccaacccccataaatggctggccccccaccccccattaaccaggcggaaaacccttcatgcccggggcataaaaaaaccggccaacccccgaaaaaaggcggttcc

SEQ ID NO: 128508 - DNA, 206 bp, Zea mays
  Clone ID: MRT4577_48670C.1
cccactcgtccggtgacgaactcgaagcttgcgttctggtagtacaggtctgcagcaagcggtggtagagcgagaggtcgagaagatcaatagcatcactgtgtctgcgattctagttatccaggtcactctggtctctgatgacagctcctaaggacctgctggtctctctacgtattagctgggctgttgctgccagtgcacta

SEQ ID NO: 128509 - DNA, 529 bp, Zea mays
  unsure (1)..(529): unsure at all n locations
  Clone ID: MRT4577_48671C.1
acctctttgtttatcccctcccaccgacctacgcgatggttgatcttctattcggaatcgccttccgcgctattttctattactctatcgccattatccttgattgcggattggcaatacaggcgccgggatcacgtggatctttgaacgagtaatagttcgttgtgtagattctacctgctctctggtctgcatgacgacaagaacccctagctcccttacttagacagttcccaagttcctctacctgcaccacgctatatgtcgaattacagctctctggatgtcgaccttacgacgttccgatctggagacccagcttgtaccaaactgggctataagcgctttctgagcgaaatagatgaccatctctcttctattcctaacgtgcctcacgtacgcatagtatgcacagactcgagtgtctcccgtttgatctatctccactctactgcccatagctaactggccactattcagtcgggatgactggattgccacctgattcntgaataccctaacgcgcgac

SEQ ID NO: 128510 - DNA, 130 bp, Zea mays
  unsure (1)..(130): unsure at all n locations
  Clone ID: MRT4577_48672C.1
acgcgtccgttcaggccttcanagaaacttgcacaactggttgctgtgcaccctatggcgcactggcacacgaaggtgcttgcatgcaaacaacatgtggtgggtaacgattttgcgtacctacaacaac

SEQ ID NO: 128511 - DNA, 477 bp, Zea mays
  unsure (1)..(477): unsure at all n locations
  Clone ID: MRT4577_48673C.1
ctgaactgtgggttctctataagtggcattttgggctttccctcttttttgtaaagcaatgtctgcctagtttattgtccagttaactttagtgaccttttaaaagttggcattgtaaataaaacaacttgcaaaaaagttttctggaatagaattaacaaaatattatctttattcatgagttggaaactggaaaaaggcttcttgaagtaaatgttctgagtggagctactaggatgtcttccagcctcctgcagtcaaggagtaccactgtattgattagcctgtatgtagcagggctcccttcattgcatctgaggacttgttttctttttctttatttttaatcctcttagttttaaatatattgcctagagactcagttactacctagtttgtggttttttgggagaaatgtaactggacagttagcttttcaattaaaaagacacttaacccannnnaaaaaannnaaaa

SEQ ID NO: 128512 - DNA, 542 bp, Zea mays
  unsure (1)..(542): unsure at all n locations
  Clone ID: MRT4577_48674C.1
gggggggtttttaagaaaaggaagctcaggaaatagatgtccaccagataggttcagcggtactataacagacctaacggtatagaacctatgcgaagatttgtaaaatatggcaaaggtagcggttatcaactaaacgaacagatctgaaactaaaatcgtaccaggtctagttctatggaactaatcgggggcgccaaacttggtttaccactatctggtgtaacgtgcttcgccggcttcactactgggctcggcatattagtaccaataaggtgctttgtctgtggcgnatggtaccgacgtactctcctgcaatggccgcaaacnttttttattgggtgctgtgtaagcnnagtggggcccccttcccctacccccatggtcgctcatcggaaccgccctgcctccccctacttggcggccttggcccgtcgcccctacccgcccggccttggcgcgtctttccactccaccgctgcgctcctggcttaaacctattttgtaggttacgtgccacttgaggtactttttcctattac

SEQ ID NO: 128513 - DNA, 334 bp, Zea mays
  Clone ID: MRT4577_48675C.1
aaacagtcacgtctcccagatctaactccccccgactcacgaatcccagagagcctccatggcgacgcaccgccactgcctcccactcctcctcgtggccgccgccctcgccctcgccgccggccctgctcgcgccgcgcttggccggcggcccgggccggctgtgggccggttggaaccggatccttgcctgaaccaattggaccttccagaacctagccggtgggcccctgggccagccaagcccccaaagcctggccgccaccggctggcggttccgcgggttgtgccccgctaaccacaagtcctgttccggatgaactaccggctttta

SEQ ID NO: 128514 - DNA, 234 bp, Zea mays
  Clone ID: MRT4577_48676C.1
cgcacaacggcacgattccctcctccgtccgcgtagctctcggtttcggcgatgtcggggcgcggcaaggtcggcaaggggctgttcaagggctgcgccaaacgccacctgaaggtgctgcgcgacatcatccaggcataacgaaccggggatccgtagctgcccagagggcggggtaagcgcatttctgggctcatttacgaggagacccggggcgtgctcaaaatcttcctc

SEQ ID NO: 128515 - DNA, 366 bp, Zea mays
  Clone ID: MRT4577_48677C.1
aaactcaactttccggtcttatagctagaccgggaatctcacaacctaacaagggaaacgcgcttcatcaacagcaccatggggtccacagttccacacctgacccgctgaacccaactgcgaacgatccggggggggggggaggcccctctcagatcaccaccatcggattcatatccacaaggaacggccgcgaggagcactctaccatcgacccacggaggactgtcctgcagaccagatcacactgacctacgagagccgtccgcacacagcgaccataaccaccttggacgacgacccggtgcctgggcccaccttctcgctggcccttaccacgtccggcccagctgatcgcccccagag

SEQ ID NO: 128516 - DNA, 269 bp, Zea mays
  Clone ID: MRT4577_48678C.1
aattcttgaaggaatattctgccagagttgcatgagctgcacataactgatgtcgccaagatcatgacccattggagtgaaagtaaagccttcagagaggactactagaagagaattctcacatccttaaatagcgacaacgttacttgagatgtgcagatgaggaatcctgattatacgcccatatttatagagtcacatgctccagcttcagctacagcttcagaaccgatttcctgtaaaattgtctgcaaaacaagcctaggaag

SEQ ID NO: 128517 - DNA, 505 bp, Zea mays
  Clone ID: MRT4577_48679C.1
cccacttcacatgttgactggctggtcacagattgttgaggtgagttgggtttatgctcatttgcttatcatttgtgtaggttataaaattttatttgatgcactgatttctgtttatgagaaccaggttgctgtatcaagaaggatgtcattattcgaggactgttctcagctattgtttgagtgagtgatgcctgccttgatgcaaaatgaaaaactattgttttgataattgtactgatattgttttatgcagactgcttgatgcttcgttgaatgccacaacatctccagattgttcagtgaaaatggcatatgttttaactaatgtatcgttgacctgtatggcgaaactgcgggatgaaagattcatatgcccagctggtacagattctgatgcggttacttgccttgacattatttcgtcaaagcagctaccaaatgcagcttgtaactcattgttattcaagcttgtgatggcaacattaagaaatgaatcatctga

SEQ ID NO: 128518 - DNA, 235 bp, Zea mays
  Clone ID: MRT4577_4867C.1
tatgcactatatgaagcatagctttcattttatttcatcttcatcttcacataccattatatacttactacattctcagctacacttacacctcctcaaccactcactcgaaatatacgagaccaatattttataaaactaataaaaatcatttaaacaacagacgacccaaataatatatactttaccgaataatctttcctcaataacataactagtaatataaaacacattc

SEQ ID NO: 128519 - DNA, 327 bp, Zea mays
  unsure (1)..(327): unsure at all n locations
  Clone ID: MRT4577_48680C.1
ggccgcaaattttctttttttttttttgcttttttttttttttttttttttttttttgtttgctttgtgtcgaaaaaactatagggcttttatgtccccagacgctcgcggtgtggacccgtgtcggccctgccaaagcttcagaagaactggggtcctggccgcctgtcctccngggcgcntgcccggggggggggtggggggattgcgtgttcggcccggatgctccgctggggcgctttggccggctctttggcggggtgcgctgcccctgggcctgggcggggcgggggggggccgcggcggggggggcggggggcggggcgg

SEQ ID NO: 128520 - DNA, 271 bp, Zea mays
  Clone ID: MRT4577_48681C.1
tcggacgcgtggtcggacgcgtgggtctagaatgacgtatacgacaacgtctcgcacgccttcgtgaacatcctacgggacgagggcccgtctgatctttaccctgggcttacacccaccctgatcggcgtggtgccgtacgcgggctgtaacttctacgcctacgagacgcttaatcgggtctaccgtctcgcgaccgggcggcgtgcctgcgcggacgtgggccccctggcgacacttctcatctggtccgcggggggcgccatcttca

SEQ ID NO: 128521 - DNA, 367 bp, Zea mays
  Clone ID: MRT4577_48682C.1
aaacccacacaaacattggaaacccccaaaattttttcgcatcatcccaaggccagggggaccacaaacagttgggaaacacattgggagcaccacaacccaatacctgaaacaagaggaaatgaacccccttaaaagtttttaaccgcccttgggggccaagggatggatcaaacggacttaaaaatccttaaaccagccaagcgggatttatttttttgggtcacaaccaaccatgggtattcggggctcaatgggcccggagggttctcctttggaggctttgaaccaaaaggaacgggcagctgtttttcatttgccaaatggaccttgcaaaaggagcaaaccacccgggaattccggaccg

SEQ ID NO: 128522 - DNA, 166 bp, Zea mays
  unsure (1)..(166): unsure at all n locations
  Clone ID: MRT4577_48683C.1
tccgcatcccggtcgccccgcgttcgcagnttccttagggggtttggggcatagcgagatcaagctgcctcgggagcatgtccgagacggtcctgtgctgacctgcccctggcgccgggttcgcggctggtggggccgtctggtgctttttttttttttccttccc

SEQ ID NO: 128523 - DNA, 521 bp, Zea mays
  Clone ID: MRT4577_48684C.1
aaaaaaaaaaaaaaagaaaaaaaaaaaaaaaaaaaaaaaaaaaaagacaaacaaaaaaaaaaaaaaaaaaaaaaaaaatacaataaaagaacaaaaaattaaattactatggcacggcgacttacaacgaaatagactggagaaaaccctgaacattacccagggttgggcgcctctgcggcccttgccccctttcgccggcctgggcgtccccccgacctttgtccgcggttgggcgcctttcccatacaggccgcgcaccctgttttggttccatgggacggcgccctgtcggcgttggcattatggcgcggcgccttttggtggttacttcgcaccgtggcccgttgcggtgtgtccgccgccatagggcccggctccttttcgctttctccctatccctttctcgcttcgtttgcctggcttccccgtctagctctgtatcgggtttcccttgtgggctttgattgggtgcttccgttacctcttccccttaagacttgattggggcgctggcccaa

SEQ ID NO: 128524 - DNA, 199 bp, Zea mays
  Clone ID: MRT4577_48685C.1
acttgctgcactactctaaacaacagccgtatcatccgtgagggggctagctggagggaactctgcatattattagcaacaacaacaactgccattcagacagtaacctgttgcctacccctagcaaattttgaacattgaaccaatcaggcggcaaaagaactctcctagcttaagtacagctgcaacaactactacc

SEQ ID NO: 128525 - DNA, 352 bp, Zea mays
  unsure (1)..(352): unsure at all n locations
  Clone ID: MRT4577_48686C.1
cggcagcgggagggagggggggggggggggncnaccagaaggnggngcgcggggggaccggcgaagggcgacaaggagagcacgcncaagggganacgcggcagcgangcgccgngcggacnggaccnggacgacgcggccaccgnggcgggcggcgacgaggacaccgacggggaggggcgcgccaccgaggagcagcncgacacgcccnggaccgacaccgacgccagcggnaacaancngcnaaggganccccgnacaacaagggacnngcgaacacagagagggaacgngagacgcacaaccaccgnggccnacagccaccagcgaggggaacccaggagcaccagga

SEQ ID NO: 128526 - DNA, 419 bp, Zea mays
  Clone ID: MRT4577_48687C.1
ggcggacaatgactttctatatcatatagcgcgagtctttactaacttcgtttacgcgttcgatatttccttccatgctccatcgcgtcagtctcatctgggaaagccgccgcatatactccgctggtgtctaaggaccatttgtctgagcctgccaccattttgcctcagcgatgtcttacgccttcgtctggataggcagctccttggtctccttgtccgcctttggcttaggattaggattgcccccccagtgtaacttcctcggcttcatgaagctctccaggacctcatccgtaaccttggcgcgacgctcctgaaagtcgcccacaaccttctgtaacgcctcgatagccagcttctttagctctcctgtcaacagagcaccgttcttgtagtccttgggaagctgttcgagc

SEQ ID NO: 128527 - DNA, 805 bp, Zea mays
  unsure (1)..(805): unsure at all n locations
  Clone ID: MRT4577_48689C.1
ggtaacgccagttcagccacgtggagagggcagatccgagaagagccggcgcgatgagctcgccggcgaggtcgaccatctcggccgccgaagacgtcgctgattccatcgacgcgctctaccgcaaggacgaggccctggctgaactcaagtctgaggtgatggaggcgctgcagagggaggtgaggtctctcgacgaagacaactggatgttcgccgcaccgcggtcccgcatcaacctcgtctccaggcctggtgcttacctgcccaagcaaaacgggaagctctcagagttggggcaagcatccaagaaaacaaggaacttctagggtgtacatgcttgtgcttgcaagaagcctggtccatgactccatgatggtagtgaaggctgtagcatcaaggatgatttgttcatgtttcaaatcaatctggttgcttcctgctaattcaatttcagacacatgtaaggatttttcaagtgattgtgacttcaatgtcatgatatgcatgattgccactttagttggagacagcaaatacatcgataattattgaacaaagttatgttgtctttagttcttatgatcactggtattagaatacctttaattcggttgtaagttgaaaagcttgcaaattaaaattcatatcttaacataaaaatgttagaacatagatatgttctttttctgagctgtctttttgtatggcactgtcccatgcctcatattnactgtanatatttagtgatcttaattacttactcttagcctacgcctggttaacggaaaaggtcccggattcg

SEQ ID NO: 128528 - DNA, 634 bp, Zea mays
  unsure (1)..(634): unsure at all n locations
  Clone ID: MRT4577_4868C.1
gatctctctgtccttgggccttgggctaggaaggagctccggtggctgaagaggaaggacctgctggagacgatggccaagaacatacccgcaggagcgatccgtctgggctgccacgtcacggccatccacccgtcggatcccggcgcggtccttactactacaccggccggcggcggcggcggcgtcatcagagccaaggtgctgattggctgtgacggctccaactcggtggtggcgaagtacctaggcatgtccccgtccaaaccgactcctccgcgcacgtatctgcgtgggttcacgacgtaccggcacgggcaccccttcggagaccgtttcctgcgcctgaggggcaggcgcttcttcgtcgggcgctcgcccatgaccgacacccgagtcagcttcttcgtggcctgccacgtcccttctgctgccaccagcagcagcagcagggtggtcgacgcgcgcgacacgaggcatgccgtgctgcagaagctgcgagaccagcggtgccccgccgaggtcgtcgagatggtgcgggacgccgaccccgactcgctgaatgtggtcaccagggtgtggtaccgcccgncgtggcaggtcgcgctcgccgccttccggaagggcgccgtga

SEQ ID NO: 128529 - DNA, 174 bp, Zea mays
  Clone ID: MRT4577_48690C.1
ggggggggacaaaaccccaacccaacaggggggaacatggtaggttaaagcaggagccaaatgttaaaacagtattcggaagttcgaggaaactaggggggggggaatctgcccttcaggagttaaacatcctacaggggttaatgcaaaaaaggctacgttttttaaaaaccc

SEQ ID NO: 128530 - DNA, 793 bp, Zea mays
  Clone ID: MRT4577_48691C.1
gggagatccgagacgagccggcgcgatgagctcgccggcgaggtcgaccatctcggccgccgaagacgtcgctgattccatcgacgcgctctaccgcaaggacgaggccctggctgaactcaagtctgaggtgatggaggcgctgcagagggaggtgaggtctctcgacgaagacaactggatgttcgccgcaccgcggtcccgcatcaacctcgtctccaggcctggtaagaaggggaacacaaaaatagcaacagatggttttctgatcagttttttttaaatctgtctatatggcctgagtttaatgcttctgttcctgatgaatgagctgtgtacattccttatacgattgcgaccgattttatttgtaccccattggggggcatgtgtttatcaggtgcttacctgcccaagcaaaacgggaagctctcagagttggggcaagcatccaagaaaacaaggaacttctagggtgtacatgcttgtgcttgcaagaagcctggtccatgactccatgatggtagtgaaggctgtagcatcaaggatgatttgttcatgtttcaaatcaatctggttgcttcctgctaattcaatttcagacacatgtaaggatttttcaagtgattgtgacttcaatgtcatggtattgtttatgacttgtgcctttcctatcttctacaaactcaacctgcctagtttttcttacattcaaaaaaaaaaattttctttctgaacagatatgcatgattgccactttagttggagacagcaaatacatcgataattattg

SEQ ID NO: 128531 - DNA, 116 bp, Zea mays
  Clone ID: MRT4577_48692C.1
tctcgatccgctcgagcctgtccgccatcgtcgccaggctgccctggcggacggacaactagatcatgaacgtctggcacacgcatctcaagaagcggctgtagcccaccacctag

SEQ ID NO: 128532 - DNA, 140 bp, Zea mays
  Clone ID: MRT4577_48693C.1
gtcttgaaccaagatttaattttttttcttgattacatggaatgtcggaaacacaaatatgaaatctaccagcgaaaccaatgttaatacacaggttacaaggtctgcaacatctgcttcttgtgatggcacactaacta

SEQ ID NO: 128533 - DNA, 224 bp, Zea mays
  unsure (1)..(224): unsure at all n locations
  Clone ID: MRT4577_48694C.1
gccgaccacgcgtncggaaacggnaagacactttgtttccttcgtcttttcttaaaaggagcnctccacagtcacggggagtgctatattatttatttaagcgcgatccatcacgtatatctgacgggaaacactgcccctgtgagtcgaatctcactccctcttcagggacacgttccatctctctgcttcagtcccacacgttgcgatgcacgaggaagttt

SEQ ID NO: 128534 - DNA, 369 bp, Zea mays
  unsure (1)..(369): unsure at all n locations
  Clone ID: MRT4577_48695C.1
tgatggccgcagattgcaatcgccacagcaatcgtaccncttcactgcttctacctccgccagtctcatnccaagaacgagtggctgtggctggatcggtacacgccaaatatgtggcggctaatttcagaatgctcatgttcatgaatcatcatggaaatacatgtgagacctagtgtacatgagaagaaaggttatgtaaatttgcacatcttctctcctccgatgcataattatacatatgagggaggtgatgatgaataagaaatgtttattgaaatggtatggtttaggtgggagatgtatttaaaaaaaaaaaaataaataaaaggggggggggtgggaaaaaaataataaatttaaacttta

SEQ ID NO: 128535 - DNA, 1902 bp, Zea mays
  unsure (1)..(1902): unsure at all n locations
  Clone ID: MRT4577_48696C.1
tcgggcttcctcggcctcgagaagtcctcgccggctccggcgacccgtcctaccccggcgggcccctcttcaacccgctcggcttcggcaagaccgagaaggagatgaatgagctcaagctcaaggagatcaagaacggcaggctcgccatgctcgccatcctcggttacttcatccaggggctcgtcaccggcgtcggcccgttccagaacctgctcgaccacctcgccgaccccgtcaacaacaacgtgctcaccagcctcaagttccactaaaacggtggtgcatcagcatatctggtggcgcccccgccggcggcggtgatgttggcgggttcgcgccccggagctcggcccgacgggctcgttgatcgtcaacgagaacccccgtcgtcgcggcaggcgtcggccatcgcagtgccgcttctccttgcgcagctcctgaggtaccggtccggacctcccgggtttcgcgacgtaccggctttccgcgcctcttcttctgcgcccctctcctcccaaactgcggatagagcagcgagccatcgacacgatcgcgagcgcaagcacgtacgttgtcggaagctcaagttagaagaagcaccagtgcctgatcgatgggcggcccaggctctcctctccggccggcagctgctgggccgccccgtgcagtcggccgtctctaggtcgtcggcgaggaaggcgcccttcgtcgtcagggccagctccagccctccagccaagcaaggtgccgacaggcagctgtggttcgcgtccaagcagtccctctcctacctcgatggcacgctgcccggcgactatggcttcgacccgctgggcctctcggacccggagggcaccgggggcttcatcgagcccaagtggctggcctatggcgaggtgatcaacggccgctacgccatgctgggcgcggtgggcgccatcgccccggagatcttcggcaagatgggcatcatccccccggagaccgcgctgccgtggttcaagacgggcgtcatcccgcccgcgggcacctacaactactgggccgactcctacacgctcttcgtcttcaacatggcgctcatgggcttcgccgagcaccgccgcctccaggactggtacaacccgggctccatgggcaagcagtacttcctcggcctcgagaagttcctcgccggctccggcgacccgtcctaccccggcgggcccctcttcaacccgctcggcttcggcaagaccgagaaggagatgaatgagctcaagctcaaggagatcaagaacggcaggctcgccatggctcgccatcctcggttacttcatccaggggctcgtcaccggcgtcggcccgttccagaacctgctcgaccacctcgccgaccccgtcaacaacaacgtgctcaccagcctcaagttccactagaacgtggtgcatcagcatacctgctgctgcccgccgccgccagttgtttgctgtggaaagctagatgcatgcgtgttgtaaaggaacctgaagcgttgcatcggtcatgattcatgcatggccagcctgctgcctgtaacaacaaactagtattgatcttattgagaccggaaactgtattgcacatggtaaatcaatgtacaattcctccctagatgcggacaaatttctcctaaaaaaaaaaaaaaaaaaaggccaccaacaaaaaaaaaaaaaaaaaaagggcggccgccaccgcgaaattgctcttaagggcaagcatgnccttgggcttccccttggtggttgcccgtgggntgtntttgtngccgnngngngtntgccctctgtgtgtttgtcccccggtgntgcgcttggccgcttgtgtgctttgtgccccccccccccccccccncgnnnnnnnnnnnnnnaaaagcggcc

SEQ ID NO: 128536 - DNA, 1801 bp, Zea mays
  Clone ID: MRT4577_48697C.1
ctcgaggccggccgggaaaggtttcaaagtcaatttttcttttcatatctttcttttttttttcagaattccatttttgttcttccacccatgcaatagagagcgaatgagaaaagaggggttttcccttaaaaaatgggctttgaaatagaaatcatggaataatgctgaattcaaatgtttatttctttatttcttttctatagtataagaaaaatgaattaaatgaaatttgtggatttagcacgacctgggttgtgaccccatagataaaaatgcaaaatttctatcttcgagacgactgaaaaagggcattgaacgagaaagaaatcgtccacagaggatagagcagcagaggcagcgacacgatcgcgagcgcacgcacgtaagcacgtgtgtcggaagctcaagttagaagaagcaccagtgcctgatcgatggcggcccaggctctcctctccggccggcagctgctgggccgccccgtgcagtcggccgtctctaggtcgtcggcgaggaaggcgcccttcgtcgtcagggccagctccagccctccagccaagcaaggtgccgacaggcagctgtggttcgcgtccaagcagtccctctcctacctcgatggcacgctgcccggcgactatggcttcaacccgctcggcctctcggacccggagggcaccgggggcttcatcgagcccaagtggctggcctacggcgaggtgatcaacggccgctacgccatgctgggcgcggtgggcgccatcgcccccggagatcttcggcaagatgggcatcatcccgccggagaccgcggctgccgtggttcaagacgggcgtcatcccgcccgcgggcacctacaactactgggccgactcctacacgctcttcgtcttcaacatggcgctcatgggcttcgccgagcaccgccgcctccaggactggtacaacccgggctccatgggcaagcagtacttcctcggcctcgagaagttcctcgccggctccggcgacccgtcctaccccggcgggcccctcttcaacccgctcggcttcggcaagaccgagaaggagatgaatgagctcaagctcaaggagatcaagaacggcaggctcgccatgctcgccatcctcggttacttcatccaggggctcgtcaccggcgtcggcccgttccagaacctgctcgaccacctcgccgaccccgtcaacaacaacgtgctcaccagcctcaagttccactagaacgttggtgcatcagcatatctgctgccgcccccgccgccgccagttgtttgctgtggaaagctagatgcatgcgtgttgtaaaggaacctgaagcgttgcatcggtcatgattcatgcatggccagcctgctgcctgtaacaacaaactagtattgatcttattgagaccggaaactgtattgcacatggtaaatcaatgtacaattcctcccaaaaaaaaaaaaaaaaaagcgtaaggcgaaaaaaaaaaaaaaaaaagcggccggggactggtacctgctgccgccgccgccagttgtttgctgtggaaagctagatgcatgcgtgttgtaaaggaacctgaagcgttgcatcggtcatgattcatgcatggccagcctgctgcctgtaacaacaaactagtattgatcttattgagaccggaaactgtattgcacatggtctaaaaaagaaaaaaggaggaaaagaaaaccatcctaggcccaaatggccgaaactgaaaaaagatactgaaacgggaagatcaaagaatgccatcaacctgaaaagaagggg

SEQ ID NO: 128537 - DNA, 786 bp, Zea mays
  Clone ID: MRT4577_48698C.1
gattcacccgctcgtcggcgcgcgcgatggacggccggaagcaggtggtgctctacccgtcgcccggcatgggccgcctggtctccatgatcgagctcggcaaggtcctcgcggctcgcggcctcgccatcaccatcgtcatcgtgagcctgccgttcgtcgacaccagcgcgagggggcctttcctggccggcgtcaccgcggccaacccctccatctccttccactgcttcccgcaggtcgaggtcccgccgctcgactccgaccaccccgaggcggtcacctacgaggtggccggcctctccatcccgcacctccgcggcttcctcgccggcgcctcctcggccgtcctcgtcgtcgacttcttctgcagcatcgcgctcgacgtcgccgccgagcttggcgtccacggggaatcatcgtcaacaccttccgctcgctcgagccacgcgcggtggacgccatcagcgccgggctctgcacgcctcccggcctcccgacgccgccggtctactgcatcgggccgctgataaagtcggaggaggtgggcgtgaagcgcggccacgagtgtctggcatggctggacatgcagcccaccgccagcgtggtgttcctctgcttcggcagcctcggcgtgttcgacgcaaggcagatcagagaggtcgccattggcctggaggcgagcggcaagagttcctgtgggtcgagcggagtccgcccaacgacgacccgggcaagaaagttgaggagccgccggagccggacctcgacgctcttcctcccgga

SEQ ID NO: 128538 - DNA, 423 bp, Zea mays
  Clone ID: MRT4577_48699C.1
ttttttttttttttttttttttttttttttgactggtttttcatgtacgttcaattggccatggctcagaaaagtccaacctcagcacacacaaaaaaagagcttttttaacgctgcatcaaaatgggacccgacctgattcttgtcgcaatttaggaactcccaagtcctaatcctacatgttttgtttttccaaacctaatgatgcccagccaactactgctttttttttctcccccacggtaccgtaccgcgcgctatggatgatatgccaacgaaactgaataataatgcacagagagggcattgcagcccacaaattaacacatgatcgccagctcgccatgcccaactaatctcagaatcgctagtcctgctcccagctttcaagagatgtggaagacaggtttgcccgaacgatga

SEQ ID NO: 128539 - DNA, 755 bp, Zea mays
  Clone ID: MRT4577_4869C.1
gtggcggcattgggcgcctcgaggccgggcgggggagccaaaaaaaaaagaataaatcggaaaagcaagagacgccgaaaattcgaagggggaagaggagaagaggggaaagaagcaaatggcggagtccccgagcaagatcgaatccatgaggaagtgggtcgtcgagcacaagctccgagccgtaggttgcctctggctaggtgggatcagcagttcgatcgcatacaactggtcgcggcccaatatgaagactagcgtcaagatcatccacgcaaggttgcatgcgcaggctctaaccctagctgcattagttggttctgcatgcgtggagtactacgaccagaagtatggttcttctgggccaaaggtggacaagtacacaagccaatatctggcccattcgcataaagattaaggtccccatgttggttcatctcttggtgctcatgacccgcccgtggatgctggatgtttattctttttgtcttcttactttaaaaatggtgtacttgccagagaaatgataatgggggatataatgcagatattatcatcataatttagcgttatgttgcattgtctaaccgctctgttgactctcagcatcttcgaatattctttttatattttttgagaaaaggaaagaagatcctgatttgttgttagattattgtgtgtattagtgatgtaacgggccttggtctagcccaggtactcttatagatgaatgcactaacaaattgctgtgctac

SEQ ID NO: 128540 - DNA, 876 bp, Zea mays
  Clone ID: MRT4577_486C.1
atttaaatttgctggacaaacggatatatccgcggatgcgaatagtgttgggtatccataacgggccacgcgtccggatttcacgcgggaagaaaagaaaagtagcggcagcaacccgcggcggcgacgagtaaccaaccaggccacgccattgccaatcgcccgagccgccgagcaccaaggagccctgccttgcccagccacagagccctcctccttccccgtctcccgctgcgggctctctgaattcggcggtggttcatttgtccgcttcttctgagctccttctcggcgccgcgctatggaggagatgggaaagcgggcggtgcggacggtgcgggtgcggaacatctcagatctggcgacggagcgggaggtgcgcgagttcttctccttttccggcgaaatcgagcacgtcgacatcagatttgatacagtgtcgtcggggaggacggcctacgtcacattcaaagatcccaaggcgctcgagatcgcgcttctcctgtcgggagcaacaattgtggaccaaattgtgaacataacccctgctgaagattacatctacatccctgttactgaacaacaacttatggtccatgaggtgacaagtagaagttcagcttctaatgcagaattggagtactcctcagaggccaatgtcagtcccaatagccgtgtctatgtgagcaaggcccatgatgtcatgacaaatgtgattgcaaagggttcagcaatgagacaagcctttccccacgcagaattgaatatatagactagagcatatttacggctaatgcatcagcgaggatcaattccgtttgtaaacgtggtggcctttcggagaagaaaacaatgggatattcggtggcaatgaaa

SEQ ID NO: 128541 - DNA, 410 bp, Zea mays
  Clone ID: MRT4577_48700C.1
caggggcaacattatgaatgaatgggacgagctatggtacctcgcgcctacaggattgatcctcggacctaccaagatcatgaccatccaaggcgagcctggcgcagcgatccgtggcaagaacggaacaagaggcaatcaccgcgaacaagacagggcaggcactcacggaggtcatcatacgacgagccgatgacacgaaggtcaagcgcaacaatggtatacggaataggctcgaacgcattacctcacttgaacagggcatgtgactactacgtaccatatggaatgcatgtcgacaacaatggcatctagtttcgactttcaataatagtgacaccaaagcaaaggccttactggcggcggatctagattggctattctcctccacgccataagacatctagcaa

SEQ ID NO: 128542 - DNA, 712 bp, Zea mays
  unsure (1)..(712): unsure at all n locations
  Clone ID: MRT4577_48701C.1
agttgtgggcggctgctggcttctgaaagcagcgagnacgagagcgagaggccggccggggggcgcgcgccatggacgtggccgtggcgctctccttgctcttctgctgcgtcctcctgctggcctccggcgccatcgccttcctcctcatccgccacttcctggcctccggcgccgaggcgcgagcagcagcgccacgccatcgtcagccaccgccagcggccaaccagcagcagcagcgagcagcgtcaatagccgtcaagaaggaggaggaggaggcgccgcggcggctggcgtggcgggaggtggaggcgctgacaggcgggttcgacgagtccgccgtggtgggccgcggcggctccagcgcagtctacctcgccaggctccttgacggctcgcccgtcgccgtcaaggtgcaccgctggtgcggcggcgagcgccggctgcgcgccttccggcaggagctggacctgctccgccgcctccgacaccccaacatcgtcgcgctcctcgcctactccgacgaccacgaggaagaaggcgcgctggtgctggagtacctcgccggcggcacgctggcggacgcgctccacggcacggcgcccgccccgctgccgtgggcgcagcgcatgcgcgccctccacgacgtggcgtgcgcgttggagcacctgcactgcggcggcggcggcggcacctccaccgccgtggtgca

SEQ ID NO: 128543 - DNA, 384 bp, Zea mays
  unsure (1)..(384): unsure at all n locations
  Clone ID: MRT4577_48702C.1
ggaaaaaaaaaaaatcacggatagaatggctaccctcgtcgtcgactcactcacnccgccttcacgcctttttcaccaaataaggtaccgcccttttccgacattcacaggagggacaggaaatcagcggccatggtctcgattccggcgacgaccttcgccgacatcttatccgtcctcgtctgcgtagcggctgacaccgccgaagacaacgacctcctcgactacgtcatccagggccgcgtctactgagacaactgacgagtcgggctcgtgaccaatgcaaccgagtacatagcgggcagcaaggagaggttgttttgcaagcacccccgcaccgggaagctcgagcgctcctacgacggcttagacgacgggaacgga

SEQ ID NO: 128544 - DNA, 119 bp, Zea mays
  unsure (1)..(119): unsure at all n locations
  Clone ID: MRT4577_48703C.1
tgnacacgcgtccggtcgaccccgcatacgtacactccaagcgccaagccaccggctaccaagcctccaacgatcaagctgagcccgccgacgtacaccccttctcgcaagcctccgag

SEQ ID NO: 128545 - DNA, 1412 bp, Zea mays
  Clone ID: MRT4577_48704C.1
ctaatcactgtctgactcactgctatcgaaatcaattgcgtgtttttttgatgttgtggtctcattccaatcaggagctttacttccacccttgttcctagatccaggagatcgtcctctcttacgtccagcaaggctagccaaccgtaatctattttcctccattgacaaacatgtcctactgttgtgaccatcagcaattccacacttctggcattttctggtcattttctttgtaccttttgctcccaatttaataaccttttgttcactcccctttattgttcttcctttgggttttgagttatttggtcttgccaagcttatcccatcgactgcaaaatccagtttctttctagcatgatcactttgttcattgtcaccactctcattcatatttgcgtgatcctcttctaatggacgtatcggtataggtatttgaacattgcccacaccccgttcaagtatattagatacgtcttgaatttccttgttattcctttcatcgaattcaccatcctttttgatgtctctattgtcttcatcatcgtcctgtataccatctcctccactagttccacatgtctcctcaacttctatatctgtctccaaacgcgaaagtacctcgagaagctcatccattactgctagggctctatcatttcctgcggtatgttcccaatgtttgcattcacaagtatactttccggattcttcatcagctgtcactttgaattggtgttgtccccacacaattttcttcgatcttgttgtatgttgcactacccaatcatttgcacccccttcttggtcatgcattatcttgaacgcagttgcatatttcaaagactcctggaatttattcatcacggcccttgtgtatgctcttgcaacccttatctcaaacatatatagcgtgtttgtttccttttgaccctgtgtcgtatataattcagattagatgacacttatattaatatataaatatacttcataacagttttgtactcaccatgcttcccactgcttcttttgattctttcatcttcctattgtgtagaagcttcatcatttgcttggcgaattgatgtagcgggagtgtttgcatcgacatgtgcacttttcacaagcttgttcatgctttcgctacactgtgtggacaacattagcccacaataatcatttttttaaaaaggcaggcaccaatccttacgtattccatacatcttgttaagagtaatgttatcgtgtagatggaaatcttcaagcatcattgaccatgcagtctcgaactccaactcagtcaagggatgatgtattatagattggaaccttgtctttaaagtccatttcctcaaacctcgcatccaactcgtttaaaaaaaggtatatacctattttgcacatgccat

SEQ ID NO: 128546 - DNA, 701 bp, Zea mays
  unsure (1)..(701): unsure at all n locations
  Clone ID: MRT4577_48705C.1
ccggccgggaaaaaattccnnnnnnaaaaaaaaaaaaaaaaaaaaaaaaaaaaaaaaaaaaaaaaaaaaaaaaaaaattcatccccttgtatgatctctccgcatcgcatcgtggagactcactatccctccatcgccacacagtttaagtagccgtaccacaacaatgccatccgcaatcgccatcaagaagatcgacggcaagccaggcaaagtgtactacccgctggagaaaatcaccatcccagcgcctgccccaaaagataccgaagctgtcataaccctcacggccgctgccctcaagcaccgcgacctcttcatccgccaacacctctacccaggcacaaccttcggcgtcccgctgctcgccgacggcgtaggcgtcgtgacctccagtggcgcctcaagcaccgcacaacaatggctcaacaagcgcgtcatcctcaacccgggcacgggttggaaagacgcccccgacggcccggaagcacccaccggctacgcgatcctgggcggcacaaaggccaaccccgcaggcacgctggccgaacacatcgtgctcgacgtgagcgagctggaagagtgccctgcgcacctttccgacgccgaggcggcggcgctaccgctcacgggngctgacggcgtggcgcgcgcttgcgggtgaagtgcggcgagaacgcgagcgcggggcgcaacatact

SEQ ID NO: 128547 - DNA, 359 bp, Zea mays
  Clone ID: MRT4577_48706C.1
acacagtgttacaccgttacacgcacactgaaccgaagggcgggtgctcaccgccctgggcacacaccttcaaggacaactactatacccattcctatcagtactgcatatgtcaaccgaacaccagttccagcacaagaacactcaaccttggctctctgctggccatatcgatgcaacaacgcctatggggcataaccgccgcaaaccaactgaaagcaggaagagaccccgcgccggcagcagactaagcaaaggtcttgataggacatatataaggcgtgggacgactacctataccgccttcctaaagaagctgacaccctgacataatcaatggttcacgggtcggctttggg

SEQ ID NO: 128548 - DNA, 125 bp, Zea mays
  Clone ID: MRT4577_48707C.1
gaagtcatataaactgatgaaataaagagcagacttagtgtcggagactccgagttggaatcacatctacagttctgcaaaattttcatcaagggatatggagctataatctaatttttactgtc

SEQ ID NO: 128549 - DNA, 248 bp, Zea mays
  Clone ID: MRT4577_48708C.1
gttcaaggaagcaggcgtccaccatggtgaatgggcgcacggtacagcgcgtcatgctctacttacggatcaccatccttggatacaagaggttcaattcgaaccagtgctagaccacgtcactcgttcatatcgaggagttgaacaccaaagaagacttcgcgtgttacactgtctagcgcatggcttacatctacagggctaagaccaagagcagcgagacccgctacaggtgcatatggtgcaag

SEQ ID NO: 128550 - DNA, 972 bp, Zea mays
  Clone ID: MRT4577_48709C.1
aggggggactgcggggagctgaggcggctggggcccgaggcgctggccgcgcgtgaccgcgaggggaggacggtcctgcacgcggtcgccgcggccggcgaggccgaggcggtggcggtgctggtggacatgggcgccgacacgtcggcggtcgacgcgcgcgggaggactccgctggacgtcgcgcgcgacaagggataccaagaagtggtggacgtcctggaacggtgggagctggtgatgacggcggcgaggcgaggcgacctcgggagcctcgagtccctgctcagcaagcgcgccggcgtccgcgggcgcgaccagtacggcctcacggcgctgcacctggccgcgatcaagggacacggcgacgcgatcgcgctgctcgccgggccgggatgcatggacgtcgagtgcgaggacgtggaagggcacaggccgctccacctcgccgtcgagggaggccacgcggaggccgtggagctgctgctcgacatgggcgccgacgccaacgcccggaccaggcgcggcgccacgccgctccagatggcggaggccatggggtacgaggccatcgctcagctcctgtgcgcgagaggtgcggaggtggccgccgcgtcggcgttgtgcgccgcgtcgtcgtcttcatcgtccatatcgtgcgcctgatttgctgccggttatcggttgggagagactgttggacggacacgaaggcttgtttgtttccgctgctgctcctgctgtgcgtgagccgagagatgcctacagccgccgtggctggctttaaagtaagaagaagcgaacccgtccgaaattgtactgtactgtatagtggtttgttctgctttgttgggagagtagctcattgttgagacggtcgattgctatacgcggcgtgctggtggaaaaaaaacattcgctatgcaattgcagtgctttacatgttcctcaaaaaaaaaaaaaaaagggcgg

SEQ ID NO: 128551 - DNA, 284 bp, Zea mays
  Clone ID: MRT4577_4870C.1
accccggggggcattttaacaacgctgcacccacaagggcgggggggtttttttcctgggggccggtttggagcacaaaaaccaacatccggccaccatttattgacataaaaaccgaaacaaagcatgcgggataacatttaaaatgcttaattaaaacagcagcaatgggagttttattgaatacaccggggcgacaacaaaaacaattgtggggccgacaacaacgacaacacaaggtttactagaagataatttatcaaaatcgaggacgacggttctgg

SEQ ID NO: 128552 - DNA, 308 bp, Zea mays
  Clone ID: MRT4577_48710C.1
aaggactaaattattatactctaaatacatatacatatatagtattaacagagggatctgctggaaattgtaaggtataaaaatttatgatctatagcttgtgctgggcacaaccgcacgagctatatatgtagtttggttacctttttaatttgtggcagagatggcgaatttagttaggtatatacgtttgctttttgcaactttgcattgctatatggcaaattttgaagcatgtttatctgttgtactagctgaaaatgaattcgttttgtgctaacaatgtattcaataaatatctcgatttt

SEQ ID NO: 128553 - DNA, 760 bp, Zea mays
  Clone ID: MRT4577_48711C.1
acttccccgcgcgcgcctagctccagctcgtccctccgcgcggctctctgatgcccagcgacggccgcagtttctttcccgcgagctccctcctccagcgcgctcatctccctcaagctcctgcacgcagccatggcacgcctgcttcctggctcgcctgcgcgcgcgtcagctcccctctgctcgtcgcgcgcctgctccatccatggtcggctccttgcgtcggtctcccctgcaaactctctggcgcgcatctccctggcacgcctggctcgcccgtccgcgctccacctcgtcaatggccgccagttgaatctctctgtccctgctcggatggcgcacgcccctccctctcggctccttcctcttacttcccatgggcaccttcctcgcggggttcacgcagctcgtcgagtggtggacgaagcgcgccaccgcctgagccgaatcgagctgcagaaaccaccttgccatggcgacacagtccggccgtcgtgtgcccctgtagcgcgccctcgtcttctccccagcgtccggccgtagcccagctcggagtttcctccatccatctccagctcgtcgaatccccttgcttctccctccctatcctctgctcgcgcgctgctccagtcggccacgcgccgagctccctcgtcgcggcttcctgcttcctcgtcagcgcgcctctcccatggcgcttgcccagtctggccaccgtttgagttccctggtgcccccctcagctcacttgccacactcg

SEQ ID NO: 128554 - DNA, 344 bp, Zea mays
  Clone ID: MRT4577_48712C.1
aaaaaaaccaacagggttcgatttaaattatcaacggggggttttccgaatcctcccccaacgaagagcgcctagggcattgaaactttagccagacaaaacattggatgattttccctcaagcccaccacttccagctcctaaattatcagcgggggttcctccgtttccaacttccgaaacaaaaacaaaacaaagcccttttttggaccggatcccaaacatatgggccctaaaaaaaagaaaacccacgggccctagtcgctcattaatcattagggggttctaagggcccgggggccccaccaatctaaccccccctcattagtttagcaagggggccc

SEQ ID NO: 128555 - DNA, 268 bp, Zea mays
  Clone ID: MRT4577_48713C.1
ctgaaagcacaaaaagacaaaaatgtctgacagcgatgatgagcccatcaccctctcggcacatgccctcgcggcgctcaagtcgtttgaggcagagagagacgagcaccaggcaaagttccagaaactgaaggacgaggcggagagcaacagcttgctgtccatagatacttttcaagaggactggaatgagtctcagttttggtattctgaagaaactgccaatactttggcaacggagctgcttagagatgcgacaagtgacatg

SEQ ID NO: 128556 - DNA, 596 bp, Zea mays
  Clone ID: MRT4577_48714C.1
ccagcgattccgatctgattggcgtggtgcagcagaactgcgagaactcaaaagggcgacggagcacatacctgcaggctgcactctgcagctagggctggaaacgagccgagccaagctcggctcagtcgcattgcgagctcggagatcaggctcggcttgttcaggctcgcgagccaccacacgtaagtccaatttagagcataaattgtatattttgattatatataaaataaaaatatgtaccaaaaatgttggaacatattttaaactatatatagcattaggtccataaaaaataaggaaataaatcaataacatagtcatataatagtgtcacaacataagtactacatgagttgtctggctcacgagccggctcgggctcggctcgttgtttgagcgagtcacaaaagtaggctcggctcgggctcgcgagcctctccgagccaagcctgagagagcccgagccgcctcgcgagcctcaagcttttttttccagccctatctgcagccaagttctggcagcagcaagggaggatatcagtccatcaaagagcagagagtctttcccttggaacacagacgcaaccagg

SEQ ID NO: 128557 - DNA, 739 bp, Zea mays
  unsure (1)..(739): unsure at all n locations
  Clone ID: MRT4577_48715C.1
ccggccgggtttccatgccgacgagctggctgggcttttggtgggtattcaagacaagtttgagattgaaaacttccaagacttgcgggtgcaaggcatggtggcgttggtgatctcccagcccaagacaatggccccttggttggcacgcacgttcttcgaaggcgattactccctctatcagcgaacgtcagttctcattacactgggcttgtcagctcgagaactggccggctttgcgacttcacagtacgagtcggctgctgcctttccatcaaagcggcttcctgaaaaaatggagcagctatacattggcccttcaggcgagaacaaggcactgccatcttctcaactgaaagcacttccagcaaatgctctcgacagtatttcgcagtcactaacatcagaattcctcgctccactagctgcagaagctgctgatgcgaatacagggcctgatgttctgaagcttcagacattcaccgctcgttacaagtccaagaccaaggctaaaccctcgcgtccgtgctatccccaacacgacagctgcccttctcgctacatctttcttctcgccgctcgctgctcacttccaagttgctcttcgctctgcgaaacccatcattctcaaccacgcacttctggcgctttatctacaaacactgggtatcatcgntcatgccgcaggaccttcgacactttccctgccgcaacttacatnctgaactgtgggatttgc

SEQ ID NO: 128558 - DNA, 264 bp, Zea mays
  Clone ID: MRT4577_48716C.1
cggacgcgtgggcggacgcgtgggcggactcgtgtgcggcaacggatatctcggctctcggatggatgaagaacgtagcataatgcgatacctggtgtgaattgcagaatcccgcgaaccatcgagtttttgaacgcaagttgcgcccgaagccttctggcggagggcacgtctgcctgggcgttacgccaaaagacagtgaaaaataaatttgagatttcaattacaatttagatcaaataatatagtaatataatatgtgtc

SEQ ID NO: 128559 - DNA, 265 bp, Zea mays
  Clone ID: MRT4577_48717C.1
gggggtatgacacgcaaattatattgatccttttaagcaatatttatagttttaccaccattttgaaacattatatcgccaggactaaatattggggcgcccaaaaacatacttttaacaagaggtaattcaataaagccccggaggcggaacctagccgactctacaaaagggcagacttaaaacaccctgggtggcttgcccaagggggtgttgcacctcaagcattttacattaaaaaagattttctttagaagggaaacaa

SEQ ID NO: 128560 - DNA, 522 bp, Zea mays
  Clone ID: MRT4577_48718C.1
aggcgcaccggcggtcgagtcatggaagagaggcagccggcgacgcagcacgtctggctccagccggtggagctacgacgacgaggacagcggcgacttcgttgcgcacgtggtgtagttgtcggttcggacagtatatagctagctactgggcgtctggctgctgcaagcagctcatccatggaggaattttgcagaggtgccgcgccggcctctaccgagcggcggcgagaaggcccatgaagcccgaccccgcatgggcgccgcgcaacgcaagaacaaaccacgaagtgctttggttcgcgtcctgccactactgcgtgtaattacgccgtgtatgatgtatccagtgtttgaccggcgccggcggtaaaccagtttaattgacgaactagctgcctcgctgtagatggtgtaccggtgcagcttgcagatacaggatgttgagtcgcttttcggttttctgaaactgaaagactgaaacttttggccactctttggggattcagaaaacttgagacc

SEQ ID NO: 128561 - DNA, 529 bp, Zea mays
  unsure (1)..(529): unsure at all n locations
  Clone ID: MRT4577_4871C.1
cccacgcgtccgcggacgcgtggggaacaggctcaaggccatgccgcgcgtcgacagcgagggcgccatgtgcggcgccaccttcaaggtcgacaccttcaccaagatcaactccatgccccgtgttggcagcgccgccaactgggccgcctgggacgaagccatctagtagatctagccactgcgctgcctgcaatccgttcgccggtgcccctgcctgcccctgcccgtggtctttatcatgcttccagccacgagactttgcttctaaaccagaggctccatctgtgtgccgccttgttttactagaaatcctttttttttattttatcctttttcacttttcctccctagttttttccttatccgggcattgtacaaataatttctccagtgcttgtagcttgtggacttgggttgtccaacatgtcatgaatacaaactgagtttgtttcccccaaaaaaaaaaaaaaaaaaaaaaaaattaaaaaaaccccaacacccctaaaaaaaaaaaaanaaagggcgg

SEQ ID NO: 128562 - DNA, 420 bp, Zea mays
  unsure (1)..(420): unsure at all n locations
  Clone ID: MRT4577_48720C.1
cccacgcgtccgcccacgcgtccgggcacgcgcgggtacctggcccccgagtggtaccgcggcgccgggcccgtgacggtgaaggcggacgtgtacagctacggcgtggtgctgctggaaatcgtgacgtgccggcggagcatggagctggaggaggcaggcgaggagcggacgctcatggagtgcgcgcacgagtggttggtgcgcggcgaggtgtggcgggtggttggcggcgacgatgccgtggacgtcacggaggtggagcgggcggttaaggtggcagtgtggtgcgcgcangcggagccccaggcgaggcccgacatgaggagcgtcatcctgatgctcgaaaggctcgtggaggtgccgttccccccgccgccgccggcgttcttgtgatccccagataccggtgggggattg

SEQ ID NO: 128563 - DNA, 472 bp, Zea mays
  unsure (1)..(472): unsure at all n locations
  Clone ID: MRT4577_48721C.1
ggtccgagctcgaattccgttgctgtcggcggtccgttctttcgcacgctattcttggagaggttcactgtgtatccgctatccggccaccgggcgcaagcttcgccaccttcgaggacaccaagttgagcgcgtagacaagtgcggcaagggtgtcctcggcggcgggcatgacgaagctctcggatatgacggtggagcgctacgatctgtggggcgtcctcggcggcgggtacctcacacaggcgcaaggccggttcgttggtttcgcagtccttcaaccccggaccccaggtgtcgacctgggcgaccgtccaagagggccatgatggagatcagaccgtgtacatgcgccacgaggaggccggaaaaggcgcttcctggacgcgtgcatcgncgccaccggagttctccaggcaggccacgtacttgngacatccgatgtgggcatgtgaatattgcttctggcact

SEQ ID NO: 128564 - DNA, 672 bp, Zea mays
  unsure (1)..(672): unsure at all n locations
  Clone ID: MRT4577_48722C.1
caaaagcaagcgaagcatcgccagattggtatatcgatcgattgatcggtggcggaggaaggggaggacggggggcagatggcggcgtgccggggcttcttcgagtgcctgctcaggctgctcaacttcatcctcaccgtcgccggcctcgctatggttggttacgggatctacctgctcgtcgagtggatgaagatatccgaggacggcatcggcggggcttcgacggcggaggtgctcgtctctggccggccgttgttgggggctgtcattctcggtgacagcttcctcgacaatctacccaaagcatggtttatttatttgtttattggtgttggcaccatcgtcatcttggtgtctctgtttggctgcattggagcagggacaagaaacacctgctgtttgtgtttctatgctttcttggtcatattgttgatccttgctgaagctgcagctgctgcattcattttctttgaccatggctggaaagatgtaattccagtggacaaaacacataactntgatgttatgtatgactttctgaaggaaaactgggagattgcaagatgggtcgctctgggcgttgttgtttttgaggcagtgctcttgctgttagctctggctgtcaggcaatgaacaaactgctgagttgacagtgatgacgaattatag

SEQ ID NO: 128565 - DNA, 586 bp, Zea mays
  Clone ID: MRT4577_48723C.1
cacgcctgcagtgtaccgggcacggctaatacacggccgacccacgcgttcggtttatgctgccaaactccctgataccggatggactaacgacggagcccacagcgagtaagagccgcgagctcacaagcagtcatgaggaacatgaccggacgcagctcctcgttgtttaccaacatgggacctagctgcgagaagcgacaccacataactaccggggtagtcgctcatgactgatgctgccaggccggcgggctcattgctaatgaaccgactcacagtgagcacaacctggtggagtgcgctctactgtacctgacacataatctcaagataaccagaatcctggataccatgcaggaaagcaaacacaatctgaacagtgcacaaacaattactttccttggtctcgaatgcctatagctacgaaactaatatgaggcccactatggacactgtatttgctatcctacaagagctccaggactctgaatatagccgagcagaagcttgaagaacacaagagcccaaccaaacaggaacctgctgaccgtgagtgctagcattagcagaaggcgcaagcctc

SEQ ID NO: 128566 - DNA, 163 bp, Zea mays
  Clone ID: MRT4577_48724C.1
tccactcgtccgcctacgtacacgaggtatcagaggctgtcagcctaatgatattaagcatatgatatctacagcaccattaacggctgatggaactgcgatcgctgcgagtaaagataatacagctgcagcaatcatatgatgttgatattagaaatctgaa

SEQ ID NO: 128567 - DNA, 260 bp, Zea mays
  Clone ID: MRT4577_48725C.1
ggcatcagcctcgtgagttgctcgcccccatctctgaacgcagaggctcagccagcagcggactctgcctccacctccgcgcgaacgcctccctataaaaagcgcccccgccgccgcagcgcgaccggaaggacgcaaccacacagctggctgctgctggggcctcggcgggacatgaggcactaccgccgacgggggcggaagactacggggcgcgggtggggcatgatcgcgcagccctgcggtgtagaagctgaacg

SEQ ID NO: 128568 - DNA, 1774 bp, Zea mays
  Clone ID: MRT4577_48726C.1
cccgtcctcctgtccttcttcccctcacccacgcgcgggaaattcggcgcgattcgggcggtattagttggaattcccctgagaatcggagcgtttttttggacttggtacaaacagcaagcgaagcatcgccagattggtatatcgatcgattgatcggtggcggagggaggggaggacggggggcagatggcggcgtgccggggcttcttcgagtgcctgctcaggctgctcaacttcatcctcaccgtcgccggcctcgctatggttggttacgggatctacctgctcgtcgagtggatgaagatatccgaggacggcatcggcggggcttcgacggcggaggtgctcgtctctggccggccgttgttgggggctgtcattctcggtgacagcttcctcgacaatctacccaaagcatggtttatttatttgtttatttgtgttggcaccatcgtcatcttggtgtctctgtttggctgcattggagcagggacaagaaacacctgctgtttgtgtttcgtatcctgttatgtgcctcttcggcgtcattatgttgtcctctctaaagaagattccatttgtcatgcacaagacactaaaaagtacttggaattatgctcaacattaattccagacgggatattattagttgctgaacatgtgaaccaacaaaattttgtttctgtgctactctgaacgctgatcttaattcttatagaacagcagtagcagaggcaataagattatcactatttctgcagcccaaaaaacgtttcgtccaaggcacttggcattttataatgatagggtcacagtattacacgcttgtttccttttacttgtaaacaagtatgctttcttggtcatattgttgatccttgctgaagctgcagctgctgcattcattttctttgaccatggctggaaagatgtaattccagtggacaaaacacataactttgatgttatgtatactttctgaaggaaaactgggagattgcaagatgggtcgctctgggcgttgttgtttttgaggcagtgctcttgctgttagctctggctgtcagggcaatgaacaaacctgctgagtatgacagtgatgacgaaattatagcaattggccgaagccctaccatccggcagccactgatccatacccaaaatgttcctgccactggtgttcctgtcccaacacttgatcaacgtgcaagtagaaatgatgcctggagccaaaggatgcgagagaagtatggtctggacacgagccagttcacatacaacccttcagacccaagcaggtaccagcaaaatggcacgccacgggctgaagaaaggagtcgatgcactataatgtgaagaattcttcatgaggtcctacgagataatagactttcttgaaggggctactgtagtttggtgttaccagtgttgttcagactttacacagcggtgtgtggaatagaagaatcccgaccatattttttgtcacgctcgatatgacttctcagcaaatgctctatgcacctaattttactgtgaatgaggaactgctagccgttgacatcatctattttgaattttttgggggtttgtttcttgttggcaatcagcccccctttcatccttctacgtaagttccagattgtcactccgtttgatttagatgctttactcaaatgtgtgtaagatttggttgtgacgtgaagtgagatgggaatgggagaatctattttgctttcaataagaatcaagatgtctaaaagagtaaaac

SEQ ID NO: 128569 - DNA, 1449 bp, Zea mays
  Clone ID: MRT4577_48727C.1
ccacgcgtccgcaacccgtcctcctgtccttcttcccctcacccaccgcgggaaattcggcgcgattcgggcggtattagttggaattcccctgagaatcggaccgctggcgtggcctcgccagattggtatatcgatcgattgatcggtggcggagggaggggaggagggcggcagatggcggcgtgccggggcttcttcgagtgcctgctcaggctgctcaacttcatcctcaccgtcgccggcctcgccatggtcggctacgggatctacctgctcgtcgagtggatgaagatatctgaggacggcagcagcggggggttgacggcggaggtgctggtctccggccggccgttgttgggggctgtcgctctcggtgacagcttcctcgacatgctacccaaagcatggtttatttatttgttcattggtgttggtgctactgttttcctcgtgtctctgtttggctgcattggagcagggacaagaaacacctgctgtttgtgtttctatgccttcttggtcatattgttgatccttgctgaagctggagctgctgcattcattttctttgaccatagctggaaagatgtaattccagtggacaagacacataactttgatgttatgtatggctttctgaagaaaaactgggagattgcaagatgggttgctcttggcgttgttgtttttgaggcagtgctctttctattagctctggttgtcagggcaatgaacaaacctgcggagtatgacagtgatgatgaaattattgcaattggccgaagccctaccatgcggcagccattgatccatgcccaaaatgtgccggccaccggtgttcctgtcccaacactcgatcagcgttcaagtagaaatgatgcctggagccaaaggatgcgagagaagtatggtctggacacgagccagttcacgtacaacccctcagacccaagcaggtaccagcagaatggcgctccacaggctgaagaaaggagtcgatgcactataatgtgaagaattcttcatgacgtcctacgtcataatggttttcttgaacgggctacctcagcttgtgtagtttggtgttgttcagacttcatagctgtgtgtgtggaatgcaaaaatcccgaccatattgtttgtcacgcttgatgtcttctctgcaaatgttctatgcacttgtaattttaccgtgaatgacgaactgttagccattgacatcatctattttgtattttaggggggttgtttcttcttgccagtcctaccattttcatgtagctctgtttaatcatgatgctttactcaaatatatgtaagatttggttgtgccgtgaaaaaaaaaaaaaaaaaaaaataaaaaaaaaaacaaaaaaaaaaaaaaaaaagcgccgccgtcgccgcctcgctttctcctcttccgccccaccccggtgaggcgctgat

SEQ ID NO: 128570 - DNA, 2496 bp, Zea mays
  Clone ID: MRT4577_48728C.1
aaaaaagatttagaaacggaagaacccgcagcaagcgaagcatcgccagattggtatatcgatcgattgatcggtggcggaggaaggggaggacggggggcagatggcggcgtgccggggcttcttcgagtgcctgctcaggctgctcaacttcatcctcaccgtcgccggcctcgctatggttggttacgggatctacctgctcgtcgagtggatgaagatatccgaggacggcatcggcggggcttcgacggcggaggtgctcgtctctggccggccgttgttgggggctgtcattctcggtgacagcttcctcgacaatctacccaaagcatggtgagatggtttccttgcctgtggacttttttttctgatgtatcaatactggtttcgtccatgtgatgtcgccattgattatgattttggattgagaggaactgcaaggtttgcttagtaggggtggcaatcacaactgtgaatgtgtgaaatatgcaattgatagccaaaacacgcagttccaaattgcagtctgacgaagcatttgttactcgcctttagattattggtgagcatgttgggtagggggtaaattatgtgtggatttgaatgttccaagtatcattgactctttagtttggcaactgtgggttttctctgtttgtttttactgccaaggtgattgtgtttcatatttaatagcctctgttccctgcaggtttatttatttgtttattggtgttggcaccatcgtcatcttggtgtctctgtttggctgcattggagcagggacaagaaacacctgctgtttgtgtttcgtatcctgttatgtgcctcttcggcgtcattatgttgtcctctctaaagaagattccatttgtcatgcacaagacactaaaaagtacttggaattatgctcaacattaattccagacgggatattattagttgctgaacatgtgaaccaacaaaattttgtttctgtgctactctgaacgctgatcttaattcttatagaacagcagtagcagaggcaataagattatcactatttctgcagcccaaaaaacgtttcgtccaaggcacttggcattttataatgatagggtcacagtattacacgcttgtttccttttacttgtaaacaagtatgctttcttggtcatattgttgatccttgctgaagctgcagctgctgcattcattttctttgaccatggctggaaagatgtaattccagtggacaaaacacataactttgatgttatgtatgactttctgaaggaaaactgggagattgcaagatgggtcgctctgggcgttgttgtttttgaggcagtgctcttgctgttagctctggctgtcagggcaatgaacaaacctgctgagtatgacagtgatgacgaaattatagcaattggccgaagccctaccatccggcagccattgatccatacccaaaatgttcctgccactggtgttcctgtcccaacacttgatcaacgtgcaagtagaaatgatgcctggagtcaaaggatgcgggagaagtatggtctggacacgagccagttcacatacaacccttcagacccaagcaggtaccagcaaaatggcacgccacgggctgaagaaaggagtcgatgcactataatgtgaagaattcttcatgaggtcctacgagataatagactttcttgaaggcggctactgtagtttggtgttaccagtgttgttcagacttcacagcggtgtgtggaatagaagaatcccgaccatattgtttgtcacgctcgataaaaaaaaaaaaaaaaaagcggccgcacctaattttactgtgaatgaggaactgctagccgttggcatcatctattttgaattttttgggggtttgtttcttgttggcaatcagcccccctttcatccttctacgtaagttccagattgtcactccgtttgatttagatgctttactcaaatgtgtgtaagatttggttgtgacgtgaagtgagatgggaatgggagaatctattttgctttcggtcctagattttcttgaaggggccgtttgtaccatcagtaaaaatcccgcccttccccgacttagcaaatcaattttcttgaatgaggaaccgttgacaaatttgtttttggggttttttaaaaaaaaaaaaaaaaaaaaaaaaaaaaaaaaaaaaaaaaaaagctctggctgtcagggccatgaacaaacctgctgagtatgacagtgatgacgaaattatagcaattggccgaagccctaccatccggcagccactgatccatacccaaaatgttcctgccactggtgtccctgtcccaacacttgatcaacgtgcaagtagaaatgatgcctggagccaaaggatgcgagagaagtatggtctggacacgagccactttacatacaacccttcagacccaagcaggtaccagcataatggcacgccaccggctgaagaaaggagtcgatgcactata

SEQ ID NO: 128571 - DNA, 3704 bp, Zea mays
  Clone ID: MRT4577_48729C.1
tccagatgcgcttttggttataattcatagcgcaactcattagctatatgctggtagtgagggtgctaacacaagctgatggtttaaaatattttctcttgctctagggtgagattatgaaggtttatgccaatgatcaaataaaaacatgtgttgagtttccagagtgttttgtatgtaagtagtgcacattatattttcttttcatttttgcaccttgtatgttttaaaatttaaaaatgattgggtatctgagctccatgccttctatagaagattgctggtcaaacatgagctgttagtgagagaggaattctgcccgacaaaaaaaccagaaaaaaattagaaacggaagaagaacagcaggcgaagcatcgccagattggtatatcgatcgattgatcggtggcggagggaggggaggagggcggcagatggcggcgtgccggggcttcttcgagtgcctgctcaggctgctcaacttcatcctcaccgtcgccggcctcgccatggtcggctacgggatctacctgctcgtcgagtggatgaagatatctgaggacggcagcagcggggggttgacggcggaggtgctggtctccggccggccgttgttgggggctgtcgctctcggtgacagcttcctcgacatgctacccaaagcatggtttatttatttgttcattggtgttggtgctactgtcttcctcgtgtctctgtttggctgcattggagcagggacaagaaacacctgctgtttgtgtttctatgccttcttggtcatattgttgatccttgctgaagctggagctgctgcattcattttctttgaccatagctggaaagatgtaattccagtggacaagacacataactttgatgttatgtatggctttctgaagaaaaattgggagattgcaagatgggttgctcttggcgttgttgtttttgaggcagtgctctttctattagctctcgctgatcgcagagtggtatatcgatcgattgatcggtttaagaagaaattcaaaaggaagaagaacagcaggcgaagcatcgccagattggtatatcgatcgattgatcggtggcggagggaggggaggagggcggcagatggcggcgtgccggggcttcttcgagtgcctgctcaggctgctcaacttcatcctcaccgtcgccggcctcgccatggtcggctacgggatctacctgctcgtcgagtggatgaagatatctgaggacggcagcagcggggggttgacggcggaggtgctggtctccggccggccgttgttgggggctgtcgctctcggtgacagcttcctcgacatgctacccaaagcatggtttatttatttgttcattggtgttggtgctactgttttcctcgtgtctctgtttggctgcattggagcagggacaagaaacacctgctgtttgtgtttctatgccttcttggtcatattgttgatccttgctgaagctggagctgctgcattcattttctttgaccatagctggaaagatgtaattccagtggacaagacacataactttgatgttatgtatggctttctgaagaaaaactgggagattgcaagatgggttgctcttggcgttgttgtttttgaggcagtgctctttctattagctctggttgtcagggcaatgaacaaacctgcggagtatgacagtgatgatgaaattattgcaattggccgaagccctaccatgcggcagccattgatccatgcccaaaatgtgccggccaccggtgttcctgtcccaacactcgatcagcgtgcaagtagaaatgatgcctggagccaaaggatgcgagagaagtatggtctggacacgagccagttcacatacaacccctcagacccaagcaggtaccagcagaatggcgcgccacaggctgaagaaaggagtcgatgcactataatgtgaagaattcttcatgacgtcctacgtcataatggttttcttgaacgggctacctcagctttgtagtttggtgttgttcagacttcatagctgtgtgtgtggaatgcaaaaatcccgaccatattgtttgtcacgcttgatgtcttctctgcaaatgttctatgcacttgtaattttaccgtgaatgacgaactgttagccattgacatcatctattttgtattttctgaggttgaggccggggtcgggcgaggacgcgattcctcccgaggtcgaggttgaggccgagccctggggtcaggcgaggcggagaccaccttccgaggtcgaggttgaggccgagccctggggtcgggcgaggcggagaccatcttccgaggccgaggtgggggccgagccctggggtcgggcgaggcggagacttcctcctgaggccgaggcccaaggtcgggcgaggcggagcttcctgttgcgcctgaggctggactcagctgctgtcagcctcaccctggcgggtggcacagcagtcggagaggggcgagcggcgctgttctcctgtcaggtcaggtcaggttctgagttttcaggctggtttgttgacgctgtcaacggtttggccgtagccgggattgcgagagcagccctcgagcctctgcacggagcgagaggacgatcaaggactgactcgacttttatgatacgccccttcgtcgcctttccacaaggaggaaggggggaaagcgccatgttgccctcggagggcgccgaacatggtgtctccagggtgcaaaccatcctccagctctgcggaggaggcgtcctccagccatgcggggggaaggcgaactgctgctgcctggccagggtgcagcattccgtcctccatccgggcgactatggccggctgcaccggggggtcgcacaacacgtcgtacgccgcgagggcagtactcgtgttctgagacggtcccgttctcgttcttgcggtgagaacgggagtgaggacctgccggtgcgctttggggcggccgatgctcgctggtgcggtgttggtgggcaggtggctgccgtcgtcggtgctgaggtggtggcagccagagaaggtttctccgccgacgagatcgtcggcgccacctgtggtcggacctccggctcttcggccttggcggcttgtcctcgcccctcgtgtggggacgtgggcgagggacctccagcagcagcgtttgccctgatgccgtcgctgcagctgtcttgccgtccgagacggaggtcgttgacgctgctgcagtggtcggcggcgagccacccggagtttgtcgtcctgcaggccctccgatgtggaaggttgttcatacccgtgggagtggaaccagagttccgtttgtaatggcgccttgagtgccggtaaggtgacaagtgaggtatccgtatcccggaggcgtaggagtccctcggctcggtcggccttaccactcaaggcttctcttgctcagttacggaaccctcggctgctctgcgatgagccggagccggaggcagcggtgtcagcgtggtcagaggcggagtcggctcgagaagaggcttcgtcggcccaggggcacgtggcttccctagccgaggaggcgcagcagcgacggctagagcctggccaggtcatccgtgagcgggaccaacttcggagtcacgctgccgaggccgtgagccggtgtcacacccggtttttgaagtggactagctttatgtggagttaa

SEQ ID NO: 128572 - DNA, 1367 bp, Zea mays
  unsure (1)..(1367): unsure at all n locations
  Clone ID: MRT4577_4872C.1
aaaaaaagggactacctttcgaggccggccgggccattccatcgcattggattgcattcccatcccattccccactctactcattcagcagatcccgtcactcgctctccacaagcagagcaccgcagcagaacgaggaaggatgctggccatcttccagaagcaggtggcgcacgcgccgcaggagctcaacagcccccgcgccggcgcgtcgcccagcaagccccggaaccccgacgagatcctgcgcgacttccacgccgcgcacccggccgccgccttctccgcctccttcggcggcggcgccgcgctcgcctgcgtcggcccctcctccgccaccgccgccggcaccggcaccgacacctaccagcggatgttctgcggcctggacgacatctactgcgtcttcctgggccgcctcgacaacctcagcggcctcatccgccagtacggcctgtgcggccgctccaccaacgaggcgatgctggtcatcgaggcctaccgcacgctgcgcgaccgcgggccctacccggccgaccaggtcgtcaaggacctcgccggcgccttcgccttcgtcgtcttcgacagccgctccggcgccgtcttcgccgccctcggcgccgccgacgccgggggagtgccggtgccggtgccgctgtactggggcgtcgcggccgacgggtccgcggtgatcagcgacgaccgggacctggtcaagcgcggctgcggcaagtcctacgcgcccttccccgcgggctgcatgttccacagcgacggagggctcaagagcttcgagcaccccatgaacaggctcaaggccatgccgcgcgtcgacagcgagggcgccatgtgcggcgccaccttcaaggtcgacaccttcaccaagatcaactccatgccccgtgttggcagcgccgccaactgggccgcctgggacgaagccatctagtagatctagccttgccatgtacactgcgctgcctgcaacccgttcgccggtgcccctgcccctgcccgtggtcttttatcatccttccaaccacgagactttgcttctaaaccagaggctccatctgtgtgccgccttgttttactagaaatctttttttttatcctttttcacttttcctgcctagtttttccccttatcctggcattgtacaaataatttctccagtgcttgtagcttgtggacttgggttgtccaacatgtcatgaatacaaactgagtttgcttcaaaaaaaaaaaaaaaaaagacgccggcgcgcgatctaggttttttttttctttgccgcttttgggggggggggttcctccgggggccccgaaaaacccccaaaaaaaannnttnnaaaaaaaaanaaaa

SEQ ID NO: 128573 - DNA, 255 bp, Zea mays
  unsure (1)..(255): unsure at all n locations
  Clone ID: MRT4577_48730C.1
agggatgaagggaaccagggacgcgcgactagccgagccgtgccatgccgagtaggccggcgcgccggcgcggcagcaggtgggagcggcaaagcgggcacgtcacctcgcccaggtcgatccaggggtcgatgcatcgcgtgtggaacgcgtgggtgcagttgcccagccgccgaacctcgnccttggcctcaagccactcgaggcacacccggcacgtcggctccgcccccagccccgacgacggtgacgacg

SEQ ID NO: 128574 - DNA, 452 bp, Zea mays
  Clone ID: MRT4577_48731C.1
acaagggttaaaacctgctattttccggtggggcggaccaccccaacccatacacctttttttttcgcaacaacttacaacaagaaaacccccaacgcgacccccctggagccacagacacagggcgcgcgcggcacgtgtttaccatgctctccctccccaaaccaaaaacacataccacccttattacaccattattgcttggcctggccattctgatcgctcacatggtaagacagtttattacaagatctgcatgatgctgatctcggtcttctttttgccctagccctcaaaccaggcctcatggactagcgggccctagagcttgccattgggcttcatgtgttacaaggtgctctagaagacgactcggatgccgttggccatggccaagaaccccaccacggatctcttggatcctccggctccccttgactggtagggcacct

SEQ ID NO: 128575 - DNA, 284 bp, Zea mays
  Clone ID: MRT4577_48732C.1
acgaccttttttttcattgtttccagaaaaatctcccggggatagtatttcttcaaagcaggcgctacaccataagttggcccgaccaaacttccggagttcctcgacagggggggtttccattccaagcggattgggatggcggcggaaatgaacccggggagcaaggttccgagggtgggggccgcccccggaccggccccttgggcggccccggacaccgtgccagcgggggctgtcagggtgcgcgcgccacgttcctttcgaccgcccgttcggggacc

SEQ ID NO: 128576 - DNA, 499 bp, Zea mays
  Clone ID: MRT4577_48733C.1
ggggcaaaaaaataaacgtttttgaaaaacattaaccaaacaaccccccccccaaggaaggcaaccccaggggcttataggcaaaacatgtccaaccccctcattttgggggggggcaacaatgggaggcccccgaaatacataccctaaaaaaaaaaacaaagatcctaaaggggtcagggatacctaccaccaaaaacaaatccaagggaacaatggcccccaaacaaacaaaaaaaggttcgtaaacccatcgggtacttttgggtccaagtgggggccggaaacttttactttggccgggccgttttgtacatgggggcaatttccggaacaaaagggccccccgggttggggccggccaccagggaccaaatggaaagccggaccttaaaaattggcaaaacagggctccactgttttttgaaaatggcaaggcataaacttccattgggggggaaataaagaaggaaaacctttggcttgaaaaaaacctttg

SEQ ID NO: 128577 - DNA, 451 bp, Zea mays
  unsure (1)..(451): unsure at all n locations
  Clone ID: MRT4577_48734C.1
gcccttatattaacggntaataattgtctttctctgctacagcaggcggctcgcgcactcatgctagtgttgacttggtgcctgcatatgtgccactccccctaggcgctcagcgaggctttttgccttattgtcccgcgctgtgacagtggctatagggcgtaggttaaccgggtgtttcccggccgcgtaggctgccttgttctgggagttcattgcccacttggcggcggactgtgatctcgtgggggttgcctttggatgggactcgagtggggcgttaacgagttgcaaggtgttcgagcacgctggctggtgggaggtactgggggtttgctgtattgggaggtcctgatggtggtggtgagcgctgtggaggagtacctgttggtgttcttgggatggttggctgacttgtatggtgacgaggtggggggtgctgttggacttg

SEQ ID NO: 128578 - DNA, 390 bp, Zea mays
  Clone ID: MRT4577_48735C.1
gcgcaattatgctatagcttgttctgttgacagcaattacagcagggcttgttactcttgttcgtattggggaggtgcattgttaaaaaacaatataaccaatgtcgttgcatgttttcctttgaatgtttgctcagaaacatgggccattacttccttgtttacagggaaattcatatactgcttcaagaatcccacctcaccctatatagatatgggcattcgaggtctgaagcacatgagctctcttcttagtatacaggtcatggatgtgatttattgcagcatagtgttagtcctggagtctgaatgactgatgaattattttttcagggatcttccttatctctattagtacgagatactcttgttgagttagatatttcacat

SEQ ID NO: 128579 - DNA, 495 bp, Zea mays
  Clone ID: MRT4577_48736C.1
gggggctcgcggtgaggggtgatctaccacggggagcgggcccatgttactccgaaccgggcctcatgcgagagcaagagtcccgaacggatctacggctcgcccgagggtccgctcaggcgttgggcgcacccccgggtcacccgaggcgaggggggggggggctttgtcatatttcgtcctcggccaaatcgcctcgctgccgaccgtatcacgtgcgcatttattgcgccccccacctgacgccttattctgtcttgcgcgccctagttggcaaggtcgagctgaccgcagtcacttcacccttttactgatcgttctggcaggatggctgcgctattcacactgttgtggctgctgggcgcgccaccagggtaggactagcatctgttgggtgcgggctctgccggggtcagcctcgggcgcggtggggggcggcggctcgcccgacccccggctgcggctggggcgggggggtggctgcgtgcggccccg

SEQ ID NO: 128580 - DNA, 303 bp, Zea mays
  Clone ID: MRT4577_48737C.1
ttcgtcgaccacgcgtcgagtacacagtctgcaacgctcatcaactagccatgggaaccctgcggtactcaacaacacactgcttcatctacccgtcgtgggcaatgcacctacatacctgacaacaatgtgcaacagattgaccagcttgactactagctgggcaaaccctgtgctacttgcacagtgcttcattaacaatgacttgcgaactctgtggtcctacaacacgacaacagtacttaatcattggtagggctaaccatgtcgccgacttctacagcagcaacaattgctgccata

SEQ ID NO: 128581 - DNA, 238 bp, Zea mays
  Clone ID: MRT4577_48738C.1
atttgggtgtgttttttttttttttggttgtttttttttttttttggaaggaaaaaatcgcaccacttgccattattaagtaacatagaaaaacagtctcagcctgcctaaaaatagctcccagcttccgttaaaaattcctaaaacaattccggggccaaaaaaatgtcatggtgcttggcacagtttatccaaagttgaactgaaagcccccccctccagggaagccctctccggg

SEQ ID NO: 128582 - DNA, 212 bp, Zea mays
  Clone ID: MRT4577_48739C.1
gtcgatgcgagggaaggtccaaccatgttgcttgggttcactgaccaggtgaacaaggggatcaccaccctcgccggccgcagcttgacaacgaaggagaagactacaaccaagaggaccttcagtgtctgcatagaagagttccatgctcgcctacctgaacgccgtgcaccaggtgtaaatctgacagactgagccccatgagtcaggac

SEQ ID NO: 128583 - DNA, 217 bp, Zea mays
  Clone ID: MRT4577_4873C.1
ggccgagcacacccttccgccacacccttccggccacagtgtattattaacactgatatcttttacttaagccaacctctatttgcctccaaaatactaattaacgcgcagggcataaacataataaaggccaaaacctcaaaaaaagtatgggccctcaaccttgtgaagctaccaagaatcttaaaagaaggtttcattatccttcccatttttt

SEQ ID NO: 128584 - DNA, 228 bp, Zea mays
  Clone ID: MRT4577_48740C.1
cgccactcaaaccatatgggtgtcattattgcttaaaatccagaagaaagggggcttgtttgggggcaaaacagcattaaaagtatggtgtcccccaggccggttaccagtttttattacggaaaaaatattcgggggaaaaacacggatccaggaaccgttaaaatggaccgccaccaggggttctctagggcctattttgtattggggcccaccctacccattaga

SEQ ID NO: 128585 - DNA, 223 bp, Zea mays
  Clone ID: MRT4577_48741C.1
ccttggagccaatggagactgtctcaagagggcactggtggcccgacagcctggcacagggcagtgggacagggcatggccaggtggccactccagacccctggcttttcactgctggctgccttagaacctttcttacattagcagtttgctttgtatgcactttgtttttttctttgggtcttgtattttttttccacttagaaattgcatttcctgacag

SEQ ID NO: 128586 - DNA, 2718 bp, Zea mays
  Clone ID: MRT4577_48742C.1
tcgtaacacgctgctccgtctccatctccaaatctcaaattacctatcctctccgtcgaatcagaaaccctaacctcaccgtaccacggcctacgagccggaatgaccacatcagccgccgacgatggcagctctttggcgcctaccatcaccgagggagaaaccacagccgacgccggtgctggggcaggtgttgagtgcgtcgagggcaaagagatgaaggttggggccgcggctccagttgaggagccggataaggaggtggcgcgggaggaggatcctggtgatgatgatgactatgaggaggaggaggaggaggaggaggagacggaaactgcgaatgggaaagaggctgagttgatggagccattggcggcgctgaagcctggggaggaggtcaaacctgaaaagctagagggggagaaggaagagctggatgaggagcccgaggcatcggaagaggaccccgaggaggtggaagagttgaaggaggagggcgacggtattgcggaggaaggcttggtggatgggtcggaggcgaacgatgataaagatgctgatcaattgagcagtgggagtgatagtggtggaagcagaagtcgtggtatgcagaactctgaacttgctggaagtcttgaaatatttgatcacgacttgcctcaagattgtgtccaggaagacattgctatggccttttctcaatcaggggaggtcaaatctgttaggataattaaaaattcatcaactggaaagaaccaagacattgcatttgtttgttacacaagtattgaagctgcaaagaaagttcttgctgaatttaaggagggaattgtgataaaaggaaaaatcgtcagggtatctgcttgtcaagataataataccctttacctggggaacatttgcaagggttggaccagagatcaggtgttgaacaccctaaaaagtattggaattcaagagtgtgagataagctttcccagttacaagggaggaagccgagggtttgcttttcttaagttcacctcacattactatgctagagcagcacttcgtcgcttaatgaaatccgatgctatttttggtactgatagaagcgctaaagtatccttttatcgaacccccacaaaatcatccaagagacttatacaggcaaaaatagtatacctggaacatgtccctctttcttgggatgaaaataaagttaaggaatactgtgaagaatatggggagatcctgaaagctgatgttttccagatatcaaagaatatggaaaatgaaacaatttcttttgttgaattctcatccaggaagggtgcgttagcttgtgtgacaggaataaacaaagcaaatattgttgatggaagcttcaagttgtgtgcatatcttgcttggccaaaaagtgcttcaaaggtcaatagtgctgcaccttcaaatgctgccaccgcaaccgagaaggacaaaacccacacagagaagattcttgtagacatcgatttgcaacataaattccagaaaggcgacaagagcaaacttacatctcagacaaaggaggcaattatgaagaagaaaaaatcaagtaaattaccaaatgacaatgatacaaaactaacctcacaaggtgctgccgaagtaccacaaacctccaaatcttctgaaggcaagaggaaagttggaaaaaacaaacatgcctctgtataccaaaaaccattgaagaaagcaataaataatcgtaacgttgatgagagccagctaactcatcggagtgctgcagtactgcaaacgtctaacacttccaaagggaaaaggaaagccagtgagaacagaagtttatatttaaacgaaaaggctctcaagaaagcacgtggcaatagtaatttgggtggaagttcaagatctaaatcatatgcctctgatctggaacctcatgctggattcatttcgcctgcgattcgagataatggcagtgatgcatataatcgacagagaactgcacggtatgatatccatcctatagatgtccatccttatgctagagcgccaccatcagcctactctggttacaaaagccatgctggctatgaggctgcaaatacatatgaatacgcagggaaccgggcgcctacacctccaagtggatcttacatccctcgaagaggacattactaacaaaaaatggagtgctggctctgtgcatccattcgatcgcatggtaacaaggaatcaaggatctccgtatttagatgtttcatacatgttatgtagacgttaaaaagtaacttgtttaaggaaaataagaaccctctgcagctttccctttgactgaagtgcagcccggcacaccggttgcttgttgaagaatgctttttttattattattgtagttaagagtccagacgtcgttattaccacttatcttcgtattggaaaaaaaatgtctttttcttagaaaaaaaaaaaaaaaaactcaagactagttctctcctcgtgccgaattcctgcagcccggggatccaagagaaggcaccgggcacacctgggcgtaaaatatgtaagggggggcggctccatccagtggcaaccattttagactgcggaatccagtggacgacgaatgttgggctgatactagatagaatgcgggcgatgatgttataaggcgagggcaaggggaccccgatgggtgaccgaaataaagaagcgttctataaacttcctttt

SEQ ID NO: 128587 - DNA, 550 bp, Zea mays
  Clone ID: MRT4577_48743C.1
gtctgaagccgccgagaccatcactcacagcagagcagacaaaacgccctgcctgcaacaagcagcagatcttccatgaacacactgcacagcgtcaagaccatcaccctctgagttgagtaggcagggacaccgtgaacgatgtcaagggctactaccaggacgagggaagggatcccgtcagaccagcagcggctgatctgtgacgcctaagcaattggaggatggccacactccttgaggaactataacaatccagaggagactacgctaccacacctgtgcgttaggtctaccaatggtggcaatcattgagccctatatgaaggcgctcgctcgcacggacaaccaatacaagaagatctgccggaaatgctatgcacgaatgcaccctagggctgacaactgcacgaaagaacaagtgtggggacaggaaccaactgaaggccaagaataagatcaacaactgaggggctgattctagtcagggctatggacaaagacgcactgtcttggtgagaggttgttgaacggtgtgagtgtacccaac

SEQ ID NO: 128588 - DNA, 679 bp, Zea mays
  Clone ID: MRT4577_48744C.1
gccggccttctcgggatagatcatcgatccatgttgctatctagctagctccctcagttcagttcagttcagttcagctcagctagctagctcactcctctcttgagtcgtggtgtccatcacaatcttctctatatcgatacactgctggtattacatacaactgagaagtcggattacctttgctgattattaacttgtttccattgctgtgaaatgaaactttcaatgcaagggggctggcctaccagctggtactagcaggaatgaagagcatatatatatgaacatgatgatgcatatatgcagagcagcaacagcagcatcgtcgtaccatctcatatatatcattgcaaacatgagcagtagtggtagttcatgaatcatgatgaagcaaggaagaggaagctagcagtgctggacgcggatcagatgcagatcgatggaggccggggccgggggtgtacctacgtagtacattgctattattgtgtccatggaagggggaccaaagtatgtaatgcgttgcacaccacacaccagagctggctcagcagctagcagcagcctgtggtggtggtggtacaatgcagcgtgtactgctgtcgtcccagcagcaagttgaaaggtaaaagagagaaatatttcagcttaaaaaaaaaaaaaaaaaaggccccta

SEQ ID NO: 128589 - DNA, 322 bp, Zea mays
  Clone ID: MRT4577_48745C.1
tgcgggccggccgggtaattgcgggtcgacagctttttgtcggcggccgcccttactttgtttagtgtaccgaatatagcgcgcttgagtggggggaataggggcacagcgcagtgtagagcagcgagctgaaggaaagtgatgctatgtataactctgtgctctatggtatgtgttatccttcttgttggaggcggcctagactgttccctagtgaccgtgtcctgcgtgagacatgccaagaggcatccggttatcttctaaaaggctctcaactgccatatgtgctgactctttcgatattggtctcgacgttatcaaa

SEQ ID NO: 128590 - DNA, 477 bp, Zea mays
  Clone ID: MRT4577_48746C.1
attcccccctcatcctctccagctgtcgtctgcgcctacactactatctctgtgccttgctggtccattgccctcttcctaccaggtcataatcatgagtcgcacatcctcatgtgcctgaactacacgtgcctactctggcaagactgccaccgcaggagaccttacctactagcttgtgggtctggaccattctatgagctccactactctataaactaccggtggaacgaacacacgagccttcaagtaccagtgtctgccccactctatcttggctattcgctgaacatggatcaccattgacagcgctccgctgaagccagagaccaccctgcactactgctacttcattgacgacctcgtctcccgtgacttcatcgataacatgagcgctgcgatctctcattctgactgagatgcacctaaccttgactccaccaacgctcttatagatactacacatctaccaacgat

SEQ ID NO: 128591 - DNA, 233 bp, Zea mays
  Clone ID: MRT4577_48747C.1
ttgtgttttctatggagtttggacaacatccggtagattcccctaatggcttagctggtcgcctattaagctctgctgcaggtcccagttttgcagatctcacttcctcaatcaacaatttacaactggagttgtgttcaattctttaggccagtcttaactgtctctgatgattacgaagaatccaatgcttgaagagaagagtgtgaacaaatcgtactagattacatcac

SEQ ID NO: 128592 - DNA, 552 bp, Zea mays
  Clone ID: MRT4577_48748C.1
actagtttgacttaagcagtagcatggttaccgatcataattaacatttgcttcacgcttgcacacttgcaaacgcatagttcaaatatccgcataaaacccattgtgtgttggagatctatcaaaatcatgaaaaaacaacaacagagcaacatggttatattgatagatccttctcttctctaaaggttcaaaacgagagatggtacggtgggaccattttgctattcttcgataatactccttttgaacctttggagaagagaagtttatcaaaggttcaaaaggagtatatagatgacaagttttatctttgaatataattatttaatcatgtatgaacaaatgtacaacagtctaaaatctgtctacagtcggaaataaagatgcttttgtacagacaaatacgaacttcggatgcctatgaatgctagaggtgttatcattttcaaacacaaactttggcattacgagtatacctcggaggttctatggagacttgaatatagcaaaggcgattacattgaatgtccgaccctatggtgctcactg

SEQ ID NO: 128593 - DNA, 331 bp, Zea mays
  Clone ID: MRT4577_48749C.1
tccttcaaaccaagcggagcacacaccaaaggggggagccaggaaacacggagggagcatccggcaacccaggaccgtgaggactcaaatgacaacggaggaggagaaccatgacgaccaatacgaggaagagaagaaagaccctgacgcaggacagactgagaaagcagatcagaaggcagagcaaccacctagagaaaaagaggagcatggcagggtcacaacagaggtcctggggcagcaagcagaagaccctatagaggaggaagccagcacaaagcgcacaataggaacaagcgggcttcacaagaccttgacagaggactgagag

SEQ ID NO: 128594 - DNA, 456 bp, Zea mays
  Clone ID: MRT4577_4874C.1
cacggagagcgccagctacaccgggcatgtttattggcctcctgcccctgttcgaccgggcggggcacgacagcgcggagaccatccgccgcgcgctccacctgggcgtcaacgtgaagatgatcaccggcgaccagctcgccatcggctaggagaccggccgccggctcggcatgggcactaacatgtacccatgcaccacgctcctgggcgacacgaacaccacggcgaacggcatgcacatcgacgagctgatcgagaaggcggacggcttcgctggggtcttccccgagcacaagtactagatagtgaaacggcttcagcaccggaaccacatctgcagcatgaccggggactgcgtgaacgacgcgccggcgctgaagaaggcggacatcggcatcgccgtggacgacgcgactgacgcggaccggagcgcgtaggacatcgagctgactg

SEQ ID NO: 128595 - DNA, 369 bp, Zea mays
  Clone ID: MRT4577_48750C.1
ggcaaaaaagagaggctaaaaacatactggacttgctcgtacaatccaacatcgccatgagcttatttttaaaaaaggggatgcaaatggcttcgattttttttttttcagaccaggagtaaaattacccttcggctgaaaaaagcaatcctaccctataacccccagggggtctgaaccaaaattctcaaaccaaaggtctaccctctcaactggtctgaaccggctggacaggagccccaaaaacgttaagttttaaacgggaaggggcccccccggggggtctgccacttgagggttcgggtttgggttttcaacaacaaagggccgggggggtaggacccttccacctaccgggggcccattttg

SEQ ID NO: 128596 - DNA, 714 bp, Zea mays
  Clone ID: MRT4577_48751C.1
ggtacccccgggtccggccgtgcgggtgcatcgaggaagcgctgcagctgttcccggcatgtccgagaaggacgtcatctcatggagcacagcgatcggcggcctcgcggcacacgggagagcacgcgaggctgtcaggttgtttgaggtgatggatagagaaggaagggtgatgccaaatggcatcacattcgtggggctcttgtcggcctgctcccacgcgggcctcgtggacgaaggcctgcgctacttggatcaaatgaaggaagattatggtgtggaacccggcgtcgagcactatggctgcgtcgtcgacctcctcggccggtcagggcgaatccaacgcgcgctcgacaccatacgaggcatgccggtccctccagatggcaagatatgggggtcgctgctcagcgcttgccgcagccatggcgacgtcgaaacagccgtggtggcggccgagcggctcgtcgagctggagccaggggacgtgggcaatctcgtcatgctggccaacgtgtacggcgctgcaggccgatggggcgaagtggcgagtacgaggaacgagatacggagccggagcacgaggaatacgcccgggtgcagcatgattgaggtggacaacgtggtgcccgagttcgtccccctgcaggaccctgggcctgagttgggaggcatttctaccccactggattttcttgcctcgaatcttgccca

SEQ ID NO: 128597 - DNA, 361 bp, Zea mays
  Clone ID: MRT4577_48752C.1
attaccttggtgttttttcaggaactacccaaatttttttttggcaagtctacaattacaggtgaaacacccaacccaaccattattaacagaaggtccctcttaaatagatctaaaaccctccctcctgtccctgtgttttcgccaccccaaaccatgttaggagcccggggtaaaaacttttcttgggaggagaccaatcattttctgaccaaccccccaaaaataattgggcgatcacatatcacctccattgtcaggcagcctaataaacttgtttttagatccagaggaaaaccctccgagacagccccccgcctgaaaccgcacaacggggcctgatacatgatccttaccatcc

SEQ ID NO: 128598 - DNA, 445 bp, Zea mays
  Clone ID: MRT4577_48753C.1
ctggacgtcagcctagcaattagctcatccactccagattggagaactctacaccatgaaggtgctgatcagcgcccttgctctactgacactcgctacgagcgccacctccagcacaagcggcatgctgaggctgccagacaccaccgtttcatcgaccgcctccgttctatatgccgactgcggtctatctgccgccgtaggagccaccgtagacatggtgataccgaactcaaccaccggagttaatcccgtgccagcagttttgatcctacggcgtcgaccacgtctgcagaccgttcctgggccacacgcgtctagttccagacgcaccagaacaaggcggctgagactccataccgctcgccacagagccaggcgctgaaaaagcagtgctgccaccagatcaggcaagtggagccgctgcaccggtaccaggcgacat

SEQ ID NO: 128599 - DNA, 308 bp, Zea mays
  Clone ID: MRT4577_48754C.1
gtttccctgcgtcgcgcgcgagctcgacgctcatctccctacttcttcagttcgagctccacccatggccgccttctccagctcgctctggacacgcagttcctttcgtcgcgcccgaccgtcatccccatgcatgactgcaacgtcgtccttccctgcttggccatgtccagtagctcggtctttagcctcttgccatagccacagtttcctctccctgtctgccaaatcgccgcgcctcgctaacgctcctcgacatcggttgtcgatctccctcggcgttgtctcctccagccgccaagtcactt

SEQ ID NO: 128600 - DNA, 323 bp, Zea mays
  Clone ID: MRT4577_48755C.1
catacccatcggctgctggctcgatattcctacgctgataagcaattactacacgaggcacctaaggtctaacggtgctacgtaatatgttcacttgcacgtgtatcgagtgtcatgtaacctaaactcagcgttgatagccatacatcatatcagatggatgaaggttacctgtcatatagtaccctagcatctaacctagaacagatgcaatgaataccttgccgcaccatgtctgactgacttaccacgattataccagagctctgatgcgactgttcataatggcactgacaccaaataatgaagcccagatctgtata

SEQ ID NO: 128601 - DNA, 590 bp, Zea mays
  Clone ID: MRT4577_48756C.1
ctcttagctagccctagccacgtccccacacatcgtagacaacgcaattagctaggaatagcatccatggcgtccggggctgctgcttcctcggccctcttgctcctcgtcgcggccttggtggccaccagtgcgagggcggccacattcaccatcaccaacaactgcggctcgacggtgtggccggcgggcaccccggtgggcggcggtacgcagcttgaccccgggcagacgtggaccgtggacgtgccggcggggacccagtccggcagggtgtggtggcagcctcccatgacgctggccgagttcaccatcggcggcggcggcagccaggacttctacgacatctcagtgatcgacggctacaacctgcccatgctcttctcgtgcagcaccggcgtgaccctcaactgcggcgggcccagctgccccgacgcctacctgtttcccagcgacaacaccaagacccatgcctgcagcggcaacagcaactaccaggtcaccttctgcccgtgagatcgcgcgtgcgaggcatgcggcagtgtggccggacgatgttgcaatatgcaatgcatgctccagcggtccag

SEQ ID NO: 128602 - DNA, 292 bp, Zea mays
  Clone ID: MRT4577_48757C.1
cccacgcgtccgcccacgcgtccgtatatatatatatcaatattacattattacgcatatatataattatatatataggtcctgtacctgtaaatatgcaggaggaccagtagggacgaccaggtcggctaggacccgattagtcgacctaatcgtcgactaatcgcgattagtcgcccaggtgtctcgactagctagtcgagcgacttgaaaccattggttgtagctagtgcactggccccatggtttaagctgtagcattgagcaaactgtttttcacatagaagaagct

SEQ ID NO: 128603 - DNA, 217 bp, Zea mays
  Clone ID: MRT4577_48758C.1
gcgggaaagagtgtaaaggacacggcgacgcgcgcggctggcgccacggcggactacgccgacgccaaggacaccggcgcgcagggcgccaggccgcggaggagaagacccaggaggccacggggaaagcggccgactacaccaagcaggctgccgcgaacgtgaagggtctcactgccggtgcggccgggacgaccatggagtacgcgaacaggcg

SEQ ID NO: 128604 - DNA, 1029 bp, Zea mays
  unsure (1)..(1029): unsure at all n locations
  Clone ID: MRT4577_48759C.1
ccggccggcaagctcttagctagccctagccacgtacccacacatcgtagacaacgcaattagctaggaatagcatccatggcgtccggggctgctgcttcctcggccctcttgctcctcgtcgcggccttggtggccaccagtgcgagggcggccacattcaccatcaccaacaactgcggctcgacggtgtggccggcggccaccccggtgggcggcggcacgcagcttgaccccgggcagacgtggaccgtggacgtgccggcggggacccagtccggcagggtgtgggggcgcacggggtgctccttcaacggcggcagcgggagctgccagacgggcgactgcggcggcgcactctcctgcacgctctcggggcagcctcccatgacgctggccgagttcaccatcggcggcggcgggcccagctgcccagacgcctacctgtttcccagcgacaacaccaagacccatgcctgcagcggcaacagcaactaccaggtcaccttctgcccgtgagatcgcgcgtgcgaggcaggcggcagtgtggccggacgacgatgcaatatgcaatgcatgctccagccaacttctttctttgcaaataataagtatgttgtttgtcctagtttgttattagtggagaaattaaaaaagtagacaatcgaataagacgatgatgttcaccccatagattatgtaacttcgatgagtttgatctatatatatgtgcttgcaaaacatagaggatgtgtatgtgtctgagaactttccgtttatgcatgtaggcctgtaaaaaaagctcaaacttgacgagctggctcggtctcgctgtgggtcagcatggctcaatgcttagaacgcgccaacggtcccgcttacgagctggctcgtggctcaatttaataataatttgttattatataaaattctaattagcatgtagtgtcaatatcaaatagatgactatttgattcgtttatgttgtgtgagattactacacaagagtaatctattttcntatattat

SEQ ID NO: 128605 - DNA, 313 bp, Zea mays
  unsure (1)..(313): unsure at all n locations
  Clone ID: MRT4577_4875C.1
acaccattaactatatctactccagagcgcacacaaacccgatcgacaccatgaggggggtgctagttgccctcgctctcctggctctcgctgctagcgccaccttcacgcatacaagctgcgggtgcggatgccatccaccgccgccggttcatctaccancgccggtgcatctgccacctgcagatcacctgccacctccgtagcatatcccaccggcggtccacctgccgacgtcagttcaactaccaccgtcggtccatgtgccatcagcggtatatctgccgtcaccaccatgccactaccctactca

SEQ ID NO: 128606 - DNA, 914 bp, Zea mays
  Clone ID: MRT4577_48760C.1
gaactactaacgcattaagctcttagctagccatagccacgtacccacacatcgtagacaacgcaattagctaggaatagcatccatggcgtccggggctgctgcttcctcgggcctcttgctcctcgtcgcggccttggtggccaccagtgcgagggcggccacattcaccatcaccaacaactgcggctcgacggtgtggccggcggccaccccggtgggcggcggtacgcagcttgaccccgggcagacgtggaccgtggacgtgccggcggggacccagtccggcagggtgtgggggcgcacggggtgctccttcaacggcggcagcgggagctgccagacgggcgactgcggcggcgcactctcctgcacgctctcggggcagcctcccatgacgctggccgagttcaccatcggcggcggcggcagccaggacttctacgacatctcagtgatcgacggctacaacctgcccatgctcttctcgtgcagcaccggcgtgaccctcaactgcggcgggcccagctgccccgacgcctacctgtttcccagcgacaacaccaagacccatgcctgcagcggcaacagcaactaccaggtcaccttctgcccgtgagatcgcgcgtgcgaggcaggcggcagtgtggccggacgatgttgcaatatgcaatgcatgctccagcggtccagccaacttctttgtttgcgaataataagtatgttttttgtcctagtttgttattagtggagaaataataaaaagtagacaatcgaatatgacaatgatgttcaccccatagatatataatgtaacttcgatgagtttgatctatatatatacatgtgcttgcaaaacataaaggatgtgtatgtgtgtctgagaactttccgttcaatgcatgtaggcccgt

SEQ ID NO: 128607 - DNA, 302 bp, Zea mays
  Clone ID: MRT4577_48761C.1
cgtaagctcggaattcggctcgaggtaaatttgggcagagatagtaattaatctatgactgaaggaaccagcgtggtgagataatcggcactggtgagcaaatcctcattcgcgactggtgtactagacgtgctcacggtcgtgagcggatcgcacactcacgtgggtcattgatggaattaagctcaatcagctcatctcctcgcatggggatcatgactactaataggatgacctatggcttggtctttactgacaataagtctctgttaagcaaatattgaccatcttattaaagcatt

SEQ ID NO: 128608 - DNA, 267 bp, Zea mays
  Clone ID: MRT4577_48762C.1
gggacgacccacgcgtgcgtggacgcgtggggcaaaaaaacctattaaaggtctaaaatgcaaaaaagttggggatggggtgtagtctagtagtactctgattggtgggtgctatctgggaagatgcatatgttgcttccacagtttgtggaggcacatcagtcgtggaaactggagttcgagagagatttatgtgctttgcggagaaaagcgcgtgcttggatccatacggaaatgatgtatgcaatgggacagttcatagctagt

SEQ ID NO: 128609 - DNA, 1023 bp, Zea mays
  Clone ID: MRT4577_48763C.1
gggaaaaaaaaaaaaaaaaaaaaaaaaaaaaaaaacactacaaacgcattaagctcttagctaaccctagccacgtacccacacatcgtagacaacgcaattagctaggaatagcatccatggcgtccggggctgctgcttcctcgggcctcttgctcctcgtcgcggccttggtggccaccagtgcgagggcggccacattcaccatcaccaacaactgcggctcgacggtgtggccggcggccaccccggtgggcggcggtacgcagcttgaccccgggcagacgtggaccgtggacgtgccggcggggacccagtccggcagggtgtgggggcgcacggggtgctccttcaacggcggcagcgggagctgccagacgggcgactgcggcggcgcactctcctgcacgctctcggggcagcctcccatgacgctggccgagttcaccatcggcggcggcggcagccaggacttctacgacatctcggtgatcgacggctacaacctggccatgctcttctcgtgcagcaccggcgtgaccctcaactgcggcgggcccagctgcccagacgcctacctgtttcccagcgacaacaccaagacccatgcctgcagcggcaacagcaactaccaggtcaccttctgcccgtgagatcgcgcgtgcgaggcaggcggcagtgtggccggacgacgatgcaatatgcaatgcatgctccagccaacttctttttttgcgaataataagtatgttgtttgtcctagtttgttattagtggagaaattaaaaaagtagacaatcgaataagacgatgatgttcaccccatagattatgtaacttcgatgagtttgatctatatatatgtgcttgcaaaacatagaggacgtgtatgtgtctgagaactttccgtttaatgcatgtaggtctgtaaaaaaagctcaaacttgacgagctggctcggtctcgctgtgggtcagcatggctcaatgcttagaacgcgccaacggtcccgcttgcaagctg

SEQ ID NO: 128610 - DNA, 279 bp, Zea mays
  Clone ID: MRT4577_48764C.1
aaaccatcaaggcacatcatctgcatcaactctcgctacctggtagcaaccaagtaactctcccacacctctctccctactatcaaccacaacaactcaatccactcaaccaactatctacactgtaccctgcttctcatttgcaccaacaattattaccattcatcacttctacctacagactactctcatcaactacaactccttacatttaaccatattcccccactgaacccctcttcttatctacagcaacaaatataatttaccattttattc

SEQ ID NO: 128611 - DNA, 167 bp, Zea mays
  unsure (1)..(167): unsure at all n locations
  Clone ID: MRT4577_48765C.1
aggcggccgggncgggctttactcgccaagcgcaagcgcccacattctcctccctctgcttcctggactcctctctgcctccccacgacgatctcgagcacctgttggagactgcgagacgtgcacctgccatttctcatcgcaacacaccataagttccccacccc

SEQ ID NO: 128612 - DNA, 493 bp, Zea mays
  Clone ID: MRT4577_48766C.1
gtcgttcgtttgccttcctgtttgttgttcaggttgttccttttttttttgtttgtcctttcagtgttttgctgtttttttttttaaaaaaccagtcaacttcacatttgggaggaagccgacccctttggccaggaatcggcggcggcaatcccttttggaggggcaccccgcgggcatagggctgccaaccccggaaaggaaggggctggggggggaagcgcacagaaaccgtgcattcaaaaccacacaaagggggggcgccagccaaagcgctgccccgtcaaaccaaccccagtcggggggccccccgtcccgggggcaacaaaccaagtctttaccgggggggaaagggcttttttcgcgcccttttttggcccccggagtggcataggtccccccaattcccgcccacattgaggccattttctccgggcccgtcacagcctccggggcgggttttgggggggcggggggggtatttccggccccc

SEQ ID NO: 128613 - DNA, 210 bp, Zea mays
  Clone ID: MRT4577_48767C.1
ccctcccctccccggcccgacgcccctcgccccccccctcctgaccagccatggcgaccgctgctgctgcgtcccgggtggctgtctcggcgccggtcttcgtttcggaagggggggtcaccagctccgagatcatagtgatcatcacttgcaactatttttgaaaagcaagaatctttgagatttctggtagtgataatctgtgatgca

SEQ ID NO: 128614 - DNA, 520 bp, Zea mays
  Clone ID: MRT4577_48768C.1
aagtcgctgaacctagctgcgctcgcgcgagcttcattccacttgaccgctcccggacggtgacctcttgcattcgcactctaagtatggtgattgtactacatgacacgcatgattgcaataacttccgtataacctagaagcgaacaaaacgccatgccaccaccgcagggggtactatcttacgatgcccagctcagaacggcggttgatttcgatgacccgcgtctccttctgcagacgccggaccgtggtggcccagactggcgacactacgttacgagacccatctaccgctgagcacactgtcctggtctagcacctcattcgaactctatcctacgcgctcgactccgtctgaagtccccgtcatcagtccgtattctattcgacgccatgagaggcctaccttgacgattacgctgtcgaggagactatagccttccgcgatcgcccatgcatcctctggcgctggcacaaatacgagcagtttcgcgctgactatcgagggaacatactt

SEQ ID NO: 128615 - DNA, 219 bp, Zea mays
  Clone ID: MRT4577_48769C.1
agaacaaaaaatacttcattatgttcttataacccatatagaccattttcttcaacaaggacaaatattactacaattagttcgaacattcctaaacgataacactcctacatcctatttataaatcgctttgacttttacataaacccccgccaattcatcttatacattgacatatcatcagccaaagatcgcttagaaccaataccaaattattta

SEQ ID NO: 128616 - DNA, 667 bp, Zea mays
  unsure (1)..(667): unsure at all n locations
  Clone ID: MRT4577_4876C.1
ttgggaccctcgaggccggccgggaccgatcccgattcggatccgattccgcggcaggcggcattcccagcccccccaaatcccatttccctctccgatcaaatcaaatcaaactcaaaccgacacgggacccacgacgcatctccgcctccgcagatcgccgccgcctactcgcgcccctccgcgcgccgatggccgccgcggacccgccgccgcgcggggaggccgcgcccgcgctgaagcggagcgccagcatcgaccggataccggcggacgcgcgccgcatcctgcaccgcctcgccggggacctctggggcggcgacgtggaccccggcgcgctggccgtgtcccagctcaggggcgccatgaccaacgaggtcttccggatcacctggcccggcggcgaggccgagggcaacggcccgcgcaaggtgctcgtgcgcatctacggccggggcgtcgaggtcttcttcgaccgcgccgacgaggtccgcaccttcgagtgcatgtcgcgccacggtcaggggccccgcctcctgggccgcttcgccaacggccgcgtcgaggagttcatcaacgccaggaccctctccgccgcggatctgcgcgacccggagatgtccgcgctgattgccaagaagctgcgcgangttcacgatctcgacat

SEQ ID NO: 128617 - DNA, 442 bp, Zea mays
  unsure (1)..(442): unsure at all n locations
  Clone ID: MRT4577_48770C.1
gcaaccaccaaacttattcttgattggccatggttcggggtggtccgcccacccaacacaaccggtccttttttaaaccccccctggcccgaacaggggatccttcgccaccctccttttggggggggccccngacgacccaggcccatcggcggtttaaacgacccttgtcttactgcccaccacggggacggggcccaagggggagggggctctccttttggatgttgtagtctgctggggggcggccttcctccagctgtttgccggcgaagatcaaacgctgttggtccgggggggtgccctccttggcctggatcttcgccttcctttggcggtgggggccgngctttcaccctccagggttatggtttttccagccagggttttcacaaggttctgcttcccgcccctgggggcgggaacacggggaagggggctc

SEQ ID NO: 128618 - DNA, 384 bp, Zea mays
  unsure (1)..(384): unsure at all n locations
  Clone ID: MRT4577_48771C.1
gcnnnnngtcgancagcnaaaaagggcaaaacaggaaagggaggaangaaacaggttttggggaaaaagaaaacataaaacggttaaaactgaaaacaaccggctgcattggttaaaacacgtttggtgcaaaaagcttagttaaaacatacatctgtctgggctatagagtataagctgttgtgccgctgttgtgcatgcacccctaaccccactactttgtccaacaaggccattatggttttaagaaatggaagaatctgaagaacccaatcaatctcgaagtagcctaagcttatcaaaaccaattcgattctagagcccctcaggaatgactaagcatccccaaatccatntcaaccaactgactgacacatacggggg

SEQ ID NO: 128619 - DNA, 571 bp, Zea mays
  unsure (1)..(571): unsure at all n locations
  Clone ID: MRT4577_48772C.1
gccagcgtgcgggcacacctgctggatggaatgagggggctggtnatcttgttaatgagattaataccaagattattgagtccttgcgatatgcaagaaaagactacttccagaacacaacaaaggaatacccttcagaggtgaagccactcttttctggctttgggttgaaaaattttactatcagaggcgtaaggtctttcctattatattatttgccactcatacaacctaaacctcacactggttctgatgatgaggatgatgatctgcttcatgacactcaagagaaaaccatggatctggttactcccttctacaattcagtaaagcaaatcgggcgggagacttctattggaacgaccagacgagtatttgaaaggattggaggtcggcatgtttcacaaagaacagcatggaaacttctcaaagcacatgcactgggaataaccgctggttgggtagtgcaatccataattgaagtatacagatggttcatccggaagcctagggaggaccgggaagcactatcaagcgaccggcatgaacaggttgaccatatcgaataaat

SEQ ID NO: 128620 - DNA, 1571 bp, Zea mays
  Clone ID: MRT4577_48773C.1
gcacgaggtcggctcggctcggccatccccgccagctcccgctcgagatcccagcgccatgacgatcggcgtcgctctcttgctcgacctcacctcccgcctgccccgcgccggggcatccgccgcctccgcagccgtccgctcccaccccggtctctctaccaccgccttcgccgcgactgccgcggccgcgttgtcgtcctccggggtgccgctctccgcgcgccacctcttcggttttcatgggtttactgttgctcattgtgatgctggcacacctgctggatggaatgatggttctgatgatcttgttaatgagattaataccaagattattgattccttgcaatatgcaagaaaagactacttccagaacacaacaaaggaatacccttcagagctgaagccactcttttctgcctttgggttgaaaaattttactatcacaaccctaaggtctttcctattatattatttgccactcatacaacctaaacctcacactggttctgatgatgaggatgatgatctgcttcatgacactcaagagaaaaccatggatctggttactcccttctacaattcagtaaagcaaatcgtgcgggagacttctattgtaacgaccagacgagtatttgaaaggattgtagttcgtcatgtttcacaaagaacagcatggaaacttctcaaagatgcttcaaaatcatcaaaaaggaaagctgcaagggggatgccaactccacagtacacatactgtgttgccagaacaactttccgagcacatgcactgggaataaccgctgcttgggtagtgcaatccataattgaagtatacagatgtttcatccgtaagcctagtgaggactgtgaagcactatcaagcgacggcaatgaacagtttgacgatatgaataaattcagattgtttgggaggaagatttatgggattaccatcaaaagttgtttcctctttggttttggcctcagctggagcaggcattggtgccctcgtgcatccagtgcatggacaatggttgggttgtgccttgggagatattgcaggtccaattatcgctataattgtttttgagaagatgcagctaccactatgagaaactggatttttggcgaccactggttttgggtcccttgtgcaagtcatggccttcagtcttctgtgtggttggagatccctgatctaacttgaaagttcacagttgatgaataacagctttcacctcagtgctcgtagttttgtagctccctttacagatgccttcgggtcttgtgggacatgagcatgtacttttgcagttttgctaaattttgtactgtctcagatttgaagaatccaaacaagaaatttaattttactagatttgagaagtaaactccatatgtatggcgccttccgtgatagtacctctcatcaaccgtttaggttatctgatttcctatctcattcaaaaaaaaaaaaaaaaaaaaaaaaaaaaaaaaaaaaaggggagatataaaaatacaataagactagctcacacaaaatagaattataataaaataaaaatgaaggg

SEQ ID NO: 128621 - DNA, 228 bp, Zea mays
  Clone ID: MRT4577_48774C.1
ttgattcgtaggcggaaatgtgcgcgtgcgaatgggtaacaatagctactaggcatttgttgtactgctatatgggcagtacaatactgcaatcgctagatgttgtacaccctcaagcgctcacatgtagcactgactaatgtttgtgtccgagcacgacgcaaaggccgtggtgattgtggtggttagaagtgcaaagttaatgactgtgtatgctgtcagaacatg

SEQ ID NO: 128622 - DNA, 126 bp, Zea mays
  Clone ID: MRT4577_48775C.1
aaggtcatgggactcatcgacatctttcgcaaggttacggagcttgtcgacaccaatgccctctccgtgatgacgaggttctcgcctatctcctagcaaggctctcgattgactatgacccatttt

SEQ ID NO: 128623 - DNA, 464 bp, Zea mays
  unsure (1)..(464): unsure at all n locations
  Clone ID: MRT4577_48776C.1
ccctcgaggcctgccgggacaagcacancacgaattaactagactatcttctagctctagctaggactcgattgctgcaatgaaggaacagttagcaggcatggaggggaaggaggaggacgaccgcctgagcgccaagcaagctactctgagcgccagcccatcggcacggggcatcaggccacggacgacaaggactgcacagagcccccgccgacaccgctatcggagcccggggagctggaaggcctggtccttgtaccgcgccgccatggccgagttcgccgacaccttcctcttcctctacatctacattctcaccgacatgggcgtttccaagtccacctgcaagtgcgccaccgtcggcatccagggcatcgcctggtccttcggcggcatgatcttcgcccttgactactgcaccgccggcatctacggcgctcacatcaaccccggcggaggcc

SEQ ID NO: 128624 - DNA, 497 bp, Zea mays
  Clone ID: MRT4577_48777C.1
ggttgtggtcttagcgctacaatttaggagctgtttggttggtctttttcagaccaccaatgatttccggcgtggatgtggatgtatgtatagtgctattttttgtttggaaaaaaaaaaaaaaaaaaaaaaaaaaaaaaaaaaaaaaaggggaggaggggaaaaaaaaaaaaaaaaaaaaaaaaaaaaaaaaaaaaaaaaaaaaaaaaaaaaaaaaagggggggggccccctttttttttttttttgggggaaaaaaattgggggggggggggaaattttttgggaaaggggcccgggaaaacattccggcaaaattttaccctttcccaaaagttttaaaggggggggagggttccggaaaaaaggtttcccccgggaaaactttggggttgggaaaaaaagcctttttttgtggaaacacgggggggaatggttttttaaacccttaaaaaaataaaaacccccctcccccaaaaaggggggggttcttttagg

SEQ ID NO: 128625 - DNA, 504 bp, Zea mays
  Clone ID: MRT4577_48778C.1
cccggcgcttcgcgtggagctcgattgcgacacagccccagaccgcgatgcagatctcggctgcgacgcggctgccaacggcagcgcgccggcgtccgcgcgcgaggacggtcgtcggctgtcgggcgtgcgtggtgccgtgatctgcgacgaacggcgcgggcgaccgggtctgtgagactgcgacggagtgacgccggccaaggacgtcgcgtgggttgcggccggcgcttcgccgttagccagatctgctacgtagcagaagggcaggcacgcgcagatcctctggctgtcctgtcggcctcttctgcagctgttccagacagtggaagcaactattagacaagccaagtttaacagtacagtacacgtgaatacttcgccctcaagtcctgaacccacacagccaacaaatacgtgtagtactcatcagatatatggcacaggagatgacgatgttgctggttccgcagacgttgatgctgagtaacgttgcagtgcttt

SEQ ID NO: 128626 - DNA, 840 bp, Zea mays
  Clone ID: MRT4577_48779C.1
attccgccgtgattccccgccgcgattccccgccctacgcacgtggatcacgcgcacgtcgcgcacgcccgcccgccaaccgtgattcccctccctacacgcgcggatcatgcgcacgctcgccgccatgcccctacagcacacccgcctccctatgagtgggtgatctgcccgcacagccctccgcaaacccgccacggccaccgcgaacgccgctaactaccagcccgcaagccgcaatcccgcccgccgcggccgcagcagccgccatgacctccgctggaagcagctcgaccacctcgggaacgcggggttcgatccggcgctcttccgggtggacgcgtacgggaacaaactctacctgcacgtcgactccgcctcgcccctcgcctgggacatcgaccactggttcccctgtgccaaggcaaactaaacaagagagagagagagaaaaaggtaaaaagagaaatgtgtgggttagctcgtatcatgcaaccaagataaaagggttacgaagcataagaagctcgtaccagcaagaactgcagttcctatgcatgaaaggactcctgagaggaaggagttgaagggaaacgacccaaccaatcccatttgtttacaacattagccggatctattgcaaagggaccagcattttgaaaagagcagtgaacagatccatcttatttggcatgcttgggaagaaaaactaattcttaattataatgatggcccaagtgttcacatttccagaacagaatctctaccaaatctgaaagtgtaggctattcagaaaataagaagttgtcttgacctcactggacccagagactactcatc

SEQ ID NO: 128627 - DNA, 763 bp, Zea mays
  Clone ID: MRT4577_4877C.1
cggacgcgtgggacaggaacggcccaccggtgtcgcgcgacccggaggccctgcgtgccaaatacacggaccagctggtgttcacgggcgccatccgcgtgaggacgggctacgagatcctccgcctgacgtcgtacctgcagcagcacctgcaccgcatcgacgtcccgctgctggtgatgcacggcgccgacgacctggtgaccgaccccaagggctcgcgggcgctgtacgagcaggcctcctccgcggacaagtccctcaagctctacgacgggctgctgcacgacctcctgatcgagcccgagaaggacaaggtgatggacgacatcgtggcgtggctgagccccaaggtctaacgccggcatgcagatgcccgtaggacgcgcgcgcgggcttcgatcgtctgctgagcgcggaggacctgcaggcggaagacgtacgcctcgcctccggacggtgatgacgcgggtctggtcggccgcggagcaagggagagcgggtgtgcctcctcgcccccttgccgtggtgattatccgagagcaggactacaggagtacggcatactactactacctacgctacggcgatggctttactcgtgcctcccattgtatcccgataatttttgtcaggggtacttacgaattatgtaaaacatgctcgtttcgccctgtacgtgtggctgcacgagcggtgtccgatactgtagaagacgcccgccctcttgtgaattgtgaatgcattaacgcaattccatatc

SEQ ID NO: 128628 - DNA, 400 bp, Zea mays
  unsure (1)..(400): unsure at all n locations
  Clone ID: MRT4577_48780C.1
aaatcantttttttttttttttttttttttggtgggttttttaaggttttttggtgttttttttttttcgtttttttgttttttttttgggacccaaaaactgggtacaaaaaattcagggacaaaaaaaaatgggcagaaaaaaaacggacggggtggtttaaaaacaaacccaggaaacggggtaaaaaataagaaacaggacccctgagaggaaaaagccccaaaatctacaaaaaaaccgggggggggatctaaagctcaacccggggaatggggtttttttggcgggggcccggtcttcccttaaacaaacctaaaaaagggcccttcaagggcaaaaaagtgggttcaagcacaaccggggtaacaagggaaaaaaaggttttttccttttttt

SEQ ID NO: 128629 - DNA, 593 bp, Zea mays
  unsure (1)..(593): unsure at all n locations
  Clone ID: MRT4577_48781C.1
cccagcgttcgtgttttgacctttcacaaaaggggcgggcgctcnctctctaaactgtgtcatgctgttccttcctgtgaactggaacgtgttgtactctggaagtgatgatagtctctgtaaggtgtgggacaggcgttgcctttcnaggggaaaagtcagcagtcgcccagggagggtgggggactgggactataggtggatgccatttccatcagaagctcataatcttaagcatccaggtgatcagtctgtggccacatacagaggccattcagttctgcgaacacttatccgttgctatttctcccctgtgcacagcacgggtcagaggtacatatacacgggatccagtgacaagtctgtacatatttatgacgtggtaaccggggaggctgtcaagaggctttcgtggcatggctccatcatcagagactgcacctggcatccatactacccaacgctcgtcagctcctcctgggacggcttncttgcccggtgggaggcctcgggcgacgacgacgaccattcggtgctcgtcgccgacgagatgagaggaagcccttactaccggggatacggcgatcccttgg

SEQ ID NO: 128630 - DNA, 1234 bp, Zea mays
  Clone ID: MRT4577_48782C.1
tcaaactttgggacatcaggaaaatgtcttccgtcgtgagatcgtagggtcttgcattatagcaatttattatgtaggatattttttttactggaccctaagcttctctgaaatttgctataggacattaaaaattattaggacactacctagtgtcttctagattttttttgacagtgtcaggcagcaataaaaaaattggacaatgccttgagcaaaattatcctgctatgtacttttaagttccatttcctttttttgcgggtctagtttctattgttttgaatttgattctgttgttttcacagtcgcccagtgagtctagtggactgggactataggtggatgccatttccatcagaagctcataatcttaagcatccaggtgatcagtctgtggccacatacagaggccattcagttctgcgaacacttatccgttgctatttctcccctgtgcacaggtcaggaacagcagatatttttatttatgtcaccagcatactgaaattttcctttgaaatactttcaaaaggttacatttgttagtggaaagttgaccgttaacttgagtaggaggccttgcagttgtgctacctgcttctaagcttgtaattagtgatatataatgaatatttggtctaatttttgtatttatctatgtaattaaggcattgcttcgccttacgctttagcgcttaaaaggtaaaaaggaggtcgataattaagatcatacatctaaaacaattatcagtgatgacatgaataatttccatgttcagttcatatcgttgtgctttctgtttcagcacgggtcagaggtacatatacacgggatccagtgacaagtctgtacatatttatgacgtggtaaccggggaggctgtcaagaggctttcgtggcatggctccatcatcagagactgcacctggcatccatactacccaacgctcgtcagctcctcctgggacggcttcgttgcccggtgggaggcctcgggcgacgacgacgaccattcggtgctcgtcgccgacgagatgagaggaagcccttactaccggagatacggcgatcccttggtgatgtagagatgtctgcaaagtggttaacaccaaatggtagtgagcatgtactttgctttgttgtttgggaattacaactgagcagcatgtacagtgccgtttggctcatgtggttgtatagccttacgataaataatatgtagggatacag

SEQ ID NO: 128631 - DNA, 502 bp, Zea mays
  Clone ID: MRT4577_48783C.1
ggagacggggtgctagggttctcctctgcccgctctgctattgcgacataagaggcgaggatgtcttgcagatagtggatcaagctgcggctgcggctcaagctgccagagacggaaagaagtaccctgatctcggaggagacgagcaccgccagcgcaggagcaccgcacgctgctcggatgtggctcccggatctgacctgccgcgccggactcaagacgaggccgcatgtctcctcatgcaaagccacccacgctagcagttgccgcgtcaactgcaaaacaggcgcttgacaaatgctgctcccattgatagaccacactgactatgataataagaactactgcaggagacgcatggataaaaataacaagagaggacgaggagcatgccaccatcaggcaccgcgtgttgtctgagttacgagtgagactacacagatactccatctcccattgtagctgtcggactcgatctccctctctgcatggtctgcatcac

SEQ ID NO: 128632 - DNA, 1487 bp, Zea mays
  Clone ID: MRT4577_48784C.1
gtcgacctcctctatggtcctttggtgttttccagtatactaacttgtaccctcttcttcgtgccgggaggaaccaaaatcccccaaccgccccagcgcacggcccggccgtctcaggcgtccgcggagatgacgcagcaggacgtggagatggcggcgcgccacgggaccggcgccgacggagcgggattctaccctcagccgcggaacggcggcggcggcgagacgctcgacgacgacggcaagaagaagcgcacgggaacggtatggacggcaagcgcgcacatcatcacagccgtcatcggctccggcgtgctctccctagcctggtcgactgcacagctcggctgggtcgtggggccgctcaccctgatgatctttgccttgatcacatactacacctctagccttcttgctgactgctaccgcagcggcgatcagctcaccggcaagaggaactacacctacatggacgctgtcgccgcgtacctgggtcgatggcaagtcctgtcctgtggtgttttccagtatgttaacttggttggaactgccgttgggtatacaattacagcgtccatcagtgcagcggccgtgcacaaggcaaactgcttccacaacaagggccacgcggccgactgcagcacctacgacaccatgtacatggtcgtatttgggatcgttcagatcttcttctctcagctccctaacttcagcgacctttcgtggctgtccatcgtcgccgccatcatgtctttctcttactccagcatcgccgtcggcctctcgttggcgcggaccatttcaggccgtagtggtacgaccactctgaccggcactgagatcggagtcgacgttgattcagcccagaaggtctggctcgcgcttcaagctcttggcaacatcgcgttcgcttactcctactccatgattctcatcgaaatccaagacacggtgaagtctcctccagccgagaacaagacgatgaagaaggcgacgctgatgggcgtgacgaccaccacggcgttctacatgcttgctggctgcctcgggtactcggcgttcgggaacgcggcgccagggaacatcctgaccgggttcggcttctacgagccctactggctgatcgacttcgccaacgtctgcatcgtggtgcacctggtgggcgcgtaccaggtcttctcccagcccatcttcgcggccttggagacggcggccctcaagcgctggccgaacgaccggttcgtcacgcgcgagcaccccctcgtgggcgtcaggttccacgtgagcctgctcaggctgacgtggaggacggcgttcgtggtggtgagcacggtgctcgccatcgcgttgcccttcttcaacgatatcctgggcttcctcggagacatcgaattctggccgctcaccctggactacccagtgtagatggacatcccggagggccctgaacgcaaatatacctggagggggggggggggtgaggtggt

SEQ ID NO: 128633 - DNA, 461 bp, Zea mays
  Clone ID: MRT4577_48785C.1
cggacgcgtgggctccggtatggttccactggtccaggggacaaaatctgctgccagtttctgcaattgcttgttttttttcgctgtgttttcagtggagggacatcttccccagcgattcagcgcgggatcctgctggactggcctgatccctccgtgctggtgtcggcgagcatgcaaggaaggatgcgaggcgcgcggcggagcgcgcgcggggaatcgtcccggaaggcggcgggccgcgaggtggagccattcacgctgtgcggcgagatgtcccatctcaccagggccacgtcagagccgtgccgcagggcccgcggcgccgccttcgcccgccgggcgaggcccttctcggcgtacgagctggtgccggcgcggaaggccggacgcgcgcacggccccgagttcccccctcccgatcgagtctacctcgccacgcaccacatccccaccaaggg

SEQ ID NO: 128634 - DNA, 823 bp, Zea mays
  Clone ID: MRT4577_48786C.1
gtcgatggcaagtcctgtcctgtggtgttttccagtatgttaacttggttggaactgccgttgggtatacaattacagcgtccatcagtgcagcgtgagtaattcttgcataaaaaaaggctcatttagtagtgaatgttttggcagattcagtctcatcgtcgattgagaaaccccttttggctgaatggcgatgagcagggccgtgcacaaggcaaactgcttccacaacaagggccacgcggccgactgcagcacctacgacaccatgtacatggtcgtatttgggatcgttcagatcttcttctctcagctccctaacttcagcgacctttcgtggctgtccatcgtcgccgccatcatgtcgttctcttactccagcatcgccgtcggcctctcgttggcgcggaccatttcaggccgtagtggtacgaccactctgaccggcactgagatcggagtcgacgttgattcagcccagaaggtctggctcgcgcttcaagctcttggcaacatcgcgttcgcttactcctactccatgattctcatcgaaatccaagacacggtgaagtctcctccagccgagaacaagacgatgaagaaggcgacgctgatgggcgtgacgaccaccacggcgttctacatgcttgctggctgcctcgggtactcggcattcgggaacgcggcgccagggaacatcctgaccgggttcggcttctacgagccctactggctgatcgacttcgccaacgtctgcatcgtggtgcacctggtgggcgcgtaccaggtcttctcccagcccatcttcgcggccttggagacg

SEQ ID NO: 128635 - DNA, 2286 bp, Zea mays
  unsure (1)..(2286): unsure at all n locations
  Clone ID: MRT4577_48787C.1
gataatggtatgctgctgtcagttgtcacaggctcaccgagtcctggactcctggttgccggttcaccgtcggagcctaacgtcacgccacacgccacgcgcgggtaacacggccggcgcctgcacggcgcccgcggctccgcgcgctcgtcctacttgccatccgtcactggacgggccacgcgactgcgatccctgccgcacgagcgcaacgcgccatgggtccggcgtgccagtgagagcgggagaagctcggacatctccgtggatttttcgcttggtttcagtggggacatcttctccagcgattcagcgcgggatcctgctggactggcctgatccctccgtgctggtgtcggcgagcatgcaaggaaggatgcgaggcgcgcggcggagcgcgcgcggggaatcgtcccggaaggcggcgggccgcgaggtggagccattcacgctgtgcggcgagatgtcccatctcaccagggccacgtcagagccgtgccgcagggctcgcggcgccgccttcgcccgccgggcgaggcccttctcggcgtacgagctggtgtcggcgcgggaggccggccgcgcgggcggcgccgggttctccgcggccgatcgagcctacctcggcaggcagcacatccccaccaaggggccgtggggcgtcgacgacgtggaaagcgaggcctacgtctcgcagttctccgccgatggctcgttgctcatcgcggggtttcggggaagccgcatcagagtctacgacgccgagaaagggtggaagatccacaaggatataagctgcagaagtgtgcactggacggtttcagatattgctctctcacctgaccaacgattccttgcctatgcaagtctgacacctattgttcacattgtgaatgttcagaatgctggaaaggaatcacatgctaatattactgaaattcatgagggattggatttaaccggtggtgatgaggatgaggactttggaatattttctgttaaattctccaaagatggtaaagaagttgttgttgggaacaatgaaaagtcaatatatgtttatgacctttcagcaaataaagtgtcagcccgcatccgtgctcataaagctgatgtcaatgctgttaccttcgctgatgaaactggaaacgtgttgtactctggaagtgatgatagtctctgtaaggtgtgggacaggcgttgcctttcaggggaaaagtcagcaggtattttgacaggtcatttagatggagttacatttatcgatagccgtggtgatgggcgttatttcatctccaattgcaaggatcagagaatcaaacttgggatcaggaaaattccgtcgtgagattcgcccagtgagtctagtggactgggactataggtggatgccatttccatcagaagctcataatcttaagcatccaggtgatcagtctgtggccacatacagaggccattcagttctgcgaacacttatccgttgctatttctcccctgtgcacagcacgggtcagaggtacatatacacgggatccagtgacaagtctgtacatatttatgacgtggtaaccggggaggctgtcaagaggctttcgtggcatggctccatcatcagagactgcacctggcatccatactacccaacgctcgtcagctcctcctgggacggcttcgttgcccggtgggaggcctcgggcgacgacgacgaccattcggtgctcgtcgccgacgagatgagaggaagcccttactaccggagatacggcgatcccttggtgatgtagagatgtctgcaaagtggttaacaccaaatggtagtgagcatgtactttgctttgttgtttgggaattacaactgagcagcatgtacagtgccgtttggctcatgtggttgtatagccttacgataaataatatgtagggatacagaaagaacacatgagatcgaagcgactttataaatcctatggaatttatagagacaagatcctctttccttgtttttaaaaaaaaaaaaaaaaaaaactttttcgatccgtannnnnnnnnnnnnntgaaaaaaaaaaaaatcaagctcccccccgtgcgggcggcatcgggttccccgcggccgatcgatcctacctcggcaggcagcacatccccaccaaaggggtcgtgggcatcgacgacgtggacagcgaggcctacgtctcgcagttcttcgtcgatggctcgttgttcatcgctggattttgggtaggtgttcgctttctgctcatgagaagttacgtacatagaggt

SEQ ID NO: 128636 - DNA, 338 bp, Zea mays
  Clone ID: MRT4577_48788C.1
ttcaattccgcatcacgcagaggcagagcgaccaacccagaaccccaccccaccgcccgtaaccgcaagctcagagtccctgcccaccccaccctagcccaccgagcgggtcactccagcccagcccgcgttcccacagtccagcgacagcgggcaccgggggtatacagccatgtgcggaggcgccattctgtcggacataattccgccgccgacaccggggggggtcacgggtggccacctgtggcccgagagcaagacgccgaagagggctgcattcggcatgaggggagcccccctggggcaccatgagcaggacgaggatttcgaggccgact

SEQ ID NO: 128637 - DNA, 439 bp, Zea mays
  unsure (1)..(439): unsure at all n locations
  Clone ID: MRT4577_48789C.1
tggtgggatgcgattcttcaagagatcgagcttcttttgcaccacaaggtcgaggatgtcttgcagctgcgtgagtcatagctgcggcatgcggctcaagggtgcaagctgcgtgcaaggaagtaccccctgacnnctggaggagacggggggggtggcttttttttctcaccgaagaacctcgggtgtggcgcccgggaggaagaaggcgcgcgcccccgagtctcgtacgtaggaccctgcggctggagtccccggcgaagggcgccgcccacggacgtgcagactagcggtcaggcggcgtcgccaagtgccgacccccctgacaacctgcgtggatctaacaatcggatgcgacagaccatttggatgactgatctattaatcatatcctagcgtctggtggtggctggtgtggaaccaactaatcacagcgaag

SEQ ID NO: 128638 - DNA, 322 bp, Zea mays
  Clone ID: MRT4577_4878C.1
gaagaagataaaaggactcatggcattattaatataattagtgctttacatgtgttagttatacatattagaagcatatttgcctagtaaggctagtagaaccacatttcccaaagtgtgctccttaaacactcatgccttatgattttctaccaaaagtataaagggttgtattaagtcagaggaagttgcgctctccattttccctctctttatcagaggttcacatgcctgtctgcacattaaaagctctgggaagacctgttgtaaagggacaagttgaggttgtaaaatctgcatttaaataaacatctttgatcac

SEQ ID NO: 128639 - DNA, 273 bp, Zea mays
  Clone ID: MRT4577_48790C.1
tctgcctggacgacctgcgcgcgatggacagtctctacaagcagattaaggtcaagtcgtcgcgcaagggctacattgtgctctaacggatgatgattgccaacacgcaccactgcttcgcatcctgcgccggcctgtgcctcggcgacgtcaacggtttcaagacgtacgcgattcagaacgggtaccagtatgcaggctcgcggttaggccacagagcactgcaactgcaactggaggaaggcgcttttgttactgcctagggtcactgaa

SEQ ID NO: 128640 - DNA, 489 bp, Zea mays
  unsure (1)..(489): unsure at all n locations
  Clone ID: MRT4577_48791C.1
gtctgggcgtggcacggggacggggccggcgccgccaaaagcaccgcgtggacaagcgtccccgtctgtcacgtgngagttgtagcaactttgcgtaggagttaaacacggctgcactggcaccagctttttatatcttttaaagtttcaagttctcgtcgttgtttgggggggggggatgntnnctanttcnttgtgtgccatatgctgtacaggaaggaaagagtcnaatcgagccggggagttttcgatcgaaaaaaaaaaaaaaaaaaaaaaaaaaaaaaaaaaaaaaaaaaaaaaaaaaaaaaaaaaaaaaaaaaaaaaaaaaaaaaaaagaaagaaaaaaaaaaaaaaaggggcgtttctttttaaaagaatccaagtttacttccccttccttgcaaacttaaaacctttttttttagggccccctaaaattaaattaattggcccggaatttaaaaacgctcggaattgggaaaaaccttg

SEQ ID NO: 128641 - DNA, 439 bp, Zea mays
  Clone ID: MRT4577_48792C.1
ccggccgggggttcaatccttacgtccgacggctttggccgtcagaaattgttccttttactgtagtgacttgaaactatatgttggtttcgtagatagagaaatagagaggatacatagaaagagatctcgttgctatttaattttgaatagattgaatagcatgagaattatttactatggatccccttcgtttccttgaccaccaaaccaatcctaacagcctctaaaactagttgtctctaaaaataggtgtaacacggtaaatttcatagttttttttaaacaaacaactctgtagttggtggtgtttttatttgaaaccatttactacatcccacaacttcaatttcaaaattggaatttcatcgagaaccgtctctacaaaatagctctgtagaagaaagataggaaaaaaaaaaaaaaaaaaggggcggcc

SEQ ID NO: 128642 - DNA, 694 bp, Zea mays
  unsure (1)..(694): unsure at all n locations
  Clone ID: MRT4577_48793C.1
tttttttttttttttttttttcctgctccaaaaaatgagtttgtggaagagaagcagaagtcatctcttcttttctttcaatgaaaaatgaatctaagttagcagcagataaatttagtgtatccacagaagatgattgctcctttgttatggaacttggagatgtttccttattttcagggaggcatgtgatttttaagtccagtagatcagatatgatcatcccactgtttggtggtggtacatccttgcttttattcgaagctgtagtgtcagtatcgaattctacaatctcggatccgtcgagtccaagcgagccgagcagccactggtaggccacgccgtcacggaaggcgacgccgccgcttccaccgccttcagcctcctccccgcgcctggggcacccgcagtaggtgcagagggcagaccgcacaccgcgcaggagccctcccgaggccccgcagcgcacgcatcggagctccgccgacacggaggcggcacacgagtcgaaggctgcgacggcatcggcgacggaggggaagggaggggcgggtgcatcttctacagaaggggcgaaggtggcctcacggagagcggactggaggcggtggatgacagcggtggggatctccatcggcggngaggagcgggcaggagtgtgctgggaattcagatctctccaggtccccctggc

SEQ ID NO: 128643 - DNA, 141 bp, Zea mays
  Clone ID: MRT4577_48794C.1
tttttgttttttcaatgatgtcgactgaacttctttatgttaataaagtaacacatgttacagattagcatgaggatagcaatatcaataaccagcattcttgctcctcaatagcatctaactacaggaaatcaagagaat

SEQ ID NO: 128644 - DNA, 493 bp, Zea mays
  Clone ID: MRT4577_48795C.1
tcaaggatcaggaaaccttgctcaaagggtgtgctctaagacgacgtctagccatgataaattcatttcttgtgcaaacaaactaaacaaagaccctaccacaagcttaagctgaggcctattcatcaagttgcatccttgatgacattaagctgaggccttgactatgctgaggctcttactttgacagcaaacctgcggctatcgcataatcctataatacagaccacctcagatctccatgcatgctggacactcgtatccaaaaattgtgtgatgcgctataaaagagctgtctatttctatcaacgtggaccctctattcatacgaagattccttcatactaggcgaccctgatggtgccaacacatggtatactggtgtagccgcagcttccttcgaattcttaactgatcttaaggacatgtgggcatcctcttttgtgagatgagaaacaaacgcctttacagatgatgctctggaccatgttaa

SEQ ID NO: 128645 - DNA, 276 bp, Zea mays
  Clone ID: MRT4577_48796C.1
ctccgatttaccatcggttatgacatccgaaaaaaccaggacgtctccaaccccttttaaaacgatatacggcttttaaactctacggaagaactaaacaacataatccaacatgcaaaacatcaccatcatttgactgaccactatctgatcaatcaataaaacctaccacataacctgtgaacaaacgatctacttaactctgacttactgaaaaaattctacacaatcaattactccacatctacttcacaaatttacaacaatctattatac

SEQ ID NO: 128646 - DNA, 811 bp, Zea mays
  Clone ID: MRT4577_48797C.1
aaacttatcccccctcgcaagtcgcaatcccgtcccctatccgcggtaattcgttcggatcggagccccttctgcgtctcatccatcccgtctcggatcccctctccccacgacctcataagcgactttcccccctccttggttcttgattgcagcagcgactcctggtggtgcttcgccggcagtctcctcgcgtccgtactgtgtcgacaccgtcagcaattccggtcattggtttggtttctgagataataacaggtccaagagaagtagaagcaaaggtccaatcaagatgttttacgcgggatatggttaccatgctagtaattttgagcaaacgtaccgctgctatccagcatctttttttgacaagccacacctggaaggtggtgacaaagtaataatgccgccatctgcccttgatcgtctggcttccctgcacattgagtatcctatgctatttgaactgcacaatggtgtcaccgacaggatttcacactgtggtgtattggagtttgtagcagaagaaggcatgatcatcatgccctactggatgatgcaaaacatgcttcttcaagagggtgacattgtgcgtgtcaagaatgctactcttcccaagggtacatatgtgaagctgcagcctcacacaactgatttcctggacatctcgaatcccaaagccatcttggagaaaactctaaggaacttctcttgcttaaccacgggcgacagtatcatggtagcttacaacaacaaacagtattatattgatattgttgaagcaaacctgcttctgcagttagcattattg

SEQ ID NO: 128647 - DNA, 430 bp, Zea mays
  Clone ID: MRT4577_48798C.1
ccccccccccccgccgcccccccccgatgggtacctcgaagccggacgggtaatgcttatattgtatctattattattattataagtatttatagtgtcgagtaaaatagaaaaaaaaacagagtgtctgctgtatactccatccttttgctattgggtcaatgttggcttgataaaaaaaaaaaaaaataaaaaaaaacaaaaaaaaaaaaaaagtaaaccacactccactccacaactgaacacttaattgattcaatgggaaactagctagctgaatcacaatggatcctaccaagttccgtccgtccagccaccacgacacgacggtgactacaacgaaccctgccgctcctgtgagaaacaataacgaggccctgactagcggagcctccaaaccccatcccgctgaaggactaccacctgatca

SEQ ID NO: 128648 - DNA, 460 bp, Zea mays
  Clone ID: MRT4577_48799C.1
cccacgcgtccgcccacgcgtccgcgctatcgcatcatcggagcagcagcaagggtggatgatatgtgttatatagggaatacaaaattgaattgttcaccgaaaaaaaagacaagaaaacgattgaatgtcaggcaaaacagttctgtaagtcgcggatcaaagcctgaagtgaagtgcctggttgtcttagtattataagtaaagcatttcattctccggttttgatttcattctcttttgtgacggtctacttgcttgtgctaaggctgctggaatgagccttctaagagtaggttttgagacaagatcttgattgatcacttagtctaccttttactcatttcttcgaacctctataagtgtaagaaaagagtgcatgtacttttagtggactttacttttttctatagtgtgagagtactttctgttcaatccagtcgctccagatctgcctgag

SEQ ID NO: 128649 - DNA, 459 bp, Zea mays
  Clone ID: MRT4577_4879C.1
gccggccggttcgggcttcggccatccaatcacgcagaagctgtcgtccctgcacatggcggttctcgactgtgatccatttccgagcttcgaggaatcgacagtcaagcttcagtgaccaagagactgaactctccgagttctacgaggctgaagatcctgagcatctgtttggtgaaggttgcctttggtgcaatctatgctcaggtagagaagaaggcgtcgaggcggatctccaggagttccaggactttgacgagttctaggcgtgggttagcggcaacccctagtcggttgcctgtgaaggccgcgtttatctacgtttcgttttcgcactttgattattgtaaagactatatggatgtcttagacatatgatgtaatcgactattattcccctttttaatactatttgagcactgtgtgatgatggaaaaaaaaaaaaaaaaaaggccccta

SEQ ID NO: 128650 - DNA, 1364 bp, Zea mays
  Clone ID: MRT4577_487C.1
cattgggtacctcgaggccggccgggggtccacaccgccacaccggtaccgcacaacccccacacccgcagcatccccatttctccttcccaaaaccctaggctagtcccccccacacctggatccatcgggtcggaggccatgacgacggcgacgctccgatcttcggcctccctccgcagggctctcctccgccacttctccgtgggtcccgcctcgactccgcgcgccgtctcccgggtcccagatttccaggttcctcagtctattatgtggaggcatttcgcaacgtccaggcctaattctcttgcaagacgcgacaactttggtctgatggcctgtttgcacgctcagatacgatgcgcttcgcaggctgctgctgtgaaagaaaccgaatccagtagcagcaagataagcatcgggcccaaaccaaaacagatcaaggaggatgacgaggatgctaacctggtataccaagggccaatatcatcgaccataaagaaagtgaagcttctctccctgtccacctgctgcctctccgtgtcgctggggccagtggtaacattcatgacttcgcctgacatgaatgtgatcctgaagggagcggttgcatccaccgtcattttcctcagcgccactacgactgcagccttgcattggttcgtgagcccgtacattcacaagctccggtggcgtcctggttcggatagctttgaggccgaggtgatgacatggctagctactcccctcaaaaggactgtcaagtttgccgatgtcaggcctcccgaaacaaacaggccctttgtcacctttaaggctgaggggaacttctactttgtcgatgctgaccacttctcgaacaaggcattgttggctaggctaacgccgcagaagcttcctcatgagtctgcgttcaagaacttgtgattgaaagctgttccgcttgcccatgcctgctccctttgtaggccgttttgagaacatttctgtgataactcttcctgctaatacttttcctgaagatgtgttactatatatttgtactgttgcgtaacattctctatgtggagaattgctagctgcttgtgtcgagcagttttagtttaggaaacactatgaggtctggtaaacagttgagtctgcattttgaataagtagatggccagatatctgcctgggatccttaaatgtcttcttctattctatctgaaattgccttcgccttgctgtcgtcaaaaaaaaaaaaaaaaaaaaaaaaaaaaaaaaaaaaaaaaaaaaaaaaaaaaaaaaaaaaaaaaaaaaaaaaaaaaaaaaaaaaaaaaaaaaaaaaaaaaaaaaagggggggcgcccccctttttttttc

SEQ ID NO: 128651 - DNA, 354 bp, Zea mays
  Clone ID: MRT4577_48800C.1
acccacgcgtccggagaaccgcgagacgcgctacgtagcagagtacaaactaaaagcagccgcaacggcgagcggcactatatggccgggcacaggagggtcggcaggcggcaaggccgggaacgagccgacggcggccgcctccggcgaggcccgcgagacgaagcgcaagacggcggcgaaggccaagccggcggcggcgaccgggagcccgaggaacggccccgaccgcgagcgagaccggggcccacgggccggagagccggcgagcaacccgacgggcgagtacccgggcgacgacggaagggacacccgaggggcagtcggcgggaccggggaccggcgccaagaacc

SEQ ID NO: 128652 - DNA, 604 bp, Zea mays
  unsure (1)..(604): unsure at all n locations
  Clone ID: MRT4577_48801C.1
aattcggcacgaggaacaatcgttgcccttctattaatacaatgatatgcaactctcttgtgtattcgaaaaaaactgaataaccaattacaattattggaatataatataaataaattgtccacctcctcctatcagcttaagcttttaggtttaattggttggtgcatgcaacttaatagcaattaaatttcacaaattcatagtcagatgacaaccaatgtgcagttcccccgctgctgcactgctggtttagagttctaggttcatcgttttttcaatggggacggtggcggatttagaacagattgacggaagcggatggcggaaagaagtctatagaaaattgtcgagaatagtgtcggacgcagctgtgcctggtcaggatttggtgtgaggggggttgtgggccgagagatgatgaaaggcccagaaaattaagaaatcagccttttnttgctgtttttgtgaactggatacacatatttttctactttttgtatacatacttgtactatagactgtatattntatttttttctcaaaatcttggntttggtaattattttgaataccccatgaatcaaatggtggccccgccccg

SEQ ID NO: 128653 - DNA, 311 bp, Zea mays
  Clone ID: MRT4577_48802C.1
ggaaaaaaagaaggggttttattctaatagacgtacgttttacacgacaggaaagactcaggtttcaaaattaagggtttttgcagaatttaaacactaacttattaaggttgggaatgatgtttgaagcgttgattacaagagactaggcagattccgacttggggtacattcttacagggacgggcaaacccagttttgggggggggaccaaaaactgggggattttggtgacaaactcctggggcttgtccgggttaaagggcggttttttggggggctttttcttcaccttggggggtattggggtt

SEQ ID NO: 128654 - DNA, 382 bp, Zea mays
  Clone ID: MRT4577_48803C.1
tttcttccacgcgtacggaccaaggcgaggacgtgggggatcacccatggattcatccggggccaccggggcgagcacattcctgggcacccgcctggcggacccggcgccacagaacgggcgcattgtggcccggctcgggttcggggtgggcggcaaggccaagcctgctgcgaagaaggcggagaagacatcgacctcctatgaccgggcgctggggttcccctgcgccgtggcgcccgactacctggacggctcgctgggcggtgactactggctcgacccgttcggcctagggaagcccgtggagtacctgcagcttgagttggactcgctggaccagcacctggccaagaatgaggacggcggcatcatcggcacc

SEQ ID NO: 128655 - DNA, 449 bp, Zea mays
  Clone ID: MRT4577_48804C.1
attcggctcgagagaaatggtatgacccgtccatccaaatattttgaacagtgcagagaaaactgtggaggccttttattctcttcatagctgagatttgcattatgtgggtagccacctttatcttctctagttcctttttttaacttgatgttgtgttatcacttaagtatatttatgtgtattcaggaatcatgagtattactatagtcatgaaccaacctttaaaatacctatgtgggtgcagtaatctggcaatattattatgaccgatgtgctgtgtggtgttgaatttagtttcttgttgcattctccccaagcgaactcattattatttttgataaagggaacttactcatattttttttgataaagtgaacttattattcatgctgcacttttcagttcatgagtcacacaatataggaattggtgcatattctagggta

SEQ ID NO: 128656 - DNA, 503 bp, Zea mays
  Clone ID: MRT4577_48805C.1
gcaaggtgttcctcctccatgccgctctccctcgccacatcttttctcctcattcccgacgacaagatgaccgcgccagtacccgacgctgcgtaggcccctaccagggcatgggcgggtcgatgcacaagaacgagtaggacccggagatccacgaggacaagaaggtgtactgcaacgatgagctggtgctggtgacgcgcggtaccatgaaggactacacggcagacgagtggagcggaaataacccctactacatcggggacaactcggcgctcgtgatcatggacagtcagatcgagaagttccgctagaagagggcccacgtcgaggagtacagtcccgacgaccactggagggcgatgcacccagacggagagctcgagaatcgagcccgagggggacaactgattgatggatctccgtgttcctcacccggtgcgtgacgaccggcccagtttacattggccctcatgaatggaactgagactcggtatgaccgc

SEQ ID NO: 128657 - DNA, 194 bp, Zea mays
  Clone ID: MRT4577_48806C.1
tcggcgaggtgtcccggggtcactgctgatcaactccaagtttttccacatgaccttgtaccgtggcaaggccttgctgatcaaggacgtaaccgtaactgctcccgggtcaagccccaacacggatggcatccacatgggcgactcatccgtgatcacgatcaccatcaccgtcattgacgtctgtgactact

SEQ ID NO: 128658 - DNA, 129 bp, Zea mays
  Clone ID: MRT4577_48807C.1
cggatatgtaccactccaggatgaagatgcagctctagcaacacaagccgcgccgggggttgccagcccaaaggcggccaaaccgaacgctacttccaactcgtctcccatctcttacctgtttagagc

SEQ ID NO: 128659 - DNA, 718 bp, Zea mays
  Clone ID: MRT4577_48808C.1
aggaggttgaagccacgctcaaagtgctatcgccgtcgatggtgtcctttattaaggatttgcctgctattgaaggaccatcgccggatatcgatgtggtgctcagcgtgctgctgcagagcacattgccagttgcacagagtgctgggaaagcaggtggcgtgagtgagctctcaggcgttggaaaaacgggactgaaccagaatggatctgtccatagacctccaagggagagaaggaaggacgtggagaggcaaggggcgcaggaggaagaggatgcgtcggcggtgcagagcagggcagctgtgccacgagacatcttcaggcttcggcagattcagaggagccgtggcctgggtgtgggtggtgccgccgtttcgcagtctgggtcctcggcattttctttctcgggcggtggaagcgccttctctggggaccactcagctagcacagattagcctactcaccagacatgttcaacagctcagctcaaagctcaactgcgagtagtgagctcaaaggctacctccagcagatttatatcacattccttttctcatcccctatttcaaacatcactttgcaaacagtatcatctatagtttcatgtcccctattttacactacatgctggagacagtctaagaacataatgacatactagtagggtgaccgtgcgttgctacggcaaaaaaaaaaaaaaaaaaaaagggcggcc

SEQ ID NO: 128660 - DNA, 649 bp, Zea mays
  Clone ID: MRT4577_48809C.1
ggaccctcgggccggccgggccaggactttcttctccctcgcggtacttatcctctccccgcgcgcgcaggcttcttgctctcgcgcgtcttcctccctgctccagcgccgcacgccctacttctctccctggcagccgcgccctggatcgcgtgctccctgccggccgagctccccatggcgcgcccctcccttgctcctccagctcggcgctcctctgctcgccatggctggcgcgcgttctccctacgcccggccgctcctctctttccctctctgctcgccgtggagcttccttgccggcgctcctccttgttcagctctccagcgcgagttccgtcatcccctgtcgtgaccctgcagtggagctcccctgcagcgcgtcccttgcttcccatgtcacttgccctcttctcccctctgctcgctcgagcccagccgagctcgcctcagcccatgtgttaggagaggtgagtgagtctctggtacgtgaggctatgtccttgggtcactagtcagtggatcgtatgtaatagtataagtacgacgatggttgccttgtgcttgggaggaaaaactacgaagaaacggaatacagataagctctctgctgtctccttcccaacctaacctatctctctctcgccta

SEQ ID NO: 128661 - DNA, 327 bp, Zea mays
  Clone ID: MRT4577_4880C.1
atggacaactacaggggtccgagggggtccgagccgttcgatcaagatcgaacggggaggggtctgagggggttcgaacgggtccgagcgggtccgaggggggtccgagcggctgtgaatggcactgacaggcgggctagggcgtgtcaggcgcgcatgcgcgaagcggtatcccgcgtgagatatgcgaaacaatgtggcacaactaaggttcataagaatcaacttcggataaacaatgcacatatagctcaaccaaaggctaaagggggcatattttcgataaatgtatatcatgagtggtttacatacttggataagttctaa

SEQ ID NO: 128662 - DNA, 254 bp, Zea mays
  Clone ID: MRT4577_48810C.1
atgcagcggaacaacccacagaacagacgcggggtaaaataatcttgtatgtgtatgagagtcatgcagaggggaaccctatattgataagagtgacgaaatacctaatattagagcaatagagagacccacctatctacaaattctattcgttcaatagacctttgtcaatgcaaatacaatgtaatcagatataaaaaggaaataaaataaggacttaagttggagcggcacgacataaatgcagtaaataa

SEQ ID NO: 128663 - DNA, 114 bp, Zea mays
  Clone ID: MRT4577_48811C.1
actcaggctccgctggtcgttcactctgtcagctccagccttcactcaggcgtagtcccagattatcgcgaggctctagctagtggcggcatgctggcgagtatccatcagcct

SEQ ID NO: 128664 - DNA, 131 bp, Zea mays
  unsure (1)..(131): unsure at all n locations
  Clone ID: MRT4577_48812C.1
gaagctcaatcngggtcagacattcatttctttgtacgagaatcccccattcatatacaagctttgagccgctacaacagaactcatgcttcccttcattttatacgcactgtatgcactcccaacggatc

SEQ ID NO: 128665 - DNA, 262 bp, Zea mays
  Clone ID: MRT4577_48813C.1
tttttttttttttttttttttttgaaaaaaaattacaggtgcttttggaagttttgttcccaaaaggacgacattaatttttagtgttcataacaaaacgggggctcaaccatatatgcgcggggatttttgccccaaagaaaaaaacggccaagtgttatacatttcattagccccacaacaatgggggcgaatagctggtttacttggggaggagccaacaatggacggggggggggaacatataaacgatggcgttaac

SEQ ID NO: 128666 - DNA, 298 bp, Zea mays
  Clone ID: MRT4577_48814C.1
acccagcctcggccagcctcctccccgtcgctctcacgctcttcgtgcccgccgcctccgctcttctcctccacctcaagcatgccgacggacgccaggccgcacgacttcggcaatgcctagtggggccggctcaagccctccggcaagatggagctccctgagcgggttgacatcgtgaagactgcgaggttcaaggagcttcctctttatgatcctgactggaactacatcaggcctgcttccattgtagggaagatgtacctaatgcaaggcatcgggcgtgcggggatttcaa

SEQ ID NO: 128667 - DNA, 768 bp, Zea mays
  Clone ID: MRT4577_48815C.1
atcagacatctacagttgcagtatgggattcactcagcagatcatgtatacattctctcattagttgaatgagcaaaccatatttttcaatgcaagaatagattcttaaaaaatagaatgcatgtaaacattacatgatatctacacaacataaatgtaaacattaaaaatggggcaacgaagaatcgtggctctggccgcctctcttcctggtcgacagacaatacaacagtccttcacaaagttcagttcgcttgtaatatgcgaatccgaagcttccaacaccttttcaaaaatgactgtcatatcaaccttgggtactgtactctcttttataatccctctccattgaactatcagggcgaaatagatccataggactacaccaagaactggacgccagcttcacttaatccttttccaggctctgtgaagaatctacctgcccccataacgtctctgcgtaaatcttctcttcttccttctcttgttgagaacaatcagatagctcaaccacctgctcatcgtcttcatctggcacatcttcgtcagtatcatctggcaaatctacaacatcgttaccctgcagaacacaagcctcagccacagcctctcgcatggctagccgagtggctggcttatcactccccttatatcgcggtggagggacaacaaagggcagggcgatgtcctcgatcctgtgcctactttcacttgcatgctttgacatgcctggtggcagagcaatgagtatgatgccaagctcat

SEQ ID NO: 128668 - DNA, 230 bp, Zea mays
  Clone ID: MRT4577_48816C.1
gcgcagcacgctagtggaatccctgctgttagccgttaagaaacactatctgtatccctaatcgaaacgacaccgcccgatcaggacctccctcctctcagattttgctgcagtgggcctgaaaaggatatattcaaagctcgatcgcacgttcgaaaagaaggtccaatcttattccaaggtgaaagatgctgctacctccttgagtacccagaagtctattactaaga

SEQ ID NO: 128669 - DNA, 229 bp, Zea mays
  Clone ID: MRT4577_48817C.1
cattggcgcagctcgaggacttgcgttcttgcatgcatcagagaagcaagttatctacagggatttcaaggcttccaatattcttctggatgcaagttataacgcaaagctctccgactttgggcttgctaagcttggaccaactggcagcaactctcatatcacgaccagggtcatgggcacctatggatatgcggctccggagtacgtagccaccggacatttgtat

SEQ ID NO: 128670 - DNA, 1650 bp, Zea mays
  Clone ID: MRT4577_48818C.1
aaactattataaattaggtataggtttgaaatatatgctagctcaagtgaacatcctcaataagaagtatagaagagttacttagacttataagaaggccgagcccaccggcacttaacaccatcaacatcagcacaaagttaaaacctgggtaacactaggttagtgtttgttaggcgatgtccgcttgacgagtatccctcgaccgagtacttgtttgatttaaccatcttcagattggtccatcagcttcatcctgcggattagcccatgcttggggtcgacttgggtcttcttccacatcacgcgattaattatcgtacctgacacgaatccgcgagatcggtagcgattttccgatccaaccaacttgtcgagcgcttggggaaatatcgcgctgttaacttcgtcttcacccgacgcttgggatttcttgacgacacacgaaacgacggcaagatcgtgtttggagtgagctggtgaggtgggggttgaacaggggatgacagctttgacgacgatataggagagtggcatatatagagctgcacacacgacacgacgaactaagtcacaaggtcgaccgacaagggatttcaaggaacacgatgctcagtcggcgagctggtaagttcggatagggacggccaaaatacgattggtgagttgagcaactccgatgatttgacgacatttaaaaatatggcgagcccagcaaactccatagtgagctgggaacagcgcccgatgacctggtgggacaggattttatcgtgaccagaggaaaacaaggatggtggggctaatcgacgagatccaaatccccccgcgagcagtattagagacaagcgcgcgcggcagcgaacatggttgattagcctaacgacacagggaccaagcgacaacgtatttagcgaggtcgacgacgaatgacgcgacgacgagctggaataccagggagactcgactgagctggggccgacgaggaaaagctccgtgagctgtgcgtgagcgagcagagagagacgcgcaggggagccactcggcggagcgccatggagagaagaggccgagaaggggcgcggccagcttccacggtaagcacacagggagacgtacgctcacaggaacgcagagaaaaagcaagcgggcaggtcaacgaaggaagagaaagtggaagacgaacggccagttgcctgaacacggtggccggatccaaacgtcatggggcggagcttcagctggttgccggaaaggaaccgaaccgagcaggacgctggacagggcgcaaggaggtgctgacgaactgcagcaggaagccaaggcaaggtcggggagcgcgaccatcgtcgcctgcgagctcctagccggcgcgcgcgcgatggtcagtagctgggcgacggcgcagtggagcaggcaaccatgggaggtgggagctcggctgcaagggcgctggggtgggacgaccgagcagaggagcgcagcagggaagaagcgcgtgagaaactccacggcaagacgcggcggtcatgggagatgacggctggagaggaggaaatgaagttgggcacaccagaggctacgaccagcgaccaaagaagcgagctccagggcgcaatggatagggccgatggcctacagcctggccgg

SEQ ID NO: 128671 - DNA, 258 bp, Zea mays
  unsure (1)..(258): unsure at all n locations
  Clone ID: MRT4577_48819C.1
tctttttcctcgtccgatggcttagagccttgtggtcgacgacgtggcagtcgctggcggggtctcgctctgtncctcacatggtttctgctgcggggtgatgaaatgctgccgggcctttctcttgttggggtggccgccgnctcttccacgttctgtttttttttggccaccgtctccggtggcgtggctttgtgccttgttggcgtcggctttggccggcgctggcggggtctcactttgtcactctcatggttt

SEQ ID NO: 128672 - DNA, 217 bp, Zea mays
  Clone ID: MRT4577_4881C.1
tccacgcgtgcggacagatcgcggagcagggtttctcatacgccactctgaatgagcatggacgacgagcttggaggagagtttgacggggaccacccacacaggaggcggctctggcgactaactgctgagggctcttggcaaggtgtcgatgagagcgatcgaaacatgcggcaccctgtgaaggatccgctacctctgggactcctggagaata

SEQ ID NO: 128673 - DNA, 547 bp, Zea mays
  Clone ID: MRT4577_48820C.1
tcaatgatctggtggtcgcttaccagggggtggctgggggctggggttaactcctatctgaccgtttcgagtgcaagagcacatttgaggctggcatataggcgacggatgggcctgtgaagggcaagtttgatgaagctaaaggatgactgggttggggatcaaaggggacactgctgatatagtgtgcctgggctgatgtttcacttggggagctggggggatgttgcttatgggacgaaagtttcagtggccgctagctggaggcggcatgtatgatgattctgtgttacctaaatagtctattgtcgatctggcggtaaaagcctgatggctggactcggcgctcatctataatggtgctgaattgggcatatgacaccttgccctgcatagatccttgccgctgatggattcatgctactttgcgaggacttatcattctgtaacgacgcgtggtgggtcggtgtggtatccaatgtcctgggtgcaaacaggcgcacggtctactgcaacgccttggctgttgagttggggttccaacatg

SEQ ID NO: 128674 - DNA, 321 bp, Zea mays
  Clone ID: MRT4577_48821C.1
atgcacgcccgcctcgactacctcgcgacgctgctgcagttcctcaccaacacctgtgtcgtcctcttcctggtccagagcgtcgaccgactcatgctctgcctgggctgcttctggatcaggctcaagggcgtcaggcccgtgccgtcgctacccgctgacaaggaggacatcgaggccggtaccgagggcgttcccatggtgctcgtgcagatgcccatgtgcaatgagagagaggtgtaccagcaatccatcggtgtggtgtcctttatgccaatgatgataacaaaagtgaatattaagcctactcagttagcctag

SEQ ID NO: 128675 - DNA, 490 bp, Zea mays
  Clone ID: MRT4577_48822C.1
aattcggcacgaggaaagaaacgctctccccccggggcaaagggaaccgtcgccgcgtcgcggaaaactgaagcggggcacaggaggaggagaggccgaggcagggagagggttccggcggcgatggagcggtacaacccctccgaggtgtacgagctcttcgtgcgccacatgaacaacccgagggtggtggtggacaacggcgcgtgcgcgacggcgacgctggtgcaggtgcacagcgcgaggaagcacggcgtgctgctcgacgcggtggcggccctgtccgaccacggcgtctgcgtccgcaagggctacatctcctccgacgacggccgctggttcatggacgtcttccacgtcgtcgacgccgcgggcggcaaggtcgccgacgccggcgccctgctggcgcgcctcgagtcctcgctctccgccgacgcattgccgccccgcccgccgccgcccagcgacggggtcgggacgcacaccctgc

SEQ ID NO: 128676 - DNA, 418 bp, Zea mays
  Clone ID: MRT4577_48823C.1
tgacaagccacatattaagcggtacaggatccaaccggcagtcgaacaatgcatctcaggattggcaccattgttacgttaacaggtataagtgctagtgcagctgacacgaccgttgcatgtaatgactcacaacatcatatcgctgcacctactacaacatgcgctagataaccgagcggtctactctgagaaaccgcagtcatttaaggcgacaggctccgaccagaacatgcaggaagaacatctcctacatcacccgcgatctatcaacgatggctactcttatcttcagcacagtcagtgattcaaccaattaggtgacttcaactgtaacgattattggtagcagcgaccactactaccattctggcagatagctgttgctaatctcaggaactaccttgcattcaatcaa

SEQ ID NO: 128677 - DNA, 319 bp, Zea mays
  Clone ID: MRT4577_48824C.1
cgtgaatgctactgattataccttgtagattgacgtagagtgcacatcacataattcattgtctggtacatggaagatagaactggttctaggtctatcatttattccgtatggcacagtgtctgctagcttggtcatgaggaatctgaaagcactcatggcatgggtttgatgatcgagtgcataagatttgagattacattagaatcaggcacagctcacagtggatgcagtgtctgatgtcgtgtcgacagaaatattgactcatcacggctcattgtgcgagtatcgatcgaggtgaccgatatagaatccgtat

SEQ ID NO: 128678 - DNA, 651 bp, Zea mays
  Clone ID: MRT4577_48825C.1
atgtacacagaagctaaggctttatagagtaatgataacttttattgtcaaacactagacccacaaggaggcaaaaaaagaagaagaaattaatcctgaaaaatactgttgttctataaataaaatcagatgggtctcttcttcttcaagtagcaaaatcacggcgcttcacgaagatcgggtaccgtttctgcgttcttgtagttggaaagaaaaccagcttgtcttgctctgcaggaacccaactgaagcctgtcactaggcggtgaaggaaaacagagagtgcaaccctagccagctcgtaaccgggacatagccttggccctccaccaaacggtgtgaacacattagaagggcctgtcgttaccgagttgctctgccatctccaagggttgaaagtgcgagcatctttgaagtggtttgggtctaaatgaaccgctctaaacgatgagaatactttccacccttttggaattttataacctttgatctcaacatccgtcattgcacgtctgaaaacaccgccgatgatgttagccactcgtagcgtctcattaaccacacattgtgtgaatggcattgacttgtaatcactccattcaagactatacgaatcactcttcattgccctaatcttttcatgctcttcct

SEQ ID NO: 128679 - DNA, 434 bp, Zea mays
  Clone ID: MRT4577_48826C.1
cccgctccgcttgacagactcgagaggcaaagccgcggaacgactctcaatgggaagggaatacagctagaggagggggcctttggcacgcattcacagcggcaaggccatgcatgcaggacccggaaggccttccccgctaccagcaccggttcatggtgcgtgacgagcaacttgtggacgagaggacactggccgactacttcatacataatgagagcaccctacaacttgttgtccgcctaagagaatgcatgcagatcttcgctacgaccctcactggaaagactataacactagaggtgaaattttctgacaccatctgattcgcttaggtcaagatccaggacatggagggcatccttacgcaccagcagtggctaatgtttgatggcctgcagatcgaggacgggcgcaagctggcccactacaac

SEQ ID NO: 128680 - DNA, 303 bp, Zea mays
  Clone ID: MRT4577_48827C.1
atattttttttttttttttttttttttttttgtgtttttttatttttttggggttttttatttttttttttttttaaaacccccagcagtttgactgacacaaaatttgcagcctaaaaaccaatatatagttaaaaaaagatagccaaaaaacctttaaaacccaaaaaagaccaatggaaaccgtataaaaagagcctttaaacgccagcaaaaaggggtttctaaaagtttgggggagattgaaccccctgcctgcaaaaagaaatttttgaaggggtgggccaaatcccttcttaaaac

SEQ ID NO: 128681 - DNA, 240 bp, Zea mays
  Clone ID: MRT4577_48828C.1
acatccttttttgtttacggtaactactctacctccgaacggccttcttaatatacaccagggctctctctaccccttctcaaatccttttttccatacttctccttattctacctctcgtcaacattacttgacctactactcactatcattatacatgctaatataaaaacttgaccattaatatcatattcacattttactattaatatatcacatactttcaccccattattttca

SEQ ID NO: 128682 - DNA, 237 bp, Zea mays
  Clone ID: MRT4577_48829C.1
gctcggcattccacctacaatccgatggtcaatcagaagttgttaacagaataatcaccatgtatcttcgctgtctagccggaggcatcctaaatcatggctgaaatggttaccatgggcagaattttgctataattcatcatatcaatcggcactgaaatgttctccattcaaggttgtctacggacgggacgctcctccgatggtctcctatcaagcaggggactagtcaaaggt

SEQ ID NO: 128683 - DNA, 311 bp, Zea mays
  Clone ID: MRT4577_4882C.1
ggaggttctataacaaaaagagtgcagttttaacaaagctaactatggctttagaaaacacaaggctacctgaatgcatcaaccaggtaccctgagtattgaaatccaaatagtgaacataaaaagccagcagatggcctcccattgtgctatctgcttttcatcctgatcctgcttagtggcttgttcttactgtcgtggaaagtagaaattcgaatttggagggtgcatatcacaaaatcctaatgtattatatgagctgtataagcccgcaacggcaatcaagcagctgaacagggtgcatcccatgc

SEQ ID NO: 128684 - DNA, 323 bp, Zea mays
  unsure (1)..(323): unsure at all n locations
  Clone ID: MRT4577_48830C.1
cctcccgggggagggggggtacttgcaacttgcctcaaataagggaagaacgatcttttacttcaatctttttcacattgattatcactatggagaccttctttctgttgttgcttacatgcttaccaacttctgagagaaccctacacatccttacatggaggggggggtgattgactaatatttccgctacttacnggatcagtagccagacctgtctgtcaagatattgtcttatttacaccccatctgctatatcttcatttactaacatatgctcctatctagtctgcatgataatccctgatttggaaccccgcgac

SEQ ID NO: 128685 - DNA, 234 bp, Zea mays
  Clone ID: MRT4577_48831C.1
atggatcataaggggaagggaatcatgatcaacgacaaggagaaggagtccttcgtcaacgagccgaaggatgacaatcctaccgactcgggctcaggccacagacgcaaagatgggaagaagaagaagacaagacacatcaaggagatcgtctactacgacgacagcgatgagtccacttcttcccaaaaggacaacgactacgagagaaggaaaccgggacgagtatcataa

SEQ ID NO: 128686 - DNA, 353 bp, Zea mays
  Clone ID: MRT4577_48832C.1
aagtgcttgacgtgccctgctcccgtaccttggcttggatactgtagaggggccggagttttctttcttggccataaacactggtctaaccgacgcagactgacaaattgggtccaaacacactggacagcatacagggcgccgaaagcgctccgaccacgccagcagcagcggagtacgctcggggtccaagggcctgacgccgaggagctactacgacgcgcgcacccaccccagcaggccggcgagcacgacggggacgtacccgacgctggcccgacgaagaaggggctcccttgggcggcgcagtccctcagcgcgccctgcagcgtatgcaccgtcaggaccgactg

SEQ ID NO: 128687 - DNA, 597 bp, Zea mays
  unsure (1)..(597): unsure at all n locations
  Clone ID: MRT4577_48833C.1
ccccggcccagcccaaggcgaaattcacacagcngcagatctcancacgggcnggagcacnntaggagcntctgganttagagctgattcctcaggaactttcngcantaaggatgggctaggcaangcaggttttccttcaggaatggagtcaaggattctggatgttgttaccggggaacactttgtcccactcacttgtactgattctttctctagggccatgtcaggatttcagacttctatccaaaaaaagcatgggtaatgtaaatgagggcggccgctcaggcgatcctagaactagcaagtggaagcttccccatataataaatcagaagtattgctagcttttagaagcacatgacttgcaacaactttatgtccagcgctatgtggtgtgctgcttcgagcattcagtagagacgacttccccgagataggagcttgtggactaaatgactagatgggcactgctgtactaggtaatacctggttccatctattccaattgcagttggtgacaaaacgttcacattggatttatgataggtagaagttgcaagagcacagtgtagacaaccatggtggttgatgact

SEQ ID NO: 128688 - DNA, 312 bp, Zea mays
  Clone ID: MRT4577_48834C.1
tcggaattggctcacggcgcttacgctgggctggacattgcggtgcggctgctcgaggccatggaggaagagttcccaggggtctcttacaccgatttctaccatctcgcgggagttgtggccgtataggtcaccgtcgggccttgatattccttccaccccggtagggaggacatgcctcagtccccacctgagggccgtctttcatgatgccactaatgtttctgaccacctgatgctatgtcttttggcaagcagatgggctttagctgatctggacattgtggccctcttttgttggtcacactttgg

SEQ ID NO: 128689 - DNA, 329 bp, Zea mays
  Clone ID: MRT4577_48835C.1
ggggtgtgggtttttttttttttttttttttttccccaaaaccttaaactagcaagattcgcataaagtagcaaaactgacatttttctactagaacgggcaggtatagcaaaaaacgagcactgtaataatatcccggaccatataattattgaaaccgaacatcctgggagacatgggaggaacaaaacaaattgcaattccagtgggcacccccagcaaataatccaacccggaattgcgaatgcaaacaactgaggccataaattgggggggatccgggtttcctccggattgaggactaaaaaattctcccaaaatttttccta

SEQ ID NO: 128690 - DNA, 1127 bp, Zea mays
  Clone ID: MRT4577_48836C.1
cttctctcttttatccaagtctgtacatatgaaagcaaccagggttgaactaacttcagaaacagccttaaaccaatcagtgggtgcaagtaaagtgataaaaaagatgactacacatcctacagacttgaagagggaacacatgcaagctaatgcagtccctcacaaatctaaaactgctttatcaaaaacatacagcaagctagcatcaaatgggctattggccacctccatgaatgccaaagttgacacgaatgccaaattaggccttgagcctcctatctcggggaagtcgtctctactgaatgctcgaagcagcacaccacatagcgctggacataaagttgttgcaagtcatgtgcttctaaaagctagcaatacttctgattcattgcaaggtgttccttccaaagataataaatcgtcaacaatttctcaactgacaggagcaagaatcacaaaattaggaatcagaagtctgaaatctgacatggccctagagaaagaatcagtacaagtgagtgggacaaagtgttccccggtaacaacatccagaatccttgactccattcctgaaggaaaacctgcattgcctagcccatccataatgcagaaagttcctgaggaatcagctctaaatccaaaagctcctaaagtgctcaaacacatcatgagatctccagctgtaagaaaatcacctagaactgttccggagttgggaaatgaaatgattctgggaagtggaactccaaaagctcatgtggataatgcaatctcctcacgtatgccacctgggatgggagccatttcagatctagagttgcctgtgttagaaaatgatggaaacatagaaaaagctgaggcttgtagaaaggagcttgaggatatatgcattctattgaaaaggaacatgcagaagctaaagagctagcagttcgggctatcgttaacaacaatacgatgctgatgttaaaccacccgatgattgaggagaaaatatcctaagggggcgtttggatcccttcattttagaggaattggaattcactcaataaaataacttatttagtttggaatttgacattccaccactttccaaagtttagatataagtctatctcaaattc

SEQ ID NO: 128691 - DNA, 824 bp, Zea mays
  unsure (1)..(824): unsure at all n locations
  Clone ID: MRT4577_48837C.1
gtgcccaagtggctcacgcgctcccgcaccctagttgtgccctcgcccaccctcgcccacgccaacccctgcctccctcccctcgtgcccgcgtttcggatctgccacctcccgctgcaccctgcctccctctcctaaccttgccagcaggaccaccgtcagtgatgcctcccccccgccgcaccttgcctcctcatcccacctctccaccaggcctgtgtccccgtcgttgctcgtgttgggcccgtgccagactcgtccacgccgctgctgtagagcgcgcgtcaggcgagggggtcgagtgcgcgaccgagatagaggctacgacaacctcctcggccaccttgccatctccattgtcctcagggccaatgctggtagaggcactttggttcctggatgagctgcgaaggaatgggagatggtgggtaagcgtggggtgtagatccgtccaggctcagatcgatttcttcgttcgctggtgagttacctaggcaagctgaacaggatggttcaagagcgcgcaagatcgatctaacaaaataactcagatctgtttgtgtgtcagctcgacaagtgcagttaatactagcatgcttgttgttagcacctaaaaacagtgaagcaggtaacgatatcaatttgatcttgcgtccaactatttcaatgactgaaaatacagtacatgtcatagctgcattctgggtgccatcctcgatcatggaaaacacattctctatcaaattatatctcctcatgtaagcaaatgtagcctcttcttctgnaatnnatgatagttgaacattgatactgaattatatgct

SEQ ID NO: 128692 - DNA, 402 bp, Zea mays
  Clone ID: MRT4577_48838C.1
cccccacggaaagcccattccccaaaaaaaagggggaaaagtttcacatgaccttcagccggctacaaaaaaaaaacagaaacgcgtttttattttttagggaataccaaaccacgcattggctaacaaactatagggaaaataccccgcaccgcccaaaacattggccaaaaaactttccaactataaaatgccccccgaaaatgggccatagcttggtaatcgggaacgggggaccacctataaaaggggttaaaaaacaagacccccccggaggacgggaaaggaaaaccagttcgtggggggggagcggctaaaaaattcccccccaccttagaatcctaaaaccctaaaacccttggggataaaaccccaggggttgaaaggaatgctgggccaacc

SEQ ID NO: 128693 - DNA, 387 bp, Zea mays
  Clone ID: MRT4577_48839C.1
gcttggaaaaaggactaacgggggagggggagcaaaactacagtcgacaacaacaaaatacaggagctttggaattaatgcatatacacaacgataagctgggcaaaacaactatggggatttagagttcacaatgaccaaagtagcgtgcctgtattttcttgataaatattgatatggaacacaccttgccttgaatgactatctggccatcttccatatagatggcaccatttgaatactgtaactctaccaaccgatgagtgacccataatgcggccacctccccatgggtagcctcagaggccctgactgtatttatgacgcatatctggacatgcgcatctaagaatgaggacctgtccccagcagtaatgctttggatgc

SEQ ID NO: 128694 - DNA, 263 bp, Zea mays
  Clone ID: MRT4577_4883C.1
aagcgggatccaaaaagcattggtacgggcccatcaaaaaacaggggctaccgggggaaaccaaacccaggggcccctaactacagcaagacccccgaacaaacgagggaagcctgcaagcgggggcccccccccctaggacgaggggaacttggggacggccttggggcccccggaaacggggtgcttggcaagccccccggggaggacaaggcccccggaggtctggatcccacgggaggggagggggggctttttggtga

SEQ ID NO: 128695 - DNA, 331 bp, Zea mays
  Clone ID: MRT4577_48840C.1
cccggtcgccccgcgtccgtccccccccctttttttttttttttttttttgggttttggaaagcccctttcttattattattatagcacatttattacacagtctctaatagtacaagcgtcttaggcaaacttacatgtagctggaacaacatacgaaacactcacagtgggggggatctggaaccatggccgcgtcgcgcatgcgtacacttttttttcccacgtctcctcgaaggacatacacttggtggtgggtccctggagactgggatgccacgaccggggcgggaagaagtgccattcccaccgtgctcggcgggtgccctttg

SEQ ID NO: 128696 - DNA, 304 bp, Zea mays
  Clone ID: MRT4577_48841C.1
ggccccccccctttttttttttctttttttttggggggaaacccatgtggcccccttggtgaacccagagggttataaagaccaaacccttatgccaccaaagggggggaagatatttaaacacaaatactcccccgggtccttaaagacccgggggtgaagggcccggggcttaccaaaaaggacacctgaaagaattttttggggaccccttaactttaagaagtaactttacgccctacccaatttaaaaagctctgaaaattaccggaagttttttggggagaaaaaaggtcaggagggg

SEQ ID NO: 128697 - DNA, 128 bp, Zea mays
  Clone ID: MRT4577_48842C.1
atttgtctcaggcattctaaccagactccacatttctaggggcgttttgtcccttctcgagtatcgccttgactacaaattataagggaaggcgcgaatttacaagcctgtcgtcctgatgattaatt

SEQ ID NO: 128698 - DNA, 394 bp, Zea mays
  Clone ID: MRT4577_48843C.1
aaaaaaaaaaaaaaaaaataactgcaaatgaataaaaaaaaagaaaaaaaaaaaatacaaatatggcggacaaacaaaaaaaaaaaaaaaaaaaaaaaaaaaaaaaaaaagggcggcccttttaaaagatccaaatttttcttcccctggtttcaaaaaaaaaacttttttttaggggcacccaaattaaaatcactggcccgcgttttaaaaacgtcgggctggaaaaacccttgtggttcccaaattaaatttctttaacgaaaatccccttttcgcaagtgggcaaaaaaaaaaaaagcccccaaccaaaccccctttcaaaaaattgcccacccttaatgggcaatgggacccccccttttaggggccattaaaccgggggggggggggg

SEQ ID NO: 128699 - DNA, 1211 bp, Zea mays
  Clone ID: MRT4577_48844C.1
cggacgcttgggtttgggccgaatcacaggtgcctttggagcccggaaacgggagtctggagcatttccgagttgtctccaccgcgcaagcgacgagaaggcggcgcgccaccaccgctgctggcctgccgccacgactcgccggcagactaggctcctatggcgcgccgccgcgtgctgctcttcctcaagcccttcgacgtataccctccccgcccgtacgtcggagctgcggcctcttctcccacctctgcgccctcgtcactgccgcaaccgcgcgccgccaaccccaaggtcttgagctatctggatgataggtgcagagttcacaaggacactattgatctctgccagagtgtcttacagcgcaagtcccttgactggattgctgtgcagcgcaatcatttgtgtcagccaatacgtgatgtggatcttgtggttgctgtcggcggcgatggcacccttctccgggctagccattttttggatgattcagttcctatattgggtgttaattcagatcctacttgtactaaggaggttgaggagctatctgatgaatttgatgcaaggaggagcacagggtatctttgtgcagctactgcaggaaactttgagcagatacttgatgtgacgcttgatggcagtaggcgccctttggagctgtcaaggatatcggtgaaactaaatggaattcagctgccgacttatgctctgaatgatatattggtgtcacacccttgtccagcaagtgtgtcgcgcttctcatttaggaaaaggaacaatacaggagagaactcgcgtttaattaattgtagatcaagcggtctgagggtctcaacagctgctggatcaactgctgccatgctatcagctggaggatttacgatgccattatcaagccgtgagcttcagtatatgataagggagcccatttctccaatggatgccgacaaagcaatgctccatgatgttcttaagcaagaacaacacatgcatgtcgtgtggtacaatcaagagggtgctgtttatgttgatggttcacacgtagtgcattcaattcagcatggggactcacttgagatatcctcaggtgctccgaccttaaaagttgttttgccagaacatttgctaaagatgggacctgaatggtgaaataacaatatttttgtgatgttccttatctatttaatatgatataggagttgagc

SEQ ID NO: 128700 - DNA, 271 bp, Zea mays
  Clone ID: MRT4577_48845C.1
aatataataaaattttaacttagcaaacaattgcctatccccctaccaaccaaagaccggtggctcccaaggccgtgtatgatcccgctgctaataatccgttggaggatgatcccgcgtgccttgtagacgacctcctgtgaagaagcccaaggcggtgaatctggttcccgctggcaagtcctttctgcaaggaaggcttctaggtcaagcgtggcaagaagatgtgcttgattgatcgtggtgactttcaatatctacatcttcaagg

SEQ ID NO: 128701 - DNA, 370 bp, Zea mays
  Clone ID: MRT4577_48846C.1
tgcggcacatgcttattttcagtatctttcccattcatcaactgagcttcaatcttcatatcaccatgatgctttgaaagggaaaacaagaagctacactatgcgtgcgatgctgtatctacttcacataatgttgaactatggggtggaactgaaggaaacacttgaaagtgggctttcaacagttcctttattgccatggcaggagattatacctcaactttttgcacgcttgagttcccacccagagaagatagtgagggaacttttggagagtatattgctgaagctaggaaagttatctccttgctctattgtatatcctacattggttgatatcagtgcttgcgaaggagaaccctctgaggag

SEQ ID NO: 128702 - DNA, 1226 bp, Zea mays
  unsure (1)..(1226): unsure at all n locations
  Clone ID: MRT4577_48847C.1
ccggccggggttatcggtggacttcttggggcattatttaatcaactcaccctctatataactaaatggcggcgaacgtgtcttcataagaaagggaaacgagtccaaatctttgaagcctgtcttatatctttggtaacatccacgatttcctttgtgttgccactactgaggaaatgcagcccatgccctaagttagaaactaattctggcatagaatgccctcatccacctggcacagatgggaattttcggccggtctattgctcacaagatagagagtacaatgatttagcaaccattttcttcaatactcaggatgatgcaatacgtaatcttttcagtgcaaaaacatttcatgaatacagtgcacaaagcctgatcactttcctggtcatgttttatttcttggctgttgtgacatttggaactgcggttccggctggccagtttgttcccggaataatgattggatctacatatggaaggcttgttggaatgtttgttgtcaagttctataagaaactaaacattgaggagggcacgtatgcactccttggtgctgcatcgtttcttggaggttcaatgagaatgactgtatctttatgtgttatcatggttgagattacaaacaacttgaaactcttgccattgatcatgcttgttcttctggtttctaaggcggttggtgacttttttaatgaaggattatatgaagagcaagcccgattaaggggcatccctttactggactccaggcctaagcaagtcatgagaaatatgaatgcaagggatgcgtgcaagaatcaaaaggttgttgaccgtgggcaaaatggcgagtcacttgtcataggtctcatgcttcgtaggtaatggtcttagggcgcggagacaagcagactgcagccacacccctaccaaatcgagcacagctgcaggatcactctcctacagccaacctccacgtgatacaagaccatgggccacatgcatctagtggttgcgggatgtgatgacaggtttatgtttntgatggtgaggtttnctgatatgaagaagcaggaacttgttaaangatagtttnaatgagatgatgtaatcaaagatttgattggggcagtagaggtagggggataaagatgcgattgaaaaattgggcaagaggagtgttatggttcttggggngctttaatgagattgggtacgagttttaagagttatggggg

SEQ ID NO: 128703 - DNA, 176 bp, Zea mays
  unsure (1)..(176): unsure at all n locations
  Clone ID: MRT4577_48848C.1
agtcagttaccttttttgcatcnaacatcacacacacatggtgtccatctacaaaaattgaaccccccacacctcattctcatcttcttcaaacataaaatgctcagatcacttgtcgttacccctattatagtgaggcatgctttttaaatgaaacgccagtactgctctagatc

SEQ ID NO: 128704 - DNA, 1343 bp, Zea mays
  Clone ID: MRT4577_48849C.1
gccggccgggctcggggttaaaaatactactacacaaaaatcttccccactccccgtctcacaaaacgccgccgccgccgtcgacagccacctccccgcgcccccaccgcctccgcgcaccgccccacacctgattgcgcgcccagaggcattcagagctctctgctgtgggagcaacgagggcagggatgagggaggtggtgacggtgcaggtcggcggtttcgcgaacttcgtcggctcccacttttggaacttccaggatgagctgctcgggctcaccgacgaccccggcgccgacccggtattcaggaccgccgcgctcgacatggacgtcctgtaccgcgccggcgagacacaccagggcgtcgccagctactgccctcgcttggtatcagtcggttctcgagggtctcttggctcgttaagttcctctggcactctaggttcgagcagtgcagctgcagatgagcccaacatcttcacatggtctggaaaggtaacaaaatcagtagcaaaacctcatgagcgaaacttgttcctacaaagtttatctgaagaagaacagaacccaagctctagcgatggccaaaacaatgctagtgttgaagataaggacctggtcgcaaatctggagaatggagtcaaattttggactgattattcaaaagttcagtatcaccctcagagcttatatgagttgtatggatcatggacagactttgaaaggtttgataactatggaactgcaaaggaggtggtttcagaatggtcccaaatggaggaaatgaatgagaggctaaggttctttgttgaagaatgtgaccatatccagggtatccagtttcttgtggatgattctggaggctttgccaatgtagctgcacagtttttggagagtattgttgatgattacacaaatacccctgtaatgctgtattgtgtgcggaatccagactcctatgggtcttccagaaatcagcgtgaaaccatcataagatctttgcatgatgctgtatcgttgtcaaaactttcatactactgcaatctgatggtaccaataggactgccttctctaagttacttgtcacctttgctttctataaaagacgagaagcacttccactccagtgccatttgtgcagcagcactgcattcattatctgttccattcaggctacaacacatgggcccggcctcagatttagcgcattcatctggtaagcttgatattggtgagcttgtgcacatattatctgatcaagggaggcagaacatgatcactgcgctggatgtagcaatgcctgccccttctttgacagatagaaaagatttgaggacatac

SEQ ID NO: 128705 - DNA, 407 bp, Zea mays
  Clone ID: MRT4577_4884C.1
atggaactgctgctgaccatattgaaacgtacaaaatgcatgcatccatccgggctcgtacctgatcgatgtacatgtaaatcattatcaatatatataatgaacgaataaaatgcatgtgttgaaaaagaaaatgaaagaggaaacaaagataaaacctgagttaacataaaaaaaccgaaaagaccgagtcactgaaacccttaccagagcagagaagagaactcactgcaagcgagcagcagcatgcaccagagactgtacgccatcgagttcgaacatcagaagtgagatcgcgaagctcagattgaacggaagatcactgagcaagcaaatcctgactgaaatctctaccatatatactccctaccaggcaaaagcttggtagctcaccagttcatacacct

SEQ ID NO: 128706 - DNA, 3152 bp, Zea mays
  unsure (1)..(3152): unsure at all n locations
  Clone ID: MRT4577_48850C.1
gtacccctcggagctgtccggggctcattcggcacgtcgcacaaaacgccgcccttggatgagccaatcttcctctcgcacggcccactccttacccccaccgtcgacagccgccgccgccgccgccgccgccgtcgacagccaactccccgcgcccccaccgcctccgcgcaccgccccacacctgattgcgcgtccagaggtattcagagctctctgctgtcggagcaacgagggcagggatgagggaggtggtgacggtgcaggtcggcggtttcgcgaacttcgtcggctcccacttttggaacttccaggatgagctgctcgggctcgccgacgaccccggcgccgacccggtattcaggaccgccgcgctcgacatggacgtcctgtaccgcgccggcgagacacaccagagcgtcgccagctactgccctcgcttggtatcagtcggttctcgagggtctcttggctcattaagttcctctggcactctaggttcgagcagtgcagctgcagatgagcccaacatcttcacatggtctggaaaggtaacaaaatcagtagcaaaacctcatgagcgaaacttgttcctacaaagtttatctgaagaagaacagaacccaagctctagcgatggccaaaacaatgctagtgttgaagataaggacctggtcgcaaatctggagaatggagtcaaattttggactgattattcaaaagttcagtatcaccctcagagcttatatgagttgtatggatcatggacagactttgacaggtttgataactatggaactgcaaaaggaggtggtttcagaatggtcccaaatggacgaaatgaatgagaggcttaggttctttgttgaagaatgtgaccatatttagttcatatcatttttactgcaaactatcattaaacactcaatccacactatgggcggtgttcacttacatattgagtgaccataaagaatttttctctcttttttcgatcattgcttgacctttgatattattgaaatctatttactacagggtatccagtttcttgtggatgattctggaggctttgccagtgtagctgcacagtttttggagagtattgttgatgattacacaaatacccctgtaatgctgtattgtgtgcggaatccagactcctatgggtcttccagaaatcagcgtgaaaccatcataagatctttgcatgatgctgtatctttgtcgaaactttcatactactgcaatctgatggtaccaataggactgccttctttaagtatgcttctgattgcttataatcttttacgtagactgccatataacatgtgattctcttatccattctccattgtagcatgttcgtatgtgcagatccttataattctactgaatgtacagtaaactcataattggacttgtgattctttttagtaatttgaggcttcttatagcagtgcttggaccttagttttgcaaatgtttcatttcctgatctttgatcataagctaaataaacattcagatgttgcattcttcacctcaaataactcacacacctgctgttggtgaatgcaatgctcattctattataatccagccctatggtcagcatgcctatcactgtcacattgtttataccgaattttgtgtaggttttgtgaaagcttgttgatgtgtgttcctctaacattgtttttttttactttgactgttcaggttacttgtcacctttgctttctataaaagatgagaagcacttccactccagtgccatttgtgcagcagcaatgcattcattatctattccattcaggctacaacacgtgggcccggcctcagattcagcgcattcatctggtaagcttgatattggtgagcttgtgcacatattatctgatcaagggaggcagaacatgatcactgcgctggatgtagcaatgcctgccccttctttgacagatagaaaagatttgaggaacatacagaggagcttgcattctctgacacctgaaatcagcgacgaggatgaagatccttacgctgttgaatccatggtggttcatggagtcctagatgcaggcgggaaaagggcttccatatctcaggtgaaggaatccatctgttcagcactggaaggcagggcgacgaaacccaagttctcccacctctcggtatcgccgtgccccctcccaatcccgctcccgttcccgtcaatcttcagcagcagcgtaggccagcagggcgagatcctcggcaccagccatgcagaaggagcccggccaaagggtccgcttgccgtcggctcggtaccgatggcagcgcgcctgaggtcgagcagcgccatagcgccattcatcgagaggaggtcggcgagcctccagaggctcggtgtcgccaggggcacactgggctcgcaggtcctccacgactggggcttcgggagggaggaggtcgaggacatggctgagcacctggcgaagatgctgcgcccgttctacccggaaatggacctgacgtcggattctgatgattaggtttcactgtcattgtgtctcgtattaccggatggtaagcagctgggttttagtctgtgggaactagaaactgtgatgcagatgcagctacgccatgctgcgatgcattcctctggtctgtgttgaagggatgcagagtactggaaacgagatctgagagagcctgggcgtgtgaccgtgtcattcagcgctccgcatgtgatgcacgtgcatttgggcgacgacgcggacgtccgccgccatgggcagttgttgttgtaacattgtgcaatgatccagccctgatgcagatgtccagatctgtgctacacttacctgcaaaccacacagctaatgaaactaaagaacagtctttctggtctgagatgttttctttgttggttttaacttcgcgagcacaagaactgtaaacctggcagtttttctagtatgaaaaaaaaagcattatttggctcgacaaactgcattgttcacttggatcttcatatcatcacagccaagtgatgttctaactcctatcacttgtacaatttaattctatggtttccgttttctccttactaaatgcttcaagcgtcatcgattctttggcgtnccacgtttgtgaactga

SEQ ID NO: 128707 - DNA, 412 bp, Zea mays
  Clone ID: MRT4577_48851C.1
attcggctcgagacagtctacacagctgaccattgagctagtgcaagcgatctagcaagcttggatcttgcaagaagccagctaggcgcgtgaatatggatcgcctcactgtgatggcgccgacgatgctcgtcctcctcctgctgctcctctcgcggtgctcggtggcggcgtcacggcgcggtggaggctggtgggaggagggcgagggggagtggaggccgagcgaggaggaagagaagggcaaaggcaaagggagggggctgatactgctgcaccgggtggagaaggagggcgagccggagggcgatcaggttcgcctggtgcgcgaccagttctggccagcgatgtccttagactgccgcgaggggctcatgcacatcgactccataaccatggagcccaagacgct

SEQ ID NO: 128708 - DNA, 353 bp, Zea mays
  Clone ID: MRT4577_48852C.1
gctactagtgcgtcaattattgcttcagactgttaaactgcgacgctttaaccatgtgagcttccacgtgtaatagcatacaggatcctacctgtattggccttgtggatttaacatttatcagccttatttttggagcaatcattggtactaatactgcaggtacatcaggtgcattaactggcgctaaatgtgatggaacaactacttctggaacacgtgcttgcatactttgatgaataatattagcttccattgatacaactggcgacactgaaggctgatgataatttggcgcaacaactattaccatttaggctagtagatactgccgactactatcagcaacaact

SEQ ID NO: 128709 - DNA, 123 bp, Zea mays
  Clone ID: MRT4577_48853C.1
tatttttttttcgttgaaaacgcaggataaactttattacaccacaagcgtatcaaagaggagaaaatccgcctttggggccatgtgaagtaaaaaaaggagcccatgacgcaagatgaacta

SEQ ID NO: 128710 - DNA, 847 bp, Zea mays
  unsure (1)..(847): unsure at all n locations
  Clone ID: MRT4577_48855C.1
cggccgctcgaggcggccggccgggaacctcagctcgtaaacaagcagctttgctagagcggaacaagtttggccaccgttaaccttatttcgaaatggcgaggtcgcccatggcgatgctcccgttcctggcactcggggtagcagcactagtcctgtctgccgcgggaatggtggccgcgcagaagtgcggctgccgggcgaacgagtgctgcagccagtacggctactgcggcactaccgacgcctactgtggaaaaggatgccagtccggcccgtgcacggcgagcggtggtggcggcggcgggagcggcgtctccgtggagagcgtcgtcaccaaggcgttcttcaacgggatcaagtcccgggccggcaacgggtgcgccggcaagagcttttacacgcgccggtcgttcctggccggcgcccgggccaaccccaacttcgggaaaggcagcaccagcgacgacggcaagagggagatagccgccttcttcgcccacgtcacccacgagaccggacacatgtgctacatcgaggagatcggcggggcgaggcagaactactgcgacaggaagtacacgcagtggccgtgcgcctcggggaaggggtactacgggcgtgggccgctgcagctgacgtggaactacaactacggggcggcggggaagagcgtggggttcgacgggctcaaanacccggagaaggtggcgaagggacccggaggtggccttcaaggcggcgcctctgggttctggatgaccaacgtgaagcaggtccctgcccgcggnngattcggcgcgacgaccagggcgatcaacagcggcgagtgcaacggcgggaacgc

SEQ ID NO: 128711 - DNA, 363 bp, Zea mays
  Clone ID: MRT4577_48856C.1
tcgatcgacaccatgagggtgttgctcgatgccctttctctcctggctctagatgggagcgccacgtgcacgcatacaagctgcggctgcggctgacagccaccgccgccggttcatctaccgccgccggtgcatttgccacctccggttcacctgccacctccggtgcattttccaccgtcggtccacctgccgacgccggtacacctgccaccgccagtccatgtgccgtcgccggatcatctgtcgtcgccaccatgccactaccctactcaaccgtccctgcctcagccttattctcagccacacccatgcccgtgccaacaaccacatacaagcccttgccaactgcaaggaacctgc

SEQ ID NO: 128712 - DNA, 360 bp, Zea mays
  unsure (1)..(360): unsure at all n locations
  Clone ID: MRT4577_48857C.1
cagctactgacggcgatgtgcggcctgcagcatgtttctacatgcgcggaggcggncaccaaccgagtcccccacttaagaaactatgtgctgtagtatagccgctgactagctagctagtcgagtcatttaacgtctatgatttgataaaaaatgtgtaacgcatcactatggttggcactttcattatgagcaatgacctgaatgaacaactgaaatgaaaagaaaaaagtcttgttccaatcaattaatcatacttatttagttctaaaacttataaagtataacatcatcaaattaaatggtttttttttttttttttttttttaccgattcctgcaggcgtaccacgcgtcctta

SEQ ID NO: 128713 - DNA, 314 bp, Zea mays
  Clone ID: MRT4577_48858C.1
aaaaacgaattgttgaagggattcaaacaaatgggaagcgatgataccagggttaatccctttttcagggggaaaaacattagggggatgcataaatttgttaaattaagggaaaagagggaacaaaaaaaaagagggccaaaggggtgtcaaattaaaaacatgccccccccttggaatgcgcgcagccatgtaactttttttcccgctttgtttttttcttggcctccgggcaaacggcccgggccggtttatttaatgttataggcaaaaaaagaggcgaagggggccccaaggggggcgcccacgggggg

SEQ ID NO: 128714 - DNA, 255 bp, Zea mays
  Clone ID: MRT4577_48859C.1
aggaataggatctgcacattgccacccttttgaatttcaaaacaagccagccctggggaaaaacaaaaccaaaaacaaaaggggggggcgccttctccacaccagggagaaacaaaaacgccgggaacccgcggggcatgatgacaatggataaccaaagaagaagggagcccgccgagcgagctataaagctttttggcttgggcgggggaggaccaagggcccaacaagaaattcaggaggacttggttgaaa

SEQ ID NO: 128715 - DNA, 491 bp, Zea mays
  Clone ID: MRT4577_4885C.1
gttagcacaatagcactgtcacagaatactcgttgtgtacagatcagacattgagactgcgagttgtgatctgtctatctcagtctccactacctgacgccgccggtggttgccgttttcatgaacagagcttgtgtcgttggttcttccaccttcgtgtcattgcgcctcgtgttataaattagtgttccctaaatacagccatgatattaggattcatccttttaatataagctccgtaccaaaatagtattcggtttagttttccatttttatatctatatttatctaggtgatgatgaatatagactcatatatagaacacatgtaccaaatattgtatgaatccactaaaaccaaaaaacttttttttaatagaacaggtagatctcgtgccggctcgttcaaaaaaactaaaaaccaaaacaaattttgttttgggacaaagggagtactaaacatacagcgtggcgcttcattgactgaggaaa

SEQ ID NO: 128716 - DNA, 521 bp, Zea mays
  Clone ID: MRT4577_48860C.1
tcttccttttttattttgccattttcattgtgggatgggttgtgcccattagtggggtctttcattgatggcagcagtgtgttatgttctagagttttcttcgtttgttgtctgcaaacaagggtacagagcttttagtttggaaatccaattcatctggactgaaattgattttgagagaaggaacaccttcactattctgtgcttcgctgaagctgatagtcagtagcacatagcatttttaagattttgtttaatactacctccgttctcgaatatttgtcgtttgctagttcatttttaaactaaaacgcgtcaaataaaaaagaacggagggagtactttgatactcgtagaagcagtttgctttgctttctaaggtggttggcggacctattcattacaaaattttggtatgtcacattgatggccttttggtaggaacttaagttggaagattgccctttttttcccccttgtgattaggatagggagttaatagctctgggatttcgaaaata

SEQ ID NO: 128717 - DNA, 456 bp, Zea mays
  unsure (1)..(456): unsure at all n locations
  Clone ID: MRT4577_48861C.1
tctgtctcgtatcatttcatgactccaactccagtcaagttgtttcgtaccatcgactatgtctatgcgaagggatggacgagtatggttcgtacgctggagaattgactctgcaagccgattgatcaagtgcagtctacatgcgtttgggcgactcctgatctagctcgcggacatgcagatcggcaaagtggcttcaggtccccagataatggcgctggcanagtgacaagtcgccgtcaaatgtcgtctggtggcaaaggtcaaagcaggaaggtcttctctgagggcttgcagaaccgtggaaatcgggnggagggtggaacctggaagctggaagtaggatacccactcaagtcagtagaagtttaaaatccaacctgtagggctaatatgtgattgcatgttatcatggtgttgcgacacaaagtccctgatgcctcttgatcatctttc

SEQ ID NO: 128718 - DNA, 303 bp, Zea mays
  Clone ID: MRT4577_48862C.1
gcgtaacgcaaggagtcataggtgtaccactgccgctttgccatgctcgccgtccccgggatccgggggccggaagctatgggggtggggaactgaaagaaggcgcaagagtgggcggccgaccccggaggacaggccacgtacctgggcgccccggtgccgaggggcacgctgtcgaccatactggtgatcgagttcgtggtcatcaccttcgcacgagcaccaactcaccatggagaaggaccccgagaagaataagtaccccagaggtaccttccacccgatcggtttctccatagaccc

SEQ ID NO: 128719 - DNA, 1800 bp, Zea mays
  Clone ID: MRT4577_48863C.1
gggagagctaaaacaaggccgtgaacacgaccagtagaaaacggacaaacaaattcagcgtggacacaaacgcaacagctaaaataaggccgcgtgcatccatccatccatccgaccgtctatttacacatctcagtctcaaacactcaactcacaagaggcccctccggcgtacgaccggccgggtcagtcccacacaatagcagacttcttcggcgtcaccatgtcgctgtgcggcgccggtcctcccctcgagagcggcctggcagcgggcaccatcggcgccaggtagttgcctacccggacgtacccgcgcgcgtcgtaccgcccaccgtggtgcggcacgggcacaggcacgggcacgggcacgggcgccgtcgggtactggtgctggtagtggtggaaattgttctgcaacagcatgggccccgcgccggcgtgccttggtgagccgctcacgtagcccgatatgctgccgtccacgccgtgctgatgcaagcgccgcgccgccgcgtccagggtgctgaggttcggcgagctccggacgcgctgcatcccgaacccaacgcccaacgcgttggcgcgcggggagttgcccgccgagacggcgccgtgcggctgggcggagaacggcgggctcccgtcgggcgaggctggtacggtggccacgtagcgctccggctggaattggcggtgctgctgatggtggtggtgatgcgggtggaggcgcgacagaccagcgtagcgggtagacgagggcacggtgggtgcggcggccgacgggtggggcgcggtggcctgcggcgtgaagacgtagacgcggaagcgcggggacgtggtcggcgagcgcttcgcctcgaggcggtcgtactcgtccagcatgtggaccaggtcctcgtcgcaggtgacggagacgagcacgtcgagttcctcggcgagggagagcagctggtacttgatggccgcgacctccgtcttgaacatgtcctccaccttcttcttcaactcgcggaagcagatggagcgaggcacggcgaggacgcgggtctccccgccgacgtacttgagcacgccgtcgtgcgggcggggcacgatgcggccgccgaagctgcagaggatcttgatgcggcctcccccaccagctccgcccgcgccgccgcagatgcaggtcggcgaaagatgcacgtcctcatctgtggtcgtgccctcggactccgtcgtcgtcaccattggcggcgcacccatcgcgtcttctatctcggccatggggtgccttcacttgaatcccagcagaagcagagcacgcgaaggaatatcccgtaaatatcagaccagagataacggaacgaagcgggagtggagtactaatccaaccaaccggcggcggcggcggtacgggcgacggacgaacagccgccgagcgacccagatcgagccggacaaaggaacaacaacaagggggcggaagcaagcgaagggcgacccccgagaaacttagtagaactaagttattattcgtccgggtccgggacagaggccgatgaatcttccattcgggagtggctgatcaatcttcgcctctcctcaccggcgggcgtggccggatttagggaggacggacggacggacgcgcaggtcgggggctcctagattcgaggaccagccgctagcctattcttggggcggggggggatgggatggggtggggcgattgccgatttcttcctccctccgcgcccgcggaggacttggaactggaactcacacggcggctgcggcctccccggcccctcgagtatt

SEQ ID NO: 128720 - DNA, 193 bp, Zea mays
  Clone ID: MRT4577_48864C.1
gggatggccggctatcgccaatgttgatctgcgcaagaaaaccaattacctcctcgtcgacaacaagactacagttaaacaaatcgaggacgcgttcaaagaatttactgcaaggcaggagagggctattgtgctcatcaatcactatattgccaacatgatacgatttctggtgtatacctacacctaccct

SEQ ID NO: 128721 - DNA, 851 bp, Zea mays
  unsure (1)..(851): unsure at all n locations
  Clone ID: MRT4577_48865C.1
ngatgaatcgagctgggccggccggactctgttcttctttctcctgtctgtggctgtagattttgagagctattactgttcttcaggcatctcctgtccgatcccattctcattcgtttacgctatcccctggtggttcttgctcagctgctctgctggggaggggaggggcggaaagagaagagaagaggaggggagtcaaaaaaatttttctttgttgtttttccctgcttttgttttgcctcccccaccccttgtttgatgatgctgtgttcttttctttaatttgagttcttgatcctgccaaaagcaaaagccctcacacccttctgctcgcaaaggcgagaggggtgtcctgccacttcaaaccctccggcacgaggtcggatttctgtctgcagtttccttacctctgaatcccgttccctccacgaaaacctcggatttccacgcccagtgttccaccaccgcaaagatccagttttttttttcctcccgaagccgcagtttccctgcgcgagctggtctggtccaagaacacacaccaaaaatctctctccccattgcgcacggaaatctcggggggtttccccgccccatgcctcagtccgcccgttgatccagaccgccacgccaccgggttcggtagctgcgtcgtctcgatccgaggcccatgcatctgtcgctatggaagccgctgtcccactgcgccgccgtcctcctcgccaagaaccaccggcgccgcggcggcggnggcggcagcaacggccgccgtgacgactcgtccgccttcctccggcagctgcgggacgcgctggacgcggcgtcggaggacggctccctctgcccgc

SEQ ID NO: 128722 - DNA, 237 bp, Zea mays
  unsure (1)..(237): unsure at all n locations
  Clone ID: MRT4577_48866C.1
cggactaccntgacgggtcgacgggggatcagagcctctgcctagccagtgctcgcattgccatggtgggtgcgctggcttaccatctccccaagtgggagagtggacgtcataatttgtggtagagggggtacgcgttcgcgcggcccctgctacgttcacggttcaccagtctcgtcgtgtccgttcgcgatcgggcaaaccgtggggggggtgctcttcntcccccccctatct

SEQ ID NO: 128723 - DNA, 194 bp, Zea mays
  Clone ID: MRT4577_48867C.1
cccttcctaaacttggattctttaaaacgggccgccctggggtgtttcttctttttctttttttaacccaccacacagggttttaagataaatggcccctcaccattcatacaatttttgcctatccggcagaactattccaacgattaaggaatcccccttaaaataaattaaggacgttagcgcccatttcc

SEQ ID NO: 128724 - DNA, 109 bp, Zea mays
  Clone ID: MRT4577_48868C.1
cgcatgcacctctgtattccgctcgatctgcgatcgaaggctgcaaaacaatgacccacaaatgataagggaatgagctcttgactcaagctggtcattttcctctcaa

SEQ ID NO: 128725 - DNA, 429 bp, Zea mays
  Clone ID: MRT4577_48869C.1
gaggcagccacaagtcaggcgccaaagcgaagcccgcggcggacccgcgcgtcgcggagggcactgaccctggccgcctgacgataaccgaaccatgcagctagcagctaaatgcctaccatatccagcgtcgtgactctcggaccaggaaacggattagaacgtgccggacgtgttcattggtaaagacaaggactgcgtcacatacacagacacttgcgaaagtgactgggacctaaaaagacctctgatcgcatgttgatctcgaatcacttgccaatatgactgaaaggtattcaggaagcgaccttaagaatatgtgtgatacctgagcgcattactccattccagaaatggtagagatggaaaagaaggagaagagttaggctaatacatgatgtaaaacactagacaacgtcttttgcaggg

SEQ ID NO: 128726 - DNA, 429 bp, Zea mays
  Clone ID: MRT4577_4886C.1
tctttcggtaatttaaatatagtttgcttctatctatcaaatctgtgaaagttgacattttaactaaggcagcaatttgtataattgctaaactcctccgcaagcagggttggattcaggccctgttccatctgtgacatgacgtatatgcctatggttttatagatgaacacgggcaatctcatgatgctggtcatttatgagacaagctgctcgttttatcttttgcgagttgtctagctttcgtcacggtctgcaggccgacggccaacggtactctagagcctagcccagagccacaatatatcgcatgcggtagatactagcgcgtgcagcaaccatttttagaaaaaaggaagcccaactttatcttggagccaagaagtcgagggagcgagggagcaacctggcttggaagaaccttgttcg

SEQ ID NO: 128727 - DNA, 320 bp, Zea mays
  Clone ID: MRT4577_48870C.1
cggacgcgtgggcggactcgtgggcggactcgtggtcggacgcgtgggcgacccacacgggccagatttatttgttgcaggatagcacgtataacgctgaacaattcactttacctgctccaataaactgaacgatcctaagaccaataagacgtactgctagaacaaagagagcatgaagcacacacttcacaaggtgactcactatacgaagggcaatgatagcctgtatgaccagggaaaaccccgatttgaccacaagcagacattatatagtggtcagaccaagcctgtattccacaagaagaccaagaccacca

SEQ ID NO: 128728 - DNA, 192 bp, Zea mays
  unsure (1)..(192): unsure at all n locations
  Clone ID: MRT4577_48871C.1
aactccgccgcnacgccncgnnccgnccgacgcccccatggcgtccgccgccgccacgaccacctncgncctcgcccagaacctcaatccccttagtatcaacatcaagctctccccatgggacagcggggtgntgctgcctcttaatctttcgtgtgagaagaccctcaacaaccaggggggggggggggg

SEQ ID NO: 128729 - DNA, 324 bp, Zea mays
  Clone ID: MRT4577_48872C.1
aaaaaaaaaaaaaaaaaaaaaaaaagaaaaaaaaaaaaaaaaaaaaaaaaaaaaaaagggaggaaataaaggggcgccggtcgcgacctaggttcgtttgtccctctcctttcgaggtattaccagtcgaccggttcctcggagcacaataaagtttgttgctgcctacctgcttgctgtcctcgctggaaaccccagcccctccgctgacaatttgactgccattctggagtcagttgactgtgaagttgacaatgaaaagatggaactcctgctgtcccaacttagcggtaaggacataaccgagctcattgccggcggcag

SEQ ID NO: 128730 - DNA, 560 bp, Zea mays
  Clone ID: MRT4577_48873C.1
actggcgaaataaaaaaacctttttctaaaatcaccagatattcaatcaatcgactgatcttgctgaattaaaaaaaaaaaaaaaaaaaaaaaaaaaaaaaaaaaaaaaaaaaaaaaaaaaaaaaaaaaaaaatacaagcacaaaaccaagataaattgaagggcgattattatagattctaccaaaactgggggtgacgctggcatccttcaagggaggggcaaaacccgcccagcatgcacgttgttgcttaaacccttggaggaagcaaatgatagtctgctggaacaagatcgatgctaccaccaccaaagtactcctaggctaggatatgatgataatcatcaaggaagtagtttcatacattaagaaggtgggttataacccaaacaagatcccatttggccccatcactggattcgagggagacaacatgattgagaggtccaccaacctcgactggtacaagggtgcaactctccttgaggctctcgaccagatcaactatttcaagaggccctccgacaagtccctccgacttccacttcatgatgcctat

SEQ ID NO: 128731 - DNA, 175 bp, Zea mays
  Clone ID: MRT4577_48874C.1
cttccatcatctcccacttcaatctggcatcccacgcgttgtcccctgcacttctggaaggcacagagtgtgtatgcctcctggtctttgcctttgctgggccttctgtgcaggacgatcagcctcagggctcagaaggtgccagtccggtcacaggtcgcttgtcccttccaca

SEQ ID NO: 128732 - DNA, 135 bp, Zea mays
  Clone ID: MRT4577_48875C.1
ggcacgatcgaccgccgcagtaggaatgcctgcacctacaccgccggccgttcgcatcagggggcggttgcagacgctcagctttgagcgaggccaggaccactgatttagccacccttttcacagggcgggggc

SEQ ID NO: 128733 - DNA, 129 bp, Zea mays
  unsure (1)..(129): unsure at all n locations
  Clone ID: MRT4577_48876C.1
gttttgaaggaatacnatggtttaaaaagtcaaaatctgtttgcttgtataangtaaaacgcagttcgaatacncacgctttagatagaccatggtattcgaaacngcgttttaccttatacagttttg

SEQ ID NO: 128734 - DNA, 469 bp, Zea mays
  Clone ID: MRT4577_48877C.1
ctgtccaaatacgcatagagtctaactgctacatcatgcaagagctatccacaaatacataggccacattgcaggacatgattctgtggatcgctctcgcatagcggaacggataaactcatggctattgtatacagaaattccgagagggggctcatcttttttagaatatccaatcatcactgcggttctcctgcgacgatcttagatcccttgtagagcctgcatagccacacatggacttggccgtcggttcacaaactccacgaaggcaatgcccgtgttggctcccaacatactgactttgcagaagatgcgattctggtggatcaggatctggagcaacaggcctcgagcgatggccctttaaaacctggacgaaaacgataattgtaaggggaccacgcctgtaccgcgaaaccttgcccagacgagacgcttggttacccgcaccattgcctttaacctt

SEQ ID NO: 128735 - DNA, 386 bp, Zea mays
  Clone ID: MRT4577_48878C.1
gtggtgggcccaaattttagggtttagggggcaaaagacaaagcccacccaaatcctttttaaaaagggggttcaaaggtttttttaacaggggggaaaacatttttttttaattggaaaactagggggccggggtaaccccccaaatcgggtttttttttggggggggaaaattttgtaaaaacccctttgtcccggcccccgaaatttttccattttgacggggagggggcccccaataaaacttggaaaacaacaccaaggggttgctttttgggggctgccccctttgacaaagggggcccgccgggggaccctggaagggccccttgggtggccccctggggaaaaggttagggggtcttggacccccaatttttgggggg

SEQ ID NO: 128736 - DNA, 247 bp, Zea mays
  Clone ID: MRT4577_48879C.1
aaattggacatatgcggacgttattcaattcaaatcaatgcacataagggttttaattttgttttttaaaagaaagggggaaatcttgggttttttttacatggttacaaaaaggtggattgtcccaattgcccaacatacatttgtttatttttaatggtcttgaagcccaccgggcattcaattgtttgtgcgtacacaggagttggggtatgtttgtttgtcaggggcaaattttgggatgtta

SEQ ID NO: 128737 - DNA, 693 bp, Zea mays
  Clone ID: MRT4577_4887C.1
acgtatagtacgtatgttcctccatgacgcaaagcacacaggactcttttgccgccactcggtttcttcctaaggccttgttcgtttccatcggattgcacccggaatcgttccagctaatcaaagtttatataaattagagaagcaatccggtcagaaatcgttccgacccatcaatccggcacaaacgaacaaggcctaattgtgtgtagcgctagagcaaacacgttcctccatgccgcctatagctcgcatggcatgtcgtcaaggcggcgatgccgtgtacgtcttcttgcattgtgcgttgtgtccactcactgtaccccttctcgatcactggtcatcttcgccgtccttgagtagattgcagatgtccgagcactccaccaagctatttgttcatttacaaaccaaagatagaaaaaaagaagaagaatgcacatagatagaagtgagtatattggaggaacgtgtttgctctagcgctacacacaattaggccttgttcgtttgtgccggattgatgggtcggaacgatttctgaccggattgcttctctaatttatataaactttgattagctggaacgattccgggtgcaatccgatggaaacgaacaaggccttaggaagaaaccgagtggcggcaaaagagtcctgtgtgctttgcgtcatggaggcctcgtgccgaatt

SEQ ID NO: 128738 - DNA, 271 bp, Zea mays
  Clone ID: MRT4577_48880C.1
ccgggtgcagatgctgagaaggcaattgttaccgcacccaagaagcagaagaaagcatcttcaaagaaatcttcagggtccaagtcataaggcgctcacagaactcagtgtgtcttctcctttatgttgtttaccgccagactaattagagtgtcgtgaagttttacttaaaaaaaaaaaaaaaaaaaaaaaaaaaaaaggggggggaaggaaaaaaatataaaaagaaaaaaaaaaaaatgaaaaaaggggggggggtcgtttttgtggt

SEQ ID NO: 128739 - DNA, 522 bp, Zea mays
  Clone ID: MRT4577_48881C.1
tcgggacgaccaccacacagacacagcgtggagccgccacttctcttctcagcgctcccaatccagcggcggcggcggcacgcgggcacccacccggtagaaactgtgatctgctctaatggctaccgaaggtgaagcttcacctccacggaagcgtatgttgttggagttaccttgtgatgaagaaggtgttaatgtgagtcaaactgttggtgtgtctgcatcatcagccacacctgccagagcttctcaagaacaaggtgaactttatgatgaacctgttatattgtgtacttgtgttctttgtgatcaacttatcatattatgaacttgtgatctatgttatcaatttgtaatattgtgaacttgtgatatttgtgatcaaactattatattgtgaacttgtggtctttgtgatcaactttttatattgtgaattgtgaacttgtggtccttgtgatatttgtaaactttgttgtattctgaacttgttatattgacatatgggtaccgattgtattt

SEQ ID NO: 128740 - DNA, 1030 bp, Zea mays
  unsure (1)..(1030): unsure at all n locations
  Clone ID: MRT4577_48882C.1
tcctccatttcccggggcatctcctcccaatcgcggcaccaagcacccgaccgctttccgcatggcttcccacatcgacttccgctgcttggatgagggcctcggcggcgagcgcggcaagcgcaagcgccgcgaggatgccgaggcggcggccgcggattccatggacctcgatgccgacgcgccccggccgtctaagctccgcgccatgccttccctctccgacccctcgaagccggcctccttcggccagcccacctacgacggcgtcatcgcagggcggttgtcggggcgccggtggaaggagccccgcacccggcggtcgtcggccgtggcggtgtcgcggaagccgatcccgctggaacagcgcgtccgggagaagtctctgaagcgcgcgtaccaggcccgcaaggcggagctcaaggaagagatccggcagaacaaggtggccaagcggaaggcccgcgaggagcgtgagaagcggaagcaggagaacgtgctccgcacgggcaccaaactgcagagggtcaccaacccaaagacgatccagaagatcgccaagtccaagaagcgcaagcagctcaaggtcgtccccgacgagttcctcggcggcaagaagtcggtggccaaccggcgcatgcaggtgcctggactcgaaaattgaatctgacaggcctcgatctctctgtatctgttctgtggcggcgttgagttggcaaggttagttcgacgacgattttgtacttgcttctggttatgtagtttgaagcgtgattaaattaagcgattaaaatggcgtgcaatagaagttatcaagttctgatatgagattttactgccgcatagtcaattttgttgggattatgggctttcgatatgaggttgccaatacatctatccatcagtgacctttgtattaacccacgcgtccgnaaaaaaaaaaaaaaaaaaaaaaaaaaaaaaaaaaaaaaaaaaaaaaaaaaaaaaaaaaaaaaaaaaaaaaaaaaaaaaaggggcgggcggttttaaa

SEQ ID NO: 128741 - DNA, 877 bp, Zea mays
  Clone ID: MRT4577_48883C.1
ggcaactgaataatagatgcatagaaaactttatatggagagcccggaatacaagcaaaattgggtacacggcagtaaaaatctcatatcagaacttgataacttgcgtaccattgtaatcacttaatctgatcatacttcaaactaccataagcaagtacaaaatcgtcgtcgaattaaccactatgaactcaacgcgaccccagaaacagagattgagaattgagattcaattctcaagtccaggcacctgcatgcgccggctggcctccgacttcttgccgccgaagaactcgtcggggacgaccttgagctgcttgcgcttcttggacttggcgatcttctggatcgtcttcgggttggtgacccgctgcagcttggtgcccgtgcggagcacgttctcctgcttccgcttctcccgctcctcgcgggccttccgcttcgcaaccttgttctgccggatctcctccttgagctccgccttgcgggcctggtacgcgcgcttcagagacttctcccggacgcgctgttccagcgggatcggcttccgcgacaccgccacggccgacgaccgccgggtgcggggctccttccaccggcgccccgacaaccgccctgcgatgacgccgtcgtaggtgggctggccgaaggaggccggcttcgaggggtcggagagggaaggcatggcgcggagcttagacggccggggggcgtcagcatcgaggtccatggagtccgcggccgccgccgaggcatcctcgcggcgcttgcgcttgccgcgttcgccgccgaggccctcatccaggcagcggaagtcaaggtggaagccatgggttgggagggaggaagcggagatcccggcccggccggcctcgag

SEQ ID NO: 128742 - DNA, 405 bp, Zea mays
  Clone ID: MRT4577_48884C.1
gttccccaggaaattaaaattttttttttttttttttttggggccccgggaaaaacagccctttgtttaaaaattttaaggggagggaccttttttctcccgggggggttttttttccatgaaaatttttttccctccgggccaaaacgggggaaaaaaaaataaaaaggggggccccctttttttttttgggggccaaaaaaaatttaaataaaacaaaacccttatattccctttgggcttttaggagggaaaaggacattttttaccccgggaggggagccaatttgataaaaattatttgtgggcccttaatggcacgagggggtgtgtgattttaaacgggttcaccatcccttgatcccctcgcccaaaaatgccagtggtcaaaaaacttttgggacg

SEQ ID NO: 128743 - DNA, 195 bp, Zea mays
  Clone ID: MRT4577_48885C.1
gcaagatgaaaccgttctcaagaattttgaagaaccgggagattctacttactgctaggaaggggcgaaccgtaacctgtaggctagtgcttaatatgaacactttgccagagaccactcactttgatttgcttcctcctaaacggaatctaaagcaattcacgtagtgattactgaacgcttactaaccgaact

SEQ ID NO: 128744 - DNA, 628 bp, Zea mays
  unsure (1)..(628): unsure at all n locations
  Clone ID: MRT4577_48886C.1
cagtgtgaaatggatactctgcagnacacttcgccctctagncgnntggtcgcggcgcgaggaactttttcttttttttttttttttttattttttattctttttttttattttttttttttttttttttttttttttttttttttttttttttttttttttttttttttttaaaaaaaaaaaaaaatttttttttgaaactaaaaccaaaaaacaataaaaaagggggcccccccaagggggggttggggaaaaaaaactgggggttttgaaaaaaaaagtgggcaaaagggaaaaatttgttgcatttgaaaaaggggcccaactttaggcccagggggcaggaaaaacggaaaaaaatgtttttggtaaaaaaaggaaaaagggctaaaaaaaattagtgggttaaagggaaaaaattgtttgttgttaaccccccccggcggccccttaaaagggaaaattccaaaacatggggggccgttataaggggacccgacccgggaaccaagttgggggaaaaaagggacaaaatggtttccgggggaaaattgttttccgttaaaaatcccaaaaaaaaaaagagccgaaaaaaaaaagggaaaacgcgggggggcctaaggggggg

SEQ ID NO: 128745 - DNA, 831 bp, Zea mays
  unsure (1)..(831): unsure at all n locations
  Clone ID: MRT4577_48887C.1
ctcgaggccggccgggccgagaatgagtaaattcttggatttgtggcagtacatcttaaaagtgtaagcagagttgagagcctggctgcggtcgtctagctcgtctgcacaactgcacaagcacgggacacgccgccgtccggaatcgacggttcggagagaggtcgcgtgttgccggcagcggacggaggcaaaccaaagcacgcggggaagtgaatggaacacccaacggaccttgcgcggtaccgcccggacgcctgagcctgacgcgagctccgtcccgtcgtccgatccatcccgagggatattcggctgtgtgacgtacgagcgcgagcaagtgccaagtggtggtggtgagcgcgacgtgatcccgcggcggagtgcgtcgggcgtcggcggcggcgtaccggtggtgccccccaaccgaaccacaacgtgtcgaccgccgggccggctgccgatcggacgggctgcggtgagttgtgactgtcaatgtgaccttaccttgggcttcgcccgttcgccgccggtactcgcgcgtttattcgggcgcttgctttgctccttccccatgcggcggggggacggcctgcgacggaccggagggcgaagaggggtgcgcagatctgatcgggcgccgtgaccgctttatccgcacgtcccgtccgctcatcgtggtgtgnngatgggatgggggggatagatcagatgcgtgacgctttttcgttcgtttgtttgttgtgttgccttgcaaccaggctgcaacaatgaccaatgagatcaatccgtcggcgtcgccctttcttcgaaatttgctaccccttgcttcca

SEQ ID NO: 128746 - DNA, 272 bp, Zea mays
  Clone ID: MRT4577_48888C.1
cacctcctcgcctgcgatctccgtagcctccgtcgcgtctagcatcgatgatgggggcctactgcggaaagtacaaggatgagctcatcaagaatgctgcctacattggcacccctggcaagggtatccttgctgctgatgagtccactggcaccattggcaagcgcctttccagcatcaatgtcgagaacgttgaggagaaccgccgtgccctccgagagctcctaatctgttgtcctggagctcttcagttcattatctgagtgattctt

SEQ ID NO: 128747 - DNA, 555 bp, Zea mays
  Clone ID: MRT4577_48889C.1
ccggccgggggatgttttcatagcataactaaaggaccgttgttccttcatatctctgaagtgatgcgtgcttggttgagaggacttgtatgatgtctgacctcctgggatgccctcgttgttgttttccttgagcgaaccgatccagaggattgatcggtgcggtcccatcgtagatgagggctggatcctaaccgtgcccgtgcgtcgtgtttctcctcgttgagctggagatctgcgcccggttcaccgcatggctaactggtgatgcactaactatccatccttgcacgaggaggctgaagcctcaacaaaaggcgtgacatactcgcccacaacaggtttgttgcagtcctcctaagagccgctgtgatgtcattctgttgtgcatttggtattttcatggtattggcagaagaagatgaggaagctactggcatgcaccacggctagatctatttgtacaggatgacgacattgtcgaccagctggcgcttcgatattgatagtcttcaattgtacagcaaaagtatcttgtgtgacacggccttgatg

SEQ ID NO: 128748 - DNA, 452 bp, Zea mays
  Clone ID: MRT4577_4888C.1
cttgattggctactgtaaggacaaagaccatttcgcccttgtctacgagtacatgcctgaagggaacctgcaggatcatctgagactgagagacacttgcactcacagaccactcacttggcagcaacgccttcagatcgcccttgatgccgctcaaggtctggagtacctgcatgtggcatgcaaaccagcgctgatccacagagacgtgaagagcaggaacatcctcctgaccacgggccttggggctaagatcgccgactttggtctgaccaaggctttcagcgactcggagacacacatcaccactgaaccagctggaacaatgggctacttggatccagagtattaccgcagctaccgggccagcgagaagagcgacgtgtacagcttcggcgtcgtgctcctggagctggtgacaggccagtccccggtcgtccccgtggacgaca

SEQ ID NO: 128749 - DNA, 377 bp, Zea mays
  Clone ID: MRT4577_48890C.1
ggaaccgccacctccctggagttttttttttttttttttttgatgaggactgatttttccatgtccattgactgctgctactaattgtatgttctactcattacttacatacatgctgactctttgaaggcaccgtcgatggggcattgcttaggttgctttaatgcgtgatcttcaaaaagccaactctctatctaagctaccctccgccaaacaccgcccagtttcatccagcgtcacctgacgagggccggctacgctgctgaacccgatgtcgaggacgtccctccgcacagagctggagagcgacaaccacctgaccgagtggcagggccactccgacagggggagtcccacaggggaggtgttggccagac

SEQ ID NO: 128750 - DNA, 794 bp, Zea mays
  Clone ID: MRT4577_48891C.1
tgtctttcttgggacgatatggatgccgccgcggtttcgtcgttgctgtgcgcacggtgggtccgcgccgcggccagagaagggtgagttctgcatcgacgacatcgacctggacgagaagagcaacaaggtgaaggtgacggggcccttcgacccggacaagctcgccgacaagctgtgctgcaaggcgtgcaagatcatcaagcagatcgagatcgtggagccgccgccggagaagcccaagaaggaggaacccgccccgccggtaatcaatcatccttggaaggaactcctaataacagtgccgatgccgacccccctcgtcccgggggacctggaatgcaggccccgccgtgccaagatcgagaaggtgctcaacaggatccaagagaagggtgagttctgcatcgacgacatcgacttggacgagaagagcaacaaggtgaaggtgacggggcccttcgacccggacaagctcgccgacaagctgtgctgcaaggcgtgcaagatcatcaagcagatcgagatcgtggagccgccgccgccgccgccggagaagcccaagaaggaggaacccgccccgccgccgccgaagaagaaggaggagccggccccgccgccgccggcgaaggtcgagccgcagaagcctccgccaccgaaggagaagcccccgccaccagcaccgaatgaggagccaaagcccgccccggcgccggcgccgccgcccaaggtggtggaggtcccctacccgtggccgtacccgtgcccgtgcccgtgcccgtacccggcgtggc

SEQ ID NO: 128751 - DNA, 394 bp, Zea mays
  Clone ID: MRT4577_48892C.1
ttccgtcaaggtggccggcaccgtcaaggggagagccataggggacacactcaagacctacccgcgccggtggctgtcggccgttgccaagagcgggtccctggctgctggagcagaccgacatcaggacagccgagtggaacagacggcttcttgtcaaaaagatggggtgcttgctccccgtctagaggaacggcctctactgcacgttgtttctgaagcttgtcaaggcaagcagggtcctgggcgcctttgcctcgtccaaggcaaacctcacgaggagggtggcgctgcaggtggaagacgccagcatgagcgacctcctgataccgttgtggtgcgccggctagacgctgtacgacttggacgccctgacggtcatgcttgaaaagct

SEQ ID NO: 128752 - DNA, 174 bp, Zea mays
  Clone ID: MRT4577_48893C.1
ccgccctcctagtcgaggaggctacgcttgaggtctctaatgacgctgatgacaacgaacggatcttagaggtgtaccagaagctaaatctccgggactcatgatgccgcacgtgcacgagcttccaagattctcacggggctggggttcgatcaggccatgcatgccacatcc

SEQ ID NO: 128753 - DNA, 711 bp, Zea mays
  unsure (1)..(711): unsure at all n locations
  Clone ID: MRT4577_48894C.1
ggtaccctcgttttcggccgggnagtaaatgtcatttgggattcgctaatttgttcatgacatcccaaactagtcacacacaaataactagttcagttggcatgcgtgcaaacttgtgaactcaaatgtcataaaaagtgtcaaaaaatcctagtggtgtacacaacggaaagcatggatggtatgggagcaaagtggcatagacacaaatgcattaacattaaagggattaaaaatcctatgctggacaaaggtccccaattcaagtcaacaaaaagacttcaggttccttttgaggcaaatcatctgacctgagcatatctctctttatattactgttctcaatgttctcatcatggacaaccgaagtggacagtacctttctctttagcaaaatcgttgatttttcatttgagaagaacctctgtttcaagtttctagattcattttcacacaggccatccatcttctgcatattttgctccagtttgtcattctgtggatttccattcccatgcttggcactggtagtagatggtacatttgcctggcccacatccccaactgagggtagaaaatcatgatgcatatcattagaagcaactatatctggctcttgactggatttcgtccacttgctgattagtagtacatgtgttntggactttggacactgggttccaatgacattatgagattccaagttcacac

SEQ ID NO: 128754 - DNA, 835 bp, Zea mays
  unsure (1)..(835): unsure at all n locations
  Clone ID: MRT4577_48895C.1
gggacttggctgaaaagaatcacagagtgattctctcgttgtttgacagactcacaatcaacttgggctaccttgggttgagtatgacagttttccaaagaattggtgtcagtcatcaactgtctctcgtgctgatttctggcgagaagttcaacaatgtccatggggaagtcgtctatcacattctgtttctcgtgcaccttctgctttcctttcttattctttggtatattcttcttgtggaggccggacacattctggatcttttgtttaccaagagaaacctgtggtaacgagatgagggtacaatatttgtatacaagcagagtaaattcagtacggatttcctattgcttgcaccattgtgtgtgtgtgtatatatatatagtttataaagaagtaaatgtcatttgggattcgctaatttgctcatgacatcccaaactagtcacacacaaataactagttcagttggcatgcgtgcaaacttgtgaactcaaatgtcataaaaagtgtcaaaaaatcctagtggtgtacacaacggaaagcatggatggtatgggagcaaagtggcatagacacaaatgcattaacattaaagggattaaaaatcctatgctggacaaaggtccccaattcaagtcagcaaaagtaggtaaaacacgtaaatgaatgtaataatctaattataaaattttcagtagaattctttatggttaatcataccttngccaaaatatctttgtaaagagacttcangttccttttgaggcanatcatctaatctgagcatatctctctttatattactgttctcaatgttctcatcatggac

SEQ ID NO: 128755 - DNA, 479 bp, Zea mays
  Clone ID: MRT4577_48896C.1
cacaaactaacgtccagagttaaaaaactaacgagcacgagttcaagtgtttagagataaccaccacttgggtggttagagctttgaccgctgccgccaccaccaccaggaggagggaacgcgaagagggagtcaacaaatccagtccctgctgcgggatcaaacccactaccacccgcttggggcgtaacctatgcaagcaaatatcaacacgttaaatgcaaatatcaaaaagtatacaagtgtataaattaatcgacagttatcaaacgtactctatctctaggtgcaggtatatgtgtcggaggggtgttgaactgtggtggcggagctggtgagtttgcaaactggctccattgtggtggcagtggaaaatttgttgccatgccctgttgctgcattaactgttaaatatatgtgttaatattgaagatgttgtattgaaatataataatttagagttcggattatgtgtactc

SEQ ID NO: 128756 - DNA, 849 bp, Zea mays
  unsure (1)..(849): unsure at all n locations
  Clone ID: MRT4577_48897C.1
aggccggccgggccgggattcgcgttcccacttccgttcgccgccgacaccgcgtgcgctctctccccccctccgtctctgtgtgcgacgactgggtgggctaccgctgccgccctacccatgtgctgaggcttctgcctacctcttcgccggcgaagagcgcccagcagatccgtcctcgcttccacgctgcagttgaagatttgatcagctatcgccttcgatgcagttgaatatttgatcagctattgacttcgctgctggcctgttttctcctttggagaccaaagaagccatggcgggccgggaggagagatatgtgaggtttcatgactggaaatcagagcaatctgtttctgttatttcagatagggtagtatcagaaaaagggcataacatctttggcttgttaaaggacagaacagcaggagccttttcattcctggggaactcttcacattctgaagccctaaacaaattaggcctaggggagaagtcaaaaacaaaagttcttgatcctcaagggccatttttgcagagatggaacaagatatttgtgatatcatgtctttttgcagtttttgtggacccattgttcttgtatgtcccagtaattgatggtggcaacaactgcctgtacttggacaagaagttagagaccacagcaagtatcctgcgctttttcacagatatcttctatttactccatatactgtttcagttcagaacaggctttattgctccctcttctagagtgttcggtcggggtgccttggttaaggacacatttgcaatagcaaagcgatatctatcancattgttcctggtggatttcttagncggtctgcc

SEQ ID NO: 128757 - DNA, 295 bp, Zea mays
  unsure (1)..(295): unsure at all n locations
  Clone ID: MRT4577_48898C.1
gcacaaaaaatcccaaacgggggggaactttaaccagatcatagcaaggtataccatatcaacatccacactagttaaaggacaaacttttccataggcaaattcanaggctaaacatttttttctacnttaagcactacttatttgaatcatttttcgtcaagcaaggcctctacctcaaagatctcctggtactcaaacttcgcattgacacactccttctgggcctcatcagatatgtccacctttgtccactcttaaagcttcatgtcatagacctnntccattacaaact

SEQ ID NO: 128758 - DNA, 509 bp, Zea mays
  Clone ID: MRT4577_48899C.1
gtaagcttgggtcctgtattaccggcgccctttttctttttgtttaaatctttggaccctgttaggctgggacgggccactttggaacggtgtctagtgcttgggataataatagaacttggaagtctttctttggtttttaaagctccgaccaccggatcccactttaaaccggtttaccaggccaaattatgggcttggcattggggggcgaacgccaattcccaatgtgctattgcccattattgagccgcaacctcaggttcttaacgggaacggggggaaaataaccccccggcgagggtggttgggcttccaatcttggccgaataacacttccttaaaatgtctggggttgccttccaccatgttgaccataacgctggccggtacgacatggataacttagcctgcagggttctggacgacttggttgatcccaacccactgttgaatctggaggttgtattaggccaaggttggaaggtcaaacaacaatccccggggga

SEQ ID NO: 128759 - DNA, 455 bp, Zea mays
  Clone ID: MRT4577_4889C.1
cctgcataactaagaccgagacgcctatatctatatctctagaatcgttggttctcaacatagatagaaaacatagcagcaactactggtctgcggctactaccgctccttcctcctgctgcgtcgctcggctgccgccttggctggcatgagcgccaacgccgccgaccttcaccatcaccaacaactgctgccacaccgggcgtgccgcgtgccaccccgcgtgctgcttgccacgcagctgaacccgggcgagaagtggaccgtgaacgcgacggacggcaccatctccgtccgagcgaggcagctcaccggctgctccttcgacaccaacagcttcagcagccacgacggctaccgcacaacggcgctgtccagcacgatgagtggccaagcgccgctgacgcttgccaaatccaccatcaggagtaccccagagttctacgacatatcta

SEQ ID NO: 128760 - DNA, 1476 bp, Zea mays
  Clone ID: MRT4577_488C.1
gaggcgtacctcgagccggccgggaaactctcctctgtttcgacttggttccctgctcctgccctgaaaggagttgtcttggttccctgcccctgccctgaaagcagcagttggagagacgaatcgtccttcttatctccggcggggggcgtggtggtgtgggcggtgggcggcagcaggaccgtgatgacgagcagcagcaacaacggcggccggccagacgacggcggcgaggtggtcctggaccacgagtaccaagaggagtacgtgaggaactcgcgggggatgagcctcttcgcatgcagatggctgccggcagttgcaggcaagagggggagggctccagctccaaaggcgctcgtcttcctctgccacggctacgccgtggagtgcagcgtgacgatgcgcggcaccggcgagcgcctggcgcgtgccggctacgccgtctacggcctggactacgagggccacggccgctccgacgggctgcagggctacgtgccggatttcgacgcgctggtgctggactgcgacgagtacttcacctcggtggtggcggcggcggcgcagtcgcagtccaaggacgcccaccaacttccccggttcctgctcggggagtccatgggcggcgccgtggctctcctcctccaccgccggcgccccgagtactggagcggcgccgtgctggtggcgcccatgtgcaagatcgccgacgacatgcggcctcacccgctggtggtcaacatcctcagggccatgaccaccatcatcccgacgtggaagatcgtgcccagcaacgacgtcatcgacgcggcgtacaggagccaggagaagagggacgagatccgcagcaacccttactgctacaaggacaagccgcgactcaagaccgcctacgagctgctcaaagtcagcttggacctcgagcacaacctcctccaccaggtgtcgttgccgttcctgatcgtgcacggcggggcagacaaggtgacggacccgtcggtgagcgagctgctgtaccaatcggcggcgagccaggacaagacgctcaagttctatccgggcatgtggcacgccctcacctctggcgagtcgcccgacaacatccaagccgttttccaagacatcatcgcctggctcgaccacaggtcacccgacacggaacaggaggagctggtgtcgtcggaggtggagcagaaggccaagcacgacgaccagcgccaccaggagcagctccaggacggcaacaaatagctagctgcttgcttgcctgctgctttcttctctttacagaacgaaccgtttcatttggtcatgcatggatacacatcatgtctcagtgatacgtaccgactaaattaaattattagatcgaccgcgcttacctagaaattaaacaatcagctgttcgacatcatatatcatcagatcctttaaaaattttactccaaaaaaaaaaaaaaaaaagcggcccgg

SEQ ID NO: 128761 - DNA, 301 bp, Zea mays
  Clone ID: MRT4577_48900C.1
cgtatgtagtcatcgctcagccttttactggaaaatgcattttccttgaatgggaccatgtggaagagcccttccggaattatgacaacattacagttttaagggaaatacacagatttacaaacatgtcatagttgacttaagcgcatgagacaccaaattctgtggctgccatcagaaattttctacatatcatgacccggatgaactcaatgcatgatgactcttcttatcacacttgcaaatgaatgcctttcaaacattgagactgctagaaccaagcactaccagtatctccatc

SEQ ID NO: 128762 - DNA, 541 bp, Zea mays
  Clone ID: MRT4577_48901C.1
gccggccgggtcggcgggacgatcgattccgaattgaacgacccgtcaacacacaaatcgtcaagatgccttccgaagtttccgacatcaagcagttcatcgagatctgcaggcgcaaggatgccagctccgcccgcataaagaagaacaagaaggtcaacaacatcaagttcaaggtccgatgctccaccaacgtctacaccctcgtccttaaggacaccgacaaggccgagaagctcaagcagagtctgcccccgggtcttaccatcaccgacgtcggcaagaagaaccccaagggcaagcgcaccgcataaacggatcgaacgcataaggaactgaggacggaagtgtgcaaggacatcaacgcatgatgcgcacgaagcacgaaggcatgggcgggcggcgtctcaacggataaattttgttcaatggcaactacggaacccttcagattgggttaccaccaggaatgaaaaaagtcaaacttcattccgaatcacgacttgtttccgacgcgaaaaaaaaaaaaaaaaaagcggcc

SEQ ID NO: 128763 - DNA, 434 bp, Zea mays
  Clone ID: MRT4577_48902C.1
gagccttacaaaaaccgggtacggggtaaccatgcaattttttacctggaattaaacaaccttgctcacgaacccccattttatgggaccttttttttttttaacccacaggggtaaaaaagtccttgtaaaagaagggggaaaaagggggtttctacccgagtgttcaaagagcccgggggggaacacaaaacaggctcacttaatgcccctttttggaaaaaagccccttgatacccaacagccccccggggccagggccggggggggggcccatttccacccgccgggaggtgacctggggccgggccccaaggcacgagttcacgcttaggtttaggccccggacgccgccactaagggcgggtttcggggcgttggaaacgccgggggttttgtccttgggctgccgggggggggcccccctgtcggaa

SEQ ID NO: 128764 - DNA, 483 bp, Zea mays
  Clone ID: MRT4577_48903C.1
cacccttgggcccaccaaattatagggagaaaaaaaagggcctaagggctaaaccaccccaaattttcccggggagggaaaattttccccaggaaaaattttttttcccctccaaaaccagggcaaatttttttacaaaccaatagcttttccttccaaaattaccccaattttcctagggaccggggaatcctgaaaaatatcccacccccttataaaaaaatgggaaaatatggccgggccatattcaaaagggcaaaaggggggggacctcagtgggttataccctcacagccaaccctcttttttcccaaatttggcctccgacctttttaaaaggcaacccctgctttttccgttaaacccctaaccttttttaaaaatttacccccctgttaggaaaagggcccatttttgaaaagttttatgttttttttttttggaccatgaatttttcatttataacaccccccctttggccca

SEQ ID NO: 128765 - DNA, 292 bp, Zea mays
  Clone ID: MRT4577_48904C.1
gggccatggaacggcggtctgcagtcttattgaatagagcagtgtgtattcggctgcctgcctgcccgcctgcttgctctctggctgtgctcctgcttaaagaaatcagtccttcctttccgacttagtcctcgggaagaagtttcagactacaaggtatcattggaacatttcaagatcatcaaatcaaattccacagggattggtgaccaaccagaaggctcagacatctgattgctgacctgtccagacatcatctggtctccctgaacctgaaatcacaccatggatg

SEQ ID NO: 128766 - DNA, 383 bp, Zea mays
  unsure (1)..(383): unsure at all n locations
  Clone ID: MRT4577_48905C.1
gttatattaagtttttttggggggccaaaaaaacgctttaccagggaggagcaaattgtaccatgaaggccacaagaacagaaggacacatttgtcagagagctaacaagccttctcaacccgagggggggggggaaaaaagcccccctccccttgggagagagaaaggaggctggaccctctggagggggggggganntaccccaacgaccgggggagggagaaagaaaaaagggcgggggggaaaaagggggagcaaaaaaaaaaaaaaangccggggggcgggcccccggggggcacacgggcgaacgagggagcggagcaaaggaacgcggccccgggggccgagcacggagcgaggagaggagacaaaaaggaggagg

SEQ ID NO: 128767 - DNA, 388 bp, Zea mays
  Clone ID: MRT4577_48906C.1
acgcgcctgtgtttcggttctcacgtagacgactgggcgagcgcctgctgccctacctccctaacttaggtcctcgccggcgacgagcgcaggcgcccgttgctatctaggatcctgccttaaaggcgcacaatatttatccggcgcacggtacttgacgcaaggtgtttaagaaacctaagccacacactattcatgataggcacaggcaatatttgtgctaatctgagggacctccagtagattgctgagagttatccttgatacaggggaatatagacacagaattttttgaacattgatctgtagccagtgctgcaatggctacaaagcttgaggttctcggcataccctgggatgttgacactgaagggttacgagagtacat

SEQ ID NO: 128768 - DNA, 379 bp, Zea mays
  unsure (1)..(379): unsure at all n locations
  Clone ID: MRT4577_48907C.1
ccgacccaaaagtttattgacaatgggaagcttcctttgaacaacagtcgacaggagcatactattattatatggaaaggggaagggagagatgccaaaaaaaaaaacccaaaaaaagggggggggggaaaacgaagggaacttttttacccctcctttacatcccgcataactggagcagtaaccccagcaggggacagagggggggatagggggggtttttccccccccaggcaacggcngcagggggggcaacaaacccctggaccatgggctttttggttccttcccctccctcctcctcctttgggtcctaataaataaaacttcaacgtggcaataggggggggtttggaacctgaacccgaaagcgccgggg

SEQ ID NO: 128769 - DNA, 407 bp, Zea mays
  Clone ID: MRT4577_48908C.1
caagggaaaaacatttttatggcccccacaatacagggttacaacaaaattcctgggcctttggaaacaaagctaacaggcaacactccttttttcccttattcaggaaaccgggcaccccagcagttaaggaacaaaaaatggagtaaaaacaaacctttaaccctcctttccaaaaaaaaaaaaggggccaccccaactagggggcctccttcccagaaaaagggccaaggaaactggcccatttcggcaggctgggttccggagttataaaggtttaacaacacacaggacccaagggggcctgttggccctttaaccccttccaagctgtaggcccacaaatctcctttgtttcggccttaaaatctggccagttaacccctccccggggattaaccccagaa

SEQ ID NO: 128770 - DNA, 481 bp, Zea mays
  Clone ID: MRT4577_48909C.1
ctcattgccgtgctagccgtaccttaggtccgctgccaacatgtgcatcgaggagcagcggagggtcggatgctgacaagccgcacatggcacctgggtggtaccgacggggcagcgtacctgggcaactagggcgcgatgacactgcagcacacaacctgtccatgactgttgtcaagggaacaaaggggcgccttaacaggcctacttatgcctagctactacgacatggttatggtaaccaggaaaaaggaaaagcccgaccttataaagaaggagcaacacagctgttattgtgaggcacagcaagccatgggctccgaaagcgacgacggctacatgtacttgcgaagacaagctggactgattgtcaacccaaagggagagatgaaaggtgctgccatcactgctgctatcggaaaggagtgcgcatgatctctgacccatgatagctagcgaggtaaatgcgaccgtctaaagg

SEQ ID NO: 128771 - DNA, 627 bp, Zea mays
  unsure (1)..(627): unsure at all n locations
  Clone ID: MRT4577_4890C.1
tcgaggctggccggggacaacagtccgaaccgccgcactcttccattctcgtgtttatattccaccccacgagctgcctcagctcatcatgatgcagagccggcggcgggaccacggcagctccggcgagctcgacgtgttcggggcgacgagttactttgccggcttgccggcgcctggtggtgaccactgtcgtcgtcctagtagtgtaacagaggagctgtgcttccaagccaataagcaggtggagcttgacacgacgaggagcgtgacacggcacggccctccgcagcagcagcatcagcatcagcgcgctgggtggcatgatgatcacgcatcgtcagagcgccacgccaccgacaaggctcctgcagctgcaggtagtagtggccgccaacaagcggcggcctccatcggcttcgtcaggcaagagcaagctcgccgccctcttgagcttcatggtgtcgccgtcgccgagagctagcttccgcaaggagaataataggcaggaggcccttgcccgtcgccgtcgtncggtaggatgctgcggcagggcggaggccgcacgcggcggcggcgacggcgacggcgaagagccagagcctgctagtaatattgatggcagcg

SEQ ID NO: 128772 - DNA, 333 bp, Zea mays
  unsure (1)..(333): unsure at all n locations
  Clone ID: MRT4577_48910C.1
atattgagataaatctcaatcaatatanttgattattttctagggaaacactatgccgggaatgagggccaccatatccgagtcccatctcatatgtagatctaaaagatggcacctccaacgatgggttcgctgcctcgtcaagatatggtttatcaaaaagaactggttgcttggcagcaattgttgctgctgtttgaaggcacccaccaatgggtcagccactgctcgtggcttaagctactgttgtcgctgctgtcggttccccactcagtccgacatactcagttggccgaattgaaccaattgctgcaagtcggcatcacggttcgc

SEQ ID NO: 128773 - DNA, 365 bp, Zea mays
  unsure (1)..(365): unsure at all n locations
  Clone ID: MRT4577_48911C.1
ataaggatcatttccactctgtcggggggttttttttttttttttatannccaacgcccaaaacaacaagaaaccaaacctccaatacattacaccaggaaacgacctctgaaaacaaactaaaaaacccacccccccgccaaacaaatacttgcgctacgcccatagcatgaggaaggcgatctccatctcaaaaaaacgtcggcaactcccccttttcttcccccccgtctttctctacaccattcctgggaccccctaacaaaggcaagtcacaacaacgacactgttcgagaacccttctacttatgaatgcccccgcaaaccaactttcattttccaaagcaatggaaagaataaaacac

SEQ ID NO: 128774 - DNA, 322 bp, Zea mays
  Clone ID: MRT4577_48912C.1
gtcggttgacttcctttactgcctgtatgtgatgtcataacttgacctccctcggattcgccattctacgcgtgccctcgtctctcggcccctcaaccctctccctgctttactaggttacctcaacaatccgtcaaatacgagcctggcggtggacgcagaggatcttttggagggaagctaggccggtcgggtccctgccggaaaaagataagaaaaggaacctgtatcgatgacgtcgtactcgctgactacgactgcggtgaggacatccggatcagacggagactcgacagccgacacgcacacgcgcgagaaacgc

SEQ ID NO: 128775 - DNA, 108 bp, Zea mays
  Clone ID: MRT4577_48913C.1
gccggccgggacaccgactctcagttcacatattcgtacagctaaatcatattcaacgtctctaatgccatgtctccggtgtgcttctcagctcggcagctatggcga

SEQ ID NO: 128776 - DNA, 278 bp, Zea mays
  Clone ID: MRT4577_48914C.1
gccggccgggcttggaaccctgatcattcacatctccaactcgtcacttcgacgtaagagctccccgtgtgacacacctcgaactgtgacgtgcggtgggtgagtaccaggcggcgaactactgccttggagactggcaggtcggcgacaccagccgcgtccgcgagcgacggaagggggaggcaacatgacgtggtcgatgacaaccgccgtgaggttccaccgggatcgcggggcgggggtcatcacgcaccagctcctatgctgcgactgcgacg

SEQ ID NO: 128777 - DNA, 2609 bp, Zea mays
  Clone ID: MRT4577_48915C.1
agcagctcaaagaacaggtggcgaggacgacggccaagaaggcgccggcggcatccccgtcgactcgcccgctcgctccatcgcccccacgcacccgctgccggccaaaagccaattcgaatctccccgctgcgcggcggggcctctgcttccgcaatgcgggcctccgtcgaggaggcgggcgcgctcctggcgcggagcgactcagccggccgccgccgccgctccccgccgccggtgcagaccgcgtccccgaggcccggtagcctcaggcgccagtcgtcgtcgttccgcgaggacgtcgggcacgccgcctccgagacttacctcgtctcgcgactcaccttcaccctcctccagtacctcgggttaggttaccgatggatgtcacaacttctttcactcacaatctatgcaattgtacttatgccaggatttatacaagttggatattactatttcttttcgagccaagtgcgtagaagtgtagtctatggagaccaacccagaaacaggttggatctatacataccagaagataatagtaggccctgtccagtggtggcctttgtgactggtggagcatggattattggttacaaggcatggggtgctcttctaggacgacgattggcagagcgaggaataatagttgcttgcattgattacagaaatttcccacaaggtacaataggggacatggttcatgatgcttctcaggggatttcttttgtgtgcaacaacatcgccagccatggaggagatcctaatcagatctacttgataggtcagtcagcaggtgcacatattgcagcgtgtgccctcatggagcaagcagtaaaagaatctggtgggaatcctgtttcttggagtcttacccaaatcaaagcatacttcggtttatctggaggcataatggaaggagaggaatcattgtcacgttattctcctgaaattgttgcaaagacgtcaagtgctgaaaccatagctcttctgcctcttgttgttcttatgcatggaactgaagattattcaataccatcatcttccagtcaaacttttgctgacgtcctccaacaagctggtgctcaagcaaggttactattgtacgaagggaaaacacatacagatatctttgtacaggaccctctaaggggtggaagagatccattggttgaagacgtgttgtctattattcatgctgatgatgcaaatgcatgtcaaaagattgctttagcaccaactcctaggagattagttttcgagtggcaatttgcgtggccacgcattgcttgtccaccctcgccggggtgatttgttttcgagtggcctgtgtgcttggcccccagtatgagccctggcgagccggggggtgctgtcccccccctagtctttttccatatgctgtctccattgcaaacatttttgatagtttggtttgtcaaaaaagttttgcaaactagtttgcatattagtgaaaccaatgcccctgtggtctgctttgaggggtcagtcagctggtgctcgtctggctgcgtgtgccctcgtgggagccagcgggaagcgtggtccggtgggttttcccccttcttgggggtcgggccctcgcctgcgcgggctgccgttgagctggaggggacaatatgcataatttggttgaccatttccacgagcgtggtcttgatcgctcaatattcctcagcataatggaaggagaggaatcattgtcacgttattctcctgaaattgttgcaaagacgtcaagtgctgaaaccatagctcttctgcctcttgttgttcttatgcatggaactgaagattattcaataccatcatcttccagtcaaacttttgttgacgtcctccaacaagctggtgctcaagcaaggttactattgtacgaagggaaaacacatacagatatctttgtacaggaccctctaaggggtggaagagatccattggttgaagacgtcggacgcgtgggcggacgcgtgggtgcaaatgcatgtcaaaagattgctttagcaccaactcctaggagattagttttcgagtggcaattaaagttggcacgcaaaattagtccattctagcagtatgaaccatggagaagcttggagctatggattttgcaccttcatgaggaaagggtgctcgtctgctcggggagccgttgagctggattggatcaggcaagtaaaaggttctcgcgtcttctttacttgcacaacgttggtcaatgtgaaacttgtagctggtacgcaatacgagaggaagaagctaaatacacgactgggaatggaaaccacgtcatcttttttttgcaaggctgtatataatgttgcatattatattgtacaaaggcttgtactacgtttcttgtgcctctattctaaaatgtaagttttttttttaattttagccgaaatcaaactgactaaaggcttgtttcaaactgactaaaggcttgtttggaagcactcagtttttaagaaattagtttataaaaattgagttggtttcccttaatttcgggtgtgacaaatatactttattatttactcttttaatatattaaatttgaaattataaaaaaaaaaaaaaaa

SEQ ID NO: 128778 - DNA, 867 bp, Zea mays
  Clone ID: MRT4577_48916C.1
tgggaatcctgtttcttggagtcttaggcaaatcaaagcatacttcggtttatctggagggtattaaattggatatctaatgaagtggtatctagtaacgattagatataacagtaaggattaatgatggatttgaagtacaatttcagcataatggaaggagaggaatcattgtcacgttattctcctgaaattgttgcaaagacgtcaagtgctgaaaccatagctcttctgcctcttgttgttcttatgcatggaactgaagattattcaataccatcatcttccagtcaaacttttgctgacgtcctccaacaagctggtgctcaagcaaggttactattgtacgaagggaaaacacatacagatatctttgtacaggaccctctaaggggtggaagagatccattggttgaagacgtgttgtctattattcatgctgatgatgcaaatgcatgtcaaaagattgctttagccccaactcctaggagattagttttcgagtggcaattaaagttggcacgcaaaattagtccattctagcaggtatgaattattttaaagtagtctgtgtgcaaaatatttagtatgaaccatggagaagcttggagctatggattttgccccttcatgaggaaagggtgctcgcctgctcggggagccgttgagctggattggatcaggcaagtaaaaggttctcgcgtcttctttacttgcccaacgttggtcaatgtgaaacttgtagctggtacccaatacgagaggaagaagctaaatacccgcctgggaatggaaaccccgacatctttttttttttgcaaggctgtatataatgttgcatattatattttacaaagggcttgttct

SEQ ID NO: 128779 - DNA, 640 bp, Zea mays
  Clone ID: MRT4577_48917C.1
atgcatggaactgaagattattcaataccatcatcttccagtcaaacttttgttgacgtcctccaacaagctggtgctgaagcaaggttactattgtacgaaggggaaaacacatacagatatctttgtacaggaccctctaaggggtggaagagatccattggttgaagacgtgttgtctattattcatgctgatgatgcaaatgcatgtcaaaagattgctttagcaccaactcctaggagattagttttcgagtggcaattaaagttggcccgcaaaattagtccattctagcagtatgaaccatggagaagcttggagctatggattttgcaccttcatgaggaaagggtgctcgtctgctcggggagccgttgagctggattggatcaggcaagtaaaaggttctcgcgtcttctttacttgcacaacgttggtcaatgtgaaacttgtagctggtacgcaatacgagaggaagaagctaaatacacgactgggaatggaaaccacgtcatcttttttttgcaaggctgtatataatgttgcatattatattgtacaaaggcttgtactacgtttcttgtgcctctattctaaaatgtaagtttttttttaaaaaaaaaaaaaaaaaaaaaaaaa

SEQ ID NO: 128780 - DNA, 539 bp, Zea mays
  Clone ID: MRT4577_48918C.1
atatgttttttgctcattatataattaatttatgggttggcttcagaagggaaaaagacatactgatgccaaccttgaacataaaaccttgcatgtcaggcgcaaccacctttttttccaaaaaaaaataccgactagtttcgcaacaacagacatttgattattacattgccaatggaagacaatgttatcgaatggaggtggacccaaataaaactgtcagccatcaacaacagggtgaatcaaatgcaatggacacaggttatctacaaaacttttgctataaaagcaagtacttacatattgtgtgcctagatatcaacatgtttaatcccacacacaagcttttggatctaaaactgcactccatgcaattcatatcccagagctttaactacatacatcccgtatttggtcatgacccttagcaattccggataatacttggacattgtagctttccggaactgttttgcccaacattcacgtgcagttctttacaaattattttggaccaaaacaactccattgaaatcaat

SEQ ID NO: 128781 - DNA, 351 bp, Zea mays
  unsure (1)..(351): unsure at all n locations
  Clone ID: MRT4577_48919C.1
ctcccaaggacacctgtctttgctgttcaatctcagggtaacttcctcccttgtcatctcagccaaggccctggaggatgggcctgccggctccagctctgctccttatgtattccttccagcagggggcctctcttcgctatgtactgggcctgtgcgagtggtggcctacctacccagtccccaaagccaagcgcactaagtacttgctgtcncctcagcacctttcccctccactcccggccgttgcttctgtatatagagaaataagttattggccgtgtcattcaacctactctcctcagtccacggtattcgcgggccaccacctgcctctctcttatccagtgg

SEQ ID NO: 128782 - DNA, 638 bp, Zea mays
  Clone ID: MRT4577_4891C.1
ctcttgggtgcatcctctacgcgagcgggccgcttatcccatccagccgagcacggtcgtcgtcggaaccggagaagggagggaggaagggagcgcgagatggacaaggccaataagcatagcgccggagcggaggagaaggcgaccaaaagcaggagccacggatgcacggagctgttcgtcgcggaggactacgacggtcctgatcgcgcttcgccgggttcctcgcctacctgggcgggtagggcatcctggcctacgacgacgggtacaactacaccgagacgtacatgatgtatatcttttatgtgttgcacgatgtgcacggagccattggctgctggagcaccggcatgctcatcatgagcttcttgattaacgatatatttgagaatgttgccgctgacgccatgaagttggcgcgctacaacacgaagaccacacataaccttgcgcgagattcagacctcggctgcgcctgggactcaccggtgagtttgccaagcacgccgtatacgagggcactaaggccgttactaagtttacctcgttttatgatccttgtgatggtcatgtgcgcgctggcggtaggcgtggctcagctgatgtgatactgatagcgatggatgatgatgatc

SEQ ID NO: 128783 - DNA, 383 bp, Zea mays
  Clone ID: MRT4577_48920C.1
cggacgcgtggggccggagggagggcggtctgtaacgtgccagcaagccgtttccggcacagacaagacaactcacacggatcctcgcccatttgggacgactcgacacagacaacaatggccgtcacacctctcacgtccacgaacaagagatgtaaaaacgtgcgagacgccgagacggctggtgctgacacttggagcggtaaaagatctggaacttctcagccattctcttcccgtgctgatctctggtcgtgcgtcactgtgaatcgcgatcgcgtgagaaatcccatgtctggaccgagagcgccggacggatcggagaggacggtcgcactgcacgagcacgagcggtggctacgggctcaatcccattctggacg

SEQ ID NO: 128784 - DNA, 126 bp, Zea mays
  Clone ID: MRT4577_48921C.1
gctggttcatacttcaaaacacagaatgggttggtggaactttttggggtcagacccaaattcttggacgggcacctatgggaatttgcacaatgcatccacagaagtctactcgtctacaaccac

SEQ ID NO: 128785 - DNA, 201 bp, Zea mays
  Clone ID: MRT4577_48922C.1
aacatcgcgtgcactccaccctaacctcagcattcaattcgagtatcgcttcactcaggccatgacccaacatacggtgacctacaaatttttttggcggcagccttatcctttacaccttccactcccgccatcccccttgacccatcgcaagcgcgagttgaatacatgccctttaccttctgtgccacttctacatac

SEQ ID NO: 128786 - DNA, 377 bp, Zea mays
  Clone ID: MRT4577_48923C.1
ggcaccctctttggttggtcaaatgaccctcagtattcattttaccctggtggcttgtgacatccacgtcaagaggctgaaaattgggatggaacttccactagttacatggctactgctactgggggatacaaagtattttcccagggaacaacttcagacatgaggggtggtatggcaggcacattgctccaacagccaataatgtcaactcatgatagatggactgatggaagcagcgattctggaaggaactgccctcaagttgacatttcgtaccgcatgtacagcctattctagcaccatggcgagaggtctgcttcctagaccctaacaacagacatgtacaagtcataccttctaacctagtagatgcc

SEQ ID NO: 128787 - DNA, 1545 bp, Zea mays
  Clone ID: MRT4577_48924C.1
cattgggtacctcgaggccggccgggatccccccgtggagaggagaggaagaagaagaacccagccaaatcctcagtcttcaggctgctcacagctcgtgccgtccactctcccccgaggcagtctcttgcgttcgctgctcgacatggcgctccaggcggcgacgtcctttctcccctcggccctctccgcgcgcaaggagagggtgagcaggtcggcggacatccgcgcgcagacggcagcggtgtcctccccgtcagtgacccccgcgtcgccgtctggcaagaagaccctccgcaagggcacggcggtcatcaccggcgcgtcgtccggcctcggcctcgccacggcgaaggccctcgcggagacaggcaagtggcacgtcatcatggcctgccgcgacttcctcaaggcgtcgcgcgcggccaaggcggccggcatggacaaggacagcttcaccgtcgtgcacctggacctcgcctccctggacagcgtccgccagttcgtcaggaacgtgcgccagctggagatgcccatcgacgtggtggtctgcaacgccgccgtgtaccagcccaccgccaaggagccgtcctacaccgccgacggcttcgagatgagcgtcggcgtcaaccacctcggccatttcctcctcgcccgcgagctcctcagcgacctccagtcctccgactacccctctaagcgcctcatcatcgtcggctccatcaccgggaacacgaacacgctggcggggaacgtgcccccgaaggcgaacctgggcgacctgcgcggcctcgccggcggcctcaacggcgttggcagctcggtgatgatcgacggcggggagttcgacggcgccaaggcatacaaggacagcaaggtgtgcaacatgctgacgatgcaggagttccaccgccggtaccacgaggagacgggcgtgaccttcgcgtcgctctacccgggctgcatcgccaccacgggcctgttccgcgagcacatcccgctgttccgcctgctcttcccgccgttccagaagtacatcaccaaggggtacgtctccgaggaggaggccgggaagcggctggcgcaggtggtgagcgaccccagcctgaccaagtccggcgtgtactggagctggaacaagaactccgcgtccttcgagaaccagctctctgaggaggccagcgacgccgacaaggccaagaagctctgggagatcagcgagaagctcgtcggcttggcgtgatgcccaccgtggccggcgccggcagccggcgacagtttttcctacctaggacatgctcattagttggtctcactctcagtcgagtagtcgacgtgtggtgcgcccgtgtcagagtgccaagccaagacagaaagtgagtacaaacgtgtaaaatatgtgctactgcgacgtgatggtttgggcagtggactgtatgtatctctactctctaggcttctgctttgctttgcatatttaattttctgctaataagaggacagcaaatgcctttcgagcggaaaaaaaaaaaaaaaaaagcggcc

SEQ ID NO: 128788 - DNA, 730 bp, Zea mays
  Clone ID: MRT4577_48925C.1
gaagaagaagaacccagccaaatcctcagtcttcaggctgctcacagctcgtgccgtccactctcccccgaggcagtctcttgcgttcgctgctcgacatggcgctccaggcggcgacgtcctttctcccctcggccctctccgcgcgcaaggaggggtcggtgaaggactcggcgtcgttcttgggtgttcgtctcgcggcggatggcctcaagctggacaccaccgcacggcggtcatcaccggcgcgtcgtccggcctcggcctcgccacggcgaaggccctcgcggagacaggtggtgagcgaccccagcctgaccaagtccggcgtgtactggagctggaacaagaactccgcgtccttcgagaaccagctctctgaggaggccagcgacgccgacaaggccaagaagctctgggagatcagcgagaagctcgtcggcttggcgtgatgcccaccgtggccggcgccggcagccggcgacagtttttcctacctaggacatgctcattagttggtctcactctcagtcgagtagtcgacgtgtggtgcgcccgtgtcagagtgccaagccaagacagaaagtgagtacaaacgtgtaaaatatgtgctactgcgacgtgatggtttgggcagtggactgtatgtatctctactctctaggcttctgctttgctttgcatatttaattttctgctaataagaggacagcaaatgcctttcgagctt

SEQ ID NO: 128789 - DNA, 1983 bp, Zea mays
  Clone ID: MRT4577_48926C.1
cattgggtacctcgaggccggccgggacgaacctaagccagcaagctcccattggccgggctggtgccaggtcggcgccgcatggcgaacctcgtcccgaccctatcgcgttatcgccaccgcctcccggacgaatgaaaactcccgccgcgcctcgccttcccaccccaccccacccccacgcgaagaggaagaggaagaacccagccaaatcctcagtcctcaggctgctcacagttcgtgctatccgctcgcgctcccggtagtctgcctgctcggcaattcggcatggcgctccaggccgcgacgtccttcctcccctcggccctctcggcgcgcaaggaggggtcgtcggtgaaggactcggcgttcttgggtgtccatctcgcggacgatggcctcaagctggagaccgctgctatgggcctacgcaccaagagggtgatcacgtcggtggccatccgcgcgcaggcggcagcggtgtcctcaccatcagtaacccccgcgtcgccgtccggcaagaagaccctccgcaagggcacggcgatcataaccggtgcgtcgtccggtctcggcctggccacggcgaaggccctggcggagaccggcaagtggcacgtcatcatgggctgccgcgattttctcaaggcgtcgcgcgcggccaaagcggccggcatggacaaggacagcttcaccgtcgtgcacctggacctcgcctccctcgacagcgtccgccagttcgtcaagaacgtgcgccagctggagatgcccgtcgacgtggtggtctgcaacgccgccgtgtaccagcccaccgccaaggagccgtcctacaccgccgacggcttcgagatgagcgtcggcgtcaaccacctcggccacttcctcctcgcccgcgagctcctcagcgacctccagtcctccgactatccctccaagcgcctcatcatcgtcggctccatcaccggtacgtgtcatgctctaacatttggatttggatgcgtgcctctcactgaactcggccgtgaatgctcgatcgagcagggaacacgaacacgctggcggggaacgtgccgccgaaggcgaacctgggtgacctgcgcggcctcgccggcggcctcaacggcattggcggctccgcgatgatcgacggcggggagttcgacggggccaaggcatacaaggacagcaaggtgtgcaacatgctgacgatgcaggagttccaccgccggtaccacgaggagacgggcgtgaccttcgcgtcgctctaccccggctgcatcgccaccacgggcctgttccgcgagcacatcccgctgttccgcctgctcttcccgccattccagaagtacatcaccaaggggtacgtctccgaggaggaggccgggaagcggctgtcgcaggtcgtgagcgaccccagcctgaccaagtccggcgtgtactggagctggaacaagaactcggcgtccttcgagaaccagctctctgaggaggccagcgacgccgacaaggccaagaagctctgggagatcagcgagaagctcgtcggcttggcgtgacgacctgatgcccaccgtggccggcgccggcagccggtgacagttttttcctaggacatgttcgttacttgatctcagtcgacgcgtggtgcactcgtgtcagagtgacaggagaggaagtgtgtacactgtacacgtgtaggcatgtttggttgacttttttgttacgaggttttctgataatatagctgtggagagaatctaactataaaaaaaatctaagtatagcgaggattacgtacgaaggaagataaagtagatgaaatgatctaaaaggtatgaagtagatgaagtgacctaaaaggttgagatctagaaagcgacggattcctaatatcgtgacgactcaaacgattctatgtttatgttggttttgtatggttttaacgaatcgatttttataaaagcgggaagaaaaactagagtg

SEQ ID NO: 128790 - DNA, 1860 bp, Zea mays
  unsure (1)..(1860): unsure at all n locations
  Clone ID: MRT4577_48927C.1
ttgggaccctcgaggccggccgggaaatcccgcggtgccgtgcctcgctttcgcatccccccgcggagaggagaggaagaagaagaacccagccaaatcctcagtcttcaggctgctcacagctcgtgccgtccactctcccccgaggcagtctcttgcgttcgctgctcgacatggcgctccaggcggcgacgtcctttctcccctcggccctctccgcgcgcaaggaggtgagcggcgcagttctgcgttttccagcgagcaccgtgctgttctttcgattcgcgctcagcttcagtgtccgagctgccaagtggcggctctggtaagttgcggttgcaatgttgatgctgtgtgcaggggtcggtgaaggactcggcgtcgttcttgggtgttcgtctcgcggcggatggcctcaagctggacaccaccgctctgggcctacgcaccgtgagggtgagcaggtcggcggacatccgcgcgcagacggcagcggtgtcctccccgtcagtgacccccgcgtcgccgtctggcaagaagaccctccgcaagggcacggcggtcatcaccggcgcgtcgtccggcctcggcctcgccacggcgaaggccctcgcggagacaggcaagtggcacgtcatcatggcctgccgcgacttcctcaaggcgtcgcgcgcggccaaggcggccggcatggacaaggacagcttcaccgtcgtgcacctggacctcgcctccctggacagcgtccgccagttcgtcaggaacgtgcgccagctggagatgcccatcgacgtgggtggtctgcaacgccgccgtgtaccagcccaccgccaaggagccgtcctacaccgccgacggcttcgagatgagcgtcggcgtcaaccacctcggccatttcctcctcgcccgcgagctcctcagcgacctccagtcctccgactacccctctaagcgcctcatcatcgtcggctccatcaccgggaacacgaacacgctgggcggggaacgtgcccccgaaggcgaacctgggcgacctgcgcggcctcgccggcggcctcaacggcgttggcagctcggtgatgatcgacggcggggagttcgacggcgccaaggcatacaaggacagcaaggtgtgcaacatgctgacgatgcaggagttccaccgccggtaccacgaggagacgggcgtgaccttcgcgtcgctctacccgggctgcatcgccaccacgggcctgttccgcgagcacatcccgctgttccgcctgctcttcccgccgttccagaagtacatcaccaaggggtacgtctccgaggaggaggccgggaagcggctggcgcaggtggtgagcgaccccagcctgaccaagtccggcgtgtactggagctggaacaagaactccgcgtccttcgagaaccagctctctgaggaggccagcgacgccgacaaggccaagaagctctgggagatcagcgagaagctcgtcggcttggcgtgatgcccaccgtggccggcgccggcagccggcgacagtttttcctacctaggacatgctcattagttggtctcactctcagtcgagtagtcgacgtgtggtgcgcccgtgtcagagtgccaagccaagacagaaagtgagtacaaacgtgtaaaatatgtgctactgcgacgtgatggtttgggcagtggactgtatgtatctctactctctaggcttctgctttgctttgcatatttaattttctgctaataagaggacagcaaatgcctttcgagcttctttactttgtcggcatttagcagattcagatttttcttgaggacatggcacgtgaataatttcttctggtcaananaaaaaaaat

SEQ ID NO: 128791 - DNA, 424 bp, Zea mays
  Clone ID: MRT4577_48928C.1
attgtcttccgttaagtctagccctataatatgacattcaaaaaccacggacataccgctaacataggaccgggccgtgccggactactgccattatcggctgtacatgggactacttccttcattaaacgcaacctatgccccaaattttttggccccccagaccaacaaagctgacacgtactgacaaacggatgtagctacacatggcgcatggatgccatttgctcgagctggtacctcccatattaactgcgagccattatgctttggtgaaccaaccaactaaagtggtcaatagctaactgagcggtctatagatatgacccttttttctgcggtacaggctctgcgtaccatgagaacctggtacagggtgaagcagttcagacagggtttaaccgctgtgtggggaacaacaaaa

SEQ ID NO: 128792 - DNA, 371 bp, Zea mays
  Clone ID: MRT4577_48929C.1
gtatggttaagatcacagaacaagacatcaacagagcccttcacaacctcttcgctgtcaggatgaggctggggctcttcaacggcaatccaaagtacaaccgctacggtaacattggcccagaccaggtgtgcacgcaggagcaccaaaaccttgcccttgaagcagcacaacatggcgttgtcctactgaagaacgacgccaatgctctccccctgtccaaatcacaagtctcatccattgctgtcattgggcacaacgcataagacgccaccagagtgcttgggaattacttaggccctgcctggattgggtgactcctcttcaagcgctgcaaggctatgtgaaggacaccaggtttctagctgggt

SEQ ID NO: 128793 - DNA, 1519 bp, Zea mays
  Clone ID: MRT4577_4892C.1
gaccaaaaaatataagctcccgaggcgcatcttgacggactgctctatatctcgccgcatcctggtggtctctgagacagcaggagacaaaaggggattgcagcacagatgacatcgacacacctgccctactacggcggccatggagaggcctctggacagctacttctacatgatggacgtggcctacagcactaggaagtagcaggggaatatttgagttgcggtttactgctaatctgctactcgttctctttgctatcttttgattcgctatgtagttcgccctactgtgcgtgtgtggaactaagcgattggtgcgaattgtcccaataattttccattttctgattggcctccgcaagcttgctaaggacaagcggaagcaccgattcatacccccaaacccagactcggcgtgtcactctttacttaaggactaatgtttcggtcaaggcggctgagaaatacagctgccgagtcctctgcaaaactgacaatttttcaagcaccagcattcatcacacgcacgcacgctctctgcacctgaaactgccgggtgtttttcctggctggcgacatgtctgtcactccactcacacccactgcgggtatgcgctgaacctgagctcctcggcgcgggacacagagggcattgagcccaagtaccgcaagtagatcaggaagggcatcatcgccttcgtcgcggtcgacgagagccggttcacgctggcccacgagctcacctgcacgccctacttccgctccgcccgctcctggggcctcttcaggaggcggtcgcgcctgctctgccgaaagtgcggggggcacatcggcagcgcctacgggaaggaggaggaggaggactccagctcctccagcctcttcggcggtgacggctcctcggacgacacgcgcccgagctccggctcgggccgccgcagcagcgtcgcgtcgagccagaagaggtacgtggtcaggatcagcgcgctgcagccgtcgttggatgacctgctgtcgttcccttcacgcatcgatgatgcattgcaggtgtcgagttggtgtgccgtgttcttcttccagcctggatgaatttgaatttgctgtaacctgggatggcgatggactgcaggaggacgaagtggagcaagggaagatatttcttggcgtgtctagacttttcagaggtttgatcagctgcatgctgctttcagtcatcttgctgtttgtaatgcctctgtgtttcctctgtacattggtaagtatagagcaacatggtttttgaaattttggttggtgtcgggaaaatgattaaaggttttctgtatttcgattgattctatagcgtttgtattatgtcatagaattgaaattttgattagtcttgtactcttgtctcgcttgcatgtgtggatgatttagcttcctagctctcttactttcttggaaaaacatttttctggtactgtgatatcagtatttgaattttaaaaaaaaaaagaaaaaaaaaaaaaaaaaa

SEQ ID NO: 128794 - DNA, 438 bp, Zea mays
  Clone ID: MRT4577_48930C.1
ctcgggccggccgggatccaataagataccagcttgaaacaccgatggagatacatatacgcagagcaatggatggagccctgacatgacaaatgcattgggttcgatacgcatgtggcagccggccatgatgctgctgatactgttcattgtgaccaccaatgagcgccacccggccagccgaacgcgagaacgacaggaagcgattccttgcctcatgcatccaagagggacaacatgctccaacgccttgccggaggcgagggcttgctccgcgcggcaggtggatcaccttacggcgccgctgcaagtgcactaagacgtctctaaagtaacctactgccggccgttagagggtggacgttagatcctatttattggctgactagaatttttgccccctaacaatcagaaaacgcgcgccctggcatgtacggc

SEQ ID NO: 128795 - DNA, 382 bp, Zea mays
  Clone ID: MRT4577_48931C.1
cggccggaatgccgggacgaccccgcgtccgcttctgtagacatcccgcggctgacgcctgagtgcctcgaccatagcgtcctcgaatcgggctcatgcatcggacatatggagcacgatgaggaggcgaccgctcgtagcaaagatactaggagtgtgatgtgtgtactgagcgcagaaggtgaaccatagtctggacctggagcatgtgagcaacagacccgagagtgataaggcagaacactttactgtttttaaccatacatctttgaaaactaaattgatacactactgaaagatgctagacacgtcgtgggaaactagcgctacatgacgtctaacaaaagaatgcatgcatgggagtacttcaagaagatatatg

SEQ ID NO: 128796 - DNA, 971 bp, Zea mays
  unsure (1)..(971): unsure at all n locations
  Clone ID: MRT4577_48932C.1
ccgtgtccaggccctggtgccctgtttgttcccttgcggcaactggccgccgccgccgcactacgccaggtgcccaattcctcgtcgggtcctccgccggcgacgagcacccaccagaaaactggagtggactctacatgtcaagacagtatggcgccaggaagcaaggcggagaggaaagcagcactagacgctggcgcatggatgttcaatgtcgtcacatccgttggtatcatcatggtcaacaaagccttaatggcgacgcatggttttagtttcgctacaacgttgaccggacttcatttcgcgatgacgaccttgatgacattagtaatgaaatggctgggatatattcagccgtcctatctaccgttacctgaactagtaaaattctccttttttgcgaacctgtctattgctggtatgatatgcattctggaaatcatattctatggagttcgttactcaagagatacaaagctcagtatagtgcttgtcctcataggtgttgctgtgtgtactgtgactgatgttagcgtgaactctcaagggctattagctgcagtaatagctgtttggagcacagcactacaacaacatgtgagtattgttatatcaaagcctgtccattgttcatatatctgtatattacatcttttcctataaaaacatcttgcacagaatcttagtaacattctggtgagtactaagtacactgaaatccaaaattcctcttttatttgggcggacttggcgcagtggtagagcttgtctacttgtggcctgaggccctaaattcgaagtttgaaccaggcttcttgcaaaattatgcaagggtaggctttctagaatatgagtgcattgagaacaactatctatgtgcctgaaccttgacttgtggtttctgnttggtttcaactgtagcctatcccaactcgtttgggactaaaatnntttgttggtgttgttgt

SEQ ID NO: 128797 - DNA, 343 bp, Zea mays
  unsure (1)..(343): unsure at all n locations
  Clone ID: MRT4577_48933C.1
agcgcggaggcctcagagcgggcgccgctctntttctttttttgttccacaacacaaggagacacagaaacgagggtttttgtaagggcatgcggcggagaaacccccgcagcgcagctacacgaaagagagagaacaagaccacacactgcaacagacaagaccaaaccaatacaacgaaaagccaacgacgcgaaccacagcggcgcaacctggaaacaaaaacacggaccaacagcacctgcgggggaagccgcggaacgacaaaaacacggctcggccaaggacggcaccggagatggatgcgaggcaccgggcgcactgaccgaagagggacgggcaa

SEQ ID NO: 128798 - DNA, 927 bp, Zea mays
  unsure (1)..(927): unsure at all n locations
  Clone ID: MRT4577_48934C.1
tcaaatcatcagctcctcacagcactgcatnntnntggtcggtgaatagtcaaaaggtatgaacggaatgttgagtttcatgacggacgttctctttcctagtattacgcccgatggccgcgggttttttttttttttttttctcttcgtgaatcctttttttattcgcgattgcatctatagcacaaccatttgcaacgcaatatccggtgcccgacccttcaggggaaactttccatttgccctgatgcttatcacgccgaaaaaatgccagaaggtaggatagtcccaacttaaaacttggagaacttcttaacagacttgccggttcggggcaggacacgcaggacgttgaagcggacagtcttgctgagaggtcggcactggccaacggtaacctggtcaccctcctggacacggaaagcgggggaaacgtgggcggcaacgttcttgtgtcgcttctcgtatcgggagtacttctgaataaagtgaaggtactcgcggcggatgatgatggttcggtgcatcttggtggaaacgacggtaccggtcaggatacggccacggatagagacgagaccagtgaaggggcacttcttgtcgatgtagctgccctcaatggcggtcttgggggttcggaaacccagaccgacgtccttgtaccatcgtcggccacccttgcccggtcgggtggacttggtcttggtcttcgagttctggaagatgtgaggctgcttctggaaagcacgctccgactggacggtcaactcggtcgccatcttgaattatccttctcgggcaggtaccgtaggcgagatggcgtatcgtaggttgagctggtagggcgaggttgagactggctaaggcggacagtagttttcgctccggccgaagttttttttcccggccgcgcctcgnnnagggaac

SEQ ID NO: 128799 - DNA, 620 bp, Zea mays
  Clone ID: MRT4577_48935C.1
tggtttgcaccctagggttatggtggctggggagcaccgggaggacaaggaagggggaagttttgtcccaatttgggcatgaagatggctttgttcctttcggtataatcattaatgtaaagacgtgcaggggaggagacagttttagtattcggatctcacgacggtgagattgcagaaactggactagttcaaaacctattcgaatagtctgtgtacacctctgcacatagttcaaaacctattcgaatagtctgtgtccacatatatggatgagttatggcttggtttgacaattagctttctgttttccaaaaatgcttttgaaaagtggttttaaaaggtccggtggttaagccatgagctatgggggacgggaaatccagtagttgtttttgaaaatgaaaaccggtaggaaactactaagattcctagatggtttagtccaagggattttgttttgtattgaaaaacttcatgcacctttgggagaggatgcactttgaaaacgataaaatgttttacaaaatagccctgcatcaaaaattgttttttctgcaaaaatatcctgagctccacatactccatgcattatatctaatttacacattctatggatg

SEQ ID NO: 128800 - DNA, 642 bp, Zea mays
  Clone ID: MRT4577_48936C.1
tcgtgattggcttaagacgatggtaagcacccgaaactcggatggggttgtggatccaaagatacccaagaaaccttcttcgagagcactgaagaaggctttgctagtggcgctgagatgcgtagaccctgatgcacttaagagaccaaagattagtcatgtcattcacatgcttgaagtcgatgatttcccatacagagatgatcgccgaggcactagagcaccaggacaagcaaggttaccagaaacaccggcaggcggatcaggtcgacctgagactgacagcagtggaaacggcggttccacacaagctgaacccttcagatggagaaacccagaggcttagtgttcatcggactactgaaaggaaagccaagccctcttgatttgtgaagcaacaagccaacaatggtgtccactgaagtcgtgaaactctcatcttgctgatgataggcatccatggatactgttagatcatctgtaaatgtaaaaaaaaatgtaatttagccctagtaattctttcctgcttatatttatataggtggaggtatctatctatgacaaacctgttccattaaaggcaaaatagaactttatttaaatctctggggtgcctctggttaaaaaaaaaaaacaaccctg

SEQ ID NO: 128801 - DNA, 449 bp, Zea mays
  Clone ID: MRT4577_48937C.1
gagaacaatgataaccatgaacacccaaaaaatagcccacagtgcggacctacacaaaggaggggatataacaatacaatcccgaccaagtaattaaaaggatgcaccatgggtacaagttccccgctaaggtcatacttagtggttagaactcggccagttgattcacttatgggggcacccaccaaacagatacgtctgtgcacgaatcagattcgtcaaccactggtttgggctttgggcttggaagccccaaaggctaacacgaattccgggcttgttaaggccaatctgcaaggggaatgcacaaccaacatccacgaattaatatacatcaccttttgactttgcaaagatttgtgaagaataaaaatgctaccaaaggattcttgccatgcccacaattggatgtaacaaggaacctcgaagagataatgcagatggccttt

SEQ ID NO: 128802 - DNA, 186 bp, Zea mays
  unsure (1)..(186): unsure at all n locations
  Clone ID: MRT4577_48938C.1
annnannnntttttttttttttggggtgggaacaaaaaccttggtcattttttttttggctcggttcatagcgggggccacccaaggggacaaccggggttcccacccctttttcaaaggtgggacgggcccttaccccgtgaccgaagcgaacggttaccccattcttttgtttggttagataac

SEQ ID NO: 128803 - DNA, 440 bp, Zea mays
  unsure (1)..(440): unsure at all n locations
  Clone ID: MRT4577_48939C.1
acgacggaaacagtagtgctgccagtagagctctcagaactcgggaaaaaaatgtcagaggccgccgtgcgtgtgatcggcctatggccgagcccgttcgtgatccgcgtcctgatcgccctgaagctgaagggcgtcgagttcgagttcgtggaggaggtggtgggcaggaagagcgagctgctgctgatcgtctgtgtgcccacccggccgtggtcgacgccatccctgacgcggacaagttcgttgagttcagcgtcacctatggctccttctccaagcctatcaatgctcccgccaagtgagcaaaaagggtccgtgcatgcttcgtcattttcactttcactgcgccccttccaaggggaatcgacgcatacactagtggctctgtattctttagtgcaaagcttactgttctgaactcaannnnnnaanannaa

SEQ ID NO: 128804 - DNA, 809 bp, Zea mays
  unsure (1)..(809): unsure at all n locations
  Clone ID: MRT4577_4893C.1
cctcgaggccggccgtggagaatacagctgctgagtcctttgcaaaagtgacaatttttcaagcaccagcattcatcacacgcacgcacgccctctgcacctgaaactgccgggtggttttcctggctggcgacatgtctgtcactctccactcacacccactgttgctgccactggcactggcagctgcgggtactgcgggtacgcgctgaacctgagctcctcggcgcgggacacggagggcatcgggcccaagtaccgcaagcagatcaggaagggcgtcgtcgccttcgtcgcggtcgacgagagccggttcacgctggcccacgagctcacctgcacgccctacttccgctccgcccgctcctggggcctcttcaggaggcggtcgcgcctgctctgccgaaggtgcggggggcacatcggcagcgcctacgggaaggaggaggaggaggactccagctcctccagcctcttcggcggtgacggctcctcggacgacacgcgcccgagctccggctcgggccgcagcagcgtcgcgtcgagccagaagagctacgtggtgtcgagttggtgtgccgtgttcttcttccagcctggatgaatttgaatttgctgtaacctgggatggcgatggactgcaggaggacgaagtggagcaagggaagatatttcttggcgtgtctagacttttcagaggtttgatcagctgcatgctgctttcagtcatcttgctgtttgtaatgcctctgtgtttcctctgtacattggtaagtataaagcaacatggnnttttgaaattttggttg

SEQ ID NO: 128805 - DNA, 494 bp, Zea mays
  Clone ID: MRT4577_48940C.1
accatccgatccaagcatcatttcagtgacatcaattatcattcaagccacaaaagatcaaccttggctgcaatcagatcgcctttctgaagcagcaaccaaaagagagcactgcgtcgcagccagcaagatctatctacagcattagcatgcaacccagcgcaggatgttatagaagctaaattatcaactaactagacaaacccaacaaaaaaacagtttcacctaaaagtatcacggcatgcagactcatttccttctatgcgtaagtacatggatcaaggtctgtttatatgacatgggtaacgtataatgatctaattcctaaggcaagggaggttgttttaggcaagatagcggtacatcttcctgtccaccttgtcccgctccaggaactcccgctcgatgagcgactcgatccgctttttgatcaccacgggggtttggcatgaaacggggctgcaactgctttgtcacctccgtcattatgctgt

SEQ ID NO: 128806 - DNA, 330 bp, Zea mays
  Clone ID: MRT4577_48941C.1
ggaaaaaaatcccgttcttattcaattttgaatatggaaaagcttttagcccatccaatcactttcgggttggggggtcccaaactagcctccagggggggggggggaaaatgaaactaatccctttttccttggtcccacaaccccgaacaaaacatggggacacttcaccattagccaccttaaccggccccaccaaaattaccctgtgtagactttacaaacaatggcccctacagcccacatgaatccttttctccccaaaaaaacaagagaggggccccccctttcataattcaccggttaagattttgttggcagggccaaaag

SEQ ID NO: 128807 - DNA, 1008 bp, Zea mays
  Clone ID: MRT4577_48942C.1
cacgagcgcagtgacgacggaaacagtagtgctgccagtagagctctcagaactcgggaaaaaaatgtcagaggccgccgtgcgtgtgatcggcctatggccgagcccgttcgtgatccgcgtcctgatcgccctgaagctgaagggcgtcgagttcgagttcgtggaggaggtggtgggcaggaagagcgagctgctgctgaggtcgaacccggtgcacaagaagatccccgtcctgctccaccacggcaagcccatctccgagtctctgatcatcgtccagtacatcgacgaggtctggtcctccggcgcgccggccttcctccccgtcgacgctcacgcccgcgccgtccagcggttctgggcgcagtacgtcgacgacaagctgccttgggcgatccgcatactgaagggaacggacgacgggggcatggagcaggcggcggggcagctgtccgcgggccctgcagctcctagaggaggctttcgcgcagctcagccaggggaagcgctacttcggcggggacagcgtcgggtacctggacatcgctctggtgtcgcatgtcggctgggtgaaggcggtggagaagatcgccggggtcaccctgctggacaaggccaaggtcccgaacctggtggcgtgggctgatcgtctgtgtgcccacccggccgtggtcgacgccatccctgacgcggacaagttcgttgagttcagcgtcacctatggctccttctccaagcctatcaatgctcccgccaagtgagcaaaaagggtccgtgcatgcttcgtcattttcactttcactgcgccccttccaaggggaatcgacgcatacactagtggctctgtattctttagtgcaaagcttactgttctgaactcagttgcagagtttcattaactttttcaaatgtgactaaagataataaagcaaactgaactgttagtaacctaaaaaaaaaaaaacccaaaaactcaagactagttctctctctctctcctcgtgc

SEQ ID NO: 128808 - DNA, 1101 bp, Zea mays
  Clone ID: MRT4577_48943C.1
cctcctatgggcgattgggtacctcgaggccggccgggaggatatgtcacgactcacgacgacggaaacagtagtgctgccagtagagctctcagaactcgggaaaaaaatgtcagaggccgccgtgcgtgtgatcggcctatggccgagcccgttcgtgatccgcgtcctgatcgccctgaagctgaagggcgtcgagttcgagttcgtggaggaggtggtgggcaggaagagcgagctgctgctgaggtcgaacccggtgcacaagaagatccccgtcctgctccaccacggcaagcccatctccgagtctctgatcatcgtccagtacatcgacgaggtctggtcctccggcgcgccggccttcctccccgccgacgctcacgcccgcgccgtccagcggttctgggcgcagtacgtcgacgacaagctgccttgggcgatccgcatactgaagggaacggacgacgggggcatggagcaggcggcggggcagctgtccgcggccctgcagctcctagaggaggctttcgcgcagctcagccaggggaagcgctacttcggcggggacagcgtcgggtacctggacatcgctctggtgtcgcatgtcggctgggtgaaggcggtggagaagatcgccggggtcaccctgctggacaaggccaaggtcccgaacctggtggcgtgggctgatcgtctgtgtgcccacccggccgtggtcgacgccatccctgacgcggacaagttcgttgagttcagcgtcacctatggctccttttcgaagcctatcaatgctcccgccaagtgagcaaaaagggtccgtgcatgcttcgtcattttcactttcactgcgcgtgtgccggtgcgtgtcaaaattgcatagcaaggggattcttctcccacatagatcttcttgtgatcatagtcaccaaatcagctctgaaaatgaagattttctgcccttccaaaggaatcgacgcatacactagtggtattctttagtgcagagcttactgttctgaactcagttgcagagtttcattaactttttcaaatgtgactaaagataataaagcaactgaactggtagttacctattcc

SEQ ID NO: 128809 - DNA, 191 bp, Zea mays
  unsure (1)..(191): unsure at all n locations
  Clone ID: MRT4577_48944C.1
cccacgcgtccgggtagtcactgtctttttgttggcgatctcgatctggctggataggttttgacactggagagtattccttaccccttttctccgtacgcacagtggtggcgacgactaagatgcatgagcacacggngagcgacaagtcgtgcgtgtggcacgcgctggacttcgccgacggcgagctc

SEQ ID NO: 128810 - DNA, 464 bp, Zea mays
  Clone ID: MRT4577_48945C.1
caagggcagagatctcacttcgctgacggtggaccagctggaccgtcacatgatcttcccgatgatgtagaccatccacgatcgacacggtatacttgaagctgcagatgctgaagaacaagatccgcgtcgtcgcctcaccagactgcgcgacatacgctatggaacatcagaggtctgttcacaactgccgtgaccatccctaggacaggaggaagcgccgctctgaggaagggtacaggctcaggcctctggaggaggcgcaagtaccggtggctccctatctgcatataccacactgcgagcaggatctacaggcccgacagaccaggcagcatacacatgttcgagcagagataccagattgggcctgacacagagtggagatctgtatcagcatgcccaaccctactgagagtgtgaaggctactcctgggctgatgagaacctgtgccactgtcgtg

SEQ ID NO: 128811 - DNA, 785 bp, Zea mays
  unsure (1)..(785): unsure at all n locations
  Clone ID: MRT4577_48946C.1
tctaaaaggtactccccttcgtattagatattattgcttttattatgtatgtagacatagtatatatctaaatgcatagtaaaagctatgtatctagaacatacaaaacatcttatagtttagaatggagagagtataagcttactatagttaaattcttgtatttggttgttttaaacttaattatctctgaagaacctaacagggatcacttttccattttcttggtagcttaagctgctcagatatccaaattaacatcttgaaggtattttaacagcatttttttacaagtcatactgtatcttcaactcttcacaaattccaggtgactacattccgtagcagttaggacaccaatttttttcatcatggtttctgacattttttacttgaattttacaataaactgtttctttcgtgttcactctcggattaattttatctggtgctttgatgattatttcagctgaatgctttgataaagtttaatgtctttagagatagtaaagcagactgttcatttttcatgaacctgttacaggtcattatatgaagatcttccatcaaaccttgtgtgcnaatccgtgattatattgaaaaggctggagccaagagtagcaattccacagatccagatccagatgttgatcatgatgaaagcaggcaatctgagcaaacgntgtgtgtcttgctcatccagtaccatgaagcagagaccaaaagtcccaggattgcaaaagggacatcgaggtcctaaaatcagagcttgataatttcattgc

SEQ ID NO: 128812 - DNA, 304 bp, Zea mays
  unsure (1)..(304): unsure at all n locations
  Clone ID: MRT4577_48947C.1
cacggcgaacccggcgacccacgcgtcatcggggggtgatcgggtttgtggtttgcactggatggggttttgatctttgcggaagatctggaaggatgcagctatgaggacatttggtgctgccctgtttttatgattacacacttccagtggcaatacacactactgntgttcttatttgcatcaacctggccgcttctttttgtggatcaagtgacaaccttatggtcctatctcgggggtgattgcaaagttacggggggtgagggaacgactagggttaagcgggcaatctgttgacagg

SEQ ID NO: 128813 - DNA, 481 bp, Zea mays
  Clone ID: MRT4577_48948C.1
aaggatacagacatcagaatcggattaattgacctgcatctctcatttcccgacaggtcttcggtttcagttgaagcaaaacaaaccattgttatgtggttagaataaacacagccaagaagatacatactacaaagatgcaatcaactatttcgtaaactaacatataggagaaatcatccaacggcttgacaccatgatcttggcatgtacgcatggcccacgatgagcttcataacaaccatctataggagtacagcttcccctgacaaatagaaattgtacttctggactcttgcacataaggggatacatggaagcatatcacttccatttcacccgttatctctcattttgagttgagttgaaacggcaatcttttgccttgacacaaaatcccaacagaaacctttcagcttgagttgattccacactctctttccaacttccgaaccaccatttatcatggataatgaaaact

SEQ ID NO: 128814 - DNA, 296 bp, Zea mays
  Clone ID: MRT4577_48949C.1
ccactcctcgccctctctactgtcctgtctcctcactccaccggtccaacccaacaaccagccccgccgaattccaaggtttcccgcgtgcggcggcgagcggggcgggacgtgccggggacggtggttgggttggattggattggatcggatcggtgccgcccgttgaccagagcgtaaaccagagatgggcaagggcggcggctgcgtccccagcaagaagcgccagccgccggccgccgcgccttcttcgtcgtccgccgcggcggcggtgccgcgcgaggcgcccgaggagg

SEQ ID NO: 128815 - DNA, 223 bp, Zea mays
  Clone ID: MRT4577_4894C.1
gcgctcacttttcggcgggcgcccttttttttttttttctcggctttttttttttttttttcaattaaatgcaatattaactttaattcactgcatttctttgtgtagtcagaatataatatttgttgatactaagaaatgcagtgaattaaagttaatattgcagttctttgtgtagtcagaatataatatttgttgatactaagaaatgctcgagccgaat

SEQ ID NO: 128816 - DNA, 343 bp, Zea mays
  unsure (1)..(343): unsure at all n locations
  Clone ID: MRT4577_48950C.1
gtgcttgcgtgcctgcgtccccctagatatccgcagcggtggccggggggggggggcncctccaccccctcacttgccgggcccaaagttggtggcttaggcccatgcgttgttgttgacggggtcggcgaggtggtcggcgaggttctcgagcgggcccttgccggtgacgatggcctggacgaagatcccgaacttggtgaacatggcgaggcggccgttcttgagctccttcaccttgagctccgcgaaggcctccgggtcgtcggtgtggccgtgcggtttgaagtctgccggcggggttgagcgggtcgacgacctctccgagcgggccgccggcctc

SEQ ID NO: 128817 - DNA, 511 bp, Zea mays
  Clone ID: MRT4577_48951C.1
gcggcggttgtcctacctgtgcgatgctcctgtttcctcctcacttgcgcggagtctggagcgccgagctgcacatgttcacacagggtgcgctgcaactacgttccgaataagagtctgatctacgcgcagagcatcctcgccatctgggcctgccatgccgcgctcatgggcgccatcgaggggtaccgcgtcgccggcggcccgctcggagaggtcgtcgacccgctctaccccggcggcagcttcgacccgctcggcctcgccgacgaccctgaggccttcgcggagctcaaggtgaaggagctcaagaacggccgcctcgccatgttctccatgttcgggttcttcgtccaggccatcgtcaccggcaagggcccgctcgagaacctcgccgaccacctcgccgaccccgtcaacaacaacgcatgggcctatgccaccaactttgtgcccggcaagtgagggggtggaggcgcccacgcccaccggccaccgctgcggatatcta

SEQ ID NO: 128818 - DNA, 193 bp, Zea mays
  unsure (1)..(193): unsure at all n locations
  Clone ID: MRT4577_48952C.1
cctcctttttttttncncaaaagggccacccggggattttttaccatgaacggggcctggaacacacaaagccctacatatagggcctgaatgcgcggagactacaaaataatgcccagttccgttaagattgaaacatactgtccctataatacatttcttccgtccaccggagtggagcggctcatacctt

SEQ ID NO: 128819 - DNA, 400 bp, Zea mays
  Clone ID: MRT4577_48953C.1
tcgttcacgctggacgaccactgtgtccagctgaagagtgccaatcagtatggaacctgaaaagtgtccaggatagaacgtgctttggttactgcatctttgagatgaggcatgaatactgggaaaatgaaaatgtttgctctgctcaacgtgcagcattttacatggagggaagagaagactatgaatttgaggaggcctgaagactctcaatgggaacaaaaaagctaaagtacaggagtctacagcttcaactgctgctgatgcttctggtttggaaactttttactagaactcgaacctactccttatacttgatgaaccgcagaagaagccatatcagggcaagacgtacctgactaacccacttttaaccaacaatgcaaagagatcagaaccc

SEQ ID NO: 128820 - DNA, 855 bp, Zea mays
  Clone ID: MRT4577_48954C.1
atcaattcctcactccactcgccccgcccagccagatcttcctagaaccttcagcaaccctagggccccagcgagaggcctctgccgctgccgccgccatggcccccaaccccgccgcaatcgccctcctggctgccctcgacggcaatctccgcctcctcaagaaaatgtccaaaaagatggatttgcgggaaacaaaggaccccaaagggctcaacgcactccatttcgctgcaaataaggggtccctggagatttgcaagttcctgttggaggacgtgggggtcgatgtcaactcggtatcaagcgtaggtgcgacaccgatgttttatgctgcactcaagggaaatcttcaggttgccagatatcttctcgatcatggtagcgatccggcgaaacctagtgagaggggcttaacgccgctgcacaatgcagcagagcatgggcattgtgagattgtaagactgttgctgtccaaaggagttgacgtggatgttatcaattaccgagggacaccattacatatgactgctgcaaagggtcagcatcaggccatgaaaattctgctggagcatggtgctgatcccaacagagtagtcatcatatcttctcaccactaatgatggcatgctgtgggaactccttggaatgcatgaagctactgattgaggctggtgctgatgtgaatggtaatagtagctctggaccaactcctttaacgggggcagttgatgatggctcaactgaattcgtcaagttcttgctggaggctggagctgaccctaacattcctaacagcacggggatattccatcaagagagcagcagtccgtggtcagcgtgaacttgttgagc

SEQ ID NO: 128821 - DNA, 633 bp, Zea mays
  Clone ID: MRT4577_48955C.1
cctcgaggccggccgggccgggattccggtctccaccgcaaccggaagcgagggaatcgacacactgcatgaccagagctagcatgagctacatccaacagcaattggtatgactgacatgacgaaggacatcgaggaataacgggacccatgcacccgatgtctcggacaaagactacacctaccctgcggctcacatgttgatctcacttgaatgacctctaccctatcgtgtcactgtaccgggctgggcatcgacaatttcatcgccacgatggtcttcctctacatcaccgtggacaccgagatcgcgtacaattatgatactaacgttgctgctccagatcccgcacacgggtgcgaggagcgtcggcatcctcggcatgcacttgaagcttcggggaaatgatcttcatcctagcctaatgcactcgacctgatgtctaagtgtgcatctcaagactctcgtgacctctcggatgaatcactggacagaaatgagatcgctactccgcgtgctgctgtacatcatcgcacaaaggctgggagccatctgaaggagggtgcctccgcaaagccttgcatagtgcctactactttgcactacgctctgggtaccaacgatgtcatatt

SEQ ID NO: 128822 - DNA, 949 bp, Zea mays
  Clone ID: MRT4577_48956C.1
attgggtccctcgaggccggccggggggaacgatctcctatgcacaaacatccacaaaaacaaaagaagggaaaaaccacaagctagccatggttagcagcaagattagtattgtcggagccatcacatctccaattgtggttgtggtggcactgacactattgatcacacttttggcatcgacagtagatgcacaaccatactcaacaatgccacctagcatgatcggagatttattgccacggacgagagtacctccgtccgggcctagccatcctccacccatggcggcgatgccaccatcatggagaatgccagccgctggacctacgaagcctccttccatggcggcaatgtcacctgatgttgttggggatttgctaccacgaggaagagtaccaccctccgggcctagccatccaccacccttggtggcgatgtcacctgatgttgttggggatttgctaccacgaggacctagccatccgccaccaagggtggcgatgtcacctgatgttgttggggatttgctaccacgaggaagagtaccaccctccgggcctagccatccaccacccttggtggcgatgtcacctgatgttgttggggatttgctaccacgaggacctagccatccgccaccaagggtagcgatgtcacctgatgttgttggggatttgctaccacgaggacctagccatccgccaccaagggtggcgatgtcacctgatgttgttggggatttgctaccacgaggacctcagccatccgcagtagcgatgtcactgctgcggctagccatccaccacccttggaggaaatgatcgagtatagcaatgatgtcctcggtgcaaatgataaacttgttggtaatgtaaggatgaatacataaggataatccgatgtaacttataaacaaaaccatccataaaaagaatatcctatgttg

SEQ ID NO: 128823 - DNA, 822 bp, Zea mays
  Clone ID: MRT4577_48957C.1
ccgggttgccacggatgagagtacctccgtccgggcctagccatcctccaccctggtggcgatgcaaccatcatggagaatgacatatgctggacctatgaagcctctttccatggcggcgatgtcacctgatgttgttggggatttgctaccacgaggaagagtaccaccctccgggcctagccatccaccaccgttggtggcgatgtcacctgatgttgttggggatttgctaccacgaggacctagccatccgctaccaagggtggcgatgtcacctgatgttgttggggatttgctaccacgaggacctagccatccgccaccaagggtagcgatgtcacctgatgttgttggggatttgctaccacaaggacctagccatccgccaccaagggtggcgatgtcacctgatgttgttggggatttgctaccacgaggacctagccatccgccaccaagggtggcgatgtcacctgatgttgtttgggatttgctaccacgtggcgaggacctagccatccgccaccaagggtggcgatgtcacctgatgttgttggggatttgctaccacgaggaagagtaccaccctcaggacctagccatcccccacccttggtggtgatgtcacctagcattgttggggatttgctaccacgaggacctagccatccaccacccttggaggaaatgatcgagtatagcaatgatgtcctcggtgcgaatgataaacttgttgggaatgtaaggatgaatacataaggataatgtgatgtaacttatagacaataacataaataaaaagaatatcatgtgttgttt

SEQ ID NO: 128824 - DNA, 325 bp, Zea mays
  unsure (1)..(325): unsure at all n locations
  Clone ID: MRT4577_48958C.1
cattttcattcttcgtcctccttcgggagtcgggctatttttttttttttttctcanccccacccccatcttctccaaccaaccaggtattttcaaaataaaaatactttcccccagcccgcattttaaaatcccccccccccaaaagcctatgcgcacaacctagatcctaccaagctgagcctcaaagccaacccccttttcccccacaaccgaagcccccttatccaacttgaattgggaccattcggcgttgggcgggcgccagtttcgcccccttaaaaatttttcttcccagccttcccaaataggcaacccatttaaa

SEQ ID NO: 128825 - DNA, 1313 bp, Zea mays
  unsure (1)..(1313): unsure at all n locations
  Clone ID: MRT4577_48959C.1
cctcgagccggccggaactattgatcacacttttgngaccgacagtagatgcacaaccatactcaacaatgccacctagcatgattggagatttattgccacggacgagagtacctccgtccgggcctagccatcctccacccatcgtggcgatgcaaccatcatggagaatgccatctgctggacctatgaagcctccttccatggcggcgatgtcacctgatgttgttggggatttgctaccacgaggaagagtaccaccctccgggcctagccatccaccaaccttggtggcgatgtcacctgatgttgttggggatttgctaccacgaggacctagccatccgccaccaagggtggcgatgtcacctgatgttgttggggatttgctaccacgaggacctagccatccgccaccaagggtagcgatgtcacctgatgttgttggggatttgctaccacgaggacctagccatccgccaccaagggtggcgatgtcacctgatgttgttggggatttgctaccacgaggacctagccatccgccaccaagggtggcgatgtcacgtgatgttgtttgngatttgctaccacaaggagctagccatccgccaccaagggtggcgatgtcacctgatgttgttggggatttgctaccacgaggaagattaccaccctcaggacctagccatcccccacccttggtggcaatgtcacctagcattgttggggatttgctaccacgaggacctagccatccgccaccaagggtagcgatgtcacctgatgttgttggggattttctaccacgaggacctagccatccgccaccttttttagcgatgtcacctgatgttgttggggatttgctaccacaaggacctagccatccgccaccaagggtggcgatgtcacctgatgttgttggggatttgctaccacgaggacctagccatccgccgccaagggtggcgatgtcacctgatgttgttggggatttgctaccacgaggacctagccatccgccaccaagcgtggcgatgtcacctgatgttgttggggatttgctaccacgaggaagagtaccaccctcaggacctagccataccccacccttggtggtgatggcacctagcattggtggggatttgctaccacgaggacctagccatccaccacccttggaggaaatgatcgagtatagcaatgatgtcctcggtgcgaatgataaacttgttgggaatgtaaggatgaatacataaggataatgtgatgtaacttatagacactaacataaataaagagaatatcat

SEQ ID NO: 128826 - DNA, 820 bp, Zea mays
  unsure (1)..(820): unsure at all n locations
  Clone ID: MRT4577_4895C.1
cattgggtacctcgaggccgggccggggacccccgctctctctcccccacccgcactcgccccacgtctcctctctcccgtcccgtctgctctctgatcagcaggagagaaaagtggatgcgccagcgaagcgaacaccgtccctaatcgtcggccatggagaggtctctcgacagctactcctccatcaaggacgtcacctacagctgcgggtactgcggttacgcgctgaacctgagctcctcggcgcgggacacggagggcatcgggcccaagtaccgcaagcagatcaggaagggcgtcgtcgccttcgtcgcggtcgacgagagccggttcacgctggcccacgagctcacctgcacgccctacttccgctccgcccgctcctggggcctcttcaggaggcggtcgcgcctgctctgccgaaagtgcggggggcacatcggcagcgcctacgggaaggaggaggatgaggacgccagctcctccagtctcttcggcggtgacggctcctcggacgacacgcgcccgagctccggctcgggccgcagcagcgtcgcgccgagccagaagagctacgtggtcaggatcagcgcgctgcggccgtcgtcggatgactctgctgtcgttcccttcacgcatcgatgatgcattgcaggtgtcgagttggtgtgccgtgttcttcttccagcctggatgaatttgaatttgctgtaacctgngatgncgatggactgcaangaggacgaagtgnagcaagggaagatatttcttggcgtgtctagactttttcagagggttgatcagctgcatgctgctt

SEQ ID NO: 128827 - DNA, 816 bp, Zea mays
  Clone ID: MRT4577_48960C.1
ttttaaacaacataggatattctttttatttatgttattgtctataagttacatcacattatccttatgtattcatccttacattaccaacaagtttatcatttgcaccgaggacatcattgctatactcgatcatttcctccaagggtggtggatggctaggtcctcgtggtagcaaatccccaacaatgctaggtgacatcgccaccaagggtgggggatggctaggtcctgagggtggtactcttcctcgtggtagcaaatccctcgccacccttggtggcggatggctaggtcctcgtggtagcaaatccccaacaacatcaggtgacatcgctacccttggtggcggatggctaggtcctcgtggtagcaaatccccaacaacatcaggtgacatcgccacccttggtggcggatggctaggtcctcgtggtagcaaatccccaacaacatcaggtgacatcactacccttggtggcggatggctaggtcctcgtggtagcaaatccccaacaacatcaggtgacatcgccacccttggtggaggatggctaggtcctcgtggtagcaaatccccaacaacgtcaggtgacatcgctacccttggtggcggatggctaggtcctcgtggtagcaaatccccaacaacatcaggtgacatcgccaccaagggtggtggatggctaggcccggagggtggtactcttcctcgtggtagcaaatccccgacaacatcaggtgacatcgccacccttggtggcggatggctaggtcctcgtggtagcaaatccccaacaacatcaggtgacatcg

SEQ ID NO: 128828 - DNA, 672 bp, Zea mays
  Clone ID: MRT4577_48961C.1
gccggccgggctgggataccaatgactccggcacatcaactcgaacctcatttcctagatcaaatcgtacaagcatcagctggatacattctccccagtgtccttctcgcagcgaatctcgttgcctatctcagtcaagatgaaaccccccttatgaacttcttcgtcttaatgtccttacctttgtctatctactctatgcctaccacagaggagacagaggccattaacgagacccaggctcttaacattgaggatgctgtcaagctgccggactctctggctctgtaccaccttgagggctttgagtctgaagactctgccctcgagaagcgcaggcacgttacagtttgcaaaagaatcattaccatcacctctcactgcgttatcatcgggggtgctatcaaggacgggattctccagatcagcgctgctatcaagcacgcatcaaaccaaaagacctgtactacttttactggacatgctggccccaacggcaaccttttctaccgctatcgctctaccgggagacactgtgacacgactgctgagcaggaaactattgcaggtgcaatcgaacaccacatcaaaaaccatgggcacaagctctgcggtactccgtggtttggaataaactcatgggggaactttggcagggataatctcctcatt

SEQ ID NO: 128829 - DNA, 1304 bp, Zea mays
  Clone ID: MRT4577_48962C.1
ggaaccctcgaggccggccgggcaaaaaaaaaaaaaacggtcttccactcgtaaacactacctgcgatctccgcacccgcgctcaccggctcaccgctatctcctccgcatccgccggccgccggcgagcccctcctcctccacgatccgtgcttccccggaggcaactccatgaattacatcgagtccatcccgcccctcaacggagggaattacgagttatggcgagagaagcttgagctggcgcttgcgttgttagatattgatctggctatcactgatccctgtcccatcgctccggtagacccggtgcaggaagagaacgagagcgatgatgatttcaacgctcgtgtgcgcaatcatgcaccaataaaaatgaagtatgacctttacaaggtaaaatgggatcaatcgaaccgcaagtgtctgatggtgattaagagctctattatggatacaatcaggggagcattcccagcatgtaccaccgctacagagtatcttagtaaggtggagagtcactttactatctcttcaaaggcttatgcatgcacaataattgaaaggctacttaccgataaatacactggcggtggagtaagagagcatatattgaagatggccagcatggcttccaagcttaaacctatggaaatggcgctcccagatgagtttctggtctatttgatttttgcctctctgcctaaagaatttgaagcttttgagattaattataactcacaaccagacaattggggcattgagaaactgattgccatgtgtgtgcaagaagaggaaagaattaaggcttcacgtggtgattctatcaactatgttgggatatataaggcacatggcaaggctccacagaatgatcaccatctgaaaaacaaagaggtggacatgaatgcttgctactggtgcgaaaagtcagggcatcatcagaaggattgtccatccttcctgaagcacttgatcaataaagggattccatacgaggaggacccttcaaagaggagaaagatgcattaaagtcgtcaatggtgttgataatgaagttgaagtgatagaacttccattattattgaataatagcttcattcttcacttgaataatgttctctatgtatcatctttcctgtcatgcgaatttaagctctctaatttattagaaatagaaaaatagatcctttcatgtaatgatatcgtgatattccatgttactccttttttgggtcgatgtagagacctccattgcatatgactggtattcaactaacaatatatagccccaatttttcgaa

SEQ ID NO: 128830 - DNA, 449 bp, Zea mays
  Clone ID: MRT4577_48963C.1
gggtcaaaaaaaaaaacacccggggtattaaaagaaacaaccgcaaaagggggggcgaaatcgggtcaaaaaaaaaaacccggggtattacccaaaaaaacaacaaccaacaattggggggacaacaacgggtcaatttcccaacaaaattggccacaccggttacccccctaagttcaaaggggtaaaggaaaaaaaaaagggcagcttccccaacttaaaaaaccaaacttgccccaccggggccctttacaaaaacaaaaagggaggggacaacagggtgggggccaaaaaaggcacctagggaggggccatggcccccaaaaagaaaaggctttgccaatccccaattggtcggaataaaacctttcccccaactttttaaaaaagggagctttaccggccatttttccaaggccctaaaaaaaacaagcgggaacctggacccc

SEQ ID NO: 128831 - DNA, 358 bp, Zea mays
  Clone ID: MRT4577_48964C.1
aaatgagataatcttgtcattaaatgattcaatgaatgagaatacagttacatatctgacaggtcaatatactatgacttatgcctatggcaaaatttatggtgatacaagaattattcgttacaaaaaattcttggtttgttcttaccaagagaaatcctatatataattgaagtcagccgcaaaggaccatgtccatttactgtctcagctagttggatgaggaattgaaggccaacaggtttccaggttacctgtttgtgatcagctactgatttaggaagcacccagctgaatgactaaaagaacatggtcccaaagtcttgcttttcttcttttggatggaattgcccccaag

SEQ ID NO: 128832 - DNA, 507 bp, Zea mays
  unsure (1)..(507): unsure at all n locations
  Clone ID: MRT4577_48965C.1
agcagtggtaacaacgcagagtacgcgggtccacatgcttggtttcgctgcaagaagactttgttgagaatgttccgtgcattctgttctggaacaagcattaccatactatagttatgatcaatggagtattaaattctctagtcactgattctaattatttagaaactcgtgtagtttggcagacgcttgacagggttaacggtgatggagtatatttggacaacaactttacatcaatttatatggggctagatgcagttgcttctgtatatgtaatgtggcccaacataaattaattttctgtatctgcaatgatttgttattatggtctgatctttcgttttcaaaaaaaaaaaaaaaaaaaaaaaaaanaaaaaaaaaaaaaaaaaaaaaaaaaaaaaaaaatgaaaaaaaaaaaaaaaaaaaannnaaaaaaaaaaaaaaaaaaaannnnaaattttnnnnaataccaatttttaaggggaaatttaaaaaaatgggggg

SEQ ID NO: 128833 - DNA, 155 bp, Zea mays
  Clone ID: MRT4577_48966C.1
ctgatgtttaacttcacgttcatcgactgcccctctcctcatcaacacacctgctacagggggatcctctaccatccctttatcaacttgatgctcaagcatttttattacccaccacgacaaaccctttccagctatctgccgtatctatggac

SEQ ID NO: 128834 - DNA, 366 bp, Zea mays
  Clone ID: MRT4577_48967C.1
atgaagacttctgtcccggggggccgaacagcagcagcgatgacctcagggcggatgctgctgccaggaggcccccgcccatgcccaaactcgagaggcaaggacgggcagaaggccgtagagttggaggtcggtccgcgggtggcgccggcaaactcgtcggcggcggaagctcttccagctgccgtggcgggaggcggcaccgggagcggctccgaagccgctcggctcagcgagccgggcacggtgcagctgtcagcgccacggacgactcccgtccttccccccgatcacggagggaaggagcgggccaccgcccacgcaggggccgaccccaactcggcacactcccctccccggcactag

SEQ ID NO: 128835 - DNA, 794 bp, Zea mays
  unsure (1)..(794): unsure at all n locations
  Clone ID: MRT4577_48968C.1
ctcggccgggcaagaaccgtgtctggttaggtgccaacagtgctatgcagtccaaagtcatgtcagcactgcactccagtgccttgggcggtcactcagggttccctgttacttacagtcggatcaagcagttgttctactggccccgtatgaaaagtgccatcaaggagtttgtcgctgcatgtggggtgtgccaccaagccaaaccagaccgggcccggtatcctggtcttctccaacccttgccagtaccaacacaagcatggcaagcaatatctcttgatttcatcgagggcttaccaccaagtggcggctacaacagtatcttggtcgtggtggatcgcttctccaaatacggtcactttattgccttgcgccaccctttcactgctctcaagattgctcaggtttttatggctgaaatctatcgtctccacggcatgccccaatctattgtgtctgatcgtgatcgtatttttacaagtaccttatggagggagctgttcagattgtccgggactcagcttctcatgagctcttcctaccacccccagacagacggccaaacagaacgcgtcaatcagtgtttggagacattcttacgcagttntgtgcaggcctgtccctccaagtggtcgctatggctgtccgtggcagagtactggtacaactgttgtttncattcttccctgngccattcaccattcgaagtgctctatggaagatcccctcgtcattttggcctttcagttgatgactcggnttcccatgtggacttagcatcctggttgggt

SEQ ID NO: 128836 - DNA, 342 bp, Zea mays
  unsure (1)..(342): unsure at all n locations
  Clone ID: MRT4577_48969C.1
gactcatacagctacacatccactttcttacacatcaactttactccctcatccatcattaccncatctggctcaatttcaaaaagctcgggtgctcaaaacacccccacacaaacaagcanccctcttaatacacaccacctcatctattcccccttaacaagccaaaatcgcacaatttttttcctagcctaaaccacaaccattataacccaacatcaaactctaataataaccttgatacttacaacatctacatcttcaaagttcttaaacttgtacacacctacattatcatcttctccaacgccatttccattattaacttcttcttctaccaca

SEQ ID NO: 128837 - DNA, 275 bp, Zea mays
  Clone ID: MRT4577_4896C.1
atcccctctcattttcctccgccatcgccgcggttagactgagcgactgaggtgggctagcgtctagcgaccaagccattccggattcgggaattcccagttgagctcatcgcggcgactcgccctctcgagtttcttgcaaaaagttacggccgctgctccgctcgccattgctgccgtgtggagcggccatggagctctgctgctcaggcgtcctaagcggcgccggcgctcgcgaccggcgccatcgaggacctcaaggcccgtgaaaatgg

SEQ ID NO: 128838 - DNA, 1345 bp, Zea mays
  Clone ID: MRT4577_48970C.1
tttttgggggggataaaatcagtagaatatattttaaattaaagtcaagcgaataacttacttatttcatgttgaccggacacccctatcaggcaatggatgggcctccttcctgcgatccctcatcaaccaccagtccgagcgcgccaggggggggcctccccaccggcccacccaccgaccggcccaccaccgtaaatgcgatgcgcccctcgtcctcgtggcggaaggaacacaaggagacggaagtagcagcagaacacgttacagcgccatcacatcatcgccccgtcaagacgaaacaaagtgtcaaaacccaaaccaaccaagcaacaccgcacaaggcgcctcgagccacttaaacagagcaagccgccgcggcggcgaccggccgaccgacgccgaggctgcgcgccctgcgccgggatcgagaggggaaagggaaggggaccagccggctcgcttggaggctggagctcgccccggcgggcccatggggggacgcctggtgtccatgctccggtggccgccggacctgggcctgcccagcctggccgcgctgctccccgcgccgcccgcgcacctccgggtccaggtccaggagtggtggcagtggcagtggcagcggtcgcggcccgagcagctgggcgcggcggcgcggcggtggcccgagctcgtgcgggacgtcccggtcctggtggacgccgcgctgtggggcgtcgtcacggccgtcgagtccgtcgcgctcgtctccatgatgtgctgcttcttcctctgctgcggctgcacgctctgacgatggactccgcagtgccgcagccaagcaaagtaagtactgctgccgcctgccaagcaaagcaagtactgctgccgcctgccagtatgggtgatgattcctccgtccgtccccatggcgtccgatctcttcgggttttttttttttactgcgtgttggttgtggtggatcagctgtggctaggtggagttactgtcatggcaatggtaactaggatgtgatctgtgattgtatttgggcgccagttctccgccattttgagatctgacttgaagcagggtgctgtagcgatagtgcgggaaggggattgctaataaattggaagtaggtgcgtggtgggaacgcgaaaatatctaaagtatcgagtcagttgcgtaccagggtactactcctgaacctctggaaccgactttgtagtttgtatcagtgcagtaataaaggcctagtggtcccgtcctgtcctaggatcgatcgagagacggtcatgtccttttggctgtctggtttattcatatcacatcttttgagtgtgcacgagattatttatgt

SEQ ID NO: 128839 - DNA, 275 bp, Zea mays
  unsure (1)..(275): unsure at all n locations
  Clone ID: MRT4577_48971C.1
attggaccctcgagccggccggagagcagcagcagctgctctatctcctgttgcagctcgtcgcgcgcgcgtccgcgacagagctagcctgatggacggccggggcacacaacgcccttttacacttatggctgcgcccggacaagggcggcgtccgcagcctgctgcacctgctgtgctcctgcgaggcgccgacaacgacgccgcgactgccccgcgcaccgaggcgcacgctggcgccggngggccatcttctctnctcccggcaatctgtg

SEQ ID NO: 128840 - DNA, 179 bp, Zea mays
  Clone ID: MRT4577_48972C.1
acttcctctaatgaacatcgaaatatttacaacactgaatctacattcatcattggcgagctttaataattagtcagactaccttgcttgcaaccatgatattatatatattacctatgatcaaattatacaaattaactttaaatataactactatcataaccattttcaatattttt

SEQ ID NO: 128841 - DNA, 230 bp, Zea mays
  Clone ID: MRT4577_48973C.1
aaaacaggggaaccaaagggccctgaataaacaaaaggggctgtttaacaaggtaattgttcacttttgccccaccctaaaaccattttttgggcaatgggccttgccaacagttggaaaccaaaaacagtcccacgtgcttcccaaagggcataattttcccttacacaaaaacttcattttttttttaaaaaatcccggcgaaaaataactcgagagacctatggccc

SEQ ID NO: 128842 - DNA, 262 bp, Zea mays
  Clone ID: MRT4577_48974C.1
accactcctccgaccactcttccgacacttcttaccctcactacattcacacacctacaggcttacacgctactgcatcctggaatcagtacaattcaccaccttcgcaccatcctaagcatcatccatcatcaactaataccacaaccgctactaggtcctcatcctctaacgttcctactaccacaactactgatattgctatgacaaatgctaagcatcagcaataaaacgatctatccaacaccattttactatctct

SEQ ID NO: 128843 - DNA, 1380 bp, Zea mays
  Clone ID: MRT4577_48975C.1
ccggccggggcaataataatcagcgattggccccgcctgccggcagcatcattaccatcgccgcgcccgcctgctggctcgccggcgatcgaatttgaccgccggtcggcgagcggagcatacgtgcatacatggtttgcctgacgccggcggcggcggcgctgctgctcgtcgtcgtcctagcggcggccgtgtccgcgctcccggcgatcaacgtgacgacgatggcgttcgaggacgggtacgcgccgctgttcgggcacggcaacatcctccgctccgccgaccaccgcaccgtcagcctcctcctcgaccgttccaccgggtccggtttcatctcgtcgtccatgtaccagcacggcttcttcagcgcgtccatcaagctcccctccgactacaccgccggcgtcgtcgtcgccttctacgcgtccaacggcgacgtgttcgagaagcggcacgacgagctggacttcgagttcctgggcaacatccggggcaagccatggcgggtgcagaccaacgtgtacggaaacggaagcgtgggccggggccgggaggagcggtacgtgctccccttcgaccccaccacggagttccaccgctactccatcctgtggacgcccgccgccgtggccttctacgtggacgacgtgccggtgcgcgaggtgcggcagtcggccgccatgggcggggacttcccctccaagcccatgtccgtgtacgccaccgtgtgggacgcctccacctgggccaccgccgggggccggtaccgcgtcaactaccgctacgggcccttcgtcgcctccttcaccgacctggccctcctcggctgccgcgttgacgggcccatccagcagacgacggcggagcggtgcgccgcagccgccgaggcactcagggcgtcggacgtggccgtcatgacggtggagaagcagcaagccatgcgcaggttccgggagcgcaacatggtctactcctactgctacgacacgctgcgctaccccgccgcgttccccgagtgcgacgtcgtcgagtcggagcgcaggcggttcaaggacaccggacacctccgcttcgcgctgcggcggcggatgagcccgcgacgctcccacggcagggcggccagcagggacagggtcagggagctcaagaagcgcgcggcggacatgtagcattcgtgtagactgtagtagcggtcggcgatggtaatggatattcacgcctgccgctgttaatctattggatacgaatacgatacgcatcgtacagcatcacagttcacaggagtagcggaatggcgagggcgaaaaaaaataccttttgtcttcaacttttaaatttaaagaatatatctagcacataaaagtttagttcaaaaaa

SEQ ID NO: 128844 - DNA, 513 bp, Zea mays
  Clone ID: MRT4577_48976C.1
tcgggagcagcttcttgctcccgagtcggtcagcacgcgccgccgggccgcatctcgtctccctccctactccacgcccaccttcgtgcgcctgaccttcagctgcacgtcgtgaagcaacgagactcgagccgcgcgttcctgtacgcgtcaatctgctgcttccttcggcttcgtctagactccggccttgtcgagctcctctcctcgtgccgcgctcctgctccatcgaacaatagagttgtccatgccccgtccgcggcactatccgtctccgtcaagtggggacatcagcaactttagcggcctcctcccctcgtggcggggtttcagtgaacgacagtaggctagtaggctcattgtgttgtaggagctttgctgaaatgacagaattttgcatgtgttgtaagagcttcgcggactgaattgatgtgatgcatgtgctgaaatcagtgtgttgttgcatcttgttgctaaaatctgaaactggaacagattgaggtgttgttgtcg

SEQ ID NO: 128845 - DNA, 385 bp, Zea mays
  Clone ID: MRT4577_48977C.1
tgtagttgcaccaattacaatttctgaatattctctactcttgtaggtcactaatgatattgctaatgctctaatggagaataggaactgtatcacattagatgtttgcgcttctctcttacgtcttaccaccagtcttcttgaaagcacatatgacaggtcatttctcatatttcctattaatttatcaatattgaaattgtgagatcatttaaatttgaccttgctattgaacattggctgattattttgattaaaagctgacttaatgctcttttggagagttggaactcgcaatgggaattgaatctgattataatgcccctttcttcaaaaagagatggaattctgaatacgcagatatgaaatattgttcatggtccag

SEQ ID NO: 128846 - DNA, 983 bp, Zea mays
  Clone ID: MRT4577_48978C.1
caccctcgtgggctttcgccaatctcattctgaacggccagcagcttcttgctcccgagtcggccagcacgcgccgccgggccgcatctcgtctccctcctcgaagcacctcctctccctggctccacgacgcggcggcctgctagctctctgggcgggctactaattctccggatggtgtcgactgctacttctccgatgccgcgcgcgcggcccgtgcggtccgctgcgcctccgtcggatgcgcaagcaggaggcggacgcgcggcccgctgtgcctccttgcgcccccatcgcccgaggcagaccgtcgtgctcgcctgctccatccggtcccgtcgtcgaggagtcctcttcgccggcgtcgcgcccgtctctgtgtttcccatgtcgtggcggcgtgctcctctgcgccggcgccgcacaacctcatgtcagctttcgtcgctgcgatgcccacggccggcggtgtgctcctccctactccacgcccaccttcgcccgaccttcagctgcgcgtcgtgatgcagcgagactcgagctgcgtgttcctgtacgcgtcgatctgctgcttccttcggcttcgtcaggactccggccttgtcgagctcctctcctcgcgtcgcgctcctgctccatcgaacaacagagctgttcatgccccgtccgcggcactatccgtctccgtcaagcggggacattagcaacttctgcggcctcctcccctcgcggtggggtttcagtgaacgacagtaggcttgtaggctcattgtgttgtaggagctttgctgaaatgacagaaatttgcatgtgttgtaagagcttcgcggactgaattgatgtgatgcatgtgctgaaaaaaaaaaaaaaatgcatcttgttgctaaaatctgaaactgaaacagattgaggtgttgttgctgaaatctgaaactgaaacagattgaggtgttgttgtcaaaaaaaaaaaaaaaaaagcggcc

SEQ ID NO: 128847 - DNA, 847 bp, Zea mays
  Clone ID: MRT4577_48979C.1
cattgggtacctcgagccggccgggaatctcattctgaatcaacagcagcttcttgctcctgagtcggccagcacgcgccgccgggctgcatctcgtctccctccccgaagcacctcctctacctggctccacggcgcggcggcctgctagctctctgggcgggctacaatggtgccgactgctgcttctctgatgccgcgcgcggcccgtgcggtccgctgcgcctccttgcgcccccaccgcccgaggcagaccgccgtgctcgcctgctccatccggtcccgtcgtcgtgggactcctcttcgccagcgtcgcgcccgtctttgtattgcccatgtcgtggcggtgtgctcctctgcgccggcgccggcgccgcacagcctcatgtcagctttcgtcgttgcgatgcccacggccggcggtgtgctcctccctactccacgcccaccttcgcctgaccttcagctgcgcgtcgtaaagcagcgagactcgatccgcgcgttcctgtacgcgtcgatctgctgcttccttcggcttcgtcgggactccggccttgtcgagctcctcgcgtcgcgctcctgctccatcgaacaacagagctgtccatgccccgtccgcggcactatccgtctccgtcaagcggggacattagcaacttcagcggcctcctcccctcgcgacagggtttcagtgaacgacagtaggcttgtaggctcattgtgttgtaggagctttgctgaaatgaaagaattttgcatgtgttgtaagagcttcccggactgaattgatgtgatgcatgcgctggaatcagtgtgttgttgcatcttgttgctgaaatctgaactg

SEQ ID NO: 128848 - DNA, 869 bp, Zea mays
  Clone ID: MRT4577_4897C.1
ccgtccgggcctccgagccgcagctccctctccccagcgcgccgccactgtgggcatctacaccgctgccgctctcctctctcctctgtgccgcagctctcctctctccctctcccctgcgcgccgccactacgggcaccctacacgccgccgctgcgtggccctacacgccaccgctacgggtgccctacgcgccgccgtcactgctctagctcttctctcctctgtttcccagccaatgccgccgctctaactccccaaggcatcgccccgacgacagctcaacgacgcctcgcggacaccctgcgccgcagcgggcgctttacgctccatggcaagccgcgttagatgcctcaggtaccggcatctgggccaattcgccccactaggagggaaacaaactgctgcacagcttcccggggactggatctccattggctacagcacccagtggctctggtactccgtgtacgcaaccttcttccattaagaattggtcatcatggcgtgggagctcattgaagtcccgggcaacttgaatccctctctcaaagactcttcagttgatgtggtggccgccaagattgatcccaagttagccaatactctcattaggcagttaagccaggtgtgccctttggagaatctgaggcatgtaaagcgtgtacgtcgacgtactgaatgtggtggaaatctgacatttatcttgttcttttttttttgccctctggaacttctaccattcgaagccttgccatcactgcctaaaagtacacgttaataagacttgccatagctggagaaatgttcccccaacatattgatacataaaaacaattgattttgcagtggaaaataaccttttggtt

SEQ ID NO: 128849 - DNA, 801 bp, Zea mays
  Clone ID: MRT4577_48980C.1
ttcgcggccgcgtgggcggacgcgtgggcggcaaaacaagcttccttccttgcgaacgcaactagtctgctccggattcgccggcccccgccgccgcttcgccttctctctccctcgtccacggcaaccaactaaccgtcgagatattggcggggcgccgatgctccctgactccccgtagcgcgttgcggatgctgtgggcctgtgaggctcgctgccgccgctttgggatctgggctgctgccggagcggcagcggcggttgtgactggcgccggcgatggcgatatcggcgaaggagaggaagctgagcaggctcgggagttgtaagggcggtgcggcggctggaagtggcagcggcggcggcggcggttcgcctgctgccagggcccaccggtcggtggcggcggcgccgcagcggcgtgtcttcgctgcgctcttcgcgttcctgtgcgccggcgtagtcgtcctcggcggcgtgcacgtcattggagcaacgttccggccagtgctcaggacggcgtggccggcggcaaccctgaacgccatttcctccgatgccagagcgcggcgaggtggcagcagcgccgacaccaccgtgctgccgtcagtccaaatccggcacgcggtcgccatgccggaccgtgtactcctgatcctcaaggacgggccgttgctgccatctcccgagcggttccagtgcctgtactcccccgccaactcctcggaactgcgccgccaccgacccctcttggccgcctcctcacccgatggacccagcctcgtccactgccctgccgag

SEQ ID NO: 128850 - DNA, 863 bp, Zea mays
  unsure (1)..(863): unsure at all n locations
  Clone ID: MRT4577_48981C.1
tgggtacctcgtaggcggccgggccgggatttcttaaccatctcattctgaatcaacagcagcttcttgctccctagtcggccagcacgcgccgtcgggacgcatctcgtctccctccccgaagcacctcttctccctgactccacggcgcggcggcctgctagctctctgcgcgggctactaattctccggacctcttctccctgactccacggcgcggcggcctgctagctctctgcgcgggctgctaattctccggatggtgtcgattgctacttctccgatgccgcgcgcggcccgctgcgcccccaccgcccgaggcagaccgctgctcgcctgctccatccggtccgtcgtcgtgggactcctcttcgccggcgtcgcgcccgtctctgtgttgcccatgccgtggcggcgtgctcctctgcgccggcgccacacagcctcatgtcagctttcgtcgctgcgatgcccacgaccggcggcgtgctcctccctactccacgcccaccttcgtgcgcccgaccttcagctgcgcgtcgtgaagcagcgagactcaagccgcgcgttcctgtatgcgtcgatctgctgcttccttcggcttcgtcaggactccggccttgtcgagctcctctcctcgcgccgcgctcctgctccatcgaacaacagagctgtccatgccctgtccgcggcactatccgtctccgtcaagcggggacatcagcaatttcagcggcctcctcccctcgcgggntgggtttcagtgaacggcagtagcttttaagctcgttggtgtggtaggagctttgctgaaatgacagaattttgcatgtggtgcaagagcttcgcggactgatatgatg

SEQ ID NO: 128851 - DNA, 144 bp, Zea mays
  unsure (1)..(144): unsure at all n locations
  Clone ID: MRT4577_48982C.1
aacaancccgaggagggaataaactcgccgctgaatagaccagcgctatttgcggctaggctagtcctccataaatattacagggaccaaaaaagaactccccacaggtgcaactttctttttttaagcgagggggcagccaaa

SEQ ID NO: 128852 - DNA, 441 bp, Zea mays
  Clone ID: MRT4577_48983C.1
tccgtgatttataactatcttttttatttatcgcgagcgttacattctatttgccattaaacccgggggaccttatcctttacctgtttcaaggaaagatataatacttaaagacccggcaaacattgccatcataaattacttgttcacccgacaattgttaggatgtccacaagaccaaatattttaagcttccatgaggtaacacaacaaagaaggcccacggcccgacaaatagatcattttttcttggcagaacaacttacacaccccggctccattagaggattttttgtccacactcttgatgactacgacacccacaaatagccttttcagaaggtcaataaagcgacccgcgggattattcttgaaaaaggcctccagcaacgtgggcttaatgggaggcctcttaaccataccgtcagcattatttttgaa

SEQ ID NO: 128853 - DNA, 200 bp, Zea mays
  Clone ID: MRT4577_48984C.1
ggcgcgtccgatacgcaagacacaggacgctcccacatggctctctctatcatagcctagcatcttgccctgtgcaccggattgcatttaacacatctaggaccgactactcgtcatacccgtgcgcatcacccccgagcgatttttccaccctcactatgtgtaataacaacgccgaccccatagaggctgatatggac

SEQ ID NO: 128854 - DNA, 629 bp, Zea mays
  Clone ID: MRT4577_48985C.1
cgggagcacgcgccgccgggccgcatctcgtctccctccccgaagcacctcttctccctcctcgaagacctcttcttcctggctccacggcgcggcagcctgctagctctctaggtgggctactacttctccggatggtgccgactgctacttctctgatgccgctcgggcggcccgtgcggtccgctgcacctccgccgaatgcgcaagcaggaggcgggggcgcggcccgctgcgcctccttgcgcccccaccgcccgaggcagaccgtcgtgctcgcctgctccatccggtcccgtcgtcgtgggactcctcttcgccggcgtcgcgcctgtctctgtgttgcccatgctgtggcggcgtgctcctctgcgccggcgccgcacagcctcatgttagctttcatcgctgcgattcccacggccggcggcgtgctcctccctactccacgcccaccttcgtgcgcctgaccttcagctgcacgtcgtgaagcaacgagactcgagccgcgcgttcctgtacgcgtcaatctgctgcttccttcggctttcgctagactccggccttgtcgagctcctctcctcgtgccgcgctcctgctccatcgcaccatagaggtgtccatgcccc

SEQ ID NO: 128855 - DNA, 832 bp, Zea mays
  unsure (1)..(832): unsure at all n locations
  Clone ID: MRT4577_48986C.1
gggaaaggaaacggtatggctggcggggactgaattgntttgctgtagtttcatggaatatggcttaaagggtgctaaaagaggacaagtatgattattgctcagaattctttgaacttgcaactgaattttcagctcaggtaatgctgaagagggtgctaacattctcatgaattgcaaaacattgatcatgagtgtcagtagcatactcctggaggacaccctcaacaagtctcagttatcagactctgactttaattgggactgcaatactcaagacgttgagaagctgttacccttgactttgccttggactctggtgacatatgatcaattggagaccaacttgcctcactcattaagctatgggataatcagtgttgccgtcagaaagctagtatgcctcgctgctcttcatgattacagtggtagcatgagtgatgcaactatgacatatttcgacatgcttgctacggttttctacacaactgaagaaattaagtcgtcaatcattgtctacattatcagcggcttgagggcaagtcgcatttcaagcggtggggaatgtcagcagcagtacaaggaacacgttgagaagctgaggatgaagcacggtgtgagaaagcagaagacatcgactagagctggaactcacgtgaatgggctctaatggaccatgtaatgcgtaatgggccaagaatgagccgtgtaataatacatcataggctgagctcgtgcagctatataggagccaaactgtaagaggaaagcatcaaagaagaaatatcagaaagccttcgtgctccacaaaaaaaaaaaaaaaaaagcggcc

SEQ ID NO: 128856 - DNA, 282 bp, Zea mays
  Clone ID: MRT4577_48987C.1
tgtcttcgcgtgcgggccgctcagggcgtactcgaggcaggtacacacgggctggtgcgacggaaccgcgtggtggtgatgcaagagcccggccctgacagcaaccttcgcagcatactcgggaccgctgacactgacgtggaaccggaggatgcacacaagggacatcatcgcgctgttggcggcgcacaccatcagccaggcaagctgatctaccgtcaccgctcccatgacccaaagggaccccagaagcatgaacccgaagctaggactcgggctacg

SEQ ID NO: 128857 - DNA, 741 bp, Zea mays
  Clone ID: MRT4577_48988C.1
cccgccgccaactcctctcagagcctcgcacccgcatctccgcgctccgccgccgccgccgcctccgagccgctcgaagcccacctcgcagccatggcggagcagaccgagaagtctttcctcaagcagccaaaggttttcctcagcaccaaaaaggccgacaaggcaaagaggcccggcaaggctggcaaccgcttctggaagagtgttggccttggtttcaagaccccaagggaggcgattgatggtacctacattgacaagaagtgcccattcactggaactgttgccatcaggggcagaatcatagctggaacctgccacagtgccaagatgaacaggaccatcattgttcgcaggaactaccttcattttgtcaagaagtatcagaggtatgagaagaggcactccaacatcccagctcacatctccccctgcttccgtgtcaaggaaggcgaccatgtcatcattggccagtgcaggcccctgtcgaaaaccgtgagattcaatgtcctgaaggtcgttccagctggaaccaccggaggcgggaagaaggctttcgtcgctgcctaagcccagactctgattcatgagtagttcatagtcagaactttttcgcacttgaaatctaccaggctgctgtttcgagatttgattccgtgttatctgtcaaaccgaatgtcgtgatctgaacatgttttgtggaatctatctatcattaatagtttcgctttaattgtg

SEQ ID NO: 128858 - DNA, 302 bp, Zea mays
  Clone ID: MRT4577_48989C.1
gggacacctttgtagccttccccaaagcctcctctacccattgtacctgggggttctttcttctatggctcgatggaacgaccgaaggattcaatccgcgcccctacacactcccctgtgattttggcagccaccccttgggcgacccctcccacatatcggaggactgcggcagacccacctgactcaacgggagctgtacagacaacaccaagcccaacaccgcccgtggatgaaacccctccctaccctggcggcgctgaccaccgaacatgagccacaccccaacaaccaaagcagga

SEQ ID NO: 128859 - DNA, 506 bp, Zea mays
  Clone ID: MRT4577_4898C.1
aaaaaggacctttttatttttgggaccccccaaaccttattccaaaaactcatttttggacctttacccataagccatctaaaagagggccccccccatggtggggtggtgggagaacactggtgagtttggcaaaaccaggtggttgaatggcaacaattggtgccgttgtaaaaaggggcccacctttggccttacctgccaggtgaaccgcaaccaccggtggtgggtcaaaaaagccacaaggcttacattaacttacttgcttaatgggaataattggtgcttcttgaaataaaccacaaaattcaatgcttcttattgggtgaatggaaaaaaatgcttggggtaggccacaacttacttgcttaatgggaaatggtggtgccaataaaccgccaaattcaatgccacccgttggttgaatggaaaaaaccggtgtttcttaaagaattccacaagggttgcttacccaaattggtggaattggtgggcccttatgtttt

SEQ ID NO: 128860 - DNA, 1397 bp, Zea mays
  Clone ID: MRT4577_48990C.1
cgacttaagctcggaattcggctcgaggccagtcttgctctccacactcgctctgctactagctactagcagtagagcagtagaggagagagcatctacctagcgccgtcggacggatcggagctacctcaccgccgaccgcgcgcgaagagatcgatggctcatgctgctacgctcgctgctgcagccgcggtcgtcgtcctcatcgtcgtctgctgctgctcctcttcggaggccgccagccacagcgccaacgcgaggcagccgccgctggcgcccggcctgtccttggacttctacaagcggagctgccccagggcggagtccgtcgtgcggaggttcgtgcaggacgccgtgcgcagggacgccggcctcgccgccggcctcctccgcctccacttccacgactgcttcgtccagggctgcgacgcgtccgtgctcctggacggctcagccaccggcccgggcgagcagcaggcgccgcccaacctcacgctgcgccccaccgcgttcaaggccatcaacgacatccacgaccgcctccagaaggagtgcggtggcgcagtcgtgtcctgctccgacgtcctcgcgctcgccgccagggactcagtcgtcgtgtccggaggtcccagctacaaggtgccgctgggtcggcgcgacagcgcgagcttcgcgacgcgagaggacgtcctgagcgggctcccgccgccgacggccgccgtgccggcgcttctcgccgtgctgtccaagatcaacctggacgcgacggacctggtggcgctgtcgggcggccacaccatcgggctgggccactgcgcgtccttcgagagccgcctgttcccgcgccaggacccgacgctgaacgccaccttcgccggccacctgcgccggacctgcccggccaagggcaccgaccgccggacgccgctggacgtgcgcacgcccgacgcgttcgacaacaagtactacgtcaacctggtgaaccgtgaggggctcttcacctccgaccaggacctcttcagcaaccccggcaccaggcccctcgtcgagaagttcgcgcgcagccagagagacttcttcgaccagttcgccttctccgtggtgaagatggggcagatcaaggtgctcacgggcgcgcaggggcagatccgcaggaactgctccgcccgcaacgcaggcatgacgtggtccgtcgtcgacgaggctgcacagcagagcttcgtgttctagactttgtacgtactggctgccgtgtgggaggcggtgtcctgtcaacagaacagatagctagcactagcagtagcactggacggcatgcagcgcccccatgcatctagcttggacaaataaaagtggccatgcataaataaatctaccgcaaccgatcttcaaatagt

SEQ ID NO: 128861 - DNA, 545 bp, Zea mays
  Clone ID: MRT4577_48991C.1
ctatccaacccctcggggttgggctcgagttctagcggttctggcggggttcgggtgcgctggtgagcggctcgatatggcggcgtcggatgttgagcaccgctgcttagtaggcggtctaggctgggccacggacaaccactccctccacaacgccttcagcacctacggcgatgtcctgaagtccaagatcatgctctatcgggagtacgcacgaagtcccgcggtttctgcttagacaccttctccagggaggaggtgatgaggaacgacatctagggcctgaaccgtaaggagctgtacggccgcaacatcaccaccaacaaggaaccaacccgccgaggccgtaaaggcggcggactgggatacgccggtggccacgaacgcagttgctacggaggaggcgggcgccgtgacggctgtggcggttacaatggtggcggcacctacggtggttgcggacgctacggtggtggtggtggcgaatacggcggtcgcaaccgtggcggatgatacggcaactccgacgggaactggacgcactg

SEQ ID NO: 128862 - DNA, 727 bp, Zea mays
  Clone ID: MRT4577_48992C.1
catcagccggttgtctagatggtttgaacatacatgcgaacgagttcgcctttgaggaatctgtttcaaccggtgagattgacagaaagatcccaggtccccgctagacaaggttgagaagttcaagagcatcagaagcgacgcggacagtacggtgccattcctgtctgtttacatcggagactcggtcggtgatttgctctgcttattggaggcagatatcggtatcgtcgttgggtcaagcacaagcttgcgtagagtgggcagacagttcggtgtttcctttgtcccgttgtttctcggtctagtggagaagcagaggcaactgacggatgaagatgcgtccgcgttcaagccgcggtctggagtcctttatacggtctctagctggtcagaaatacacgccttcgtgctgggaagcgatttcagctgatggatcagctgcttcttttctccatcttttcccccttgagaagcaaaaaagcttttgccggttgattctgatgcatacgatgcgtgaatcctaatgtggtcattttatgaaagccacatgtcgattctggctaccactatgtatgaatgaatacctgtagtttgtggtgtggaatgggttaagtttgtgcccgtgaattgtgatcaatgtttcattgattcatccttgttccatttgggactaatttctgggtgttgctggatgaatgatgaagtacaactcgtttttatttct

SEQ ID NO: 128863 - DNA, 991 bp, Zea mays
  Clone ID: MRT4577_48993C.1
aattatggggagagggagaacccctacctgtggcaggcttaacggattttcttctttgctcagccctgctggtggagacctctatttatagctataatccagccatatttctaaggatagcaactaacagatctattcctatctctagtgcttatctccttaacatatttatccctatctctagtgcttatctccttaacagatttattcctatctctagtgctggattaattttataggtggattgtgatgaaatcgctatatggaaataaatttggtaaatctatgtatcagatggccctggttgatctttattaggcttgttattcatgttcttctattttcccaggattcatctgtccctagctcaattgggatgcccacgcgtccgggataccaatcttatacaccttatcgtggccagatagaatctattgctcggaggtcacgtggccccgtctagatctttgcaagttgggttcactgacgttcaaagctcctgacaatgtaaaatacccgtcaatggacctagcgtacgcagctgggcgggctgggggcaccatgacaggagttctaagcgctgccaatgagaaggccgtggagctgttcatcgatgaaaagattagctacctggacatattcaaggtggtggagctcacgtgtgacgcgcatcggaacgagctggtagcaagcccatcgctggaggagatcatccattatgatctgtgggcgaggagacacgcagccagcctacaaccagcttctggcctgagcccggtccctgcatagtagtaatcacatgcgaacgttgtcacgaccatggtgtgtatagcaagcagttctgagatgtggcgaagtgtgtggtccctggagctggatgaaattacatgcgaacgttgtcgctggaggggacatctctaggtcgccctcctggatgtagatcgtgcctccacagaataaaatgcatctgttccataggctacttttacat

SEQ ID NO: 128864 - DNA, 289 bp, Zea mays
  Clone ID: MRT4577_48994C.1
gggttgttcgcggtgaagggtgcgctcaacacacaagctttataagcagtgtcccatgttccttttagcgaccactttgctggacatgggggctcacgtgaagagtcaggctccacctaaactcctgcagcggtcggcggggtggggaacaggtggtggtgcgacacatgttctacattgcgggacggaccaaggcatgcaaagggatgatccctctcacgacgtgggcctcggttgtcaacgggcctgagctgcgcgggtgagggtggtgcgttcctattgctcatgg

SEQ ID NO: 128865 - DNA, 551 bp, Zea mays
  Clone ID: MRT4577_48995C.1
cgggtggcgaacagcgacgcagagagcaattcatcgacaaatcgcttctatacattgaggagagatgaatgccaagaggctgacgccggttctgctcgccgttctattgccatgcctatgccttatgttcgttgcaaactgtagcgacgtgggcataccggcggcggctggcggtctccggcggctaccggacggagagaagagcaacaagatacacatcatactgtgtgtgaagtcccattgctacggtcccgtcaagacatgttactgctgcaacacactcgttaatgtaacgtgctacacagatcagcaatactgctggagcgtgtgtcccagtagactccaagggatgatccctgcacccgcgccagcgccattgccatcgccaacgggtcgtcgcggcaggttctctcgagcctcgacttctccgacgagtaacaacaattcgtgaaattatgtcatgcctgacagcgtgagcgtaggatgatgatatatatgcagcaactttaatttatatgcaacaataatggacgggaacatttttgggatcc

SEQ ID NO: 128866 - DNA, 1876 bp, Zea mays
  Clone ID: MRT4577_48996C.1
ccggccgggatgatacatttaatcctagacttgatggcaaagaacgggtgcagttttttgtctctctatttcctatttatgttgcacaaataattgtttccttttgttatccaaataaataattacttccttctccacccttttctccagttgtagcgagtgagttttagtaagggataaacaatagtaggaaggactctgttgtgtttcaatctcgagtatttgatggatggggcattgttctatagatggtgtatacagaaatgatcttaactgtcattttggtcaaaaccacaatagttctacttatgttagaaaatcaaaagatttaagtgtcttccatggtttaaagttcatgatgagcaaatttgacttatttttaattgtttatcatattttgagaataattttgctgcctattcaacagataccatggggggagcatttgatccagctagctggcaaacaagatttggtggtaactgtttatgatgaaacaaatatttcgaatcattaattgctatgtttgtgtctgcatcctgtcagcaattaggatgtgacaggacatggcctccctccaatgcaaaaatcccaaaagctccttgcagacacacttatttgcattctttgcgctgacatgcagttaggatgcgatagggcctccctccaatgcaaaatcacattaaccatgtcaccgctgtcaattgtttttttgagtttgttcccaaaacctcttaattattattgcccacggatagtcatgttatctacataatccgttttgccactcttcagggttctgcattgtgaatagaggttcatctttgtgattagattgccaccgccgctgctttctactcattcgacgaatgttttgcaaagaagaaatctggtttatcttaccctcgattccttcctatgatacaactaacaaaatgaattggtacattcaggtatctttaaaaccttttcacttccaaattagaatgatatcatgctcaagaggtaacattttctgatgttttttattttaatagtaattattggtcgctgactttttaaaactatttgtgttgtacttcaagcatcttctacactgcatctaagctttgaagagttacggacaattttgtactaattgttttctttattttcccaaatgtgtgccacttcctttagtatttttgcagtgcagacgattgaaaactactgttttacatcacctctctgtcataggaatagtttactactctaatgctcattctattaacactaaaaaaagatatatcgcttgaaaacaggtatgtatttcaatcttctagatttatatttctttctttatatatacaaaacaggtaagtttgtaccatttgttttattttttaaaaaaagaaaaggtatgacacttacattagtattttttcccaccagaaacgattgaaaactattgtttcccgtcacctcctgtcatagatggcttggaccctcttattatcctgggagcctcggtggtttggaagcatagaaacagagtggtgttcggtagagtttcttccaacctcactcttattctggagtctgctaatgaggaaagcgagaaatgacaagttgcaggagccaagggttatcctttctggctgctccaagccatataatttagggtggttggatccttcatggatattttaatgtacttctgttgttggcctccgtaagaagtgcatgtatcccgggcgtctttcagctctttgtattcttcgtcttttaatatagtggggcgcagttctcctgtgcttttcgagaaaaaaaaataaaatgtgcatctatttaagtctcttaccaataagtgtttatccaatatgtttcattgttcttt

SEQ ID NO: 128867 - DNA, 555 bp, Zea mays
  Clone ID: MRT4577_48997C.1
gcagctaccggtccggaattcccgggtcgacccacgcgtccgcgattgaaaactattgtttcccgtcacctcctgtcatagtaagtgtttcccgtcacctgaggatttccaattttctacaatggtgggagagatcttcaactattgtttctgacacttgaaaggatggcttggaccctcttattatcctgggagcctcggtggtttggaagcatagaaacagagtggtgttcggtagagtttcttccaacctcactcttattctggagtctgctaatgaggaaagcgagaaatgacaagttgcaggagccaagggttatcctttctggctgctccaagccatataatttagggtggttggatccttcatggatattttaatgtacttctgttgttggcctccgtaagaagtgcatgtatcccgggcgtctttcagctctttgtattcttcgtcttttaatatagtggggcgcagttctcctgtgcttttcgagaaaaaaaaatatgtgcatctatttaagtctcttaccaataagtgtttataaaaaaaaaaaa

SEQ ID NO: 128868 - DNA, 770 bp, Zea mays
  Clone ID: MRT4577_48998C.1
gaagagactcctcgactcgcgtcccgcgctcgggctattggaccgaggggttgcggtggatttggagcggggtggactcgtcgctgatggtattctccgatgcaagaggcagggagagagcgggacagggcggcggcggcggcggatctcggaggcgtcgccgctagcgtcaggccaacggatacagcagctgtaagcacaaagccggcaaagcgatacccactggcgttatggataggcatattgggcctgataatgctagttggtgtgtacatattctcgttgtctctaaagcaaaatgggatgcttttcgggctcatgcagacaaatttgatagaaaaggaaagggagaaaccttgtcatgatcccggtattccagacacagaaatcccttacttgcactacccaatgccaaatacttatgataggaaagaatgtgcgtgcacgggggttaggttctttgctatattgtcaatgcagaggtcagggagtggatgggttgagacattgttgaatagccatcctaatattagctccaatggagagatcttctctgtcaaagaaagacgcagtaatttcactgcgattaagaaaacactggacaaattgtacaatttggattggtacagcagtgctgctaagaatgaatgtacagctgctgtggggctgaaatggatgctcaatcagtgaaaatatagggcttaatgaagcaccatcaagagatagttgaatacttcaaccgagggggcgtttctgcaatttttctacta

SEQ ID NO: 128869 - DNA, 644 bp, Zea mays
  Clone ID: MRT4577_48999C.1
ggggtaccggcgccctcctcgagttttttttttttttttttttttttttttttttttttttttttttttttttttttttttttttttttttttttttttttttttttaaagaaaaggggccccaggccccctccatttttttttaagggggcacccccccttccagaaaaaaaggggggccccccccttgtttgcccaccccccccccccacaaaggttccttttaaaccgccccacggaaaactacaaacggttttttaaactacaaaaaaggccccccccggttaaagggggaaacaaacccttgacagggggggaaaattaacctttggaaaaaaaaagaaaaaacaacccccccccccttaaaaaaaaaaaactttttttttcccccccgggagggaaaaaaaaaaaaaaaggggcagggaaaaaaacccaaccctcggggggctccctttcgttaataaaccaaaaaggtttgggccccccgccccccataattggggggggggttttccctccagggccaggggaccggggctcccctggggggggtttttgggcggctacaaattttcaaggccccgcggggtttcccccctttccgggggggacccgttcttcaaaaccccgaccacccggggggg

SEQ ID NO: 128870 - DNA, 192 bp, Zea mays
  Clone ID: MRT4577_4899C.1
aaggagcacacacatgctgtactaaaatgaaacagccactatatagtattttgttttggcccaaggtccacaggaggagacaaacacaggagcaggcacgcccacagacacaggaccccaccacaaggcgaccagcgatgcacacaaagctaagtcatatgcccgagaggggcattgaggcgcaccctgcat

SEQ ID NO: 128871 - DNA, 382 bp, Zea mays
  Clone ID: MRT4577_489C.1
aaaaacggggcccaccccccaaaaaccaaagggggggcccggaaaaatttttttccccccgggggacgacagaagggccaaaaaaaaaaaaggcctaaaatacgggggggggggcgccctttttcagtctctcccggcccctttttttttaggggggggggggttccaacccttttttggggggggaaggaccaccccattgggaaaagggaaccctggaaggacgggcatcatccccctttgaggtttcaccccccccggaagggatggcattgttgaaaagacttctggcaccaccttcagggaaaaaaggaccgggaacaccccttttgaaaggcccacccccggtggggccccccctttgggtccccggaattccttg

SEQ ID NO: 128872 - DNA, 822 bp, Zea mays
  unsure (1)..(822): unsure at all n locations
  Clone ID: MRT4577_48C.1
aaacaagagcctccctcgctttcctctccaatttgagcgcaagtccgcctaccactttgagagttcatcctggtcaagcctgagccagatacagacacttacacctaccaagtttctagcttacttgtttgcatatctcgatggagtgcgagaacgggcaggtcgccggcaacggcaacagcttgtgcttggcgcagcctgcgcgggccgacccgctgaactgggggaaggcggcggaggagctgtccgggagccacttggacgcggtgaaacggatggtcgaggagtaccgtaggcccgtggtgaccatggagggcgccagcctgaccatcgccatggtcgccgctgtggccgctggtgctgagaccagggtggagctcgacgagtctgcccgctgccgggtcaaggagagcagtgactgggtcatgaacagcatggcgaatggcacggacagctacggcgtcactaccggcttcggtgccacctcccaccggaggaccaaggagggcggcgctctccagagggagctcatcagattccttaatgccggagccttcggcacaggtggccacgaccatgttctgcctgccgcagcaacaagggcggcgatgctcgtccgtgtcaacactctgctccaggggtactccggcatcccgcttcgagattctcgagacggttgctgcgcttctcaacgccaacgtgacaccatgcctgccgctccggngcacgatcaccgcctccggcgaccttgttcgcttncctatatcgcgggcctgggtgacggtcgagcaaactccgtgggcactgccccagacggcagca

SEQ ID NO: 128873 - DNA, 882 bp, Zea mays
  Clone ID: MRT4577_49000C.1
cggttaacactaacaaaagagattcgcttgaaaacaggtatgtatttcaatcttctagatttatttttctttctttatatatacaaaacaggtaaatttgtaccatttgttttatttttaaaaaagaaaaggtatgacacttacattagtattttttttcccaccacgagtccttgaaaactattatttctcgtcacctcctgtcgtagtaagtgtttcccgtcacctctctgtcgtaggaagaatttactgccctattactcatcttattaactctaacaaaaaatctcactttaagataggtacatatttcaatcttaattctagatttatgtttcgttctgtacatagtggttccattttttctccccttgctctcgtcatatgaatatttttactccattggttgttttatttactttaaaagcgtgccataaaatatgtgtgtttcactattaaaaaatatatcccttcacttatgtattagtgttagaattacaattattttttcttttcccaaaagtttagaaatgttttaagcgaactatggatctttatgtttgtgataatgtgtgcacatcttagcccctaaatatgaggatttccaattttctacaatggtgggagagatcttcaactattgtttctgacacttgaaaggatggcttggaccctcttattatcctgggagcccgggtggtttggaagcatagaaacagagtggtcgttcggtagagtttcttccaacctcactcttattctggagtccgctaatgaggaaagcgagaaatggcaagctgcaggagccaagggttatcctttctggctgctccaagccatataagtaagggtggggtggatccttcatggatattttcatgt

SEQ ID NO: 128874 - DNA, 488 bp, Zea mays
  Clone ID: MRT4577_49001C.1
gttatttaaactattttttgttcgtttttttttttttttttttcggggaaaagttccatgatatttttacggcccccgcacacgatttttttatttataaaacaaaccccgaggtggggaatttttacgtccacacacaatgctttttaggggggggccccccacccagatcgtgaactacggagtaccccccccttgcaaccacaaatgcttgcccccactggatgacgctgggttttatggttttaattggcagccactcctggggggaacaacggcctctgtccgttaacttgacccggggggtcgtagctgcacaccaaaaaaacgccgtggttgtcgtccaaaaaaaagggcacgaagcaaatgggggtggacctgccccaaacaacctgagaatagtggccaaacactttgcggggaccacagggatgcctgataaggaggaatttaattttttcgccaccaaaaaccgacggggtgggggg

SEQ ID NO: 128875 - DNA, 101 bp, Zea mays
  Clone ID: MRT4577_49003C.1
ctgacgcgtggggccgtctctcaacaaaagatgaagacaaatgcatttgatagtgaaattgtgaggcttcgtcaaacttctgattctgctcttccaactga

SEQ ID NO: 128876 - DNA, 550 bp, Zea mays
  unsure (1)..(550): unsure at all n locations
  Clone ID: MRT4577_49005C.1
gaataaactttgaaatgttataaattatttatagttttgaaatatatgctatcgcaatgacaatcctcaataagaagtacttagacttataagaaggtcgtgcccaccggcgcttaacaccatccacagcagcacaattctagtacctgcaacaacatgggttcgaaaaccctaagtacgaagtgtactttcgcaagtcttacctgtctaaggaaaaagactctcaaggatatgctggctgttgggaatcaaggtatggcttatcaagaatcaaagactttgtttgcataaatgcttactaataatggatccttaaaaatccagttttattgtcaggttgagtaaagttacctgcatctagagttctttctaccctagttcaagcacttggcctagactagccgtctttttatcatcccttcagtccactagattgctacgtgtagggcagtgaccaagtcttcatgtccgagaagtaacggcgatctgaatcgattaataaacagctggnggatctccaatcacacgacatatgtagcacttaaccctt

SEQ ID NO: 128877 - DNA, 304 bp, Zea mays
  Clone ID: MRT4577_49006C.1
gtactcctccgcttcgtttccagagcggcggcggacgacgagaaggtgaaggcggcacgacgctctccgacttctgcctccacaccacctacgcgtcgtcgtccatccgcgcggtcgccggcggctgccgcgccccgcgcgagcgctcgaactactggtggagggagagcatttgtggagaaggcagggtgagtacgccgtgcgccagcgccgccgtcgtccgcggcacggtcacagatgaagctctagatggtgcgcgtcgccaccaccatgttgctctggacctgcgtcatgcagctcactg

SEQ ID NO: 128878 - DNA, 330 bp, Zea mays
  Clone ID: MRT4577_49007C.1
atgagcttctcgaagcatccactgtctccgccatgagtcctttcggggcggtgatgacgccaaacgctcgcaaggagctgtctaactctgaaggacgtcagctcacgcaggtagactgcggataggaggcgcagaggcagatacacgcagaagataccagtcactatgccgaaggctcagcggagtaacagcccaaacatgttcggcaacggcgtaagcagtatgggcctcgtcgacaatgcgacagttgctatacttagcccggtggcgcatcggacacactggctagactgcgatcataagccgccgataccggacactctcaacaac

SEQ ID NO: 128879 - DNA, 373 bp, Zea mays
  Clone ID: MRT4577_49008C.1
attgggtacctcgaggccggccggggtcacgacttccacgagccgttcaaataggtgccaagtggaagcgcagcgatgtatgcaagtgacgaatactaacgaacgaacgattttgagacatagcttgtgtctcacgcctggttgctaatttctcttctcctggctcttctttttctaaaagcagaggatggagccatgtaaatttctaaagctgtgtatttatcgacatgatcaacttccacattgtctttttcctaccccctaatcttgctacaatacgtgagtgatgttgacattcttgctacctgaatgttatgtactgcaatcagcatgtgtcttctgctatccagaaaaaaaaaaaaaaaaagtgatc

SEQ ID NO: 128880 - DNA, 415 bp, Zea mays
  unsure (1)..(415): unsure at all n locations
  Clone ID: MRT4577_49009C.1
gaaagcggacgccgcaggaccgnccaaattcccgtcacccaccctctagatttgagcgccacccttttttgggttgtgttaattaatatggtctgaaaaatcaactacatttttttaattaaaattatacaaattctccattcttattcccaacactactaccaatttttttttcacttcttacctaatattacctttatctcataacatcttcttaatcctcacattttatttactcaccacattactttccaaatataacctaacactttttccttttaaactaatttcttagattctcctttttttataacccaaccaaactttcaaattttcttatattattttccctttaatattttcttttcaaatttttttcaacttacaactatacttaattttaatttcctcattt

SEQ ID NO: 128881 - DNA, 215 bp, Zea mays
  Clone ID: MRT4577_4900C.1
ccgggatcccataccccacgctcactgcagccgccgcccatttcctagcaacccgtcctccgccatggccgacgaccactactcctctaagaggaagtacgacgacccctcgccgccgccgcggcggacgggggtctcttcgggcccgccgcctgcctcgccgctcgcgggcggagccccctcgtactacagtcgtgcgaccgcctcccgatgcc

SEQ ID NO: 128882 - DNA, 506 bp, Zea mays
  Clone ID: MRT4577_49010C.1
gggcggatgacgacgcctgccccactatctgaagtttttgcgggcgctaccagtttgatacagtaagagatatctctgctttgataactgaaaccattggtgccaagcctgcgcgctaagattatcaaaagatgatcgtacctgcaaagaaaccgcatcctaatgctcggatgaagaaagaactcgtggttaatctgctcaatccaacttatatatctgggcttgctagtgtactcgatgcttggtaaatataatctacactagacaatacaaggcaatgatgactgagctgtgaaaggcactatacgttgtatgtacatcgcttagcgctagatttgcctcatgatatactacctttaatgcctgaatatgtggataaaaaaaaacggtttgaataataatataccgacgtggtaccctttctggcgccaatgagtctggagctcctcttatttatagcattgctgaccaattatatagtacaatgtgaccggcatggtttaaat

SEQ ID NO: 128883 - DNA, 300 bp, Zea mays
  Clone ID: MRT4577_49011C.1
ggtgccattgcatattatgactcggaggctcactaaaggaaacgcatggctggaaggaaagagcaaccaacaagcgactgtggactagacctcaggacaaaaacaccacagtgttccaaatttactcacgaccagatgcatagaaacactatctccacttctttgacacattctacaaccgcccatggcttcacggtcctacaggctctctaattgcgggcgttgattaccaaccagggccgaatggaacgcaaggcgcagtagtcagtgaagatatcctcagatccatccattgcaaac

SEQ ID NO: 128884 - DNA, 416 bp, Zea mays
  Clone ID: MRT4577_49012C.1
tcgacccatcgcgttcgcccacgcgttcgtggactcgtgggcggtctctgggctgtccggctgtcccggctacaagattttcaccctctcgcggcggacaaaagcctttgttttttttttttgccgcccaagccggtccccggccttaataggaattcccccccacggggccagccaagaccgggacgggagatgttcatccgccaaggggtctacaatattgtcttccctttccaaggggaaagcaaggagggtttttttttttttttttggagccgacggaatataaacacacgggggtggggccccagtatgaacacaaaagggggtttggtccttgggggagaaaaaccgaaacccctcttttggggaaagccccttggggggaggggggcgcccccccctttggggggggg

SEQ ID NO: 128885 - DNA, 360 bp, Zea mays
  Clone ID: MRT4577_49013C.1
agcttatgagtacttttatttaaaaattgtttcactaatacaaaactatccctcagacaggaccagtctaggtaagaagtctacaccagtctcagtgacagacgaacaccttcttgctgcctcttttccagcctctccttttccaattgcaatttcacagggtctatattcttcccatgatccagaagtgccttctgttgagccttcactatagtcccagcaaaacgactcctgagcattgctgcacgaagagccctgcttggtgataaaggttcatcacaaaggtaactttcctcaccttgtacagaggaggcgataggcgaagtagaaatgtcattgcaagaccatgaatcatttcca

SEQ ID NO: 128886 - DNA, 637 bp, Zea mays
  unsure (1)..(637): unsure at all n locations
  Clone ID: MRT4577_49014C.1
aattcggcacgagggctttgcaacgtgaagtcaaagctgctgcatcaggggatgtggctcgacaacgatgatagctgtcaagacccccttcttcgtggactggattgttttggaggtttgggcatttgacgggggcaagacggatgttcaagctcgttggtgaagaattcgaaccctcgtgtggggtgtgttgaggcttggcaacgacggcgcaccgcgatcttcctccttctgtgacggtgtttggatgtaggcgtcgtcatgttttctttgtccatgtgcggcccgtcttgcggagtcagagctgcttgtcccttgggtcgagctcggcaacaataactttggatggattgtgtggggggagcttccgttgtctgggctgtttgtgcattctgtataggttttgggcccaagtttccttaaaactaggttaattctattcttgttcttaattgaaaggcagagctcctgtcattacattcaaaaaaagaagtctancacagagattaaagaanattccatgtacatcactcacttgaactgagtaaatggatcgctaagctcaattatctgcttgatgtcactgcctttttgtctcttaccttttgcatggcttggatgcttaaagccttaaatg

SEQ ID NO: 128887 - DNA, 805 bp, Zea mays
  unsure (1)..(805): unsure at all n locations
  Clone ID: MRT4577_49015C.1
ccggccgggcgagctatcgtggattcgaagtctacagttgctagagggcaggttgcctgctcaaatcctaaatttttggctgcaagagggccagtaccttgctcaaattcgtttgcaaagaagacactgacagatgcattatcctccaaagtaaaaatcaaattttccgtgcgcagctctgcacatacctcttccaaagatatacctgttcaaacagctggtgtcaaagaggggtcattaagccactcttttcctaccggcaacaaagaggcatatttaaattgcacttttccttttgctaaggagaatgctaaaatttcaagtacacgagaaactgagcgcagctctggttcaactggaaatgattcatggtcttgcaatgacatttctacttcgcctatcgcctcctctgtacaaggtgaggaaagttacctttgtgatgaacctttatcaccaagcagggctcttcgtgcagcaatgctcaggagtcgttttgctgggactatagtgaaggctcaacagaaggcacttctggatcatgggaagaatatagaccctgtgaaattgcaattggaaaaggagaggctggaaaagaggcagcaagaaggtaaatgtcatatataattgtgatctggatctgtttttagaacctctagacttcctgagaangaatatctgatataggtngtcgtctgtcactgagactggtgtagacttcttacctagactggtcctgtctganggatagttttgtattagtgaaacnnattttaaataaaagtactcataagctttcttgactcct

SEQ ID NO: 128888 - DNA, 1964 bp, Zea mays
  Clone ID: MRT4577_49016C.1
tataatcctccaggcaatgatgtacatgctttcgctagagaattgaatgaaatatttgactcagaatgggaatcagtagaaaggaaatttagaggccgaaaccttgttcaagagcagaagacaaaggccataaaagttcgagctatcgtggattcgaagtctacagttgctagagggcaggttgcctgctcaaatcctaaatctttggctgcaagagggccagtaccttgctcaaattcgtttgcaaagaagacactgacagatgcattatcctccaaagtaaaaatcaaattttccgtgcgcagctctgcacatacctcttccaaagatatacctgttcaaacagctggtgtcaaagaggggtcattaaaccactcttttcctaccggcaacaaagaggcatatttaaattgcacttttccttttgctaaggagaatgctaaaatttcaagtacacgagaaactgagcgcagctctggttcaactggaaatgattcatggtcttgcaatgacatttctacttcgcctatcgcctcctctgtacaaggtgaggaaagttacctttgtgatgaacctttatcaccaagcagggctcttcgtgcagcaatgctcaggagtcgttttgctgggactatagtgaaggctcaacagaaggcacttctggatcatgggaagaatatagaccctgtgaaattgcaattggaaaaggagaggctggaaaagaggcagcaagaagagaaagcaaggattgaggctcaggtgaaggctgctgaagcagctgcacaacaaaagtttgaggaagaaatgagggtgaagcgagagcaggaaagggaagcagcacggctggcagtacgcatgatgaagaagactgttgatattgacaacagtgacttcctaaaggagctggagaacttcagcaaaacgtggcagtcgaatccacctggcaaattaatcgtggattttattgatggggacttgccaccggggttagggagccctctggagaggcttggcctgttcatgaagaacgatctcgaggatgaggtggaacaggaagtcgaggacagcgcatcaccctcgatggacgttgacatgaggaaagatttagcagggcatgaaatgcaagacagcatatcacccgtgaaggtcattggcacgaaggatgacttccagggagcggacattaacacgaggaaagatttccaggaagacgcagcagggcatgaaatgcaagactgcatatcagccgtgaaggttattggcacgaaggatgacttccagggagctgtagggcatgaaatggcgaacagcctatcaccatccactttcgttgacacaaagaaatattccgaagggacagaacatgagatggtggatagcatatcgcctttgatggatcctaacaccgaggaaggggagatcagctgctgacgttagctacacttgtcatccacatcatttgttgagttcgtgaggcagacatccttgctgggttgttggattaggcgacatcataagcagagtgacgaagaaacgctattcccctctggttgtgtcgtagaacaatgtggagaacatgtgtcagccgaactgagtagtggttttggctttgttgcggttttttttcctgtcgtggtcttgtcagtcgggcactccgctgtatgctgggttacctgagctcgtcagctggatgacctgtataaaaacatgatgaaattagggaggggttaatttagtgctagtatatattgtaggtgtaggactgtaggagcttatggtggagccggctgcagcacacaagctatagcattgttctcagatttggtcagcgcgccgtagtaccttgttactgtattcattctaaaacttgaataaaatgatgccagtcgcacaaaaaaaaaaaaaaaaaaaaaaaaaaaaaaaaaaaaaaaaaaaaaaaaaaaaaaaaaaactcgagagagggg

SEQ ID NO: 128889 - DNA, 1736 bp, Zea mays
  Clone ID: MRT4577_49017C.1
ttttttttttttttttttttttttttttttttttttttttttttttttttttttttttttttttttttggggcaaaaaaaaacatacaagatattcagtcaaatcatagacttttgtaggtagcactgagggttggtccatacagttccagcaaacatatagccatatagaagccacacaaataacatgacaaactgttccaaacgtttaattgcaacttgcaactagcgcgacagcaacatgacacattgttgccgaaaggaaaggaacaatataactagacgcagtaacttatacttgagaaactacttggcaacatgctcgttgttcctcaaactttttattcttagatagcgtagcccaactgacatccacactgaatggacttttagttgcggcagcaaccgcccactgacaccattcttgtagctacatgtccaacgagagatgaatcatatggtccgtgcggagcgcctataatcaatggattcgagtttgtttcattaaccctttgtgtcagcgttgaagacctcgtataattcatccccatcagactgccgacagatcaatcaacctccactccctctttgtcccagaagatggtggcaatccctgtaaattgcaagccaaccaaataagggcttgttcggttagctctcaatccatgtggattgagtgagattggatgggtttgaatcccaaacaagtcaaacttcttaaaaactttttccaatcccatccaatccatgtgtattgggaataaccgaacaaggcttaagtgtatacgcagatatatgatccacgagagcgttaaccaacataacagaatacattgaatgaattttgcaaatctacagcaacattatctaaaaaatctaggcaagctctgtagtcctaaaaaatgactgttcaccattcccgtgcactcagcacagtagtccatccaattggaattagtctaaataaggtttattatcgaaatataacaatacaagtcatttaagaaatatattcatcactctagcgcaccggtgatgctatatggtgctgaatgttggccgacaaaaaggcaacatgtccaacaagtcaacaactgagatgcgcatgttactttggttttgtgagcacacaagggatagagtccaaaacgaagatatccaggatagggtcggggtggcaccaattgaggagaaattgatttaacatcggttgagatggtttggacatgtccaaaggagacctcctgaggcgtgcgtagaggaattttagagcgggtcaataatgtaaaagaggtatgggtcgacctaaaatgacttgggacgagacggttaagagagatcttaaggagtggaatatctccaaggaattagctaatgataggtgcgcttgcagacaagcaatcaataatcccgaaccatgatctttgcctttttccttaactctattgtctctctttcaccctttcgatgtttttccgtatcgttgtttcttgtgagtttcatctctagcctaccccaacttgcttgggacaaaaggctaggttgttgttgttgtacctcttaaatgattaaatgatgttccaacttgcataaataaatccaatcgctctaatccctcccaatacgatagaaacagattaagttcagaaataaaagaagaaaaccaactccaatttaatcgatctagacccttatactcctgaacacccaagtacatataaaatcaagaacacccgg

SEQ ID NO: 128890 - DNA, 302 bp, Zea mays
  Clone ID: MRT4577_49019C.1
aaaaaaaaaaaaaaaaaaaaaaaaaaaaaaaaaaaaaaaaaagaaaaaaaaaaaaaaaaaaaaaaaaaaaaaaaaaaaaaataaaatcgcgcaaaacacaagattggaaggttcaagttaacaataggggtttgggcgggcggctttaaaggttcaagcccaggttcggcatcaccgtacgctcttgtcgtgtccaacatggtctaaaaccgcggtccatggttggccgttttattgggggaaactcccgagatccgtgccagttctcaccgttaccggcattgcccccatcccccttccgg

SEQ ID NO: 128891 - DNA, 513 bp, Zea mays
  unsure (1)..(513): unsure at all n locations
  Clone ID: MRT4577_4901C.1
cagctgcctctcctaagctatccgccgtcgccgtcgccgtcgccgtcgctctcctctctcctccgagccgctgctccctctcccctgcgcgccgccactgtgggcatctacaccgctgccgctctcctctctcctctgtgccgcagctcttctctctccctctcccctgcgcgccgccactgcgggcaccctgcacgccgccactgcgggcaccctgcacgccgccgctgcgtggccctacacgccaccgctacgggtgccctacgcgccgccgtcattgctccagctcttctctcctctgtttcccagccaatgccgccgctctaactccccaaggcatcgccccgacgacggctcaacgacgccccgtcgacgcctcgcggacgccctgcgccgcagcgggcgctttacgctccatggcaaggtaccggcatctgggccaattcgccccactaggagggaaacaaactgctgcacaacttcccggngactggatctccattggccacagca

SEQ ID NO: 128892 - DNA, 459 bp, Zea mays
  Clone ID: MRT4577_49020C.1
cacggcaccgaaaaccatggcaccaaaccatggcccctgccgcgggccttgccctcaggctcgcgctcagcggcggcgccggcggcccggactacagacgccactacaaacgcgcgaggaaccggccctcgggccagatcccggacccgatccacaacaccccgaagaagatccggacctacctcacgacctacgacaccgcccgggactccgaccccgcctaccacgactaccggcgcgactaccgcaacaccaacgtcaataccaacttgcgttaccccttgtgcgtacccctctgccgaagcagctgccgcagcaccaacaacagctccatcaagtacttgcacacccacatgcaggccctgatgctcgccatgccgctcccgctggacctgtacctccacccgttgcaccgtgcagaggaccctatctaagatccacgctcatgcaaccgtgcat

SEQ ID NO: 128893 - DNA, 693 bp, Zea mays
  unsure (1)..(693): unsure at all n locations
  Clone ID: MRT4577_49021C.1
ccggccgggncagccctttcaagttcccgcaatgtcgaacgcgcctacacgtgcgcacgtgcccagccctacgacccctactgccgatcccgaaattgttgcgatcacgaccgagcacctcagcaacgacgcagttgatcgccgcgccggtccaaacaaacgcgaaaggcgcaagcagagaagaacgcaacactcgctaccaacgccagacgaaacatcctctgagacagattcatctgctgcgacaaagccgcccaacaacccgcctaaggcgcgcaaaagccgtcagataaacaccaccgcagacccagacaccgcagcatcgataccacagtccctcattgctataatgcctccagcaaaccccctccctctgctggtatgcagcatcggcaaccctggggctacctacgccaataccctgcactcagccggacacatagtaacgtcctttatcgcggagcgcaaggtctatcagcccttcagcaaagggctctccggcctggtctcgcgcccggatgacactcgactctccttctcactgacggggttcaaaaaggtacagggcgccccgcccgggccctgagacgactggaccttctggcatcactttcattgatgaatgtgagcggcgtgggggtgaagaagcgtacgccgcgtggttggcggagctgcggcgacgcacaagcccga

SEQ ID NO: 128894 - DNA, 499 bp, Zea mays
  Clone ID: MRT4577_49022C.1
gtacacagatttcccgcgcggggctggccggggctgggagcgaggcgaggatggacgggcggcacgcggatctgagggtttctctagaggcggcggcggcggccggaacggctggaatagggactctgcgcgtgggggctctcggtcttcatcagcgaccctcctccgacgctcgttgcctcgaccctccttcgatgctcctccgacgctcgccccgctgtgggacctccgctggtgagcccctcaccgccgagggagccgaccaggccatgctcccggactccttttccttcacttgcctcctccgtgcgtgcgcccgcgtatcctgcctccccgttggacgaaccctgcactcaccgtcatggcatccaccaaggacttctcgtccgtctctgccttcaggtccaactaatactttttcatgtggatcctctctcttttgaaatgtgaacttactactttgcgaaagtgaaacaccagaaattttgcggtaaatatg

SEQ ID NO: 128895 - DNA, 315 bp, Zea mays
  Clone ID: MRT4577_49023C.1
aaagaaaaatcagccccctggcccgtattttggaaatttgaattgcaaacccaaggggagaacccccaaaagcccccaatttgaaggccaaaaactggggttaaaaaaacacatactggagttttccatttcccagttttcgggagacccatgaattttcgctcagggaaacataccctgggggaccaggtgccgaataggccaaaactacagttttaaaaaacttgttttttacaaactatccatcccttttgggggaattccccccttttgttttttgatcaagctcagccaggaaaacagggtccgggtttt

SEQ ID NO: 128896 - DNA, 211 bp, Zea mays
  Clone ID: MRT4577_49024C.1
aaaggaaaaaaaagagatttttttttttttgaacaaaaaaggggggacctaagcatctacccccccaaattgttaaaaaagccccctgtttttcattccggcacgatggcaaaacagaggttgtggtcttttttttaaaaagcgagcgtgtggggtatggccaaccttttggggaaaggcccctgttttttttaatcgcaaacctatagct

SEQ ID NO: 128897 - DNA, 530 bp, Zea mays
  Clone ID: MRT4577_49025C.1
agtgaactcttatatataggactttaggtcataagtgtaatttcatacgaagctatacgccatgtttcccttacaaataggagtacaatgcccatgaaaggggggtctttttggatagctcgaggcacacatttcttctcgacttgctcaacatctgaagctgtgaagtatgttcattctttgttcaccttcggacattccgaaggaagttggtaaaaaagtacaataaaaggaatgagaagaaattgaatctatgttttgatttatcatctacttatgtttgtttattaccttctccctctgacttgtctttttcccacgagagaatcaaagggggaagggattatgttattttaattgtgttgccctgttttgtttcccttttggaatcttaacagataaccaacataagtggcttcaccaggagggaacgataatgcaacaatgaagtctttcatcatagcactagaaggcctagcattgacatggtactcaagattgccacccctatccattgactcgtggcgggc

SEQ ID NO: 128898 - DNA, 333 bp, Zea mays
  Clone ID: MRT4577_49026C.1
tgcggacggtccgcgtgtaaaaccctaaaatcctgatttaaggataagtagaactttaaaaaaaaattgataatgaataattaagtaatgttaaaagtttggaggttcagaattaaatataaactttaacactagaaattaaattgaaactacaaaaaacaatagcaacactttccatttatttattagattagataaattcgttcataaactataaatgctctttaacattatttgacctaagtaaaagttttaaattactttatcctaaaaaataaaaaaagcgtttttatttaacttttaatcacacgttcaaattaatacccttctaaa

SEQ ID NO: 128899 - DNA, 602 bp, Zea mays
  Clone ID: MRT4577_49028C.1
ggctttgcattgttcctacgacctataatcggttctcagtttttggcatgcctcaacaagtgtgtcaccccaatgggaagacgcctcttgagggcatggttcctacgtcctataattgatattgatgccataaataatcgcctcaacacaataacattctttctttgctgtgaagaagtaatgtctgcattgcgtgagactttaaagtctgtcagagatgttccccgcatgcttcagaagttcaactctccaaattccttctgtacaagcagtgattggaacacatttcttaagtgtatttgctctctgctgcatataaacaagatttttgaagtaggaatatcagagcatctggcaattaagttgcaacatatgaacattgatttgattggaaaggcaaattcttctattacagcagagctggattacatgtcagacctggtagttggtgtgattgatgttcaacggggtaaggagaaaggctatgaaaccatggtgaaagaagggtttatgtgatgagctggatgagctgaggatggtgtatgaaaggtttacctgactttctggagcagaatacctccactaatagtctatgtacacca

SEQ ID NO: 128900 - DNA, 435 bp, Zea mays
  Clone ID: MRT4577_49029C.1
gcgggcgtgtgcacggcgtcgtgttccccgctcgagccacgatgatcgccgattcttgcccgggtttacgacagctgcggtctgcttatggcctccccaagttctcaccctgttcaatctcctggtcgagctttctggtgcgaattgactccggctttccttacgctctgtatttaaatccatggtggatctaccatctgcatgaggagataggtgctgtatgtaatcagatcgccatcagattgagctcgcctacttccgacgcgctagcatagcggagtctatgctctggtcaaccacgactatagacatggcgcctgcagctcccaccaattgatgaactcttgaacgagcatacatgaaccgctgtgaggggggttctcaacgatagctacactgaacggattgaaaagctggctcggttgagcgcagtga

SEQ ID NO: 128901 - DNA, 2330 bp, Zea mays
  Clone ID: MRT4577_4902C.1
cctcgagccggccaaaaaaaaaaaaaaaaacctcagacccaggcgggcaacaaggctttcagccgctctcctagtctcctactctcctctcagccgtcgccgtcgctctccacaccgctctcctctctcctccgagccgcagctcttctctctccctctcccctgcgtgccgccactgcgggcaccctgcacgccgccgctgcgtggccctacacgccaccgctacgggtgccctacgcgccgccgtcactgctccagctctcctctgtttcccagccaatgccgccgctctaactccccaaggcatcgccccgacgacggctcaacgaagccccgtcgacgcctcgcggacgccctgcgccgcagcgggcgctttacgctccatggcaaggcgcgttagatgcctcaggttccacaggcgccttagcgcctaagcgacgctaaggcggcgcttcagataagcatgcttttgaataagatgtgaaggattaaagctcatgtgaaagattctaagactacaattggtatcaagcggttgctttcttatttctcatacgctcaaccatgctcctgcatgctaaggattcagttaggaagatgcattcagttgctaagaactactttgtgtctgatcttactcatcctccaagatccttgaacagagcttccagacatgttgttccattcaagacccgtttctttacgcattgctcacttgagagccgttcagttgaccaagagattgtgattgctatgggaagcaatgtaggcgatagagtcagtacattcaacagggcattgcagctgatgaaaagctctgacgtgaacatcactaggcatgcctgtctctatgagaccgcccctgcttatttgactgatcagccgcggtttcttaactctgccattcggggcacaactaggctcaggccacatgagcttcttaaactgctaaaggaaattgagaaggatattggccgcactggcggaataaggtacggcccaagacctatcgatctagacatacttctttatggtaactcccagatccatagtgagactctaattgtgccacatgagcgcatccatgagaggtcatttgttttagcacctcttgttgaccttctaggtgcatctagtgacaacggtatcgaaacaagttggcactctctctcaaagtgtagtggaggtttctttgagttatggaataaccttgggggtgaatctataattggaacagaaagcattaaaagggtattacctgttggggatcgtttgttggattggtgtgagaggactcttgtcatgggggtccttaatttgacaccagacagctttagtgatggaggtaagtttctagaagtgggagctgccatttctcaggctaagtcattaatctcagaaggtgcagatatcattgatattggtgctcaatctaccaggccctttgcaaaaagattatctccaaatgaggagcttgagaggttggttcctgttctggatgagattacaaaaatccctgagatggagggcaagttactctcagtggatacattctatgcagaagttgccagtgaagctgtgaaaagaggagctcacatgatcaacgatgtatccagtggacagcttgatccaataattcttaaagtggcagctgaacttggagttccatatgttgcaatgcacatgaggggagatccgtcaactatgcaaagcgaacaaaatgttcactatgataatgtctgcaaggaagttgctttggagctatacacacaggtgagagaagcagagttatctgggattccattgtggaggctggttcttgatcctggcattggcttctccaagaaatctgaacataaccttgaagtaattatgggattggaatccattaggagggagatgggtaaaatgagtataggtgcttcacatgtgccaatattactgggaccttcaaggaaaagctttttgggtgaaatatgcaatcgtgccaatccagttgagagagatgttgctactgttgcagccgtgacagctgggattttgaatggtgctaacattgtaagagtccataatgctggatatggtgtagacgccgcaaaggtttgtgatgcattgcgtaagcgtaagggaagttgcagaaactgaactatcgctccagttttatacaagaaaaaagtgatgtcgaaaaatgtgatttgtgaagtatcgttgttgtaatgaaccagagataatgctttttcttgtgtcaccaaggaataaagtcaagaagctgctactcaagttgcattggtcctattcagatgattttgctgaacttatttttttgccta

SEQ ID NO: 128902 - DNA, 468 bp, Zea mays
  unsure (1)..(468): unsure at all n locations
  Clone ID: MRT4577_49030C.1
cccgggctcgactccactgcgtctcgattgtttggccatganngtcctcgtcagaatacccttcanngtgttggaccattctactnnngatacaacgtgagcgagcatttgctgattggggcgctatgcaaggggcatcnnaaatgatatatgttcatcatagtattttagtaacccatntngagtaattcaatttctgttgtcacgtnncatgtatgtgactgannagtgtaaatttcttccttagctgggctcagagtgaagnnntttgttgggaatgtaaaaattagttttaatcgacatactgtggatttgggtttcaattccaatccaaaccctggtagtgtgccttcaaatttagtgctgtactattaagtttaaagttattattaatgtgaatattaaatatcaattttctgataaattgttgcctctgttgatacacttatcaaatagttaaaatggata

SEQ ID NO: 128903 - DNA, 525 bp, Zea mays
  Clone ID: MRT4577_49031C.1
tcgagccggccgggaatccatagcgccaccatccgcttcccagtcggtgctcccgactcgctcgcacggacaacgacgtggatacggggtgccgattggccacagtgtgggctcggagacgccacgaatgcttcgcacgacacttccgccagaacctgtgcatgactctcaccagcaactccacttcatacacgaccacatatacttccgatacttcttcctccggctacaccaccaagatgacgccctgccaggtctacaggtcgagcctggcgagatcgtgttccctgacttagagggactccccaccgccggccaagatggaggcgtcagggaccatcatgtgcccagggatctgtcctttgcgggacgctgtgcaataggccccgtgcatccatgatgtggtgtccttgaacgagaacaacgacccagcgagcgcagacgtggaaaaagggaaaggggagtagcgaccatgccaacgaggcattagccgccgggaataataatatggactacggcgacgcc

SEQ ID NO: 128904 - DNA, 216 bp, Zea mays
  Clone ID: MRT4577_49032C.1
ggacctcatgtgagcatagatggtgacgtggagagcaatgtcctcttgcaccacacttgcatgagggcagatggtgggaatgcctgtataccatcccgaaccagaaccctgccaacccttgcatgcggctctactaccaattatgagtgatctgatcacagctaatcgacatgatgattatatctgtaacctgcaagcagtgtgcagacgtttaca

SEQ ID NO: 128905 - DNA, 152 bp, Zea mays
  Clone ID: MRT4577_49033C.1
aagtagaggcaaaactctcttttccccccacgggggaaaaataagaacactgttgataaactaacgaaaagggggctttcaaggcactaggggattacaaaattgttctgggatcgaacacaccccagggcaatggtggttcattgggtaca

SEQ ID NO: 128906 - DNA, 310 bp, Zea mays
  Clone ID: MRT4577_49034C.1
aacaagttctcgtatatctatccgacactactggctatatatatacaatataagatctcttacaatcccctaacatctgaactaaagttccacatggtactctctgtctttattgatgacgtggtcaagaaagaatcccgccaattcctcttgaattgctcgtatgcgatcttatggtaagagttcatcccacatctgaaacatttcatattgtttttagagtagcccgctcacatgtcgtgtggcgtatgaactcgcaaacgtagtatccacagtaattattcctgggttcctgccacaaccattatgg

SEQ ID NO: 128907 - DNA, 354 bp, Zea mays
  Clone ID: MRT4577_49035C.1
tacctcgagggcgggcgggattccttctacgacagacttgcatgccgtccgcgtattcgcccgccgacgccgcattttcttccccgaggcagcgtccgaggtacactgagcgtgcgagtcaccgtagcgacgaaaggtcaggcggtgagcggcgatgacgtccgctgacgcactcttggcgcagatcgtatcctccatcctcgtggtgcccgacttctccaagccatctatcatgtagtcggacatcactgccttcctgaacgatcaccaggcgttcctcagacaagatgtacctcgttgtagagcggacgccggaccaccggatcaacgtggatactgctgcattaactacat

SEQ ID NO: 128908 - DNA, 1640 bp, Zea mays
  Clone ID: MRT4577_49036C.1
ttgtccaaaaaaaattggttaagcatttaatagatcaggaaagagttgcgatctatatacataaatatatatctctatatctaagtatgtctaaatatatatttatagattcgttatcatctattaaaatgtattttaatatacacataaattcaaggcctagcgtgactagtaaattaggatggatggagtattatttagcattcaactctgaatccaactggtcaactatcatgctttaaagtgatttcatttgtttatttagcgctcttcactaatggaaacatatctgctccattgatttctgcaggtacgggggcttcggcaaagggaggctcggtggcctctcctacttcgccggcgccgagaagaaggacgaccgcgtgctcgtgccggatttggggtcgctcaccagcatccatgacagggcgcgtgagctcttctactacctcaagggtgggcaggtggactacggcgaggagcacagcaaggtttgcggccacaacaggtttgggagaatatatcatacagggcactatcctgtgtgggacgagcacaacccagtgcattttgtggggcactctgctggcgcgcaggttgtgagggtgctgcatcagatgcttgccgacaaggctttccctggtcatgatacttctgaagattgggttgtaagcctgacttccttgtcgggtgcacttaatggaaccacaagaacttactacgatggcatgctggtcgtagatggtaggtccatgaaatctatctgtcttcttcagctctgccggctcggagttattgtctacgattggctagacattccttggctgaagaattactacaattttggttttgaccactatgagatgtcgtggaggaaagtaggcttttcaggtctaattaatctactgctggggcacacgggcccatttgccagcggggattggattctacctgacctcacaatccaaggatccatgaaactaaactctacacttaggacctttcccaatacattctacttcagctatgctacaaagaaaacaagaaaaatatttggaattacagttccttcaagtgttcttggagtgcaccccattctctttctgagagtcctccagatgtgtatgtggcggcaccctcaaaatgcacctctgccttacaaaggatacagggatgaagattgggaagacaacgatggggctttgaacacaatctctatgacacacccccgcattcccatcgagcatccacaccattttgtagtcgatgattctgactgccatcctttgcaacctgggatatggtattacaagattattgaagctgaccacattctattcattgtgaaccgggaaagagctggagtgcagtttgatttgctgtacgatggcatttttcagcgctgcaggaaacatgcctttaggaagagcccacctactgtaccaaacgaaacgagccgatagcaaaactaagctgaagtatgtgtaggtagtacataggaagaaacaaggtgccacgacattttcattaactgtaaattacattgttgattgaacggcaataacatatttgcttctccaattaaaggaaaaaaaaagcgggccgctcgcggcgagcggctgctcgcgatctagaactag

SEQ ID NO: 128909 - DNA, 125 bp, Zea mays
  Clone ID: MRT4577_49037C.1
aaaattcggaaagcaggagcaagctgttcggggattacgcgatgctccttaatttatttcagtacatagaacggcacaatacgcagaggctggcgcgagggcggaccctggggcggacgcgtggg

SEQ ID NO: 128910 - DNA, 398 bp, Zea mays
  unsure (1)..(398): unsure at all n locations
  Clone ID: MRT4577_49038C.1
gggtacatgccgggttattattattaaaactatttattggtggcacgttacatgacaccacattacatgcatgcacgggacgtagggtgtgcacaactagccaagggggttacttaatactactagagttcaattctggcaagccaaaggggtttgaaaagcttttcttaacaccccttttggcacctgcagtaacggagggggcaatagcccgcggtccaccccccgtccttcttgacccactctttgctgcaaaagcggtcggagattcaagggaacaaatggggctggcttttgcccatgcacacccgggccttcgccaccattgtngtngtcgtccccccctcgtaatgtgagaacaagaacaaccccaggaagaacgcgcacaccgtcgccct

SEQ ID NO: 128911 - DNA, 457 bp, Zea mays
  Clone ID: MRT4577_49039C.1
ccgcgacaacaaagagggctgtacagacatttggcaagaagaaaacggcaatcgcggttgcctacgtaactgatggcaaaggaatgattagagtaaatggccaaccactcaaactcgtcaaacctgagatcctacaattaaagctttgggaaccagttttgcttctcggtaaagacgctttttccaacatcgatattagagtacgcgtgaagggaggaggttacacttctcaagtgtatgctatcagacaatccattgcaaaggcattgatagcctggactcagaaatatgttgatgaagccaccaaggctaccttgcgtgagacccttgtcacttatgatagaaacttgcttgttgcggatcctcgtcgttgtgaacctaagaaatttggtggtcgtggtgctcgtgccagattccaaaaatcttatcgttaaatcactaataaaaattcttgtag

SEQ ID NO: 128912 - DNA, 399 bp, Zea mays
  Clone ID: MRT4577_4903C.1
ccggaatatttgaccggcgagatgaggtcactagctccgcgaccaccacgcctaccccagcgtctagacgctggacggagtcaccccgctcgatgggcaccgcggtctcaccgccgagtacctcttcaagggagccgggccggggctcacgcaaatagagcccaagaagctgaggctctgacatgaactcgagcagaccacggtgaatggtgaccacgctcgacgaccacaccggggcacggggaggaagaagcgaagcacccctcaacagctggtggagcctcacaaagaactacacgcaaatgtaccagggccagagaaaaggaagggaccaacgcccgccaggtcagaaaagggagcaggaagtgaaagaagagaccccgcccaacaaagaatccc

SEQ ID NO: 128913 - DNA, 299 bp, Zea mays
  Clone ID: MRT4577_49040C.1
ccggccggggacgcagcaaccgagctcgctccctgcggggctaaggtacgctcttcatacttggagaccatagcccgggcggacgtgcgtgacccgagccagggcccggaatattggtagaaccgagtggaggactcggacccggctgccaggcatggatgagaatctggcgcgcgagaagcgccactccttggagcacaaaggacagaaggtgcacgagtgggaccagacgctggaggaggagaacatgaacatcgagctgccggagggaggaccaacggaaagtatgggactgggac

SEQ ID NO: 128914 - DNA, 376 bp, Zea mays
  Clone ID: MRT4577_49041C.1
gactccggtcaacaccataatcagttcgactaattttcgagttcaccaccagatggtctgttccattaagattcagcgggcatgtgtctacctacgtcatcactttaatcctacaccctattcggtatagtcttagtcactgaatcctacagctggtcagaacttgagggcataagcataccctcatggctcgcaacagcactcgctgaacgtatgcttaaagcatctggatcagatactctttgaccaggaaacgcatcgtcggcggctagaaacgcattagtattgagtacatgtccaacttcctacgcgtcaagactagctgcattggtacacgagccctagttcaggagcataccggccgttacgatgacct

SEQ ID NO: 128915 - DNA, 509 bp, Zea mays
  Clone ID: MRT4577_49042C.1
aactttcttatttctgtaatatcccaaacattaaaaaacacactttattattggcctttacctcgtcctaactccaatggatgccaccatcttagacgtccttgcgctagatcgcttttgagtgagcgcaaccaaggcgtttagttagtccacagtggtcacttgctcctaatgccgtcattgcacagcgcctcccaccagttacatcgaatgcacttggaacatccacacgagcgaacctatactctcaccatatagctggctgaaaggcgccttacaacagccaattgcccaattgcgacaacaatactggtgccatctaaccctacaaaccatacggtcgcaagcacaacaacattatctgccataacgtgaccacctagcagtggtgaaccctgtcgactacttgcacatcagctgcttgcatacaaaccacttgctctggcgaacgtagctgcatgccagctacaacaacaggtggtacagtttatgccatcgctcagtcaact

SEQ ID NO: 128916 - DNA, 431 bp, Zea mays
  Clone ID: MRT4577_49043C.1
aacgaaagcgcggggaaaccgccccctaaaaatattaaaaaggggaaaaaaaagattttgggggccccggggcccaacattaaaccccttacgggggcccgccccccccaaaagggaaagaaaccaaaaaagcccgccccaaaaaacccccaaaaaaaaaaccgggggggccacccctttgcaaaaaaagccgccaaaaaggaaaccccgggccccagcaaatccccaaaggcttctctaaaaaacagcccgccaaaggaaagaggggaacccgggggcctgcccaaaaaacacacattgggggggggggttccagaacccccccgcccccaaagagaacagggaacccaaacccctttggaccatccccggaacgggttaaaaagctatcccccacccttccaaaaaggaagtcaggcccggcggggggg

SEQ ID NO: 128917 - DNA, 326 bp, Zea mays
  Clone ID: MRT4577_49044C.1
aaaacaaaaattggccaagctttttaggcggcccagagtctcagttttttacagaaaaaccacagaggggcagaccctttaaccatccaggggttttaaccattaattaagggccccttgggaaaaaagcaccagcagtttgtttttcggggggaaaaactaagggaaaaatttttgtacaaaaaaagaaaacgagccggggctaaaattcgggaaaataaaccgagccaaactcgggggggggcatgaggattgcgggaaaaatctcggcacccaaagaggcgaaaagaggaatccttttcgggctcttaaaaagggggaatttg

SEQ ID NO: 128918 - DNA, 399 bp, Zea mays
  Clone ID: MRT4577_49045C.1
atgcaggcggcatgcaaccgtaccaagggggcacaccctttcgactccgacgcgtccagcatgggggcccaagcccacacgtcatgtaaccggcccgccggttactacgtgcgagaagctgcaccgccacttgcgccagtaccgtgccttctcgactgtggaaccggtgccgcgactcgaggcaacattgcgcatggcccaacactgccaaccgagcacatcggtcacagggaccgggaaaggggatactccgaaagggatccttctccgcgaaggaagcgggccccgagcccccctactgatcagaggtttgaaggctggccccttgaaagggttcgacaaccacctcagagcactcgggccctgagccctccgattgatcagaggttcgaaggctag

SEQ ID NO: 128919 - DNA, 275 bp, Zea mays
  Clone ID: MRT4577_49046C.1
gggggcaaaaaaaaaaatttttttggccccccggtaataacccccccccaaaagcaccaccccctggggttttacacacccccacccccacctgggttccctacccgggcccgggcgggcaccaacaccctttccaaagcaacgcatgtaacccagggcgggtttttttggatcaaccccggggcttgtgggggaaaattttataggtgggcccggccagggggcccctgataatgcactcgtcctccgagggggccccccttgcaatctaaaac

SEQ ID NO: 128920 - DNA, 128 bp, Zea mays
  Clone ID: MRT4577_49047C.1
ccccgattaacatcccattggttcccctgtgtgcaagtcatctagctacatttattaacatgagactttcaacaccaacgtacggttgaggggcaggaactatgcactcccggattggcgcccgatca

SEQ ID NO: 128921 - DNA, 2000 bp, Zea mays
  unsure (1)..(2000): unsure at all n locations
  Clone ID: MRT4577_49048C.1
cattgagacccgctttggaggaacgcagaaacgtcgaaaccagcacccggaaacccagacaaagcacgagccacgcacgccccgctgtctccctcccgccgtcccgccgccaccgctactgccggagtctctcgccaccgtcgttgctctcccgccttcaccgtgccaactcccctccttgcctcccccgcgcttcagtcgctccactccccatcgctttcgcctggtcagaattccagatccaggtgtcctttgacccagaccgcgcctgcctttccctccgctcggattcttcgccgtcttcgttcctactgggcaccgccggggtggagcggagatcggatccgccaggagctgattccttctctcgtagtctagtttgatgcggattcattcgctgaccggcatagcatgatcctgcggtgattgcggtcgcggatagcttgtgcaagctgttggcttgggagttatctttctaatctggcctaaagaaatcctgaggcggtagcgtcacatggatgcaagtacggaggttactgatgctattgctgcagtgggcattgacaatgggccaacggggaagttgccgccccgtgatagtgtagaggggcacgcagaagaacacgacgtgctggctgatggaacccattcgggtgagagcgaggtgatcaacccgtctgaagaagtggaaatggaagccacctcgcaatcccaggacataaagccccgagttcctgagggggttcaaggccattcaccgaaggttgttactaaatctccgcgacagagccctcggggcggggataagagtgaagccaggaaaatctctcccagtccttatcctaaggtgcccatcgcacgggtttctgatctagatatagttgatagctcttcgagcaatggtgatactggtgccagtaagaaaaagactgaaaagagcagtttccgcccaattgccaaggagagcctgtcacttgaggactcaaaagagaagaataaaactcagaaggcatcaaaccaacgctctgccaaaaacgatattgacgaagaatcaaatgaaagtgtgaaacctcaaagggtgggcagcactccttcatatggatttagttttaagtgtgatgagagagctgaaaaaagaagagagttctactcaaagcttgaggagaagattcatgcacaggaactggagaaaagcaacttgcaggcaaaatcaaaggaaactgaagaagctgaactcaaaatgctgagaaagagtttaaagttcaaggcaacaccaatgcccagcttttataaggaaccacctcctcccaaggttgagttgaagaagatcccaacaacaagagctcgatcaccaaagcttggtcgctccaagaacacaccctcaggagggacagaaggaaattcaaaccccccagctcgttcagctcgactgagtctcgatcaaagggtcccccaaaatggtgccaagaaagcacctgctgcaaatgcggcgaagaagccccaacggaaatctctccctaaattgccttcggagcaaacagccaaagttgttgacattgcagcgtctgttccatctggagaagagctggggaacaagccatcgttgatgggtcttgttcgagagccaatccgcgcgcaacttacacctgatgaacctggactcagcgtgtaggaaaggaacctatcaagccgactcatgaaagaagagagttgtgcctcagcttccttttatcacactttgctatttctgcattaactgctggctggtattatgtactaaaattagtctcatcaccaggaaggaggtgggagtttggagaatggcaagtgacccccccgtgtattgtttatgctagtttctgttgacatacgaagtgtttgtagttggcaaattttttcagattatcatgtctcctatctccagggctcggagccaattttcttgccaaaaaaaaaaaaaaaaaaaaaaaaaaagnnnnnnnnnnnnnnnnnnnnnnnnn

SEQ ID NO: 128922 - DNA, 257 bp, Zea mays
  Clone ID: MRT4577_49049C.1
aacgggaaaaacaaggaatgggcctggtccaagggataacgggcgcttccggggggaacacaaaacggtctctccaatgtccctccagacacgggaacattcgagggaatcctgtcagcggaggcccccccccctatggcaaggagaacttggggaacccctctgggccctcagaaacggcgttgttgggcagctccccggggaggacaaggcgcccccgaggcttggatctcacgggaggggagggggggcttttt

SEQ ID NO: 128923 - DNA, 372 bp, Zea mays
  unsure (1)..(372): unsure at all n locations
  Clone ID: MRT4577_4904C.1
ctgccccntttccgccaataaggttgggctatctttccgaacctgctcgaccggggcaggtggactctcaccatgcacacttgccgacggcatcccgcccctcaaaccctatcaaacaacacatactctcctaccatcggcccaccaaccacacccttactagctccactgctcgaaaccgctctacgaagccactggactacaaaggcagctaccaaacctgcacacagaactcaatgactgaaccagcctaaccacgaccgtccagagactgacgctcttcgcgagaaccaaagcacccaaaagagcactcactctctcactaggaagctaccggaccatacgctcgtcactgagatcgctcacgatttc

SEQ ID NO: 128924 - DNA, 3281 bp, Zea mays
  Clone ID: MRT4577_49050C.1
gtgtttttttttttttttttttttttttttttttttttttttttcgaaaaagggctcaagtctgcaacccttttgagatttaattgctgcatcgctacaatcgggtcagctacagatagattacactacaccggcagcttacacaccggagcggactcatgcacacaatacaacagcacatcctggacgatatccgccatctttctcgcattcgagaatggcgcgcgctcgccattgccgtcccccaatcgggattttatctcgctattgctacggtacggccgccgctaggggccttttttttttttttttttggataaaaaaaacaagcgcgttattacatttgcacaatttcaggtaaagccacaaaaaatgtaataatttgagacttttcaaaaaggtagaacggaaaacatttgtggagaccatttctgataggcgaggcgacagttccccacagcactacagcaggttccaatcagtcactgcgaaactgctcctgccctcgcacagtcacactctggtccagtcccaacttgcaagcctcaacctataaaaccttctcctctctaataattccattccaatcaaccaagcaccatcaatctccatccaaccgtccaccccgatcccatttccatccaaaaatcacaacctacggacgctgataggattaatgaccttattagtagtaataatagcaacacagaagaaacctccaatttgcaccgtaccccctccaaaccttcccaccctacacttcggtccttttgactgcgtagtgtagggaacgaggccgtcacatggatgatggattatgggcctttctttgaggctgaggcgccaaaaaccactgtcgtatggtataatccatccgtccatcaggttcaggtccacgtgaacgctatcgggctggccacgctgtgcttcccgtccgaccacacgagccgcccgaaaccggcggtgcccgacggctgcgacttggacgtgaacctcaccgtgtagctcttcttctcccccaccgacgtgaactccagctccgccggctccacgtccacggccacgcccttggcagcggcgagcgacgtggacgccttgtacgtgcccgccccgcccacgttggtcagcgtccgcgtgtgtgtcacggtggccgagtccccgccgccgtcgccgttggccgtcgagtaggccaccgagaaggacgggtagttgagggcgcccacggagtaggtcttgttctcggcgcacgcgtactcccggctccgcgccacggcggcgatcatggtggagctgtacttgagcgcgcacaggaagtccacgtagtcgcgggtgcccagatcgtagacgagccccgggtccagcgcccgcgcggggtccacgtgccccgcgccgtagtcgaacggcgtggccatcccgcccgtcgccgcgtccagcagcgacgacccgccggagtagctggcgtaggccgtggtcatgagcgccgagcgcacggcggcggggctccactccgggtgcgcgctccggagcagcgccgccagcccgctcacgtgcgggcacgacatggacgtgccggagatgatgttgaagcccacgcggcgggtgtcggcggcgaggcccgtcggcccggccttgcccgtccacgacgccaggatgttcacccccggcgcgatcatgtccggcttcaggatctccggcgtcaccatgttgggcccgcgcgacgagaacgccgccaccaccggcgaggggcgcacgcccacctccgtcccggcgaccacgaccgtcgccgtggggttcggggcggaggtcacgtacgacttgattgccgtgccttccgtctcgccgacgccggcggcgggcaggaggtgcgcgtcggcgacgagctcctggccgttggcggccgtgttggacagcaccatgccggcgccgcccgcgtcgcgcacgacgaggcccttctggacgcgcgcgctgacgccgcggtcgcacacgacgatcttgccggccaccttctccggcacgagggtgccgggcatgcacaggttccccgcggtggagttggaggcgttggccgcgtacacgatggggatcggggcgctgggcagcggcttcccggcgtagagcgagacgcccgtgtagttcttcccgtcgccgagcacgacgtaggccgggaagtcgcggtcgagcgtgccggcgcccacggtggtgatccacggcgccacgttggacagcgtggagctcccggggccggcgttgccggccgagcaggagacgaggatcctcttctccgtggcggtgaaggcgccgatcgcgatgctgtcgcgctagtactccgccgtgccgccgccaagggagagcgagagcacgccgacgccgtccgtcacggcgacctccatggccttgaggatgtcggagctgaagcacccgccgacccagcacaccttgtaggtggcgacgcgggcccggggcgccatgccgcgcgccgtgccggcagcgaagccgaagaggctggcgcccggcacggcggcgccggcggccgtggagctggtgtgcgttccgtggccgtcgtcgtcgagcggggaccgggactcccggtcggtgtccatggggcccatggcggcctcgtagcccttgttgaagaacctggcgccgacgagcttgcggttgcaggcggtggaggcgtcgaagccgggtcccgcctcgcactggcccttccaccatgcgggcacctcggcgaggccggcgtcgtcgtagctcttgctctcgggccagacgcccgtgtcgagcacgccgacgacgacgtcgcccgccgtgccggactgcggggacagtccctggccggcgatgcccaggaactcgggcgtccgcgtggtgtgcagctcgtaccgcgcctccgggttgacggcgagcaccccctcggcggacgccaggtcgctggcctcctgcggcgtgaggcgcgcggagaaaccgtgcaggacggtgtcgtacgcgtagagcatcttggcggcggaggctgaggcggacacggagcgcagcgatgcgccgtaccactcggcgtggtccgcgtactcggccggcatcgccgacttggccatgtggacgatgtacgtcctcctcttctcggcggcggcggcggcggccaccgcgagcgccaggaccagcgcccgcagcatgccgatgttacgcatgttcgtgcgtaagtagattagatagatggatagattcgcgccttataatatgaatgagtatgacggggctcctttgatggtgcacctcccggccggcct

SEQ ID NO: 128925 - DNA, 193 bp, Zea mays
  Clone ID: MRT4577_49051C.1
cctcgaagccggccgtgcaggatatcttaataccttggtggtgcacctgtaccagccacatcctctacaagaatgtctacgagatcacaccagatagtacatatagcgtggcttccaacgcctctcagagctcgtcctcttccgcgacgcgacctggccctccgcgtgcaggccgtgcacatcgcctagctgt

SEQ ID NO: 128926 - DNA, 261 bp, Zea mays
  unsure (1)..(261): unsure at all n locations
  Clone ID: MRT4577_49052C.1
gcggccgggccgggataatacatctaggttgtaantgtcaacacatgcagccgtgttacgcctttgttgttctatgtctgttcagtataaataaggctttccttaattatgctgaagcgaacgtatgtaaagagcaaagtcaactgttggctgcaaggatccttataacatactatttagctcattcgtatagcggttagctatttagtattaatgtagaaccctatttatctagaaaaaaaaaaaaaaaaaaggccccta

SEQ ID NO: 128927 - DNA, 979 bp, Zea mays
  Clone ID: MRT4577_49053C.1
tgggaccggagactcggcgaggggggcgccagcgtctcgcctcgccgtcagcagcagcagcagctgcacctccattccacggcttccgtcgtgcgcttcgtctgcacccacaaaggcgacggcgacggcagggggaggagatgaagctgaagcagctggagggcctcttgggtggcctgacccagttctccgaccccaagctggagctggagcagtatgcgacgggccctcacatcgcgtcgcggatgctctacatgacatgttcttggtattgatattgacccgactatcacttgaacttgctcaagaaaatgctgctgatctggagctggacatcgatttagtttggtctgacataaagaacttaaatctgaaaggcgtccatgttgatactgttgtcatgaatcctccctttggtacacgaaggaatggagcagacatggagttcctctctatggccttgcaggttgcttctcaagctgtctattctctacacaagacttccactagagaacatatcaagaaggcagccttgcgtggcttcaatgccatcagtgcggaggttctatgcgagctgcgttacaatctaccgcggacgtacaagttgcacaagaaaaaagagatcgacattgcagtcgatctgtggcgctttgttcctaacgcccaacgccgcagctagcgcgctcgctatgggccgaggggcacaggtgatggaatggaactgaacatgaatggaaaatgatcaaatggatatgtgtctcaaaaggctggacttgatcgaagagatcccaagcgtcacgcttgctgtgcttatcgtcttcttggtgccagtaagggtagctcagaatttgacgaactgtgtagagttttgtgggcacagatgatgctcccagtagtgtgcacaatgaatgctttgtatgtattgtgctctattgcctgtgctaacgctacagaataatatttacaattaatttggtga

SEQ ID NO: 128928 - DNA, 1339 bp, Zea mays
  unsure (1)..(1339): unsure at all n locations
  Clone ID: MRT4577_49054C.1
tataactctgagccccatcggagactcggagtcgggggcgccagcgtctcgcctcgccgtcagcagcagcagcagctgcacctccattccacggcttccgtcgtgcgcttcgtctgcacccacaaaggcgacggcgacggcagggggaggagatgaagctgaagcagctggagggcctcttgggtggcctgacccagttctccgaccccaaggtactgctgactgcgccaccgccaccgcccccacctcttgggtggcctttctttcttcctttctcgtaccctgctcgatttcgcctcgcccaaccccgacaaaagggagggggaaaagcggaggagtatctgacttttgccaccacggacgcgtgtttttacaacgagatggcgttgttgggtgtagctggagctggagcagtatgcgacgggccctcacatcgcgtcgcggatgctctacatggcagagaatagtttcaatgacataactggcaaagtggtaagctgaacttcggacttgtggctgtggcaactctggcttgtggcgaagtgctttaactggatgactgaacatgtntcttggtatttgatnatttgacccgacttatcacttttgaacttgctcaaagaaaaatgnnctgctgatctggagnctggacnatcgatttaagtttgggtcttactcctatgggcgattgggaccctcgaggccggccgggaaaaaaaagatactgttgtcatgaatcctccctttggtacacgaaggaatggagcagacatggagttcctctctatggccttgcaggttgcttctcaagctgtctattctctacacaagacttccactagagaacatatcaagaaggcagccttgcgtggcttcaatgccatcagtgcggaggttctatgcgagctgcgttacaatctaccgcggacgtacaagtgcacaagaaaaaagagatcgacattgcagtcgatctgtggcgctttgttcctaacgcccaacgccgcagctagcgcgctcgctatgggccgaggggcacaggtgatggaatggaactgaacatgaatggaaaatgatcaaatggatatgtgtctcaaaaggctggacttgatcgaagagatcccaagcgtcacgcttgctgtgcttatcgtcttcttggtgccagtaagggtagctcagaaattgacgaactgtgtagagttttgtgggcacagatgatgctcccagtagtgtgcacaatgaatgctttgtatgtattgtgctctattgcctgtgctaacgctacagaataatatttacaattaatttggtgatcaaaaaaaaaaaaaaaaaatttgcggcc

SEQ ID NO: 128929 - DNA, 847 bp, Zea mays
  Clone ID: MRT4577_49055C.1
gacgtcctcccctcgcgagcggcgtgcatctcaccgcgtgcgtcagcgcggcgtgcgaactaaccctagtcccggggggccagcggcgcgaccagcggtgcagccaaatcgaggaaggagttgggcagtggcgcggccagcatctccacggcgcacgggtgctaccagttcagtaggcaggcgagaggaacgcggtgctgcgacggctcggccgctcggcgcctcctgcgtgctgcgcagttctgtataagcgcagagcagcagagcagacaacactcagctacaacaggaagccacatggtgttgaatgctgttatctgttagactttctgagtaggctaggttagataagatatcattgtttttgacaaaaaattctgggttaaggatcaagatgagtagaaaaatatatggtgaaaatgactctgagagaattgctagtgatgggacagctgcccgcacaagacctctgagcattaaggacattatgctgcggcgtgaaaagaaggctgcatcagaatctaagaaagccaaggaagggctagaaaatggtaaggacaaatctactcacttggaacgaggaagagaccacaaaagcagaaaggatcccagagatatgcctgtggagggttcaagaaaggagaagaatagagatgcaacaagggagggcgccaagaaagaaaaccaagaatataccaagggaatattccagaaaggaggacatgagatatgcaccaaaggaggtacccaaggacaactctagagataggtcaaacactgatgcaaagatggatgacataaaagatgcaccaaatgtcccggagaaggaaagcctgagagatgcacc

SEQ ID NO: 128930 - DNA, 207 bp, Zea mays
  Clone ID: MRT4577_49056C.1
aattttcttcttttaatggttgggttcatcatttctgttttgccaaaacacaaccccctcatattacacacttgtctcacatgaatgacactgctccaatcggataatagcacctcccaactttctataaggaattcaactccacatgccatacatcggcatcatttacaacctccacaaattcatccttttaagaccggccacata

SEQ ID NO: 128931 - DNA, 1559 bp, Zea mays
  Clone ID: MRT4577_49057C.1
cattgggtacctcgaggccggccgggaaggcccagtccacgcgttcgggccctataactctgagccccatcggagactcggagtcgggggcgccagcgtctcgcctcgccgtcagcagcagcagcagctgcacctccattccacggcttccgtcgtgcgcttcgtctgcacccacaaaggcgacggcgacggcagggggaggagatgaagctgaagcagctggagggcctcttgggtggcctgacccagttctccgaccccaagctggagctggagcagtatgcgacgggccctcacatcgcgtcgcggatgctctacatggcagagaatagtttcaatgacataactggcaaagtggtagctgtctagctgacttcggctgtggctgtggcactctggctgtggcgagtgctttactggatgctgaacatgttcttggtattgatattgacccacagtcacttgaacttgctcaagaaaatgctgctgatctggagctggacatcgatttagtttggtctgacataaagaacttaaatctgaaaggcgtccatgttgatactgttgtcatgaatcctccctttggtacacgaaggaatggagcagacatggagttcctctctatggccttgcaggttgcttctcaagctgtctattctctacacaagacttccactagagaacatatcaagaaggcagccttgcgtggcttcaatgccatcagtgcggaggttctatgcgagctgcgttacaatctaccgcggacgtacaagttgcacaagaaaaaagagattgacattgcagtcgatctgtggcgctttgttcctaacgcccaacgccgcagctagcgcgctcgctatgggccgaggggcacaggtgatggagtggaactgaacatgaatggaaaatgatcaaatggatgtgtctcaaaaggctggacttgatcgaagagatcccaggcgtcacgcttggtgtgcttatcgtcttcttggtgcccgtaaggatagctcagaatttggcgaactgtgtagagttttgtcattttgtgggcacagatgatgctcccagtagtgtgcacaatgaatgctttgtatgtattgtgctctattgcctgtgctaacgctacagaataaaatatttacaattaatttggtgaaaaaaaaaaaaaaaaaaaaatctaaaggccaggttcctaccgttttccttcctaacgccgcagctagcgcgctcgctatgggccgaggggcacaggtgatggagtggagctgaacatgaatggaaaatgatcaaatggatgtgtctcaaaaggctggacttgatcgaagagatcccaggcgtcacgcttggtgtgcttatcgtcttcttggtgcccgtaaggatagctcagaatttggcgaactgtgtagagttttgtcattttgtgggcacagatgatgctcccagtagtgtgcacaatgaatgctttgtatgtattgtgctctattgcctgtgctaacgctacagaataaaatatttccaattaatttggtaaaaaaaaaaaaaaaaaaaaaaataaagtg

SEQ ID NO: 128932 - DNA, 276 bp, Zea mays
  Clone ID: MRT4577_49058C.1
aaaaaaaaaaaaatttttggtccccccccgttttaaattctaacccggggttttaaaatttgggggggtttaaggaccccaaattgggtgaaaatggggggtttttttggcccctaccccggattccctgaatggggggtaaaacttggggggggccccaaaaaaagggaaaccaattttttgggccaatgggagcaaaccttaaaagcccccgtctctcaatgggaacaacagccccaaatggttttggggggtgtttttgagaggggataaaaa

SEQ ID NO: 128933 - DNA, 355 bp, Zea mays
  unsure (1)..(355): unsure at all n locations
  Clone ID: MRT4577_49059C.1
cgtaacctcataacaggacaccnatngaaggggcccgctctactgggtggggggcaccaacaaacntcttntggtctctgaccaccccnaactcntgaagagtgcctgtgggaaatcctgtgccccgttccccaaaggaaaaaaagaaaatatacgaacagaagtgtttctcgtcactcttcactctgctctcgcccgcgcgctatctgacgcctggctggcgtttcgacttggatgtctctcgactgcatcaagcttcttcttcactacttcccgagggctgaagagctactagcaccccatgcactaggtgaaacctgtgccgagggtggacagcaagggccaggtgtgcggc

SEQ ID NO: 128934 - DNA, 775 bp, Zea mays
  unsure (1)..(775): unsure at all n locations
  Clone ID: MRT4577_4905C.1
ccggccgggatacttcccggccgggtatggcaggacacgggcgtggcggcgcatgtccgactccggtcgcgagaacttctcatcgagatcagctacgagccgtccctgttcctctccctctcggtctctcccgtgctgcctagcctacctctccctctccgccgtctcctgtccgccacctcccttgtgccgcacctctgcctcctcttccctccgctgtccgtttatgccgccgccgacccacctctccgcccagggccggcgatcaagctttcctggatccgcaccgcgcttgcgcctcgtgttagttagggcctcgcgtcgcccccatgctaaggagcgccggctcaccgagggcaccatcggcgtccagcaaaatgccttctacacatgcaacatcctcatatttgaagctgaacaagcgaatccaatcaggttctgcggtcgtcgtcccttcgatgtcggcgcagccgccaccgaaggggagcaacatggacccgcccacacaggctaggagggaaagagaaacagagagaggaagacttggagagaaagaagatagcgaggaaggagccagttcgttgtattccttgatagtcatacctccagtcattacacccacaccggacagcactcagccgaccccacacacacctggtgccattacagaacccagntttcattggtggaaacgagagttaggaatctttgtgcgtatgctccgtctggtcgtacaatcatcctatatacgctatcatggggtatgngntgaacc

SEQ ID NO: 128935 - DNA, 192 bp, Zea mays
  unsure (1)..(192): unsure at all n locations
  Clone ID: MRT4577_49060C.1
attattcacgnccatcttaaaaggccaacagacagcggggggtctgtataaacattagaggggggccccactgaacatagacacacaacccaaaaggccacagttcttccctaaaagcgaatcaaaaatgccttatgtccaaaaaaaactatatgtagggccccaagcacaacacttcacttcatttgtgct

SEQ ID NO: 128936 - DNA, 377 bp, Zea mays
  Clone ID: MRT4577_49061C.1
tgaatcgtacccgacactacggagccaacggcgtttttaggaggcccggggggaacagcgccggcgacatccgacacgagggcccccaggggtccaggcccacagaagccctcacaggctggaaccatcatcaggaccacgcatagaagaccaaagatccgcgtaacaaaatacgcacggaccgaagaagatgcagacactataacaggtgcgaccctgctggagagaaaccattaggcgcgcgataactgcaggtaacggaatgaaagagaccacacgacccctactagaacggtgaagacccaaactgccaaggagggcccacccctccagaggaggcaagcatgcacccccgaaaaaggaggaccatgagcccc

SEQ ID NO: 128937 - DNA, 614 bp, Zea mays
  Clone ID: MRT4577_49062C.1
ggaaagagtgacaagtaggggatccattcaatccacgtctggaataattccacatgaggattgaatccatgcctaccgaacatggcctcaaagagtccacacgtgtataccattcccttatgtacatcgccacacaaaggagctagtacaagtacaatactagagtataccaagtcaccaccaaatattaaaaaaacaaaaccaaaataaatagcccaccctcctgcccagttcccccagccccaggacgtataccagccccctacccccaattataaaataccatacctctctcaccatttacctccaccaccccacatcaaatttacacctacatccctcttatacccacacaaactataccctggtgctgtcctcacgccacacaactacgtccatcatccttctcgcctctcggcggcaacacccagctgcatgcagtttaccttggctgcgggcgtgcggggaacgacttcgcgtgtctgatctgcggagctggtcgaggggtcgacgggcggctcatcgtctgcgagcgcagcagcatgtccaccatggacgaggtctggtaggcctggaaccagctcgcgctgtccgtcgagtcccgcgcgcggtcg

SEQ ID NO: 128938 - DNA, 292 bp, Zea mays
  Clone ID: MRT4577_49063C.1
aagtgctgcactcaaatgatgggaagtccggccccagtacacaggggcttgactttttcaacttcgtttcctttgttggagtcaaaatagaaccacttgtggttctaaaaggtgtgcaggtgatttaagggcccatgtcagccactgtatgtttacaaaatcaggtaactaactgcatacactttttctctttccatgacatcaagactttgctacagacatgaatccacgagtgccataagctactgcgatgccccgggagttagccccctggtaatcactgtatacttcc

SEQ ID NO: 128939 - DNA, 397 bp, Zea mays
  Clone ID: MRT4577_49064C.1
aagcagtggtaacaacgcagagcactttttttttttttttttttttttttttttttttttaggaaaagagtaacaccatccatagataggtgtctcagtttagtaaaaaaaaatcgaaaattgtaataacaagtgcttagcattccttcattgggagataacaaatgaacatacggcatgcgatcaacttttttacaatatcatcatggaatcctgaagttcgctatcattggcgtcgtctctcaaaaccatagtctactactacacaccttctgccttccctgttgctgcctttttgtcgtcggcctcccttttcaatcccgggggcgcgtccttcttttccggtccttttctggcccctcttcgcctccggggggggcctcctccccgcgttctc

SEQ ID NO: 128940 - DNA, 148 bp, Zea mays
  Clone ID: MRT4577_49065C.1
cgcgctggcggcggcgggggccttggtggtggaagtggacatggcatgggtgccggattcggtaagggaggcggcattggcggcggcgatggcctaggccgtggaagtgggcatggcatgggtgccgtattcggcaagggtggtggtc

SEQ ID NO: 128941 - DNA, 344 bp, Zea mays
  Clone ID: MRT4577_49066C.1
atatatggggagagtcaaaccttgacgcaggagaaaaaaaaaacaaggggggaccacaaaaaaaaagggcccttaaagaccatgggaggggatttagggcccccaaaaatattttaaaacctggggggggcgcgcctaaaactaacaggtgggggccaaccattaatctttacaacctttggaaaaatttttcaaccttccttttgagctcaaaaccctaaattacagagggacaacccccccttccaaacctaaaagccctaggaaagaagacaagggcttttaacctgggggaaacccaaagccccgagggggattttgaaaaggggaccgcacacaccttt

SEQ ID NO: 128942 - DNA, 241 bp, Zea mays
  Clone ID: MRT4577_49067C.1
tttttgaaacagaggaggtgcactttttcatgaaacaaatatgttcgcatggccacaaaattatacaaatcgcccttttggatatatgatattaagcggtgtcataattggaacaccccactatttttttctgtgttctgtgacggactatctgccctaattgtaacaacagctgacctttatttatcccataactctggcctcccccgtttggattttccctgttttgaaagcattaacc

SEQ ID NO: 128943 - DNA, 498 bp, Zea mays
  unsure (1)..(498): unsure at all n locations
  Clone ID: MRT4577_49068C.1
ggcttggaacctttgggctgatttatgtgcttgaggaacccgactcctgagcggtcccgttctcgggcgcgtcgaacggcgtctctaatgttggagcggtcgtgggagctacttacttaccggaaaggggactcgtaggactcgctctattatccgcagaaagacccaatccgggcggcaacagggtctctgcgcgttgtccgggcggattactcctatcaccaggtcctaaaataagagggtcatgggtagtaatagagcttagaatatacgattttaatatcttcggtaacggtatccttttccttttcgagtcaaacggctccggaggcgaagcagtggcgatagttcccgttgattcgctacccgactcgttctcgaagttgtctagggagtcgggaacttacggctacgttcccgctcgcgtcggaaactcnggcagaccaatggagcgcgactcgtggaagcctctcgccatcgaaccttcgtagatgccta

SEQ ID NO: 128944 - DNA, 512 bp, Zea mays
  unsure (1)..(512): unsure at all n locations
  Clone ID: MRT4577_49069C.1
agccaggcctgcgggacgcgacggaaatcaccccgcgaactctacacaaacggaggtcgtcctgggtcccctttgcacacgtcccacgcggcagccggagttagggtcaccacagaccccaccccgtagtcgtaccacgtcccaacccccagccacgttaacngggaaccaaaccnccttttcaggcctaatnttcataaggaggactaggttatctagaggtaagtcgctacaacaaaagaggtcgaaggtaactacgtcaaggtccaagtgaccctgacagtctatactaaagaagaggagttcaccgactaggaggtaaaacgtctagttgggaaacaggatgaggacacgactaggaagaacgctaaggtcgactttggtcaggaggtttccatatgggtcgtgaccgaggtcgtgactgcctgtctctaatgggtcctggccgagttacaagtcaacgcgacttttatgaacacctgtaaagtggagttgatcaacacgatcatcgt

SEQ ID NO: 128945 - DNA, 186 bp, Zea mays
  Clone ID: MRT4577_4906C.1
ccgtcgtagctcgaatcggctcggccgtccgcgcgtcgagatgtgaatagtgacgtgaaggttaagtttcataaaataaacaaaggggcggcctccgcttaagggacctgtgggcccgggaattaagtcccggccgggaccttccagggtacccactttccccaatggtgagcggtttaaaacttg

SEQ ID NO: 128946 - DNA, 343 bp, Zea mays
  unsure (1)..(343): unsure at all n locations
  Clone ID: MRT4577_49070C.1
gcaacattagaaaggtggaatacttagtagcaaccaatttgagtcatctaatggcgnngccaagatatttggccagtgccttatgtctccttgctctttcntgcatcgtgttgctaacccgcgaccatttttcctcaatacctcacnnaagctcctatagctgcccttcttcccccataccttccatcaatgaccgcttcagtatgtgaaaacccagcccttcaaccctacaggctccaacaagcaatcgcaacaagcaacttacctttatcacccctgttctttcaacaatcgccagccctatctttggggcagtcattggtacaaaccatcaaggcacaac

SEQ ID NO: 128947 - DNA, 325 bp, Zea mays
  unsure (1)..(325): unsure at all n locations
  Clone ID: MRT4577_49071C.1
gcacgagagggcgacctgtccgccgaggcatatcggccgtccgtggtgcgctgcaagacatccaacggcggaacgagcctcttcgcggggatcaaggaangctagaacagcgtgtgatgtgatcttctgtgcgcgattacggttcatcacaggtttcgataaccaacggcgacaagtaaagggaaacgatcaaacggcaaaacgggaagccctcgttaggctagatgaaatgctcgtgttttgtactcggttcggtttgtggtcagcttgactcaactcggatcgatttatttaaatttttttataaaaaaaaaaaaaaaaaaaa

SEQ ID NO: 128948 - DNA, 943 bp, Zea mays
  Clone ID: MRT4577_49072C.1
cccacgcgtccgggtgaagggcagcttcgggtacctcgacccggagtacttcaggcggcagcagctcacggagaagtccgacgtctactcgtacggcgtggtgctcttcgaggtgctctgcgcacggccggcgctgaacccgagcctgccgagggagcaggtcagcctcgccgaccatgcactgagctgccagaggaaggggacgctggaggacataatcgacccggtgctgaagggcaagatagcgccggactgcctgaagaagtacgccgagacggcggagaagtgcctgtgtgaccatggagtggaccggccgtccatgggcgacgtgctgtggaacctcgagttcgcgttgcagatgcaggacaccttcgagaacggcgggaagccggagggtggaagaggcagctcgagcgacagtggcaccgtgtctatggccgacagcatggctgcctcggctgcggcgctcgagctgatcagcgaggacatggacgaggaggacatcgccaacagcgtggtgttctcgcagctcgttcacccgactggccggtaaggggtgtgtgtgtggattgggacgtggatgctgaaatctatgggtgcgtgcgtttgttgtccgttggggttcatctgttcttgttaatatgtactcagatcatgttgtgcgtatgtgtgtgtcgtcgttgttggttgattctttaatttggttccttttgctgtacttttgtgggccatgaaaacgggggaaacttggtaagaacataggatttctgatgtttctttaaagatcgactaaaaatttagtgttcatgatagacagacagtaacgattggatgggcttaaaataggggtctcagcaatgcacgtaaaataggggtctactttatatttttgacattgctggaagtaggatataaatggtatagatattattggtgtatactc

SEQ ID NO: 128949 - DNA, 951 bp, Zea mays
  Clone ID: MRT4577_49073C.1
ccacgcgtccgcccacgcgtccgcccacgcgtccgcccacgcgtccgcgaaacccaaaatatctgtctatgctcaaccatctaagattttacctcccccaagtctatcccaagctgaataaaattcttttcctggatgatgacatagttgtccagagggacctaactggactctgggaggtagatcttaatgggaatgtaaatggagcggtggaaacatgtggagagagttttcaccgatttgacaagtacctcaacttctcaaacccaaatattgctcagaattttgatcctaatgcatgtggttgggcttatggaatgaacatgtttgatctggaagaatggaagaagaaagacattactggaatctaccacaaatggcagaacatgaacgagaacaggctgctctggaaattggggacattgccgccagggcttctaactttttacaagctgacacaccctctggacaaatcatggcatgtgcttggtttagggtacaatccgaccgttgagcgctcagatatagacaatgccgcagtcatccactacaatggtaacatgaagccatggctggaaatcgcaatgacaaagtatcggccttactggacaaagtacatcaattatgagcatccttacattcatggatgcaagttcagccaataggaactacctaaacattcttctgtgatgaacactgaagttagagggcactcaaaatatagtcctctcttagtagtataactatcacatgttctttcttcgttttatattaagcttatcatgtgtatgtagtagtttcatcgcctttttgtggtgctacttagtccgttgtcggttcttgtttttttttttgtcatgaaaaggacgatgagttcaaagattctcatcagctgataaatgcaatatatgaatttctgttggtagcaaaaaaaaaaaaaaaaaagcggcc

SEQ ID NO: 128950 - DNA, 326 bp, Zea mays
  Clone ID: MRT4577_49074C.1
ggcccaaacacaagcatgggggcttttattttattcatataaattaacttacaaaggtcattggtcatggtccggcaggaaatcttattaccgccgggggtagtaaacaccgggcttgccatccggtgggcagttaatttgttgttggggatgttgcgcccaattttgtaccactgggtgtggaaagggccgggtttgttaaccctttttgtggggggggcccctaagtttccctctgggcccgcaccaggttgggaggcggtcttgcccttgggtaggaggctgatttggccaggctaggagacatctccggggggttgacccct

SEQ ID NO: 128951 - DNA, 3894 bp, Zea mays
  Clone ID: MRT4577_49075C.1
atgtctggtcatctttgcaaaaatggctacgtgccaaattatgaagtttgggtgcatcatggtgaggagcttctccgtggatatgctccagaaggtcaagacgattttgaaccggatttagaccgaatggaggagatggttcaggatttaagagaggatcccgatttagtgtttccagataatcctgaggatcctcaaccgccggaagttaaaaaattctttgaacttctcaaggcagcagaagagccgttgcacgaacacacgagagtaaccattcttgcttttgtgacgcgacttatggctatcaagtctaagttcgcattctccatcaactgcttaaatgaacttttgaatttgatcagcgacgtattaccaccaaatcacaaaatgcccaaagacgtgtatcagtcaagaaagttactctctggcttaggtatggagtatcaaaaaattgatgtttgtccagataactgtatgcttttctggaaggaaaatgaaaaattagacaaatgtttgagatgcagcaaatcaaggttcgttgaggtcataaatgaagatggagaaaaaatgacaacagaagtagcaaagaagcaacttcgttacatgcctctcacgcctcgtgtaaaacggttgtttctctcaaaaaacaccgctaagcagatgagatggcacaaagaacatgaacgcgagaaccctcaagttatgatgcacccatctgatagtgatgcgtggaaggcgcttgatgattttgattcggattttgctagtgaagctagaaatattcgaatcgggttggcgacggacgggttctcacctttcaatatgaccacatcaccgtattcttgttggcctgtatttgcagttccatacaatcttccacctcacctttgcatgaaatacgattacatgtttctgtgtctaatcattcctggaccagaacaccctggaaaacatctcaatgtaatgttggaacctttagtcgatgagttgaaaaaattgtgggaaggagtcgaagcttacgattgctacaagaaagagagattcaatcttcgagttgcgtacttgtggtcgattcatgatttcatggcctacggtatttttgctggatggagttgtcatggaaagttgacatgtccaatatgtggtaaggatacagattgttttcgtcttgaatttggtgggaagatctgttactttgattgccacagatgtttcttgcctctcgatcacccgttcagatttgaggcaaatcaattcagaaaagacaccattgttaccaaaggcccaccgaaatgtttgagtggcgcacagattcatgctgcgctcgataatttgaaaccagacggtactggttacctgggatttggaatagaacataattggacacataaatgttctttgtgggaactcccttatacggaggccttgattctgatgcacaacattgatgtcatgcaccaagagcggaatgttgctgaaagcattattagtacatgtatggattttcccgataaaaccaaagataatataaaggccagaaaagatttagagaaaaattgtaaccgaccaagcctggtcttgcttcagagtggtgctaagccacgtgcgtcattttgtctaaaatctaagcaaaagaaagatgtgatggtgtggttgaaaaacttaaaatttccagatgggtatgccgcgggattcagaaggtccgtgaatttgaggacaggaaaaatgaatggattgaagagtcatgattatcacattattatggaaagattacttcctataatgtttcggggttacttgaataatgatgtgtggacggcgttagctgagttaagctacttctatagacaactttgtactaaagaaattaaaaaagctgcgatggagaaattagagaaggagattctggtccttatttgcaaattggaaaaaatatttccccctggattcttcaatccgatgcaacatctacttgtacaccttccatatgaagctaagattgggggtcctgtgcagtatagatggatgtatcacatagaaaggacacttaagaagcttagtgcaatggttggcaacaagggaagagttgaaggtaaactcaaaattttgtcattcgagggaaagacagttggagcatcaactgaatatcacattggacatgaagaaaagttggatgcattactctacatgtatgaaaacatggaagagatgactccatacttcaagatggcggctcgaaagttgaagaattttgtgaagggcatgacgaagggctcttcttcttcttcaggaagaagcaaagcacaggagtgtctgttccaaggtaccgagtcgctctcgagcaacagacgacaggctttgatggaacatcttccacctgatatgcagggacaggatgttaacgagactcgagaggaggaggcgaggggtgaggatgcggccgattacgatgcggccgatgcagactatgagcaggaagatgatgctggaggtggagctggagatgggtggtcttctggtggtggtcagtttgagggtggagggtcagtaggcggatgggactcatggcctagcagtgatgctggagcttctagtggtggagggtcttctcgggcacggaagtcgaggaaaacacattgggtgcctcctcctaaagttcctgctcgtgaggaggataagattctgatcgtaccgtgtggcgacgagtcttggattgatgcatcttttcaaggtcaaggacatcgcacacaggtgaataaagttttgggaagtatatgcaaatatctctggcctggtgtagtgatggagaaaggcgttgaggtgccttgtatgtcttgggatcagtacgggctcgcgttcaatgcagaacataggaatgcccaaggtgctgtgtggcatgagttctggaaacgttacaagttgcctgaagatggaagtatgaacgatcatgcacggatcgtttttaacaagagcgcgactaccttggttagggatcagatgtattatgctcggatccaggtcacttctgattacatattaaggcaggaaggacgtcggccacgttccaaaagtgaggcatcaaacaaatacttaaccgaagaagaatatcttgagttttcagactcggtgccatggatggcatcaaatgaggctggttggcgggttgtatgcaaatattgggcaacagatggatttaaaggtgtttcattgagaaacagctcaaatcgtgggcatgatgttcaccacagatatggtggtgatggccacgttcgtttggcaaagcgcatggaagctagttctggtgttacgccgagtgatgttcaggtttaccttagaggtcacagggggtcggatcctacaaatccagaacagttgtgttctcagtcagctgctgagcgtgtggcctcatatggtgcttccatgatgtcggagcatgggcaagactatgattggatgaatcagcctatcgatcctcagattgtgtatgctagtggaggcggaaaacctcatggacgttacctcatgtttggtagtgttatcgactcgactcaggtgaggcctgaaaggtctcgcccatcgaggtcgtctagccgtggtcctcgctctagtacccaaggaaacgccgagttgatccggcaaatagcactaggacaacgtccagatttttcagcgatgactatgccacctcctccacctatcccgcagtttgtaccgactccacaatttagttggcccacacctgcacctcaggtccctccaggaaacttgctaactccgggaaatgaggactctgaagatgcagacgcttcttttgtggacggtcttctaaacagcggaggagctagcggatcaaatcaaccccatccatttgatcaacctcctccatttgagtag

SEQ ID NO: 128952 - DNA, 2249 bp, Zea mays
  Clone ID: MRT4577_49076C.1
tatgagtgtactggcccgccaccactcgccactcggccccaggaccctcctcttcctcgccagcaagccggcacgatccctcccttccgggaaaaaggctcccaacctgttccgagccagccggccatggcgattagggctggccgctcgccccttctccacctcctcgccctcgccttcctcatcctcgccgcctctccctgcctccaagctcgagtggaccatcgcaaacagatatctcactggactgggcaacccaactttgacctgcagaatgtctcatcgggtcgaaaggatggccctcatctcctgggtagatcaaaggaaataacacacatgaaattaaggagagttgctgtaaggaagaaaatggaagtagtgcagcaggatgatgaagcgttagttaaacttgagaatgcaggtatcgaacgttcaaaagctgttgactctgctgtgctgggaaaatacagcatctggagacgtgaaaatgaaaatgaaaaggcagattcaagggtccgtttgatgcgagatcaaatgatcatggccagaatatattctgttcttgccaaatcgagggacaagcttgatctctatcaggagctgcttgcaaggctcaaggaaagccagcgatcccttggggaagctactgctgatgctgaacttcccaagagtgcttcggatagaaccaaagcaatgggccaagttttatcaaaagcaagggatctattgtacgattgcaaggaaattacccagcgtttgagagcaatgcttcagtcagcagatgagcaggtccggagcttgaagaagcagagcaccttccttagccagctagcagctaagacaatcccaaatggcatccattgtctttccatgcgcttaacgattgattattatcttctctctccagagaaaagaaagttccccaatagtgagaacctggaaaatcctgatctttaccattatgctcttttctcggacaatgttttggcagcatcagttgtggtcaactcaaccatcatgaatgctaaggagcctgaaaaacatgtatttcatcttgttactgacaaactgaactttggggccatgaacatgtggtttttgctgaatccacctggggatgcaacaatccatgtggaaaatgttgatgacttcaaatggttaaactcttcttactgccctgttctgaagcagcttgagtctgcagccatgaaagaatattatttcaaggctgatcgtccgaaaacactctctgctggttcttctaatctgaagtatcgaaacccaaaatatttgtccatgctcaatcatctaagattttacctcccacaagtctatcccaagctgaataaaattcttttcctggatgatgatatagttgtccagagggacctaactggactctgggaggttgatcttaatggaaatgtaaatggagccgtggaaacatgtggagagagttttcaccgatttgataagtacctaaatttctcaaacccaaatattgctcagaattttgatcctaatgcatgtggttgggcttatggaatgaacatgtttgatctggaagaatggaagaagaaagacattactggaatttaccacaaatggcagaacatgaacgagaacaggctgctctggaaactggggacattgccaccagggcttctaactttttacaagctgacacaccctctggacaaatcatggcatgtgcttggcttagggtacaatccaaccattgagcgctcagagatagacaatgctgctgtcatccactacaatggtaacatgaagccctggctggaaattgcaatgataaagtatcggccttactggacaaagtacatcaattatcagcattcctacattcatggatgcaagatcagccaatagaaaccaccctcagatattcttctgtgatgaacattgaagttggatgggactcaaaatgaaatcagtataactatcacatgttctttattcgtgttatattagatttgttagttatcatgtgtatgtagtttcgtcgcccttttgtggtgctttctcccctagctcattgttggttcttgtctctttttgtcatgaaaagaacgatgagctctatgattctcatcagctgataaatgtaatgtctgaatttctgtcggtgacaaattaatgatcccattcaaacggtatcaagtgttcgaacattcatgctaaaaaaaaaaaaaaaaaaaaaaaaaaaaaaaaaaaaaaaaaaaaaa

SEQ ID NO: 128953 - DNA, 5183 bp, Zea mays
  Clone ID: MRT4577_49077C.1
atgggtgatagtcgtcgctggatgtatgaaggctggcgaaaaaatgatccttcgcttgagtggatacagaaaaccgaagattttatcaatcgtgttttttcttcgtcaagaaatggtcgagtgtggtgcccatgcagtgtttgcaaaaattatcaacgtcaaaccaagaaagagatgtctggtcatctttgcaaaaatggctacgtgccaaattatgaactttgggtgcatcatggtgaggagcttccccgtggatatgctccagaaggtcaagacgattttgacccggatttagaccgaatggaggagatggttcaggatttaagagaggatcccgatttagtgtttccagataatcctgaggatcctcaaccgccggaagttaaaaaattctttgaacttctcaaggcagcagaagagccgttgcacgaacacacgagagtaaccattcttgcttttgtgacgcgacttatggctatcaagtctaagttcgcattctccatcaactgcttaaatgaacttttgaatttgatcagcgacgtattaccactagatcacaaaatgcccagagacgtgtatcagtcaagaaagttactctctggcttaggtatggagtatcaaaaaattgatgtttgtccagataactgtatgcttttctggaaggaaaatgaaaaattagacaaatgtttgagatgcagcaaatcaaggttcgttgaggtcgtaaatgaagatggagataaattgacaacagaagtagcaaagaagcaacttcgttacatgcctctcacgcctcgtgtaaaacggttgtttctctcaaaaaacaccgctaagcagatgagatggcacaaagaacgtgaccgcgagaaccctcaagttatgatgcacccatctgatagtgatgcgtggaaggcgcttgatgattttgattcggattttgctagtgaagctagaaatattcgaatcgggttggcgacggacgggttctcacctttcaatatgaccgcatcgccgtattcttgttggcctgtatttgcagttccatacaatcttccacctcacctttgcatgaaatacgattacatgtttctgtgtctaatcattcctggaccagaacaccctggaaaacatctcaatgtaatgttggaacctttagtcgatgagttgaaaaaattgtgggaaggagtcgaagcttacgattgctacaagaaagagagattcaatcttcgagttgcgtacttgtggtcgattcatgatttcatggcctacggtatttttgctggatggagttgtcatggaaagttgacatgtccaatatgtggtaaggatacagattgttttcgtcttgagtttggtgggaagatctgttactttgattgccacagatgtttcttgcctctcgatcacccgttcagatttgaggcaaatcaatttcgaaaagacaccattgttaccaaaggcccaccgaagcgtttgagtggcgcagagattcatgctgcgctcgataatttgaaaccagacggtacttgttacctgggatttggaatagaacataattggacacataaatgttctttgtgggaactcccttatacggaggccttgattctgatgcacaacattgatgtcatgcaccaagagcggaatgttgctgaaagcattattagtacatgtatggattttcccgataaaaccaaagataatataaaggccagaaaagatttacagaaaatttgtaaccgaccaagcctagtcttgcttcagagtggtgctaagccacgtgcgtcattttgtctaaaatctaagcaaaagaaagaggtgatggtgtggttgaaaaacttaaaatttccagatgggtatgccgcgggattcagaaggtccgtgaatttgaggacaggaaaaatgaatggattgaagagtcatgattatcacattattatggaaagattacttcctgtaatgtgtcggggttacttgaataatgatgtgtggacggcgttagctgagttaagctacttctatagacaactttgtgctaaagaaattaaaaaagatgtgatggagaaattagagaaggagattccggtccttatttgcaaattggaaaaaatatttccccctggattcttcaatccgatgcaacatctacttgtacaccttccatatgaagctaagattgggggtcctgtgcagtatagatggatgtatcacatagaaagggcacttaagaagcttagtgcaatggttggcaacaagggaagagttgaagggtgtattgctgaagaatttaaatataaagagatatcagccttcacgagtgtatactttgcagaagaacacaatgtaaatgcacctacattaaggtataatgttgatcaagctggtccatgcagtaaactcaaaattttgtcattcgagggaaagacagttggagcatcaactgaatatcacattggacgtgaagaaaagttggatgcattactctacatgtatgaaaacatggaagagatgactccatacttcaaagagtacgaacgacagaataagggtaaactgtcgacgaggttgtatgaaatcatgcttcgcgaaggaaaagaaggcactcccaatttcattaattggtttcgagttcattgcgaaaaaacttccaacgttgacgaggacttacgtcagatgtcacgtgcacttgtcaaagtcagaagctatggtcgttatgatgtcaagggatatcgttttcgttcaaccaaatttgaatgtactcgaccgttagctgcgacaacaaatactggtgtggtatgttggtcttttgatgagcaaggaagggagatgaattattatggaactatcaaagatatattggaattcgacttcgctgggggaaaaaatctgaaagttatgttcttcaaatgtgattggatcgatcctaaacatgggatacgacaaaaccaatttggtatggtagaagtcaaacacgagcgtataatgactcgtggttgtagtaaatttgttcttggttttcaagtggaccaagtgtattatatgtcatatccctgtatcgatcttaaagactggtgggtagtgtacaacgtaaatccccatgaaagattatatttaaagggtgatacaagttatcgacaaaatgaggtggaagctgatgttgaagaaatttatcaagaaattgaagttccacccgtttttaatatagaaacaacaatggagccagattcagtagcgggcgatcttaatgatgtaatagttcctccaaaaaggaaacggaagtcgaagaagaaaaagacgcccgagagaaagatggcggctcgaaagttgaagaattttgtgaagggcatgacgaagggctcttcttcttctttaggaagaagcaaagcacaggagtgtctgttccagggtaccgagtcgctctcgagcaacagacgacaggctttgatggaacatcttccacctgatatgcatggacaggatgttaacgagactcgagaggaggaggcgaggggtgaggatgcggccgattacgacgcggccgatgcagactatgagcaggaagatgatgctggaggtggaggtggagatgggtggtcttccggtggtggtcagtttgagggtggatggtcagcaggcggatgggactcatggcctagcagtgatgctggagcttctagtggtggagggtcttctcgggcacggaagtcgaggaaaacacattgggtgcctcctcctaaagttcctgctcgtgaggaggataagattttgatcgtaccgtgtggcgacgagtcttggattgatgcatcttttcaaggtcaaggacgtcgcacacaggtgaataaagttttgggaagtatatgcaaatatctctggcctggtgtagtgatggagaaaggcgttgaggtgccttgtatgtcttgggatcagtacgggctcgcgttcaatgcggaacataggaatgcccaaggtgctgtgtggcatgagttctggaaacgttacaagttgcctgaagatggaagtatgaacgatcgtgcacggatcgtttttaacaagagcgcgactaccttggttagggatcagatgtattatgctcggatccaggtcacttctgattacatattaaggcaggaaggacgtcggccacgttccaaaagtgaggcatcaaacaaatacttaaccgaagaagaatatcttgagttttcagactcggtgccatggatggcatcaaatgaggctggttggcgggctgtatgcaaatattgggcaacagatggatttaaaggtgtttcaatgagaaacagctcaaatcgtgggcatgatgttcaccacagatatggtggtgatggccacgttcgtttggcaaagcgcatggaagctagttctggtgttacgccgagtgatgttcaggtttaccttagaggtcacagggggtcggatcctacaaatccagaacagttgtgttctcagtcagctgctgagcgtgtggcctcatatggtgcttccatgatgtcggagcatgggcaagactatgattggatgaatcagcctatcgatcctcaggttgtgtatgctagtggaggcggaaaacctcatggacgttaccccatgtttggtagtgttatcgactcgactcaggtgaggcctgaaaggtctcgtccatcgaggtcgtctagccgtggtcctcgctctagtacccaaggaaacgccgagctgatccggatgcaggaagctttgaggcggcaggaggagtataacaagcaacaacaagagtactgggctgctcaatttgcacgacagcaggagatgatgcagcaaatagcactagggcaacgtccagatttttcagcgatgactatgccacctcctccacctatcccgcagtttgtaccgactccacaatttagttggcccacacctgcacctcaggtccctccaggaaacttgctaactccgggaaatgaggactctgaagatgtggtcgcttcttttgtggacggtcttctaaacagtggaggagctagcggatcaaatcaaccacatccatttgatcaacctcctccatttgagtagcctgtctgcttgtgtgtttctcgtactatggacttgtgaacttgtggtattgggaacttgtgttattgtgaacttgtgaacattgtgaatttgtgaacattgtgaacttgtgcttt

SEQ ID NO: 128954 - DNA, 983 bp, Zea mays
  Clone ID: MRT4577_49078C.1
gctaccaacagaaattcatatattgcatttatcagctgatgagaatctttgaactcatcgtccttttcatgacaaaaaaaaacaagaaccgacaacggactaaaggcgatgaaactactacatacacatgataagcttaatataaaacgaagaaagaacatgtgatagttatactactaagagaggactatattttgagtgccctctaacttcagtgttcatcacagaagaatgtttaggtagttcctattggctgaacttgcatccatgaatgtaaggatgctcataattgatgtactttgtccagtaaggccgatactttgtcattgcgatttccagccatggcttcatgttaccattgtagtggatgactgcggcattgtctatttctgagcgctcaacggtcggattgtaccctaaaccaagcacatgccatgatttgtccagagggtgtgtcagcttgtaaaaagttagaagccctggcggcaatgtccccaatttccagagcagcctgttctcgttctgtataaagataacataaaacagtgtgaaaatggagtcaataaatgtatgcactgatatgtacatctcaggcagtacatttatgtttcgacttgctcttaattctttgtaatgattaaacatcagctaattaactaattaatagagttgttggtattatgaaaattaattaaggactccaatgcaatcatactaaaaaataactatttagcatttgcttcatctatactgtacacagtagtcatatatgcataaaaatgaccaaaatcacgatatctgaaaagccaaagcaacagaatataaatcagcaagatggctgtgtacgtataggaaaattaaatgcaatattaaaagaaaaggtctcaagatgcaagtaatgtaaaatcttccaattcaccatgttctgcctttgtggtagttccagtaagtcttcttttccttttccagatcaaacagtcttc

SEQ ID NO: 128955 - DNA, 282 bp, Zea mays
  Clone ID: MRT4577_49079C.1
agcatacgaagacgcgtggctagacgcgtgggcggacgcgtcgccaagtccgcggacgtggagtgcatcttggtaactgtataattgcagactttaatttctcgtttaatgtcggaatcattaatggtcaataatttccagctttttacggaattctcggctctcattctcagccacgacaatttgtccggtacacttccgtctaacctcggtttctcataactgagctaccttgcactcgccagcatcaaactcaccgggcctctcccatcgtcaatcagt

SEQ ID NO: 128956 - DNA, 489 bp, Zea mays
  Clone ID: MRT4577_4907C.1
gggggaaaaaactttggggttaaatggggcccccccccttaatggggttttgtccaaataaaaaaaaaagggggggtaaagttttttgattttttcaacataaaccggggtaaaacccctcgtggttgccggaatttatataaaattcccccctttggggggccgatccgttaaaaactttcccctgccttttccccttgtttttttaacccccccggcaataaggggactccctttaaaagaaaaaaaaccccctttcatttccccccttttggccctaaataccattttttaggggggggggtgaccttttttaaggcatatggccttttgttccaagacgggtgccctttaagcccttaaccttagaactggcttttgattgcacagcttttccaagggttaataaaaaaaagggggggggggtgggagacccctttggggggggtttgaaatttccccttaccaaccatttggcctttttaaccc

SEQ ID NO: 128957 - DNA, 427 bp, Zea mays
  Clone ID: MRT4577_49080C.1
cgcgtgcttgagttctacctagagtgcatcacctcactgttttgtttcatgttcacgccagcgtttactctccgggagcattgttgtattatagggaacgccacggtgcctacccccaacgccgctgtgaatgatctctacatggcataccttgcttggggccggacgctagcgagatctatgcttggacctgctctatggagaagcttttatccccttatcttttggtaagatacttcatgttgaggccttgaagcttataattgcttacgtttacattctatggaaaggcttcacccttccaagtattgtaataagctattcactttatgtactatcatgactagtaatacttacagatctttttatgatttaatactttctactttaaaatgtaaaatatattttgtaaaaaaaaaaaaacaag

SEQ ID NO: 128958 - DNA, 269 bp, Zea mays
  Clone ID: MRT4577_49081C.1
catttatcatcgatccttcgctgtgctcttacgtcggaccctgcataatcaatgtcttcagagaagaaactatcgaacccaatgagggctatacaggcgcagaaactcgtgctcaatatctcctatggtgagactggagatcgtctcaccagagccgccaaggtgctggaacagcttagtggccaaaccccagtgttttccaaagcaagggacactgcgacggagcttttgtgcatagaagaaatgagaagattgcatgctatgtcact

SEQ ID NO: 128959 - DNA, 485 bp, Zea mays
  Clone ID: MRT4577_49082C.1
ccacgatctgtgatcttgtcgacgccdccggttacattagaacggttcgtaggaatcgattacacagttcgtccgcaaccacaacgcagcaaaccccgcccgargcgacacaacggcggcaggaacgatcatcgcatcccgtcgtggtagtcgcagccggaggagcgccgcgggccggcctgccgaggtgcgcctcgcggatgtcgaggccgcagcgcacgcggcggtagaacttggacttgacgaggaggccgaggatgtyggcgcgcscccagcacgaagcggacctgacgggcaccaccgcggggccgaggcgcccgtkgttgggcttwctgttcaggctggcgcccgcvccgtagagcggcacctgcttccccaccacggacaccgtcaccgtccgcccgctcttccgcggctggtagaactccgccatctctccggaggcgacggttaggtcgccgtagaagargaggaacggcgtggcc

SEQ ID NO: 128960 - DNA, 146 bp, Zea mays
  Clone ID: MRT4577_49083C.1
tccacgcgtccgcggacgcgtgttctcattcgctttgctttcgagcctgcaggagggcacccctggctgcggggggggagatcgagctaattccgatcaccgtagacgcaactgccatccacaagtggtaccttgggaaacatctg

SEQ ID NO: 128961 - DNA, 172 bp, Zea mays
  Clone ID: MRT4577_49084C.1
gcatgcacgcctacctaagcctggattcttttaaagtcaaccaacccttccggccttttttacttgccgctgggtgtcatgggtggcctccttaactccgtgaagtctcttacttctatgatgatcaccctcgccgtggagtacttacaccccatactcatcgaggcggacg

SEQ ID NO: 128962 - DNA, 550 bp, Zea mays
  Clone ID: MRT4577_49085C.1
ccggccgggacccggatagcaacccctcactccgatcttgtcgtaagccggcagtcaaatctagatcacgccctgagctgaataccattactctacattaccacggcggaagcagaaagtcatggatcaagaggacaattagaaccaaagaggagcatggagatcttgttgtcctccctgtgctacggggatagcctctcggtggagaacatcttcgccgaatccggcgtgctctgctaggcctagtgctgcatccgcatctaccgcaccgtcacctatagaccccctaccgcttctccatcgaccaacattacgctgaactatacgtcatgaagtaccggtacacttcagcctcctccggacgcgtcgactcctccgaacagaacgcactcgatgcgagcctaagaatatgcaccacgaggacatcagcctcagaggacgctgatggaggacctgtcggaacgactaccaccagctgcaggccgacaaggatcgcatggtcttcatgatcatcaggaagctcaacatcatcttcaagcagcgcaccgac

SEQ ID NO: 128963 - DNA, 433 bp, Zea mays
  unsure (1)..(433): unsure at all n locations
  Clone ID: MRT4577_49086C.1
cgcgccgctccncncccaacccagncgcgcaaaacccgagagcgcncgccggcncgccnccgccgccggagcgagcnccccancnncanccgncaaccatggcgancccagacagcaagaagaagaaggncgncagcgacgggggnnnctacgccgagcncaacgaggagccgacgcgggagcggggggaggacggcnacccnggcgnggaggggcgcgncacgccgnagcgcacggagancatcanccgcgccacgcgcacgcagaacgggcncggcgagaagggccgnaggancagggagcncaccnccgncggccagaagaggggcaaccccccggagaagggcgnagagcnnnacgccgagaagggcgncaaccgnggccccngngccancgcgcaggccgaggcccnccgnnacaagcnccncggagg

SEQ ID NO: 128964 - DNA, 1957 bp, Zea mays
  Clone ID: MRT4577_49087C.1
agggagcttcttcttgtactgcttgaaacttgagattacacccctgctccaaaggcccatatgctttctctcacctctgtctagaggttgacctcagcaagtaaagggctcgcgatcgaagagatggtggcgatcgatcgacgagtgcacaaaagctagggagagagagagagagatagaggagggcaagcaataagtgccctgcacgtccttgctttgtgtgtgagacagtgagagagagagagggagggagggatcagagggaggagaatatggataggggagtcgtccacaaatcatcggcggctctagtgcgcgagatgggggaggcaggccatagccatggatggtggagcatgaataatttgctgaggcccccctttgagcagcagcaccacgcttctcttttcatgccgtccacaaccaccagcagcagcaccgccgccgccgcgccctcttcttcttcgtcgtcgccgcctctccaatccttctcctctctgctgctctcgaaccactacccgctgcctaccaccaccagcacgtcgccgtggcagaacgacagcagcagcaccagcagccatggccagccggattcatggagccagctcatacatactggcagcaaggaaagccagatggcgtttccaactacgatttgttcggaatccggaggcggcggcagctacgtcgtctacggtgccgcagcggctagccatgggagcagcacaagtgatgtcgagatccagttgccatggggaagcagcagcgtgctccagcagcagcagcagaaagcgtcctctcctaggtcttcttccagaaccacagcgacgacgacctctcccggaagcaacatgctggagttctccaacaacagtagcagttcaccacgtgagtgcatcagtacagtatctggatcagctttcaagaaggctaggacccaagaaccctccccggctcaatctactgtgaaggtgaggaaggagaagctaggggatcgaataactgctctccaccagcttgtctccccgtttggaaagactgacacagcgtctgtactccttgaagccattgggtacatcagattcctccatagtcaaattgaggctctgagctccccgtacgtgggcggcagcaatggaggtgggggcggctccaagcagaatcagcagctccacgaggctagtgcgcagagagaaagcaggcacagcatatttccagaagaccctggccagctcctgcatgacagcagcgcaataaataaacgggccggactgcagcctgctgatggtgagcaggatgaagaaagctgtgatgaagagaagaagatgatgctggccaggacgtacgataaggatctgagaagcaggggcctgtgcctcgtcccggtgagctgcacgctggacgtgggtgtggacgtggccgctggccccgcagactactgggcggcagctgcgccggctttcggcatggggttcggtgcgtagatgatgctggccaggacgtacgatcgatgctgtgaggaacacttgtgtgtgtctgtgtgcgccatatgcatgtatgggctgcacctgcatgcatagcatcaggagcagccatcctggtggaagcaggagaatgctcaagaaggctggctcctcttgatgctatatatgcgtatggtatatgtatcgtgcacacaccgacaatgcatgcatgggcatatatagctacagagacgctgagagtaatataacttgcgtttgtgtgtttgtgtgtacgtgatgagatcttgtctagctagctagagcgagatcaaacaatttgggtgccatggagaggggcgctatagctgcagatatttaattgttaaggctaggagtactgcgcgcggatctgtaagcaatgcactcttttaagtcttcgtcattgaggcgtcactgtgtgctatatatatatatgcatggccgaaatgtgtaat

SEQ ID NO: 128965 - DNA, 2067 bp, Zea mays
  Clone ID: MRT4577_49088C.1
cacaaaagaaaaattttcctcggtaacttttttttctatgcaacgtacattttagcaaaaacaggcatttggtgttacaatggagacgcaatacactttagcaaagctacattattcagaacacgagaccaccaataaggcaacaatggtcttgtttttttttttaacacatgcttcactccacgcgtgatggttatctattaagcctccagcgccatccgacaggactggaagtctgtaacacgcagggcgggcgggcgatcacagtggatccgcacggtcgtcttgttcaacgttgacgctggccgtcccgagctcccaggcctcgatcttggacacggtcactgggtgagctccgttgttgaacaggtacaggtggctactgccgcctgccgccacgtgctcagggtacactcgcgccgtgatgcacgtccggcccccgcctccgaagctctcgacgacagagtggtcgatcagtgttctcagcgatatgcccctgtccttctcgacgtccacgtcaacgaatcctgcgtagaatggcttgtgcaccccctctttcgtagacgacctcgtcaggtcggcacacatgagcaccttgtacgtgccaccgtgcctcaacacctggaagaagacggtggtctgctcccgcatgtcgccggacgccatcaccaccagcccgaacggcccgacgccgccgcgcgggcccggcgaggaggctttcttctccgcgcacgcgcgcagcttgtggggatcgtgctgcagccactcggggtccagctcctcggcgtcgtccaggctctcggggacctcgaaaacgacctccacgtccgcctgcagggcgtcgacgccggcgatctcgcgcaggccgccggcgccgaccaccgcgcccgccagcgcggctcggcccttccgcagcgtctcgatctcctccaccggccactgcaccagctgcctcccgtcggcgtccagccacagcgcccgcgggaacgtctggatgcccctccagcccttgtcaacgccgtcgtccgtctcgtccacccacgcccacagcacgcgccgcctcctgcgcgcgtcgaagaacgtcttggcgccgaacaggtggccgtggtcgatccggcgccagtcaaaaacgccctccaccggcgcgaacgtgtccgcctcgtcgtcgtaccggccgaccacgtagtagtcctcgtcggcggccttgctgagcttgagcacgtgcatcaccccggccccgccgcgcgccgacgtgtcgagcccctccgcgccgcgctccgccaccgggaacaggtccgggcactcccagacgggcacgtcgggggacgcgtgcagcggcgcggagccccgctcccagcgcacgaagtccttgctgcggtacaccagggtggagcccacgccgccgacctcggccgcgacggcgaaccgccacagcccgtcgcgccccagccacgccgtggtggggtcccggaagttgttgcccgtcacgtcgcccggctgcgggaccaccgggttgcagccgggcggcttgcgccactcccggagcagcgggtccgacgggttcttggggaacgccacgttctgcacctgcacgccgcttgcgtcgcgcccggtgtagaggatggcggggcggccgtccgccagcgtggtggcggagcccgaccagcagccctcggcgtcgaacggcgacgtcgggtccagcgcggtgcccaggaacgcccagttcaccaggtcgccggagacggagtggccccaggagagcttcccggtgccgaacgtcgggccgtgcgggttgtactggaagaacatgtggtacatgcccttgtggtacagaggcccatttgggtctgttcagttagttcttggcaggctggaagtggtacgcagttcggccattccgcgggctctgcttcccgttcatgtcgcacgtcggggtcggggaggaggacgaaggggggacgatgaacagataggcgaaggtgagatctcacgccattgccatgccctgaccagggtttgtttttatagcggacagaaaatgaagacgccttgcagattgcagaagac

SEQ ID NO: 128966 - DNA, 102 bp, Zea mays
  Clone ID: MRT4577_49089C.1
ctgatcctgtgctggacgcgtgggctggggaccatggacggcatcatcgacacggtttcggcgtggcgtacgatcacgccgatgcggtcgctgctgaatccg

SEQ ID NO: 128967 - DNA, 225 bp, Zea mays
  Clone ID: MRT4577_4908C.1
ccttaatcatttttcactttttaatttcaaaacagggggcatataatcaattcactctttgtaaattatgacattttattccattccctaccgatactctacctcatccaccccccatacagaaaagcttattttaaaaaactctgtacaatatcaagtactacgctgcgaatgatttacacacgttccgttaacaattagtggccgcaaaagatcccggggggc

SEQ ID NO: 128968 - DNA, 731 bp, Zea mays
  Clone ID: MRT4577_49090C.1
ctggccgggacggcacggcccacgggtcctcgtaaacaccatcagagtgtacacaagaacacgtacgcggcgcacggcgtcgttagtcaccaagcgggccatcggcaatggcgagcacgcaagctccagcggcggccgacaacgtggaccccgtctacgagtggctcgacgatggcgccagctaccttctccgcctcgacctcccagggttcaagaaggaggactttcgggtgcacgtggacggcgagggccggctcaccgtcatcggcaatcgcaaacccacgcccggcggcggcggcaaggcgctgcggctccacaagacgttccagctgcccaatacggccaaccttgataccatcacgggccgcttcgacggcaacgtgctcacgctcaccgtgcccaaactgctcgccggtgctgatgcccccacaacgccaccaccgcagtccaaggaggaggcgcgagtcgccggcgataagccagatcaggcggacaagctgcccgccagggttggccgtggccgtgaggagacgacggaggagcggaggaccaccgagaccgagaggactagcttggctgcgacaagcaaagaggaagacgaggagaaggccaagcccatggtggcgctgccgccgcagtcgagcgagaaggcgagcggagaccatcaacgagatgaccagcaggatggcaaggcgcaggccgaccacaggcacagggaagatggtcgctcg

SEQ ID NO: 128969 - DNA, 776 bp, Zea mays
  unsure (1)..(776): unsure at all n locations
  Clone ID: MRT4577_49091C.1
gcccgcctctaagaactaagtggaattcccccgggcctgcaggacattcggcacgatgcctctccctcacccgcacctcaccactcctcggcctcacttcttcacaagttcacatcagcagcagctcacgaaacaggagcgtcataaagacatggtcgtcgcaggatagcctcagacccagcgacgcagcggcagcgacccaggaagcaacagcgaccggcatcgatcgcggcagccgaggcggggggacgggaggagggagggagcggtcgccgcaggagcagagcggcacggcatggggtcctgagtgactgactgactgacgactgagtgtctgactgagaaggagatggctggagcgcgacggccccggagccattaatggggcgctcatcctcctcgtcctcccactcctcgcctcccccccgccaggtcgcggtcggctccgctttttaaccggcttgtcctggagcggggcgaacggcgaacctcacgggcgccggaacacgaaccggaaccctagtggtggtggtggtggcgcgccccatgggcatcgacctcaacatggcggacggcgagagccaggagcgccgcccgccgccggcggtgtgccgggagctgtggcacgcgtgcgcggngcccgtggttgcgctaccgcggcggggcagcctggtcgtgtacctgccgcaaggccacctatccgcggccggcggcgggcacgtcgctgtggacctgccgncgcacgtggcgtgccgcgtcgcggatgtcgagttatg

SEQ ID NO: 128970 - DNA, 338 bp, Zea mays
  Clone ID: MRT4577_49092C.1
gacgaagcttgatcctcatagcggtcgccccccctaatataacccggaaccaaaacaaaaaaccaggggggacttaacaaggcagccagcggacacagggggaaggacatgaaccataacaggaccaatgaacagccgaaaagccaacaaagacaaaagggccgaaaagacaagtacacaaaagaaaaagggaagactaaagactaagaacacgcgagggataagctgacaaagggaacaaaaaacccacgggcaaacggccacaggcgacggcggaacaatcgaatacccgataacccgaagggcgaagaaaaacgcccacaaacagccccacggga

SEQ ID NO: 128971 - DNA, 135 bp, Zea mays
  Clone ID: MRT4577_49093C.1
acagcaatctacacaatcacttttacatatcactttcgctatagacagacacaccaagcgttggggccaatagcttactaccaggaggtgggctactgctcagaagacgtgacgtccggagcctcgggcgggttt

SEQ ID NO: 128972 - DNA, 601 bp, Zea mays
  unsure (1)..(601): unsure at all n locations
  Clone ID: MRT4577_49094C.1
aattggtatcagaggtcaccggtccatggagcccaacctacagtccgccatggaggaacagttgaagatccttcgcgagattagtgaccgtctcgctgctcaggaagcgcggtggcacggtcgggagtcgacagtggcgcatcattcggcgtcgatccacgacacggaagtagcggcggccactgcaccttccacgaccttgagcgcggagctcgacgctcaggttgttgcgacccacgagtggctgggcgtggtcgctgacgactggggtggtctcttcggcagaggcgacgactccgatgagcagcgcttcgaggagcccatcatcgccgacaactggggggccgatgcggggcgagaaatcgtgctcacgacgcgcgtgctcgccgctgatgcgtgcgcagctgggatcgtcgacggcgccacgccctttgcctctaccaagcgctcgtcacctccactaaccccaacgaggtgctcgacaaccaccgcatcggcgaggtcattgccaccgacactgaatatagctcagacagctccgtccatggcagcggcggggttgcgctgtctcacctcacgcncaatgacaccaacttcgata

SEQ ID NO: 128973 - DNA, 354 bp, Zea mays
  Clone ID: MRT4577_49095C.1
cttgcgtactctccgccgacgcccaggacaaatgaatccgcctcccggacctcggcgtcacggccgacctcaagccgcaccagctccatggcgtcgcctggctcatccgccgctatcgcctcggcgtcaacgtcgtactcgcaaccgaagacttcttttctgctatgcttgattgagagggctgcgtctgcacccagttctgcatgtggcttgggctagtatatttccctactgcgttttttattctggctctcccgagcttgtaccccggtattgtaataatctttatttaaactctgtactatttgaagtaaggaatgtgtttactagcctcctgggactagtaagtgtacc

SEQ ID NO: 128974 - DNA, 463 bp, Zea mays
  unsure (1)..(463): unsure at all n locations
  Clone ID: MRT4577_49096C.1
ccggaattcccggtgtcgactccacgcccgtccgaagatactgaactcaactctattgnngtgtggatagttcaaatccgttggaatttcaaccactttaactgtgggtagagatcaagtgttctaagctgctgggatactctgcagggcaaggagaagatttggtggccctcagtggataggatacctatagtccatggccaagtgtgtcgatcatncatcgtttgatgtaactctcaagggcttacttacacagaatggttcctaacgtggcatagggacactgtgcagtggtctgtgaaaaccatactcattgtcctctgcggtaataaggttgatgtgaagaacaggcaggtcaaagccaagcaggttactttccacaggaagaagaatcttcagtactatgaaattactgccaagagcaactacgactttgagaaacctatcctgtaccttgcaagga

SEQ ID NO: 128975 - DNA, 221 bp, Zea mays
  Clone ID: MRT4577_49097C.1
ccaagatccactacaaggagggcggggccccaaacgagcgactgcggatcaattcgggcaaacagcttgaggaccaccgcacgcttgacgactacaacatacacaaggagagcaccctccaccatgtgctccgtctaatgggaggcacgcacatctatgtgaaaaccctgaccgcgaagactatcaccctcgaggaggatgcctctgacaccattcacaac

SEQ ID NO: 128976 - DNA, 421 bp, Zea mays
  Clone ID: MRT4577_49098C.1
ccaaccggagggccatagtcccctcgccccgggaggccccaccccccccccaaaaacccccgttggcccaacctttcaaattacccccccggggccatctgaaaaatttttggggaccctttccctcaggccgggcccccctttacccccctatagcaggggccccaccaacccttaaaccctaggggtttcccaacctccctgttccaaattcccaaaacccccatttccctgacccgaatccctggggagggccgaattgaaaaacccccccaaagtcccttccggaccatctttaaaaacccaactggccagggataaatggcccccaagaacccctttttttaaattaaaaccgtccccaaacccttcggggggaaatatgggggctttggagtttaatcgggcccccaccccccca

SEQ ID NO: 128977 - DNA, 352 bp, Zea mays
  unsure (1)..(352): unsure at all n locations
  Clone ID: MRT4577_49099C.1
cgggcggtggacccagcacnngggcgatgatgcaggtgacggatgggatgggggntcggcgtnnccgggtcgtgcgcgacggtgtgcccttgcgacggtacccgttcgggtgaccagcggctggctgccgtgctgctttgggaagttccacggagagcgtgggggagcattatgttttttctgttcggncttctgcgaacctgcgtcttcctccattgggcgagtgacttacttcggnacnttcgactaggctttctcggccctttgggttggtgaagtcggtcgttgcttttaaaggatttgcnnncgtttttttttaaaatttgttanaaaagtttcnatggaatggctt

SEQ ID NO: 128978 - DNA, 180 bp, Zea mays
  Clone ID: MRT4577_4909C.1
tttacacctacggccacccaacatactgagggtgagagacggagaccaacctgcaagcatatatatagcctgcattggactttctaggatatatcaagctccactgaaaccattatgtgataatgggcttgatgcttctaatctcggaccacgcccctgaactgtatcttgttaggaaac

SEQ ID NO: 128979 - DNA, 471 bp, Zea mays
  Clone ID: MRT4577_490C.1
aaaaaaaagaccagggcacatgcaccaaaaggaaaacacaaaacgcgggttacgcggtcaaaaaaacaacagaaaaactctgaaacatttttaacaaaaagaaacgggccaaaaaaaccgcccataaaaaacaaaaatacccctcggttaaaaaacaaaaaaacccctaaaaaaaaccccgctgggaaaaaaacccccccaccccaaaaaaaaaagggttactatgggggggagaaggacgggcaccaaaaaacctttttttttctttcaagaggggaatgaaccgcccccctggaaccccaacacaatggggatgggttttcacaagagggggggcctggcgacccaagttaaccccaggcccaaaaccggggacactgggagcccctgttgaaacaaggaaaagggcattatccaaaatttgtctttcaccagcacaaagagggaaaggcccctttgcgggggggcgtc

SEQ ID NO: 128980 - DNA, 279 bp, Zea mays
  unsure (1)..(279): unsure at all n locations
  Clone ID: MRT4577_49101C.1
annannnaacggncggcagngaaccggaagggaaccaggcggctaaggaaaaaggacccacccaacagccggaggcccaaaaggcaggcccccacacaggccaaaaaaagcaaacggggagcaccccccgcagtaccaggacggaggagcggcaggattaacaagggggggcggggacggaacccgacggaaacgggacacagagagagccgccaaaggagaggacgacaagaaccccccgccacggagcacaggaccgagagggccgcggaaggcccc

SEQ ID NO: 128981 - DNA, 346 bp, Zea mays
  Clone ID: MRT4577_49102C.1
agtctttatcctccgtacagacaaatcaatcaaacttaaacaatgcccgatccatatggctgcgaatgcataatccaaccccacggccacttttacaaagtaaaaatggacctatctcccatccctgcaaagtaccaagtccaaccgactatatgatagatataccctatatctaggaacactgacatcacagacgcgaggcatactatcaaatacaagggggcatttacctgataaggctgacgctgagtcaccaaaaccttttgtcctttacagccggcttcacaacacccggctaattcataccctttccataccagcaacaaaccatctaaccacaaataat

SEQ ID NO: 128982 - DNA, 256 bp, Zea mays
  Clone ID: MRT4577_49103C.1
tcttcgtctcgtgccattttttcagttccctcgagccgccgactaccgctcgcgctttcctagcgttcgggaaggtcgtttcgccatggcctcggagacggagacgttcgccttccaggtggagatcaaccagttgttttcgctaattcattaacaccttctactccaacaaggagatcttccttagggagcttatcttcaactcctacgatgccttggacaagatcaggcactgagagtttgacggtcaagacct

SEQ ID NO: 128983 - DNA, 392 bp, Zea mays
  Clone ID: MRT4577_49104C.1
gttctgggtagatttgaagtgcaaactgtgtgtgccaaccaaggtgttcttgtaaccaaattcagacagttcagcaaaacaaatgctgatgattgctgcagttcattgaaaaaaaaaaaaaaaagaaaaaaaaaaaaaaaaaaaaaataaaaaattaaaaaaaaaaaaaaaaattgtagagggaaataacaaccttgtgaaaaaaagaaagaaaaaattattgtaaactagtatttcgaccctccctttttttgaatttttgaatagagtactttgtatttaaataatattcaagggtttcttttctagaaatttttgggaaaccttggaaaaacactctattttggatactattatttagttggtacatatggtttaaaaaaaaaataaaa

SEQ ID NO: 128984 - DNA, 353 bp, Zea mays
  Clone ID: MRT4577_49105C.1
acccctgcggtaccgcggcgtagtcccaggcttgccccatgcgtccggcgacagcgtagcaaaactcgtgctgcggatccctactcctgcgaaaagaaagagcacacgtcgatcgatcatgggcatcgcacgaccgaaatcaatgcccgcgaggcctcataccaaggtgaacactgacgacgaaattctgcgaaccgggttcttcgacagcacaccacttgagggcggcaagatcaccgactgcgaagccggcgaacttttggccggtgcacgacgccttgccgacgccaggtcctcatggctaaatgatggtccacaccaggcggggaccaacaataacgcccctatggctg

SEQ ID NO: 128985 - DNA, 114 bp, Zea mays
  Clone ID: MRT4577_49106C.1
gaaccacacgcttttccacaatccccacgtcattcctttgcccatcggctacgagcagccttgaagactcagcagacgtactctttcacagtctccaaactgacctccatacgg

SEQ ID NO: 128986 - DNA, 404 bp, Zea mays
  Clone ID: MRT4577_49107C.1
ggatcgacataagatccaataaatggctatagatctgctattaatcgaaattttcaaaaacacagcttgaagctgcaggaaataaaacatgtggagacacaacagaaagccggcggtgatagcaaatcagcttgctctcatttttgtgtgagattgatcacagggaatcaagcgtatacgctgatgacctagttagtagagatccaatattgctaagaatgcgcatattgctcttccttgctgtaacggctaaagggaaagtgagtctctctattactcgcatgctaattatggacagccagtgttggggataagcaccatctgggtagaggttataacagccttgtccttgaagttgttcttcagccactacatggtcacaagcttctggctgtcaagtggct

SEQ ID NO: 128987 - DNA, 1857 bp, Zea mays
  Clone ID: MRT4577_49108C.1
aacgatcagcaccttcatggtgtcgagttctccaatctggagtcgatgagctaattgctaggctgacgtccagtggtggtggtgccgccgctaatcctgttcctaataccaacagcccaccacctacaatggaggagcatgcaattactgaccgtgagcttccgattgagggtcttaatcaaccactgtcagattttggaaatgatccggagttgttttctgaagcacagcctgtttcttcccatggtcaaggtcagggttggctcagtgaggggggtgacaaagctgaggtcgtggatgcttccattagcaatgatgttgtggtagtagcagagaacacctgcactgatatctctcttggggatattgagcagtttctcatgcaaatatctgatgatcagcaaaacgatgaattgttctcagatttatcaacaccacttccaaaactgcagttccagtgcgatgatcgtcaggtttggcttgatgccgaaaggggacatgaagtttatgctgcggatcctactgccagcagtggtgctgttgtaactgcagaatgcactgtcacagaacttccacttggagatcttgaagggcttctgctgcaaatagccaatgaccagcacatggtcgaatcccaatcagatctttctgcaccaactccacatcataacttcaatcaggctgacattggggatttacatgaatctcatggtgctcgggttggtaatctttcttgtatagttcaggaaagcacattttgtgaaccacggactgagccaagtgatcaatttccacagtctaatgtaaccaatttgccatttagcggagaagcaaattcttctgaagggaccagtgtggcacattctgtgtcaggtcagaatgcaaattgtatgacaactgagtacatgatgtctgcaacaaatgggatgtttgacaatttggaatactctgatgcttcttcgtttctacctgggtcatttgacatagttggattgggagctgaaaatcaatattttgataccgataacagtggaattcaaaaccagggatatcaaaatacaaccgaagtaaggacatataatcaggctgctcttactgtgcggagccatatgaagcatgatcatgtagtcttatcctcgcatgcatcaggcactctgaatatccatgcggcaaatgagctacataaccagagctccacatcttcacaatcatggttcaatgcggctctatcagccttgttggactctgtacctagtagtccagcattagctgctgaaatcgaaaacactgttatcaacagaacactccagcgcatctctagcttccgaccacagcaaactgcaggtgaagaaaacacttttatcaacagaacacttcagcacatctctagcttcaggtcacagcaagcaacaggggaagaaccaggcacccctagtattcaggttaccagaggtggcaggctgatgttcatatctctactggttatacttgcttctgttatatggacctttacttcaggctccgccctcaacttttgcaagggtttatggaaatcctcttctacgtgacagattaagtgggaacctggtgaccttgccctctgtaaattttttggtcctcggtaccatttatggtttgaatatcctttcgctttcaaaagggtgaagaggtagaaacattttgagggtggtaatatgattataggttgtagagcctatttaaaacggtaaaacgcaaggggaaaaagcatatctgatggtaatatttgaaactaatgggttactgttctcatttgtattttgacagatatatgtactgaatgtaattaacctattaatatagcttcagtttctgtgc

SEQ ID NO: 128988 - DNA, 402 bp, Zea mays
  Clone ID: MRT4577_49109C.1
actatcggcattttttaacttggtttttgttttatatatatattgacttccttttagcggggcacaaaaatatcattcacacaaaaaacgggaaaaaggcactaaaaactcgggaaaaacccaaaccaccgggggccaagcaaaaacttactctggggggggggggtccaaaaacgcccccaatgcgcgggaagaagccatcaaaactcgcggggaccgggtttttattgaaccccaccctagcgcgtccagggcccccccggggcccttgagcaccaacaacaagaaggcagataaaaaaaaccatcagagggggggggaaccccatgaggattgtgcggccactaaccttaatatgggggggagccccagccccaggaaaaccgccaagaaccgggccca

SEQ ID NO: 128989 - DNA, 241 bp, Zea mays
  Clone ID: MRT4577_4910C.1
accactcctcgctagctgaggacggtacattttgtacataggtgcgacgttcgacggcgacggcgcatgcgccacacatggcatcccagctctccgccgccgtgccccggttccacggccttcggggctacgccgcgcccaggtccgcggtggcagcgctgccgtccgtgagggtgggcaggatgaggtcgtcttcccatgtctttcgttttgtcttcattgtcttcgtctccaactctgt

SEQ ID NO: 128990 - DNA, 1560 bp, Zea mays
  Clone ID: MRT4577_49110C.1
ggccgctttttttttttttttttagcacagaaactgaagctatattaataggttaattgcattcagtacatatatctgtcaaaatacaaatgagaacagtaacccattagtttcaaatattaccatcagatatgcttttcccccttgcattttaccgttttaaataggctctacaacctataatcatattaccaccctcaaaatgtttctacctcttcacccttttgaaagggaaatgatattcaaaccataaatggtaccgaggaccaaaaaatttacagaggacaaggtcaccaggttcccacttaatctgtcacgtagaagaggatttccataaacccttgcaaaagttgagggcggagcctgaagtaaaggtccatataacagaagcaagtataaccagtagagatatgaacatcagcctgccacctctggtaacctgaatactaggggtgcctggttcttcccctgttgcttgctgtgacctgaagctagagatgtgctgaagtgttctgttgataaaagtgttttcttcacctgcagtttgatgtggtcggaagctagagatgcgctggagtgttctgttgataacagtgttttcgatttcagcagctaatgctggactactaggtacagagtccaacaaggctgatagagccgcattgaaccatgattgtgaagatgtggagctctggttatgtagctcatttgccgcatggatattcagagtgcctgatgcatgcgaggataagactacatgatcatgcttcatatggctccgcacagtaagagcagcctgattatatgtccttacttcggttgtattttgatatccctggttttgaattccactgtaatcggtatcaaaatattgattttcagctaccaatccaactgtgtcaaatgacccaggtagaaacgaagaagcatcagagtattccaaattgtcaaacatcccatttgttgcagacatcatgtactcagttgtcatacaatttgcattctgacctacatcctccagatcaaagaaatcgttgatttcaaggaactcttcatcagcatcttgactgtggtaactgatcaaacctgacacagaatgtgccacactggtcccttcagaagaatttgcttctccgctaaatggcaaattggttacattagactgtggaaattgatcacttggttcagtccgtggttcacaaaatgtgctttcctgaactatacaagaaagattaccaacccgagcaccatgagattcatgtaaatccccaatgtcagcctgattgaagttatgatgtggagttggtgcagaaagatctgattgggattcgaccatgtgctggtcattggctatttgcagcagaagcccttcaagatctccaagtggaagttctgtgacagtgcattctgcagttacaacagcaccactgctggcagtaggatccgcagcataaacttcatgtcccatttcggcatcaagccaaacctgacgatcatcgcactggaactgcaattttggaagtggtgttgataaatctgagaacaattcatcgttttgct

SEQ ID NO: 128991 - DNA, 346 bp, Zea mays
  Clone ID: MRT4577_49111C.1
gcctgcgtgtaccgggctgctattacacggtcgacctcagcgttcgtacctaatcatgtagctgtacgcgtaacccacctatcggtcttgatgctgccgaccggagtgctgcttgtgcgccgaccaggctgcttgcagactggagagccgccgtcatctaagacttgtcagaataacctggaccacgccgtctacctatgcaaattatacacatgtggagagaggctccaaagacttgctatctaaacacttacctagcgctggagtgcaggctcctcttcctactcctgtgaacgcgaagtgttgatcgagaacgacaaccgactcctgagtatcttaaactttc

SEQ ID NO: 128992 - DNA, 1032 bp, Zea mays
  unsure (1)..(1032): unsure at all n locations
  Clone ID: MRT4577_49112C.1
gtcgccgtccacaccgttgagcnnnnnctcaggcttcgcatggcctgattcatcctacagtctccaacaagccaagcaaacgccgcatcgcgctttctccgcttccttctttcccctcacagggtcagaccccaacgccgggagaataggggattaggagccagacctggcggcgccgggcgtccaagaaacgctgcctaataaaatccctccggcgtctgtcgtcttgaccgcggcggcgcaggcttcttcttttcgctctccaccacacttggatgaatgttgtcattgccaggggtgtgctggcaagtatacactactcagagatgaagaaaacccacggtggacaatctttgagaggcggcttccttgctgtggttgtggtataggatggtcttcttttcttttagggttcttgtgtcctttgatttggtactttgcagccactctttactgctgcaagtactacaacaaggatcctcgagagcgccctgggctagctgcatcagctgttgcggcactcatcttcacagtcctggcactcatcgctctctctgtggcactgatattctatatataaagcgaggaatgaacttgcgcttgcttgaaatgcgtactcaggcactcatcttcacagccctggcaaccatacatcgctctctgtggcacagatcatctgaaacccaaagcgaggaaaacgcggtagctggacctggcattcagaaggaacttgtaatctcagtgatagtagcatatcgttgcaatcatccttcatgtatcgccatatcaatttgttgatttaaatgctgcatcggttgacctgtcggctgctgttgtctatcaacgaggatgatcattgctctatcgcaaactgcgtgctccgtgatctgtgatgcttctgaactcattctgtcttggcaacctttaggactcggttggtagagctccgctttatgattctgagctccgagagctgatttttcaattgagtggttttctagcagaagtgaatctatctatacactgtttggt

SEQ ID NO: 128993 - DNA, 761 bp, Zea mays
  Clone ID: MRT4577_49113C.1
cggttcttggtccgcggcagaatgagaccgcctctcccgaaccgctacttcggcaacgcgttgatcaggctgggcgtcactggtgcggttcaggacattgcttcggaggctttggtatctgtcgccggccgcatcaaagacaccatcgatcggatggacgacgagctcgtgcgttctgcggtcgactactgtgagatggccgagatggacagccggcctgtaaagggcaccttgctagagacggagctgatgcttattagctggctgggcatgccaatgtacgacacggattttggatgggggaagccagcggtgatgtcgcgggcggagtccatccgtggaggctttgtgtacataattgacgacgggccaacagacggcgtcggcagcggcggcgtccgcgtgctcatgtgtatggaagccgcaaatatgaaggagctggagcggctgctttacgcaaaactctagactaaagcctggacctgctaggtgcttgtgatgtggaacgaaacgctttggtaacaataaagggcccgagactatacaaatctggacggccggcctgctttttgtttgctcgcaggaaaccttctctactctttaaattttattttttatgtgtctcaaaaacattgtatttatgaaattccaccaccaactgatctacatcatatatgtatgatggagaagatccatctaatacggctggtgaagtttaaataacagaggtttctgatcggacctaataatatattgttatt

SEQ ID NO: 128994 - DNA, 286 bp, Zea mays
  Clone ID: MRT4577_49114C.1
ggcaaggtgagaaggatcaccagcgagggccagatcctggagcagcccctggaccctagcctcatccctaagctgatgagcttcctgaagctggagaagggcaagtttggcatggtgctgctgaagaagacgctgcaggtggaggagcgctatccatatcccgttaggctggaagccatgtacgaggtcatcgaccaaggccccatccgtaggatcgagaagatcaggcagaagggctttgtccagaaatgtaaggcctctggtgtagagggccaggtggtggcgg

SEQ ID NO: 128995 - DNA, 1397 bp, Zea mays
  Clone ID: MRT4577_49115C.1
gagcttaaacacggcacctacctctttatgaatttttacccatctggtttcggggtacccattgcgcagccagagcgagagggagagggagagcgagcgcgagcgcgcagtcgccgtccacaccgttgagctttttctcaggcttcgcatggcctgattcatcctacagtctccaacaagccaagcaaacgccgcatcgcgctttctccgcttccttctttcccctcacagggtcagaccccaacgccgggagaataggggattaggagccagacctggcggcgccgggcgtccaagaaacgctgcctaataaaatccctccggcgtctgtcgtcttgaccgcggcggcgcaggcttcttcttttcgctctccacggcagcgtcatgaagattaaggggaacttgcatgtttgatgtacccctgtagcaaaaaattcttgtgataaaatttgttgaattagtcactgtcagggagggatctagttgtcagttgtttgtattaaagctgctggcactttccttgcagggtttctgtagaataaatgggagaagcacacttggatgaatgttgtcattgccaggggtgtgctggcaagtatacactactcagagatgaagaaaacccacggtggacaatctttgagaggcggcttccttgctgtggttgtgggataggatggtcttcttttcttttagggttcttgtgtcctttgatttggtactttgcagccactctttactgctgcaagtactacaacaaggatcctcgagagcgccctgggctagctgcatcagctgttgcggcactcatcttcacagtcctggcactcatcgctctctctgtggcactgatattctatatataaagcgaggaatgaacttgcgcttgcttgaaatgcgtactcaggcactcatcttcacagccctggcaaccatacatcgctctctgtggcacagatcatctgaaacccaaagcgaggaaaacgcggtagctggacctggcattcagaaggaacttgtaatctcagtgatagtagcatatcgttgcaatcatccttcatgtatcgccatatcaatttgttgatttaaatgctgcatcggttgacctgtcggctgctgttgtctatcaacgaggatgatcattgctctatcgcaaactgcgtgctccgtgatctgtgatgcttcttagaaaaaaaaaaaaaaaaaagcggccctggtaacaattttcaactttatattgtttcttgtggatcaattgactgttgcacctttgcaacatcagagtccgtcattgtagaattgtgcttttctgttaccttcagaattagatgttattatacctgccatgtgtaaacatcagcatggctgcgtgttcctcctggggcctctttgtcatg

SEQ ID NO: 128996 - DNA, 251 bp, Zea mays
  Clone ID: MRT4577_49116C.1
ggcgcgtgggtgatgatgtacagaccatggatgaaatagaacagactgaaaattgaaacaaatagagcttgcaactcttgactttgtgtttgcaggtaactgagcggactgaaactggagggcaatggattactttgaccgtgcctttctggctcaggctgtcagcaacagaccactgctgtcaaaaagctcctgagatatagcttgtgctgagctgaagcctgatcagttcactgaaggaaaggtttaat

SEQ ID NO: 128997 - DNA, 464 bp, Zea mays
  Clone ID: MRT4577_49117C.1
atccaatccgtctgcccgaacatgataatttgagcacgcgtccttacatcacagagggggtggtgagtaatacaacctgctgctgcgaactttttttgtccacgtccgctaactgtggggtggagggggggcccaaaaaaacagaggaggagctttacagtggtgtggacacaccgaaactgaccaccggacggggcccgacgcacgagcagtcgatcgctcgagcaaaaaaaagcggagaggccggtgcaacttgggcgccagaaggcaagggagcatcagcgctctattattaggatggtgcaccggcgcgtagcatactcggccatgtgcacgccgaagaagcaaggcgtataggtgccgtacataacacaccgtgcggtgcggttttgttgcagagcaggacgggtctcgccggcggggcggtggccactcgccgatagacttggtttcccagagcaact

SEQ ID NO: 128998 - DNA, 312 bp, Zea mays
  Clone ID: MRT4577_49118C.1
ggcacggcaaaccatgacctctacctactacagatcgcacagcaaccatatcgacaccatgatgggggcgatggacgtacttactttcctgaatatttgtgggagcacacagctcaagcattcaatcagctagtggtggtgacacccaccgcctacttgtaatatacggtcgcattgaaatatgtgactttgggttaatctgccacctacctagcatatccaacagacggaccaaatgcattcgtcggggcaaatgcaatcgtcggtgcatgtgctacacgacggataatctggtggcatacaacaagccac

SEQ ID NO: 128999 - DNA, 412 bp, Zea mays
  Clone ID: MRT4577_49119C.1
cgggacttggattttgttggcggctcaaggaaccccaaaaattttcctggcgccaaagcaaattgggggggaccctggccgcccccaacaacaacaaaaaaccccccctcctgtaacggaaacaaatgaacagcgcgggtttaaaaccctaacccaaaaaagtaaacctttaacccccgccttggggaccatggcctttttatgtctcgggggacactttttatcaacaaggtccaaaatcttttaaaggctggcggcccatgaattcaatgacccattggtgtcttggggcgcccgaaaactgacaactcccatcggcctgtgaatctttcgccctagaaatttcaagttaaccctgtgtgaaagatgcttatctgcctcctgaaaaggcgggcaaaaaaaatcaccaagc

SEQ ID NO: 129000 - DNA, 292 bp, Zea mays
  unsure (1)..(292): unsure at all n locations
  Clone ID: MRT4577_4911C.1
gattctgctatctttagtcgagagactgaaatccaatgaagctaagctatctgctcaagcagaggcccacaaagtcaaagtgcaagggctagacaagaaagttgccgaagcaactaaaagtttgatgtggagctaacgaaacatgaaatttgtgaaattgaacgatcaagggcaaaagaaatgttgatgagcttcgtgcaactanagaaagatgttacgatatggctatggaatgcgccaagaatctgaagagcagcttttcanaagtttgtgcattctccttcagagcaaa

SEQ ID NO: 129001 - DNA, 1291 bp, Zea mays
  Clone ID: MRT4577_49120C.1
cagctcgagcccattcggctcgaggtgcctgcacaagctccaaaagttgaaatatctatatatcaaggaccgcagtggtcaacttaacattggtggtttggatgcctgggtagcccctccaaatctccaaatattgaatacgcgatcgggttgctggttcaccacactgtcagcatcagcatggatgaatccatctcttcttcaggacctctccttatctaccaccgtgagggagttgcagcaggatgacattataattcttgggagtttgccagctctccgctatctaaatctgatgattgttggtgaggatttgggagttcacaatgaaatccatggggaatgcattgttggtgctggtttgttcccatccctagtatactgccagctctggggaaatgtggcgcctatagtgtttcagcgaggagccatgccacggctcagaacccttgactttcggttatctgttcaagaggtgagaggaatcaacggcagggatggtggtatcgacttgggcctcaggaacctgccatcactccagaaggtttgggttcatttggaccctgagggcgctaacaaggcagaggtgaaggaactggaggctgagttgacgcgtgccatcaaaattcatccaaatcatcctcagctgtatggaattcaggatgaagatgcagatgatgaatgatgcactggagaaaagattaccaattatgcagaagctagtgcactttcaactttcatggcactggtctcaaggattgtctgattcagatggattacttctgtttctgtctcagattcagaatgtgatgtccaccccaatcatccaacccttaaggaacatggtgtcatggtgatgaagatgtaaggagccaacttgtgatcatccgctggaaaatggaagagcaatctggtggcctgatggactagcaaacctggaagtaagtacaaacaaaacacgagacagagacacagagtcgggcctaagatttagcaaaactgatgctgtgagcttggttgggtatgtatgccctgtttggtgtgctctgatcagaggatgacatttacagaattaaagcgtagtgtggcaatgtggcagcctggggaaacctgcaactggcgatctggaggtctggagagaacaaaacgccagtgacagttggggcttaggcttggcaagcctaatattgcaatagcacatatgaataacggttgtttgttgcgactggaagtcctgtttggtttttttacatagtgtttgctgtttccactcgggaaaaaaaaaaaaaaa

SEQ ID NO: 129002 - DNA, 319 bp, Zea mays
  Clone ID: MRT4577_49121C.1
ggttaaagttatttatcattgaccgcgtctgcatccaaaacgacatctaatgggaaagcccacgcaggacggttagggcgttaacagacatgcaacatgcgagaaaggaatactacacataaacacgtgaaagttggtctctaaactaatggctggggagaacagaaaacctgctggaacggcctgcctaagcaggctaggagtgggctaactgaacaggcacgggcttggagaggatggacaattacgggcggtatggatagctccccgaaccaggagcagaggagacagagggggcccggagcaggataggagacac

SEQ ID NO: 129003 - DNA, 204 bp, Zea mays
  Clone ID: MRT4577_49122C.1
acacaacgtctatcagtgcttattcaataattcgagcgcgaccaaggcaatcatggggtggggctaccgtgctggcggcgggggggaatgccttatacttggcaagttctactttgaaggcgttagcatccatagcagggggccgacgtaacggttcaaggacgagagcctcgacagcacagataacaggggcaagatgaaccc

SEQ ID NO: 129004 - DNA, 468 bp, Zea mays
  Clone ID: MRT4577_49123C.1
cacggttctatctcttgtggtgatcgtttccttccaaatcacaagacaaaaaaacgcaagatgaaattaaaacaagcaaaaggaacagataaggcctccgacaagacggaaggaaaccaaaacaaacaataaaaggcgagagaggggcaggaacggcacccgaaacacaccaccactggcgtagggcccgcagacccccagttgggaacccaacaccctgatgggatctcgccctcaccctgatggatccccccccgcacctcctgggggcccttcccaccaacggtgcaccccccgccgacgcacggcccccccatccccttgacaggcccccccaactccttggccagggcccggttccgaatggccggtgccgagcccgacgacgggcgtcgaggcctgatgcctgcacggtgggcggggatgtgacttagcccttcttccctggcccctctcggccccccttgc

SEQ ID NO: 129005 - DNA, 261 bp, Zea mays
  Clone ID: MRT4577_49124C.1
cccacgcgtccgaaaaagaaaaggcaaagtctaaggaatcccaatcaggcaagcaaaatgaggaaccggcttctgcagagttcggagatctcatctcatctgatctctcattttcgacctgctaatcctcctctcatttgcatacaatatactttatttgaacctcttcgtatctcatttctcatcatctccttcatctattcattatagactatttccttatactcttattaacctatcttacacttcattataggatta

SEQ ID NO: 129006 - DNA, 683 bp, Zea mays
  unsure (1)..(683): unsure at all n locations
  Clone ID: MRT4577_49125C.1
tctatcccactgtctctcctcctccagagatctccctctccggtcaccgtctccctcgatcacaccacccgtgtaggttgagaagattgttgcgatccagatgggctcagacaatagcgcctctaggaccattggactacttcttgaatagaatcatccatatagggcatgtgcagtgaatcatggtcggtctttcacaaggtcactcatacaaggttctctcgacgaaacatagcaagcagccaacggcctcacctattgggaccagcgtacgcatgccacgcttgtatgtatccactcgtatctggaggaagtatcgtgcgtcgatacgtcaacggtcatgctgaacaagtgcgtccgtgcatcagccctcgctttgatatcggtgcgacagacattgagggatgcactgctaggctgctcccgcccaggcggctcggatacatcgctcctcacaacttcttgaggtatcatgcaccgccaggtaggcccgccggaagagcgtcggaggcaagggtctaggtgttcttctacttgaagaagctgagaatctttgttatgatctgcctgtctgtcttactctctcatactagagcacctggtattttactttaatatgtctctctcagactaaagcgccttcttttacttgaatattggtgactgcaatcaanngataaagn

SEQ ID NO: 129007 - DNA, 678 bp, Zea mays
  Clone ID: MRT4577_49126C.1
gggtaccctccgggccggccgggattgaaagataatgttactatgatcaattcagaaaccagaaggctttgttatggttagcaaaactttctcctaaaaacttctcgagatggagtttgttggtttgactcgcccagttctagatacacgtgcaactacaggcaagggtgcccatccatattacaagatattccaagcatttggccttgtgagaaagattgagaaagatacaacgccatgtgtcctcggatacccttaatgtttttgtgtggggagaccacaagaagccatctgctcacaaccttgcttgggactatgacattgtcataaccacattcagcaggctaagtgcagaatggggtccacagaagagaagtccactaaagcagatccattggttcagggttatactggatgaagggcatacactaggttccagccttgccctgacaaacaagttacagatggctgtcgctttggttgcatcaaataggtggatattaactggtacacctacaccaaacacaccaactagtcaggttgctcatcttcacctcatgcttaagtttcttcatgatgaaacttatggtcagaattaccagtcatgggactctgggatccataggccttttgaggcgcaaatggaagaggggcgcgctcaccctgtgccactgcttc

SEQ ID NO: 129008 - DNA, 316 bp, Zea mays
  Clone ID: MRT4577_49127C.1
gaccggaaaaaacggagcgacccacgcgtacgccggtatgcaggaaagcgaaataccacttttttttttcagcatgaattctcatagttcgtgacggaacttatgtttgatctatatcacgaattccaacaattaacgaaagaaatctgctaccaaaaatgatgctatttacaaacaacatccattttcgtaacagatacccttctttgattgttgaaaaaccagacattgtaaaaaaccaactacgatctatccttttataatgcaaaaaaaaacaacaaaaaaggacttccgttttatacgaaccaaacttacc

SEQ ID NO: 129009 - DNA, 320 bp, Zea mays
  Clone ID: MRT4577_49128C.1
gggttgggttttttttttttttcctttcctttctttgaaaaaaaaacggcttgttcattcccatttacacccccccattttatgccggccccaggtgttccttctaacccgcaaaataaaaagaaaaaccaacgttgcccccctaaccaaccctttttcctatcctcttaaaaaaacacccgggaccctttgtgaaaaaccggggaaactttttaacccacccccccaacgtcttgtctaaacatgccccaacagatttcccagctcgcagtgggacaaccctcccctatcccccacttaaaggccaggcgccccctttc

SEQ ID NO: 129010 - DNA, 319 bp, Zea mays
  Clone ID: MRT4577_49129C.1
ggcattacggatgattgctctttcttcatgattgaacggccgtttaggcaaaacgagcttagtaaagtttaccaaagagttgattctgcacaagggaaaaaaaggaagacgattctggtagaaaactgagcagcaacataagatcctttttcttctctggctaacactgatgttcctggctgcaggaagccgggaatagctacaaactcttttcagccatgggttctaagaaacactagacatgacgtgctacaaaagttcagggactacgtttcacccagtccattaccctttccatgaagatacattggattatttg

SEQ ID NO: 129011 - DNA, 1725 bp, Zea mays
  Clone ID: MRT4577_4912C.1
ccggccgggaatctagtacatttgatttcttcgtgcttattattgctctggtggttgtgaaaaatgcttgtcagtttagactgcagaacgaaacttattggcagaaaaaaaaaaaaaaaaaataaaaaaatagagattgccgtgccggcttccgccgccagcggcagcaatcccctcctcctcctccctgttcctggacgccggctccggcgccggctcctcatcgtccgcgggagactgaagtggtgaacgcggaagaaggttgtcattttgctaagttaaagttagatcattggagcaatgccgccccataagatcgagacggggcaccaagatgtggtgcatgatgtcgccatggattactatggcaagcgcctagctacatcctcctctgataatacaataaagatcattggcgtaagtggaacctcacaccagcagcttgcaactttgagtggacaccagggcccagtatggcaagtcgcatgggctcatcccaagtttggttccatgcttgcatcctgcagctacgacggccgagtgatcatctggaaggaaggaagcaagcctgatgaatgggcactggtacacacctttgctgagcacaagtcctccgtgaattccatcgcgtgggcgcctcatgagctgggtctatgcttggcttgtggttcatcagatgggaacatttcagtcttcactgctcgttctgatggaggttgggataccacgcgtattgatcaggcgcatccggttggtgtgacctcagtttcttgggctcctgcaatggcaccgggagctctaatcagcgcggggtcttctggtcagtttgagtatgttcagaaactcgcttccggtggctgtgacaacacggtgaaggtgtggaagctcaacaacggcagttggcggatggactgtttccccgccctacagatgcacaaggactgggtgagagacgtcgcgtgggcgccaaacctgggccttccaaagtccaccatcgccagcgcctctcaggatggaacagttgttatctggacagcagcaaaagaaggcgagcagtgggaaggccggttgctgtatgatttcaggacccctgtgtggaggctgtcgtggtcactgactgggaatatactggcggtgtctgacggcaacaacaatgtgaccctgtggaaggaagctgtggacggcgaatggcagcaagtgacgactgttgagccataggtctctagagttgtccctcgtctatattgccttaatacttgtagtttttgtgtacctatggccctgtgtgggtagcaagcaggccacggtgcatgactacttgagacgtgatttcaggctcgggcagaagtgaaaaatgaacttgttgtatatgtggagcattctgtttctcgattcagtgccttttctttcccatggttaaagcggtgcaaaagcaaaagagctctctccagttattccgcgccggtttttgcttaattggatttgttgttttcgtgtaaggtaaagttatgcccctgtgggtagcatgtgggactgtatgtggttcacagctgttggcaaggcacagtgcacgagacatggtttcaggctcgggcaaaagtgaaaaaataacttgttatacagtccattctgtttatttagtgccttttcgttcccatgtttaattcgttgttcactgaggtttcatatatcagttattgtattccgacagcaacggaattcgag

SEQ ID NO: 129012 - DNA, 566 bp, Zea mays
  Clone ID: MRT4577_49130C.1
tccaccgcggtggcggccgccctttttttttttttttttaacagaaacaaggcgcttgtaattctgacagtacataatcatgggtcatattacaggtgggccaatactctctcttgcactcaacagccatctacagtgtcaagcacacagattccagggcataacttattgtaaatcacataaaaagtaaacaaactccaaacatggcctaatgagaggacgtgttaaaaaaacagggccagtatttgatattagctgcctaaagaagaggcactggtcttccattccattgacaaagaatagcgacaatgtaatactatgagcgaacaaacgaggacaaaatagaccaccacaaacaggttacacaccttgtcatttttcagacacgcccttatgccattacagctttaacgtctacctcaatcggtgttagctgctatcaaccttggtgaccacgcccgctttattgccaaagcatccatcttcctttctgatgcgatctggctgctttcttttaacaacactagaatactgagctctgcgctaattattctcagacatgataa

SEQ ID NO: 129013 - DNA, 837 bp, Zea mays
  Clone ID: MRT4577_49131C.1
gccggccgtaggatggagtggctaggcgaacctccgcccgcccgcgacccaaaagccgaaagcccgaaaccagaggcgggtagggttctagctgcaggcgacggccatggccgcctccgccgccgccccggcgctgcttcgacgcctcttctgcagctctattccagcctcctcctccgtactgcgcgctaccttttgctcctccgccggcttcggctcgtcttctccgtcctccatattcggcgacgccaccgaggtcgccaacgtgccaccgctcaccacgcccaacctcttcgtcagtggcctttcaaggttaacgacagatgagaagctccagggtgcatttgctcctttcgggaggctccttgaagcaaaagtggtgacggatagagtttctgggaggtcaaagggtttcggtttcgtgagatatgccaccatagaagaggccgagagagcgcggcaggagatgaacgccaagttcctggatggatgggtcatcttcgttgaccctgccaagccaaggcagccaaagcccgctcctcagcaggacactggttcatcgcatgctggcttcacgacgaacaagactgtaggatggtgcggctaggctcattgatctgtcgcgatatttcacggcacaaaacttggattgcaggggtggatctaggggtgttcgtcacccggataaaatttataaattctttagaaaaacacagttaaagttcaagaaaatttgtatcatgtagcaaacctgaccttgctacccgataatattttgggttagattcgccatttattgaaaaaaaaaaaaaaaaatcgagagttcactttggcatg

SEQ ID NO: 129014 - DNA, 1080 bp, Zea mays
  Clone ID: MRT4577_49132C.1
ccggccgggaatccacatcaaatccattcagtccttcacttgcttgacgcatacccactctcttcatcttcgactcgcttctattcgtgctatataccactttttccaaagcatcccaaataacacactctccatcaaaatgaagttctccatcgccgtcattgccgctgcttctggcctcgtcgccgctggccctgctgcccccacccccaacgatgccttcgctcttaccaagcgcgcctctctccccgtccccgcctccaagggatccgttacccttaaggcacctcagtccgtcagtggcaccttcgatggtggcatgaagacctacggccgtggtgtcagctgcactggtcaggttgagggtggcgacaaggacgccgtcttcaccgtcaagaacggtggtactctcaagaacgtcatcattggaaaggaccagatcgagggtgtccactgcgagggttcttgcactatcgagaacgtctggtgggtcgacgtttgcgaggatgctctcagtctcaagggtgacggtaacgccgtagtcaggggcggaggtgcccaggctgcctctgacaaggttgtccagcacaacggaacgagtacggttaccattgacggcttcaccgtcgttgacttcggcaagctctaccgcgcttgcggcaactgcaagaacagcgtcacccgcaacgttgtcgtcaagaacgtcaaggactacaacggaaaggtcctgactggcatcaaccccaacttgcgcgtgacagctctaccatctccaacacctgcgctacctccgtcaagaccatctgcgaggagttcaagggtaccactcccggaaatgagccttcctccgtctccaagggtccttccgccaactgcaagtacaccgcttccgctatcaagacttgctagacgccttatactcgcggttggtagtagggtagatgcgagcctgtagagtgttgagacgttgctctggacttttggattttggattcttagcgtatatactacttctttctcaggacatattaatacatgccgtgcatgttttttccgaaaaaaaaaaaaaaaaaagcggcc

SEQ ID NO: 129015 - DNA, 538 bp, Zea mays
  Clone ID: MRT4577_49133C.1
aagaagaaaggtcaagcgcaacaattggcctggaaattaaaggccggttaccaccccatggcaggacggaaggttggcaccaaggaattaaaccttgccgcacaaggcttggcggggggcacaccatgaaagggcaccgggggggacgaatcaaacacaaaacgcccaacggccggggagggtaactttggggggccccccaacccgggcttaaattgcccccgaacagggagcccagggaaaaaccccccccaggagcaacgtggaccttggttgaaggacgggccctaaggaaattgccagggttttgaccattaaccctgggggagttattggtttggctggtaaccccaaaaaaaacctggttggccggattaatttttggagcaaatggttttttaacagggggagcacttgcaactggggccactgctggtttggggggcttaccgtttccaaagaaataacccaaaaaactttgaccaccaccgggactaccaccaagggttattttggtttttgaaaaaaaaaaccaaag

SEQ ID NO: 129016 - DNA, 425 bp, Zea mays
  Clone ID: MRT4577_49134C.1
cggtccggaataaattcccgcgtcgacgagcttttatgtcggcggccgccctcttactggatccggttgtgtttttaagccaatggtcccattccctcttataccttttatttaatttctttggtcactaccggggagaaacattctaaaacgctccccttcgcggtttcacaacccctggccccacaggaaggaaaaaaaaaagggggcggttttctttaagctgggacgggcaaaatgaatcaaaactgaaaaatttattccacccacaaccaccttaaacaagcctggaaaaaaccatcggggagtaaaaaacttgaatttgaaaaaaaaccttgaagggaagctggggtactccataaagcacgcccaacttcggggccgctggggcgcccataaagtaaaagggaaccgggttgtcctcc

SEQ ID NO: 129017 - DNA, 234 bp, Zea mays
  Clone ID: MRT4577_49135C.1
atcggacggatttgttcggttgttgtcatgtacttaccgggattgctaaagcgctcgggcctatttagatatcaggtgatggcgagggatatgtgaggttcatgcactacatgcaccagaggaaagccgaaagtgcttactcagacacaagccttcatcgatttcccaggtgggtcacgtaacgatggacgagctgctggagatgatcccctgatgccctctacggatccatga

SEQ ID NO: 129018 - DNA, 351 bp, Zea mays
  Clone ID: MRT4577_49136C.1
gcggtgaacgtctccagccggcgccccgtggcggtggcccggcactggtacacgggcgagacgctggcgcggttcgccgtggtgctgggagggtgcaagttcgaggccaccgtcgcctgctccgagggggcggatgggcacgtcagcgaggtcagcctggccgtggaggacgccgacggcgccgccgtcagcggcgagggcacgctgcggctcctcgccgcggcgatggaggccccccggaaaggaggggcgcgggagccggaggaggcccggaggcggtacctcgacttcgtcaagcgcaagaaggggaggaaggagagcaaggcgcgccgcgaggcgctcgtggacctg

SEQ ID NO: 129019 - DNA, 396 bp, Zea mays
  Clone ID: MRT4577_49137C.1
attgggacaaccgctgctcttactcatcgaaggctttaacagaagatttatccatacatgtatgctcattgggggagacccagttgaccacctaaagcttggtggttacagattggctcaacatggggcaacgtaggaacccatgtttataggccacattttttggactaaaagcccgggttgggtggtaaccaaacgacaaccccgggatcggaaccgtttaaaaaggaaaaaacttaaaagccaattggccccaaaaacccgttttaattaataaggccttcattctttttcttggaaggatccaactttcttcaaggaaacaagaatagcccggttggaatcctttgcaaaagggggttgatttttgcccttaaagcaacgaaaaacgggttt

SEQ ID NO: 129020 - DNA, 353 bp, Zea mays
  unsure (1)..(353): unsure at all n locations
  Clone ID: MRT4577_49138C.1
gcagggaattcatgttttcatatctcaggggaataaccactttccaaaaagtcactacaccatggggtaaccgaaatccagtgactggggttatatgcctgaggggagtccctccttntaactccaacaacggggggggggggaagggcttctatgctcccctaccgggaaaactatacatatcctaaggggtaaaagacatgaaccttttaaaaacaacttgctactaattgatttaacccccacctccagtatatgcaaacccaaactggaaatcccatcaccgctcactctattaagggcccggcaatgatcaaatcaatgttgctatcagatgattcagggtcctattt

SEQ ID NO: 129021 - DNA, 358 bp, Zea mays
  Clone ID: MRT4577_49139C.1
tgtgctaatattaagtgtagtatctgttcttatcagtttaatatctgatatgggggccatgtgtccactttgatattaaattaattttttgtggggaagggtccactacagtggcttgccattgggtcccttatgtgtcgctctagcgttgcactattgcttgagcctggcgcaccccaaccaaatcaaaaaaataaaattgttaacaaagtgctaagttatctatttgttagattacatctattggatgggtactcttattctgattttgtttggcttttatcttatttttatgtctatttatatttgcatacatgggcttggtattagctataattactttccatcattcaccacc

SEQ ID NO: 129022 - DNA, 248 bp, Zea mays
  unsure (1)..(248): unsure at all n locations
  Clone ID: MRT4577_4913C.1
cgggtgacgagaggggtccctacgcccgcctttccaaatcctcgctcgctcgcgacgaccgccggcggcgccgccgaggctgacccgcctctgtccgatgcccccacgcgcgccgncgcgccggcggcctgctcccgccgcgggaggccccggcttcggcgactccgcgcgtgtgctgctcgcgctggccgcgctctacgccgccatgtcgctcctcgcctaccgcgtcatccacatgcgccacgtcg

SEQ ID NO: 129023 - DNA, 709 bp, Zea mays
  Clone ID: MRT4577_49140C.1
cataccttggctcttgatgtgcacttctaaatcacttggcacatatgaacttaaaacaatgtgttggccatctaatcacaaaaacatttatagaaatggctcaagggcacatttccctttcagaagtgtctaagggtctagctaacccaggcctaaccattcaccttggaagaatctatggttttggctaacccaggctaaaagggatacacgacctctgcaaagtgtaaaactggtatatcagtcgtgctcacagttaagagcgactcgggactctcacgtgattaatatatggaagtaaatttaacgagacatgcattgtattgtggatattttgtttatgttcatttatttaattgggatggtatgtacttgtacttaattaaaagctaatgcccaacctcagccatatttcttggtaagccttatactacccttattcttgcccccttgctgggcaataaccgtatgagagctcccccttgctataaacaatacccaggtcaagaacaagtatctctggaggaggactactatgataagttcgatgagatctagggtgtggagaagttatcttaatctggtttattttatttagttatttttgtaagatgtttcgtcatgtaataaagattgtgacattggtttatatcccaaaaaaaaaaaaaaaaaaaaaaaaaaaaaaactcgagagggggggccgtgtacc

SEQ ID NO: 129024 - DNA, 114 bp, Zea mays
  Clone ID: MRT4577_49141C.1
ggaaaggcaacgcacaagcagcagtcgcagcaaccgcacacaccagatattcgtgaagctcatgcacctggacgccgtcgcacagttgtggccagcagtggggagctcagctgt

SEQ ID NO: 129025 - DNA, 281 bp, Zea mays
  Clone ID: MRT4577_49142C.1
ggaaggaaaggaggtgttttaatatgagggggggcataatagtagggggggatggaacccgggttgggacttggactcttagatccccgaaggccatagccgattgtgtaaacaacgccatgattctgcatacgatcaaaggtttcaaaaaagtttgagtgacaaatgcggttctgtcaatgaactaccgtccataagcaatgacaaatacatcgaaggacttcgcagataagcttgcaatcacaagtgcatgctctcaaaagactgatcccttaagaact

SEQ ID NO: 129026 - DNA, 2376 bp, Zea mays
  Clone ID: MRT4577_49143C.1
aggcgaagaagaccaaccaaagccaagcgaccgggatctccctctcattccagaggactccgcgtcgccaggcccgcttcgcgtgcgacgccggcatatagggtttcgccggcgccggcgatggacccaccccccgtgagccccgatcgctgggggcccagtcagggcgctggcgtcgggccctccggcctccgccgatatggcctcaatttctccgcctccagcctcctccaggcccccatcgcggccctccttgagtactccggcgtagtccagtccggccctgccctgtcggcgcaccacccgtccgcggggccctcgtcgccgttgtccgcgtcggaggtcgatggtcttctctccgctgccgccgctggggacggggaggtttcgatccggattcagggcggcccaggcgacacggaggccacgggcgggccggatgcggggacctcgtccgaggatttgatcgaggcgaccgccggctctgaggttgaccaggcctccgctgcgggcaggggtgcaggcgctacggatgcggaggcaaacggtggcggggccggcacgtcggggaacgggggcggggaccgcgcgtaccagcgctacgacgtgcaccacgttgcgcggtggttcgaacagatattgccgttctcgctgcttctactcgtcgtcttcatacggcagcatcttcaaggtttctttgtcacaatttggattgctgcggtaatgttcaagtcgaacgatatattgaggaagcaaactgccttgaagggcgagagaaaaatatctgtactcattggtattacagtaatcttcatgattcatgtgtttggcgtatattggtggtacaggaatgatgatcttctcagacctttgttcatgcttcctccaaaagatataccaccattctggcatgcgatttttgtcatcatggtcaacgatacaatggttcgccaagctgcaatggctgtcaagtgcatgctgcttctgtactacaagaactgcagaggtcgtaactaccgtagacagggccaaatgttaacccttgtggagtaccttctgcttctttatcgtgctttgttgccaacttctgtttggtatcgtttctttctgaacaaggaatatgggagtctcttctcatctttaaccactggactgtatctgactttcaagttgacttcggtagttgaaaaggttcagtcattcttggccgcggtgaaagcactgtcacgtaaagatgtgcattatgggtcttatgcgactgcagaacaggtacttgctgctggtgatatgtgtgccatttgccaggagaagatgcatgtgcctgttctccttcgctgtaaacatattttctgtgaagactgtgtttccgaatggttcgagcgagagcggacttgccccttgtgcagagcattggtaaaacctgctgatatccggtcatttggtgatggttctacaagtctattcttccagttgttctagactgcaagcggtaaaatcctaacataacaatggacgagctattgcatgaaaactcgagtggaggtccttttaacgccatcatgtgaaaccatcttccgcaatgttgagatcaatgtgagaaggttcatgacagtcacgacagtgcagtcgttatttgtttatatattcaaccaaatagtttacagagctttttagttgcaacagaggcaaaatgtttccagcagactgctttcagagcctttagaactctgctggacaaacaatttgatcgttgaggtctgctgagccgacaaccgtatgcctcctgtaaaattctggtatttttttttaattttttttttgcatatgtgggcttacgtgggtgtaactgaaatttgaaagtaccgcttgcacagcaagaattgccggtgggggttgaaagtggtaaatgaatgtaactgtaaagcgttgttacatgaagacaaaaatttccacccgttgcaacatagtaaatgctgacagacgcgacttgtgtacttttttattaaaatataaaaaattctaaaaaaagtgctttctttttgacacacaacagtgcacttgctgctggtgatatgtgtgccatttgccaggagaagatgcatgtgcctgctctccttagctggaaacatattttctgtgaagactgtgtttccgaatgggccttatcattttgtgaagaagcatttggatcgcgattcattaccacccctacgtgtgagttatcttaggacaaggcgcttcatgggggagcgaggggtgcttgacaggagtgaggtcaagccttgctaccctggagctgagagtgaaagagataaatactggcaagaccaactttgtcttgctttatttatggttcgagcgagagcggacttgccc

SEQ ID NO: 129027 - DNA, 1367 bp, Zea mays
  Clone ID: MRT4577_49144C.1
aattcattgtcattaattttttgaaaacattcttttagaaataaacaaaaatatttgaatgttggactatagctgatataacgctatgcacattgatgtataaccatgagttactttcagatacaatggttcgccaagctgcaatggctgtcaagtgcatgctgcttctgtactacaagaactgcagaggtcgtaactaccgtagacagggccaaatgttaacccttgtggagtaccttctgcttctttatcgtgctttgttgccaacttctgtttggtatcgtttctttctgaacaaggaatatgggagtctcttctcatctttaaccactggactgtatctgactttcaagttgacttcggtagttgaaaaggttcagtcattcttggccgcggtgaaagcactgtcacgtaaagatgtgcattatgggtcttatgcgactgcagaacagagttttagagctcatgctcgtctttcaactcaagagctagatttaggactaccactaggaccggtgctgggaggaagacatggagctcccaacatcggtgtaggcgagcgcgaagaggaatattctgaagcaggtatagagaggtcatacgtggagaatgggcccagagccggagttgtcgagggccgtgatggtgttggaacggagccgagttcccttagtgagctcctcaagaaggtcattgcgaaccttgtcaatgccatcacattttggatatcttggagcacgctggcatgctggactcttaagccatgtgcgacatcggtggacacacatgccaaggtctttggtgacggtgccactctcagcgacaccactgcctatcatagtcttgacaacgctcttaagtatctcaccttcacttcacttgacctgacatcacatatggtgttcaataggtctctctacatgaacgatcctcgggagtcgcacctgagcatggtcaagcggattcttcggtacttgctgctggtgatatgtgtgccatttgccaggagaagatgcatgtgcctgttctccttcgctgtaaacatattttctgtgaagactgtgtttccgaatgaggtacaatgctcacgtgcatattttaaatctgggatattcatctcacattcaaaggcagcatccattttttacgaagaaccccttccaccaaaattttacgaggaaccccttatgggtgttgtcattgaatggccttatcattttgtgaagaagcatttggatcgcgattcattaccacccctacgtgtgagttatcttaggacaaggtgcttcatgggggagcgaggggtgcttgacaggagtgaggtcaagccttgctaccctggagctgagagtgaaagagataaataa

SEQ ID NO: 129028 - DNA, 603 bp, Zea mays
  unsure (1)..(603): unsure at all n locations
  Clone ID: MRT4577_49145C.1
atacgagccggccgggaactccaacttgagaacgccattatagctttcttgatcagccgcgaacacacaatgagaaacttagccgaggatcctgcgttccaggcaacaaactggcctgaattagtcacttacgtatctaatcgccatgacacgtacccctttatcgacccaacaaaggcggacctcacgggaaagtcagtccttgttacaggagcatcgaaaggaatcggaaaggcggnttcaatccgttttgccatgggagagaggtcctaatatatgctcccggcccctgcgtcatccccgcagtcactggacccgtggccgctgcctatactccctaggccgggtcggtggagatctgtatccccgagctcaaggacgacctctccagcgcgcacgatgcttgcagggacgccccccgagctcaagagcaactcgaatcccacggtacccccagcggactgtgctcctcatacgctcgcgctaccgcccccgctccgaaaaccgccactggacctcgccacaccaccaactcccgtccagacacagccacaacgcaccgccacagagcccacccccagcatccctacccccagcaacgtc

SEQ ID NO: 129029 - DNA, 783 bp, Zea mays
  Clone ID: MRT4577_49146C.1
atggacccaccccccgtgagccccgatcgctgggggcccagtcagggcgctggcgtcgggccctccggcctccgccgatatggcctcaatttctccgcctccagcctcctccaggcccccatcgcggccctccttgagtactccggcgtagtccagtccggccctgccctggcggcgcaccacccgtccgcggggccctcgtcgccgttgtcggcgtcggaggtcgatggtcttctctccgctgccgccgctggggacggggaggtttcgatccggattcagggcggcccaggcgacacggaggccacgggcgggccggatgcggggacctcgtccgaggatttgatcgaggcgaccgccggctctgaggttgaccaggcctccgctgcgggcaggggtgcaggcgctacggatgcggaggcaaacggtggcggggccggcacgtcggggaacgggggcggggaccgcgcgtaccagcgctacgacgtgcaccacgttgcgcggtggttcgaacagatattgccgttctcgctgcttctactcgtcgtcttcatacggcagcatcttcaagatattgccgttcttgctgcttctactcgttgccttcatacggcagcattccaaggtttgcttcatatctctcgttctaaatgtgcgtatgctactactggaacgttgtgcacttgtgcggacctaactgtggcaactcaagttgtcaacaagtgctgcattggttgggcacctaatgctgttatactttatgtttgttgtgctgatctttga

SEQ ID NO: 129030 - DNA, 269 bp, Zea mays
  Clone ID: MRT4577_49147C.1
ggacacacaaaccacaaatgtttattagacgaccacattcataggggtacaccaaagggccccaaacgacgcaaattcccaggtacaggagcaggttaaatgaaccatggtttactgcacaccggggggggggagcaccagggggggagggctctccttttggatgttagaaactgttaggggggggctattcttaaaattgttggcggagaaaaataaacccttctggtttggggggatgccctttttgccctggaaatttgccttaa

SEQ ID NO: 129031 - DNA, 508 bp, Zea mays
  Clone ID: MRT4577_49148C.1
ggcgtaggcccatgcgttgttgttgactgggtcagcgatgtggtcagcgaggttctcgagcgggcccttgccggcagcttcgaccccctcggcctggccgacgaccccgaggccttcgccgagctcaaggtgaaggagctcaagaacggccgcctcgccatgttttccattttcgacttcttcgacgacgccatcagtcgaccgacgacgcatacgcacccacaaccacccccattgtcacgatctacagcaaagcctgcgagatgcgcgagaccactagttgataggccattaccacttgcactgcgaagctacagatctccgacgtcgcggctactccactgccgtagacgaacctcgctcaccgcaaaatccgcaacccagtgcgctgtcatgtcggacgatatgtctgactatgaccccctgctccagaccgatcatcgcgctggtgtatcatactggcacgaactcaacgcctgtcctacttaccacagtaatctgcctcatc

SEQ ID NO: 129032 - DNA, 469 bp, Zea mays
  unsure (1)..(469): unsure at all n locations
  Clone ID: MRT4577_49149C.1
gtgnactcttgtaggtcgcacctgtcaacggacaacatttctctgctgttcagggtggccagacatgtaggaccgggagcatcagtgggagtcaattggacccctgttcacatgttgaaccaacaggtcaagtgagtggcctatccttgtggctcctataatacggctcataaacatatggtcgtaaggtccagaataccggatatcatgagatgagcaatggtgattatccatactctcacactgtttgctgcgcatgatacagagccatcacatgtagccactcagatctaagggatgtgcctgttgaccctgaagaccgtcaaggatcatatttatacctgatattctcagagatactggatattatcccacacctgttcagtctgtacatctatggaacatagaggacatacctgtctctacccaagtgcgtcgagctcaattgtagatgcacttgtattatatc

SEQ ID NO: 129033 - DNA, 329 bp, Zea mays
  unsure (1)..(329): unsure at all n locations
  Clone ID: MRT4577_4914C.1
accttattttttttttttttttatttttcatatgtgtgtaattttagaaattttcgcgggaaatcacaaggcgcacagaaacaaaattaaaccaaccaagcaaacaagagaaatggatgatgctccatagatatgggagaattacaatattaaaaacaaaaaaggatgtaccggcgaggggtacaaaaaaaggcacgccgccggaaattaacgaatgggaaaacatactatggacgaacagaaattnttaatccatccatccaaccatacatgaccgggatctagcttaaaattcctagggaggggctggaaaaaatgagtagctgggg

SEQ ID NO: 129034 - DNA, 164 bp, Zea mays
  unsure (1)..(164): unsure at all n locations
  Clone ID: MRT4577_49150C.1
gctctcgctccgctgctcgcctcgggtcaaacccttttcaggagttgatttatccccgcagccatgagtaagttgcaaactgagtctgtgagggatgccatctcccagattgttggggatgccaaggagaagaataggaaggtnnactaaaactggggaactaa

SEQ ID NO: 129035 - DNA, 798 bp, Zea mays
  Clone ID: MRT4577_49151C.1
atgggcatgggtgagggggagagagaagagtggtcagatctggatcggagggctgagattagatccgctctgattaaacctaaaccttcagatctcggacggacgcctgagatccaacaaccggggaccagacatgagcgcggtggcgccgctcggtcccgcggcaagggctcgccggagacgagggggcgaccacggtggggctctaggggcttagggaaaggaaccggcacgggggcaccagaggatacagaccacggtgggaaaggtcccgcggcggcgcaactaactccggtgagcaattgcgcgggcactggggtgatacttggcgaaataaaggcatggaaaggttgctcacctcgagtgcgaactccaggatgcttggagaacggagggggtgcagtggagcctctggtcgacggcggcgggctccggctgcgtaagaaacgccccggtgagcgcggaccaggcaaaccagagaggggaagggcaaaccagagggtgtcccaagtagctgatggcgaggcgcaactcaccgaggcaacagacggggcgcgggctcgacgacgatcacagaacggacggtggtcgacggcttcaaaatgccgaaggtccgaaaacaccttccctgagctcgttgtcgagaaacgattaagatattccaagcggcagatggcccagcgctcagcgggtatgagcgatctgtcgattcaccttccagacgctgagtggcccactattcagcgagtgcgggcgatttggcggttcaccttcccacctgcagcactatataaatag

SEQ ID NO: 129036 - DNA, 297 bp, Zea mays
  Clone ID: MRT4577_49152C.1
gcagggcaggcagcacgtggtggatcacgccacgtgctccaggattgactggtggggcttcagggtgaagaaaaccatggtgtgcgctgggggcgatggcgtcatctcagcctgcaatggggactccggtggcccactgaactgccagttggagaacggttcctgggaggtgtttggcatcgtcagctttggctcacggcggggctgcaacacccgcaagaagccggtagtctacacccgggtgtccgcctacatcgactggatcaacgagagaatgcagctgtgatttgttgctgg

SEQ ID NO: 129037 - DNA, 355 bp, Zea mays
  Clone ID: MRT4577_49153C.1
ggctgctgcgcctgctggtgccgccgcggcgttactgcggggacccacccgtccgccgacgcgtggagcgtttcgggccctcatactgatgactgaggatggcttgatggctacgaccaatatggtgtatatggctctggcatggagcggctgctgtgatcttaatcaagcatatcctagagaagtctacgtcatgcgcatcttctggggaggcgcttttggtgtcaggtgggctcgcaccatacggtgccgataccgtgcgacatacactttgaaagatggagcgctgcatgtcatcaaaagcattcattcacacacctcagactcgaagccatatgaccgcagttattcaggg

SEQ ID NO: 129038 - DNA, 1116 bp, Zea mays
  Clone ID: MRT4577_49154C.1
atgcccagcgacagcgccgaccccacctgcacgcaggtcatcgcggccgacgcgggcgccaacagcaacacctggggcacggctaggaccaccgcctgcgttgtcttcttgttgtcgttcatcagaagagccatcgtcttcttgagtggaggatggccgtgtgctggttctggttctagtggcaacctttttttgttttgttttcttgcttgcccgttggccgttggtccaggcaagggactgaaactaaccggatgcattggtcaccagtgcagggtaaagctgatcaacattgtcctacttaccatgataactacattattaactattaagaaatgggagaacaggctcatctctgttgttaagcgccaggaaacaaggacttcagatgctacccatgcaaggaattgttacctagaatggtattggagaattccacgtcgttggatctccactccagttcaatatccaatcatatcccatcagttatctgggcatactgataaagttctggttaatttggtaaatacagttgagggacgaattagaacgttattactaggtgaaattgatgcaaaaatgatgcagcagtcacttatttatattgatttgtacatcactgttaaaagggtggatgctaagcaggttgctctcacatcatgtccttatgaatgtagttacttaaacctcaagagaaagggcatgcttatgtcgtcaaatgttgtgcagattatacaaagtggtgttccaactggaacaagaattggaagtgctaaatcagacacagtctctaaatattgtggctcctactcaagctactgttgcaaagatggtacaggtggtactcctgattcagcacttcccataacagaagtaaatcttcaggacattattagcacccctgtagaggatgctatgactggtattatgaatacatccacagaggatgctacaccaaaggatatttcagattcagatgtgaaggatggttatgccttcatagaggccgtggaagtgcaggagactgttgtcaggagactgttgtatctatggacaacatcaaaatacccaagaaggttacagctgaattgcaggagtgtgccggtgcacctttga

SEQ ID NO: 129039 - DNA, 381 bp, Zea mays
  Clone ID: MRT4577_49155C.1
tcccattcttgcaccggggtcattggactatgattactgaaccagtgcgaggtaggctctgtgataaacctccaatttatgacataaatgctcctgacttgtacattccattaatggcatttggtacctatgttgttcttgctggcatctcattgggtctttgtggaaagtttagtcctgaagctttgaactggttatttatcaagggattggttggttggtttatgcaaacagcactgctttaagttactttactttcattacgcaatgggtaagcacctttattggacattatagcttacgcctgtttcacttttcctggcttgtgtttggctgtttctggaagaataatatgtgattacttctactactttctgatgc

SEQ ID NO: 129040 - DNA, 594 bp, Zea mays
  Clone ID: MRT4577_49156C.1
cattgggtacctcgaggccggccgggtaacacttccgttcacctccctgtgacacttcgtgtcggcggcgcaatctccttctctctgtgacatattgcagatcatttaacataaatggctgactcataggacattcagcccctagactgagtagaatgtaactggatatggtcaacgctgccttctgctgctagatgatgctccccgtggtgctttcccaagaatatatgcccgtccacgtcacactgtggacatggattggcatgaaacagaaagatgcttatgatgctgatgaggccctatcctagaggggaatcctgactttgaagtatcccatctagcatgccatctcaagcaactggcatgacgtggaaaagatctggcatacacaccttctataatgagcttcgtgtagcaccataagagcacccagctcttcttactgatgctcctcttaaccctaaggctatcatgaaacagatgacacatatcatgattgaaactgtcagtgtacctgatacgtatgaggctattcaagactgcctttcactttatgctagtgagcggaccactgctattgtcctggattctgca

SEQ ID NO: 129041 - DNA, 604 bp, Zea mays
  Clone ID: MRT4577_49157C.1
acacataacagcttgaagactgttgcatgtatttttttttttttttttttttttttttttttttttttttttttttttttttttttttttttttttttttttttttttccccacacccaaaaaaaaaaaaggggagaaaaccgggcccaccccccgggggtggggttcaacatggggaaaggtaaaaaagccaaaaaaaaaaaaccaggggggggggggcaaaaaaaaaagggggggaaaaaaaaaccggggggggaaaatttcctaacaaaaaagggggccccaaaagggggaaaaattggggggggaaaaaaaaggaaaacgggggcgggggcaacggggggggcaaaaaaggaaaaagccgccaacagccccctttaagggggggggggggccccccgcccaaacttgggccggaagggccgaaaaagccccggcaaaggccaggccgaaaaatcccaaggcgcaaaaaaggggggcccttcaaatgggtccgggcccccaagaaaaagggaaattcccccaaggtgggggaaaccaacgtggacccctccaaggaaaaaccaagagcaggggggggccccccgggagggggggccccggc

SEQ ID NO: 129042 - DNA, 439 bp, Zea mays
  Clone ID: MRT4577_49158C.1
agcagtggtaacaacgcagagtactttttttttttttttttttttttttttcctttttttttttttttttttttttttttttatttgatcattttacaacgggagggtagttttacaaaatcattggaggaagaaacacggggaaggaaaacaaagaggaatacaaggggagggggggtaaagcaacaaaaagggacattccaagaaataagggaagggctttatattaaaattttgggcttacagaaggcctgggggctacaaaagatcacaggggggggaaaaaaaaaaattttggggacaaaaaaaggtacaagaaggggaagggtacaaaaatacgggtacgggggggtatgagcatagggctaccaaacaggacaattaaagaagggggttacagtgggaaaaaaaacaggggatcagatgaaggttgatttaa

SEQ ID NO: 129043 - DNA, 235 bp, Zea mays
  unsure (1)..(235): unsure at all n locations
  Clone ID: MRT4577_49159C.1
ctatcctggtcccaagtgcaggatagcggtcgacacgctcaactacttgggcgcggcgacttgctattagtggtggagactaganagctcctatataacttattatacgtacttccacaaataaaaatcataaaccgtagacgaacaaaactaaaatccactcactacgcccctgacattgcacgacttagtcctcagctccaatcacatagcgtgctgttcactcacagctcat

SEQ ID NO: 129044 - DNA, 926 bp, Zea mays
  Clone ID: MRT4577_4915C.1
cattgggtacctcgaggccggccgggcggactccctctgcaacctccggcacctctcactattcaacctcatggtcacctccgtgtcgggccccatcccggcgtgcctctcccgcaccaacctcacctccgccagcttcttccgcagcaagctcaacggcatcatccccgggtcgctctggaagctcccgtacttcacctacttcaacgccgcctacaacaacctcgtcgggcccatcccgccgctgctggtgcacggcggcacgcccgaccggccgctgggcctgatgctggacggcaaccggctcagcgggcctatcccctggacgttcgcgctcgagaggcacctgctgcagttcagggtggccaacaacaagctcaccggcgacccgtcgttcctcttcgggcggcgcaagacggtgaccggcaccatcgacctgtccgggaacaatttccggttcaacctcaccggcgtagagatgcccatgcagctgtctttcctgaacctgagccacaaccggatctacggcggcgtgccggtgtcgctccgggacaccagggtggcggtgctggacctcagctacaacgatctctgcgggaagatacctaccggcgggcatatggtgcagttcaaggcggcggcgtacgagcacaacaagtgcctctgtgggacaccgctgccaccctgcgcgaacggccgctgagatgaagatgtcccttagatcctctgggctgtgggattaacatgcattagaggctaagataaataggtaatgttggtcccctcggtaaaaatagtaccactgttatcttttagttaccagtcaaatctgtgtctgggcaaatccaataggtttggcccaattaatcttcgtaatggtgtacgtctgaagcaaataatggaaaagcggtggcgtggttattttt

SEQ ID NO: 129045 - DNA, 641 bp, Zea mays
  Clone ID: MRT4577_49160C.1
ccggccgggacagatctcgatggcgtcgcgcgctctacctgccgcccgatggaaatgattgctcaagatgcatccgctcaagattcaagtgagtcctgtgtgtgtgccgtgtgacattggagaggatcataccgatcgcgtgtgctgttgatcaccgtcggaatgctggattgcgcaaaagaaataccagaaagactccttggcctgacacatgttcaccgacccccgagcctgccaagtgttcccaacccgagctacccacatgtcagccctagcgaactgctgaaatttgcttcggagcttatctctctcatacccgcttacttcgaatcgatcatgctcaatactgtatacaacaacactctgatcttcgttgtggtacatcaagatgacaacaagagtatgtccgctgacgacaagaacatgtatgtcctccacaccaagaacgacaacgccttgatcaggactgatgccgagacaaaggcttacaagaggctgactcacgtatactatgctcttgatagtttctatcaaaatccatatcatctacgtgctgaatcatgcatccgtggatctctagaacaatgtggagtggactacgactatgtgatgcgagacctatgtcactatggatgtcaatc

SEQ ID NO: 129046 - DNA, 476 bp, Zea mays
  unsure (1)..(476): unsure at all n locations
  Clone ID: MRT4577_49161C.1
cccacgcgtccgcccacgcgtccgaggccatcggcggcggcggatcggccacacctcaggctcagccgcactccctccgtccctcgacctgtgacctgcccacccaccgccgccagcctcgaaccgtcgaacggccagccagctagccgcacggccagccagcccgcagcatggccagctagacggcacccagccagccagccgcacggacagccagcccgcagcggaggagcccctgtccgcccggcgccccggccaccggccaccgctagccaaacaccgaagcacgtcgccgtgaaggctcggcaacctggcggagcagacttgttcatctgttactgcgattaatgtgttcaccactgaaaagtgaaaactnggcagtagttgcttctgcgattaatgtgacaatggcaacatgatcatttgcttaaagagcgatggatgctngtattgatgaataaatctcctattaacat

SEQ ID NO: 129047 - DNA, 341 bp, Zea mays
  Clone ID: MRT4577_49163C.1
cccacgcgtccgcggacgcgtgggatcttggccgggtgaacagcttaagaagacaacatggacttgatgaacgggtattgccagaagattttggaacggttgcggcagggctttttatgctacaacttatttataatgcgtatgggctgggggaaccattataataaggcaaatggtttgctatattgggaacctagatatggagaacaactttaatggcggtgagagggtcttttgtcgtgacagtattatattgatagatcaagatcatacgtttaccgtgtggcgatgtgccagactttgtatacccaagtagctaactggatggaacgatgtgtagc

SEQ ID NO: 129048 - DNA, 625 bp, Zea mays
  Clone ID: MRT4577_49164C.1
ggtaccctcggagtcagcctttgtctcctacactagggcttgttgcattcttagccgacgcactgtccatagctgtgctcctgagccgatgagtgagaagaaaagatggcccgacaagagtgacgatgcgcgccggctataggcatagagcttgggacgacctactgagtgagtctaacgtcacattaatacgagcgcgctcagagctcgctcatccagcagggaaacctgaccacccccttgcactaatgaatcacccaatgcgcgcggagaggcggataggctatcgagagctcttccgcttcctacgctcactgacatcgtgtgcgttgccagagtgggctatggggagcaggatcagctgactcaaaggcgcagagagagatatacacagaatcatggaatgacacatgagagaccatggaaacaacagggcatgatagggccaacaacggtgaagaggaccagttggtggcggaatagataggcttctgcctcctaacaagaatcacaaagattgatgcatcagaccagaggtggcacaaacaagacaggtctatgaacataccactggctacttcaatgactgatagatggagcgctcaaatgatgctaccctgactgt

SEQ ID NO: 129049 - DNA, 307 bp, Zea mays
  Clone ID: MRT4577_49165C.1
tcggccggggatctttcgggcatgaggatggactttgctgatttgagatgaaggcctgatttcacgaggaagatttacgttgttgttgccctcacggtcatgtgcataatcatgcagttcagcatacaagggcaaaagaaccttatggggccgcacttcagtatttgaaaatgttttgtatagttctataaattagtatcggtagcatagtcttacaattttatgcaaaccagtaattagtttcgcaggcagtctgtaacaattatcaaaagatcacctttgcaaaaaaaaaaaaaaaaaagcggcc

SEQ ID NO: 129050 - DNA, 403 bp, Zea mays
  Clone ID: MRT4577_49166C.1
ctttttggctggctgataatgggcaccatatattgatgaataaccaaaataaagaacagaatatgaaacaatgacatagaaacagttacttttcatgcattttagggatagaacagataacaatactacttttatcccagtttctgaaagtataaaaacaccgacaaatttctttacgtgaaaatgacacttacaccatatacttccattgagaaatcataatagaatgcattaaacacttgaagccttagcaggctcatcatcatcatcttcaatgtcccaactcaagtcttcgtcttcttctgcagcactaagccgcttccgcaaatcaactttgcttgtgccaccactctgcattgttttcttttcatcaatactgctaagatcctcaatgtcatcccac

SEQ ID NO: 129051 - DNA, 1958 bp, Zea mays
  Clone ID: MRT4577_49167C.1
gaatgggtacgacatgagcacgacggctgagctcctcttcccccgcgcgcggcaagctttcagcgcaatgtgaactgtggaccttccctccccgcgtcctcctcctctccgtcgtcctcctcgctgcccccgccgccggcgccggcactggttcggagttcgacgacggcacctcgcccaagttccccggatgcgacaacacgctgcagaaggtgaaagtgacgtactgggtggacggcgacgagcggagcagccttacggggatcagcgcgaggttcggcgcggtcctgccggacgcggcgcccgacgacgagaagcagcgggccgccgtgcccagccccgagagcggctgcgccaagtcgtcgacgccgctcgcgggctccgtcgccgtggctgtgcgcggggagtgcacgttcatcgagaaggccaaggcggccgaggccggcggcgccgtggcgttgctcctcgtcaacgacgaggacgacctgcagaggatggtctgctccgacaaggactcgccgcccaacatcggcatccccgtcgtcatggtgtccaagtccgccggcgacaaggtgcagtcggccatcggggacgggtccaaggtcgacattctcatgtacgcgccgctgaagccgtccttcgatggcgccatacctttcctctggatgatggccgtcggcacggtggcctgcgcttccgtgtggactgtcgtcgtcgtcggagaagagcctaccaagcagggcgacgtctccctgggtggggaggagaaccccgacgccgaggtcgtggagctgcaagccaatacggcgctcgtgttcatcgtcacgtcctcgctcgtccttctcttcctcttcttcttcaactccaactggtccgcctggctcctggtttgcctcttctgcctcgggagtctccagggtatggaattcgtggtatcttctctcgttgtcagactatgccagcggtgtcgcgaggccaaagtgaagcttcctgctctaggaaacgtgaaggtggtcacgctagtggtcctgccgctggccttcatcttcgccgtcacctgggctgcacaccaggactcgccggttgcttgggttggtcagaacctcatgggcatctgcatgatgattctagtactgcaagtggtgcacatgccaaatataaaagttgcgtcggcgctccttgtctcggcctttttctacgacattttctgggtcttcatatcacccctcatattcaagaaaagcgtcatgatcacagttgctcgtggcagcgatgacgggccgagcctccccatggtactgaagatgccgaaggagttcgattcgtggaatgggtacgacatgattgggttcggggacattctcttccccggactgcttgttgctttcagtttcagatatgacagaacacacggcaaggacttgacagatggatacttcctctgcttaatgattggttatgccttcggattgtcatgcacatacgttggcttgtacctgatgaacagcgggcagccagctctgctctaccttgttccttcaacactaggagttatcgtcctgcttggagcgaggaggggggagctcggtcagctctggaacgccaaggtgtagcctgcctgggaggcccgtgcatatagctgatatgatgacactggttgcaggcttcaaatgggctaatttggtttagctagacatgcatctgatggtttttggtgaaattatgccaagcatcagcatgatccatggttaggaaatttctttgttattagagtacacaacacacaccacacatacgaaggctggttggtttgttactagcctgctgctgtagggcacactgcacgtcaaaatccctagcgtgatgcaaatttcagcaaaatttatagacagatatgcatcaataatacctactatatcaaagtagtttttattgagccaaaaagggaaaaagggggg

SEQ ID NO: 129052 - DNA, 287 bp, Zea mays
  Clone ID: MRT4577_49168C.1
ccttctactgggcatgggaacatttattattgtactcttccacacaaaaatcataacaattgacgaaccaaaataaccttctccttcattgaaaagccatcccaccacctatacaatatataccgaaactaactaatccttccaacttgctttttatccccccaacattatcctacaccacttaacaaaacataaaggagaatatatccctatcggactatctaacccaatcctaacagtgtcacgatcttccgaaagttcttatcctcctcatatgttttcatcag

SEQ ID NO: 129053 - DNA, 367 bp, Zea mays
  Clone ID: MRT4577_49169C.1
gggacacgcgcaccgctccggccatgtcctggaggcagcagtgaaccggacagaggaagagatagagagaagtagagaacgcccgccacggcgccgtcaacgccacacccggccgaaccgaaaccgagactgcatcctacttcgcggcgcgccgagatgagcggcatgagcctcttccatcgtctgcctcctgtcgcggaggctgaggaccgctactacgtgtatgcagcacacccggacccacagcggcagggcgtgctgacgctcttcgtcgcggagctccgcgacgacgtgaagcgccgatagattcacatcctattataccaccagcacgtcttccatcactgtctactcgattacacaggac

SEQ ID NO: 129054 - DNA, 205 bp, Zea mays
  Clone ID: MRT4577_4916C.1
attgttcaggtgtttttttgtaacctggtcagtacttctttagcacaaactttttagctttttggaacccactgggctttacctaccaaagtcgcttcggaaacactaatccacgaggcctgaaaactcgcccccgttgcacacgaatacctgtacagatccacgggcgccgggaccatgtaccaaaaaccccgggcccgcgttt

SEQ ID NO: 129055 - DNA, 500 bp, Zea mays
  Clone ID: MRT4577_49170C.1
ccacccccccgggccgcccctaaagaggggcgaaccccacaccacgggccgccactactaggggcccccacctcgccaccaagcggggagaaatcaaggtaatagctgcctccgggaaaaaattgtcccccgccaaaaactccccacaaaatacccgccggaaaaaaaaagggaaaacccgggggcgcctaaggggggaacccaccaacaataagggggggccccccaccggccgtttaccagggaaaaaacccggcccgccagcttcaataaagaaccccccaccccccgggaagaggccggccgaaaaagggcccctcctccgcttcccccaaaaacaacttgctgcccaaggtccggcggcggcgggcagcggtatcaccccaaaaaaaggcggtactgcggttctccacaaaagggggggacaccccaaaaaacaacatggcaaaaaaacgccaacaaaccgccaaccacccaaaagccgccgcgctggcggcgtt

SEQ ID NO: 129056 - DNA, 863 bp, Zea mays
  unsure (1)..(863): unsure at all n locations
  Clone ID: MRT4577_49171C.1
cattgggtacctcgaggccggccgggaaagcgtcctcctcccgcgtgctctccactcccagaccccggggactacaagggcactgggctaggtccgttggcaacagccgccacactgctccgctctgctctctggaggcattgcctgcctcgagttgtcatggcggcagcggggacgcagctgggtcggctccttgttggcggcctctggctcctggccgcgttgctgcagcggggcgctgcggcggcagtggccgccgtggatgggcggcgcgccatcgcagcgactggggagaacttcgtgtgcgcgacattggactggtggccgccggacaagtgcgactatggcacctgcccctggggccgcgccggcctgctcaacctggatctctccaacaaggtcctcctcaacgccgtcagagccttctcgccgccgctgatgctccgcctgggagggtcgctgcaggacaaggtggtgtacggcaccgcggacctcgggcggccgtgcgcgccgttcgccaagaacgcgtcggagatgcacggcttcacgcagggctgcctgaccctgcgcaggtgggacgagctcaacgccttcttccagaaatctggtgccaggatcgtgttcgggatcaacgcgctaaatggccgtgttccgttgccggatggatccatgggagggccatgggattacaccaatgcggcgtcactgattcggtacaccgcanacaagggctaccgaatcatgggatgggagcttggtaatgaactcagtggcactggagtncgagctcgagttggtgcggaacattacgggtgcagatgtgatcgccctanaacactagtcgacgacatatacgcaagcca

SEQ ID NO: 129057 - DNA, 185 bp, Zea mays
  Clone ID: MRT4577_49172C.1
tcgcaactggaatgtgacgtcttatgatatctagtagtttacatgaatgcaaagctttcctgcggggttcccctgccttgcggggagtgtgtccaggatgactttcgtcgtaaactattcaaaagattgatgtatatgatcacagtttttaccaatgtattagtattatttcaccattttgtatt

SEQ ID NO: 129058 - DNA, 461 bp, Zea mays
  unsure (1)..(461): unsure at all n locations
  Clone ID: MRT4577_49173C.1
gcttctccggnacgcatagcaccctccacctgcggctccgtttcacgggtgacctgcttaattttgtgaagaccctcacgtgcgaaagcacaactaccactgcaggtagttgtcttcggaataccataacccaatgtgagggtcgctatgccataaccagataggcatcaggccgtaccagaacattctaagttctttcgcgagtcctgtgggaggtgggctgacaataggaaagcacatcaaatttgggggtacaacgactgagctaaggctaaggctgatggggcttacaccatgaacactgataacactgacagcgacaagaataccatccgacgtctgaagcagcaaccccattcatgatgtaaatgtcaatatcattgacattgactgcatttgctcttaccaggcatgtttgagcttccttatctagcggataagggatatccctgctctggctg

SEQ ID NO: 129059 - DNA, 578 bp, Zea mays
  Clone ID: MRT4577_49174C.1
gccactcgcaggcgtgatggaaggaggcacgcgaggccggacatgctcgacctcaaaaacaaccactggtggtccaagtatgcatacagtaccagagcgtttggaagcctgcaccaccatcatattggatagtgtctgatctacaagccgtcgccaacttatgacagtacccaccctgtggttaccatcacaatcaccctgccgtaaaccatgctcccatgcctgttccggtcttcgaaagtacaagatgttggaaacaaccccttaagacattaccgcgctcaattgccacccacgttcacgccagcaacaaaatgtccgtgctggagatcctgttcaccctctactgccagtacgagtacctgaaccagagagacagccaggcatggacctacaacgcctgggaggagaacgccttcaagcctgtcccgatgatgatcatcgagatcgagatacacgagccggtctacaacatagaccggtactctaagaaccgactacagtgcagatgaggtcgattacacactactattacgcattacatgctgcaaaggcaataataatgacgatgcccccaa

SEQ ID NO: 129060 - DNA, 343 bp, Zea mays
  Clone ID: MRT4577_49175C.1
gaactccctctccgggcccatcccgccgcagctcggccagctgcgcaactgcagacggtgctgctgtggcagaaccagctcgtcggcactatcccgccggagatcgccaactgcaaggacctcgtgctcatcgacctgtcgctcaactcgctcacggggcccatcccgagcagcttcggcacgctgccgaacctgcagcagctgcagctcagcaccaacaagctcaccggcgtcatcccgccggagctctccaactgcacgtcgctgaccgacgtcgagggggacaacaacgagctgtccggggagatcgggatagacttatcgcggctgggcaacctgaccc

SEQ ID NO: 129061 - DNA, 175 bp, Zea mays
  Clone ID: MRT4577_49176C.1
gatggagagggtactcgttaagctagctgagtctattggactgttcgaggctcaagacaatgctcacagggagtgggacgagaaattcagcctgagtcgggattcacttatggaccacactttgctttttcagatatgaaaccttctacataatacgaccttcttacctctcgac

SEQ ID NO: 129062 - DNA, 660 bp, Zea mays
  unsure (1)..(660): unsure at all n locations
  Clone ID: MRT4577_49177C.1
ccggcgcccgcctttagccactcgtccattttcagctgccgcccactcccctctctctcaccccgtcaaagaagaggagacgagaaagcgaagtcaatcaaatccatggggatcgtggaggaggcacacaacctgcgggttgtcggggaggggaagcgcggagtgatcgtcctggcgcacggcttcggtacggaccagtcggtgtggaagcacctggtgccgcacctcgtcgccgactaccgcgtggtcctcttcgacaccatgggcgccgggccgaccaacccagactacttcgatttttcccgctacgccacgctcgagggatatgcgctcgatctgcttgccatcctggaggagctcgggatcgcctcctgcatctacgtcggccactctgtctccgccgtaatcggcgtgctcgcctccatctcccgtcccgacctcttctccaagcttgtactcctctccgcttctcccaggtacctcaatgatgtggattactatgggggatttgagcaggaggagcttgatgagctctttgaagcgatgagatcaaactataaggcctggtgctcaggttttgcaccactctgtgttggaggggacctggaatcagtgtcagttcaggagttcagccgaactctcttncacattcgcccagac

SEQ ID NO: 129063 - DNA, 331 bp, Zea mays
  unsure (1)..(331): unsure at all n locations
  Clone ID: MRT4577_49178C.1
aaatnccggggccgaccacacccttccggttgtgaccaatcgccactttccaattacttccgttccggagggaatcatgaaggaggggcggcaactgaaagcgggggcgttcggttttccgcccccggtccacccggggcccacccccttggggtggatcggcatcggcttaatggccgggcccttggccaaccccttcttctcggcagggtccccggtaaccggttaccctcgaacgccgtccagggcggaaagccttttctcggcggccccaagctctccggactttccgtcctctttgtcctccttttccacactggtttttaccatg

SEQ ID NO: 129064 - DNA, 201 bp, Zea mays
  Clone ID: MRT4577_49179C.1
gccggatctataaccctaggtgcagcggcctagattgcccccaagcgctcggctccacctgcggcgactgacctcccgggtgcctcctacgaggagaccgactatggttcgggctcctacgaggaggaggaggacgatgaggacgacgatgatttgtagaccgatctctcaccgtctaccgaagatatcgagagcgatgct

SEQ ID NO: 129065 - DNA, 248 bp, Zea mays
  Clone ID: MRT4577_4917C.1
aaacccgcggatcagatccggtctcctccgtatcgcattctccacagcagaggggccacatgagacagttaccgcgatgaaactgtctatcgaatcacgcgttatcaaactgtccctgccgtgtccgaatccgtgccgtggcagtatcgtctgggacgggacaaataagaagaaacgctcgctgtctcacggcgacacgacaatcgatcaccgtcatcatccatccacctcgatgatcatcgacgagc

SEQ ID NO: 129066 - DNA, 227 bp, Zea mays
  Clone ID: MRT4577_49180C.1
tcgagcggccgcccgggcaggtacaagctttttttttttttttttttttttttttcaaacattctttttccctataaactatctccctcccatttcaatggttcatccaggacaaggctcacactgccacccatgaccatgggtgacactccgagccacggcccgggtgaaccagtgaactgccaaggagtagttatacagcaaaaggatttctggattactacaaa

SEQ ID NO: 129067 - DNA, 168 bp, Zea mays
  Clone ID: MRT4577_49181C.1
ccgccgaggcagtgctccgagcatcacccgcctctggcactacccctaaatcgcggaaccacccccgccggtcctccccggaggtcctcatcgacgctaaacctaggaggctgctgggcaagacctcttctgacataaagaaccaccaccactcactggtggccgccc

SEQ ID NO: 129068 - DNA, 1919 bp, Zea mays
  Clone ID: MRT4577_49182C.1
ttccgcgcagatgcacgtgagccgcccgggacggccggccggccggtcccagcagggccattgcccttcttctttcactagctcggcctcgcttcatgggaatgggaatgaagtggggagcgacgaaagccatgacacaattgaagctactctcgtctcgtgtctcgttgccgttatttaaacaccccttatctttccctcaggctcaaaagccttgcccttccctgctctgctcctcctcgttctctgtgatgctgaggctaaaagctctcaccttcctgctcctgctcctcctcctcgctctctgctccggcgttcatctgtgcgacgcgaggagcggcacgcgctggagtcggacgacgcgaggcggtggtagcggggcggcaccgtccgcctccgctgctgcgatcgggaggaaagggaaagcgagaagcagcggctcctcccacaggcaaagcggcgaagggagtcggagcccgaccgacggcgaccccgtgcagggcgacggaagccaggctccaccaccacaggatactacggtcttcagcgtggtggagttcggagccaagggtgacggcgttacagatgacactcaggcctttgaagcagcgtgggcagcagcgtgcaaggtggaggcgtctacggttcttgtaccatctgggctcgagtttgtcgtgggcccgatctcgttctctgggccttactgtaaaccgaacattctgttccagctagatggaactattttggcccaaaccagcgcaagagcatggggctctgctggtctgttgcagtggctggagttcacgaagctaaccggaatcgcggtccaaggcagcggtgtgataaacggcaggggccaggactggtggacgtatgcagacccaaacgatgccgacgacgagtctgtggagatgctgctgccacggactaagcccacggcgctgaggttctatggcagctccaatgtcacggtagctgggatcacgatcgtgaacagctcccagtgccacctcaagttcgacagctgcgagggcgtcatggtccacgacctgagcgtctcgtcccccgaggacagtcccaacaccgacgggatacacctgcagaactccaggggagtcgacatccaccacgcgacactggcctgcggcgatgactgcatctccatacagacggggtgcagcgacgtgaacatacacagcgtgaactgtgggccagggcacgggatcagcatcggtggtctagggaggttcaacacgaaggcgtgcgtgtccaacgtcaccgtacgagatgtcaagatgttcaggacaacgacgggtgtcagaatcaagacatggcagggcgggtcggggctggtgcagggcgtgaggttctcgaacatccaggtcacggaggtgcagacgcccatcatgatagaccagttctactgcgacagggcgacgtgcaggaaccagacgtcggcggtggccgtctcgggcgtccagtacgaggacgtcaggggcaccttcaccgtcaggcccgcgcacctggcgtgcagcgacagctcgccctgctcggggatcaccctcgccgggatacagctccagcccctgccgctgccgcagcaccgccgcctgtcgtacgaccccttctgctggcaggcgttcggggagctgtacacccccaccgtgccccccataccttgcttgcagatcggcaggccggcagcagggaacagcgtgctgtccgacggcgacctttgctgaaacgccgatcggttcatcagttaagctaaggcggtcgtcgtgatgcttccgacccctgctttgcacgatgtggattgtggagtgtcagttgatgatgcatcatgcatgcatgcgtacgtgggatacttgaggccgatttattatattgatgcgagccgatcaccactattgctatgt

SEQ ID NO: 129069 - DNA, 204 bp, Zea mays
  Clone ID: MRT4577_49183C.1
ggcaacactttttccggccggctgggttcaaatgtagaagggcttcgaacgtccatatcccgggtttgggcaaacgacaaaccggtttaggggggccttggggtccgcaaggggccaattggggcgtggaaacgttgcaaccggggctttcttttcaaccagaacgtccaaagggtgttgccgtaccatttcggggttgccccg

SEQ ID NO: 129070 - DNA, 142 bp, Zea mays
  Clone ID: MRT4577_49184C.1
acgtaacggcttaactaaccgtacctgcttttagtcataagcaagggcggcaaatcatgatttcacggttccaccatacatacgcctgttaggaggagctcaagataacccgagctaacttctttttacagaaattagcgct

SEQ ID NO: 129071 - DNA, 396 bp, Zea mays
  Clone ID: MRT4577_49185C.1
tcccacgcgtccgaaaaaaaaaaaaaccaacttacttattaaccaaaaaaaaaaataaaaaaaggcaagtaaaaataaaaacgtacagtagaacaactaaaaaataacaaactaaaaacttaccacatctttatcaatccactaccaactatactcgtccaactcgcacatcttcatttcctacttctaccatacccaccatctaaacaaacatctactatctcataacacatactctgactctctaacaacacactatctcttcatcatctatacaatcacacttacacttatcctctatctaacttcctcactaaacccacacttcctttcactactatctctttctcatcattaacctcctcattgctcatcactcacctctcttttactctc

SEQ ID NO: 129072 - DNA, 867 bp, Zea mays
  Clone ID: MRT4577_49186C.1
gattcccggtcgagcacgcgtccggacacctcgagccggccgggaaacctctcggtgcgttccgattccaaacccaaatcaccgctccctccaaatcccattccctccgcccagaccagctcgcgaaatggacggcggcggcgcgaaggcgaagaaggcggctgctgggcgaaagctaggcggcggcgggccgaagaggaagccggtgtcgcggtcagttaaggccgggctccagttccccgtgggccgcatcggacggtacctgaagaaagggcggtacgcgcagcgcgtgggcacgggcgctcccgtgttcctggccgccgtcctcgagtacctcgccgctgaggtcctggagctggctggcaacgcggcgcgcgacaacaagaaaacccgcatcatcccgcgccacctcctcctcgccatccgcaacgacgaggagctcggcaagctgctgggtggggtcaccatcgcgcacggcggtgtgctgcccaacattaaccccgtcctcctccccaagaaggccgccgagagggccgagaaggccgctgccgctggccccaagtcccccaagaaggccgccgccaagtcgcctaagaagtagtgactcgtcttgctctcactcatcccgttctgagatcagcttgtgtttgtggtcgtggacgccttttaccattttgcaagtgtgtgtagcgatgcgtcgtctgaactataatgtgctacgattgacctaagttctagtttaattcctagctctagtggtgcttggtgatgggtccccatggaagtttaatgggaacaagaggaagtgtcttgctttctttgatgcttaaccatgcttcttagcattccgcaagtttgatctccatc

SEQ ID NO: 129073 - DNA, 304 bp, Zea mays
  unsure (1)..(304): unsure at all n locations
  Clone ID: MRT4577_49187C.1
gcggaaccacgcgtgcgantgggancattcagaaacacaccaaattaaacactttttcaacgacctaacaacaatggctacttgcatattatccctacttacacttctatacctttttaagagcacaacaaattccttcattattacacaaagctcactttctcctacttccattattccacacttacaaacaccaattaattacaatagcttcaaacacctatctttgcaacccaacatgcaacaacaaacaatttccccgagctttttacatcaaccaaatgccaaattacaaccacaatcc

SEQ ID NO: 129074 - DNA, 376 bp, Zea mays
  Clone ID: MRT4577_49188C.1
tgttttttttttttttttttttttttttttttttttttattttaacagggttggcttttagacataaaggtttgtcatttcttttcttttttatgaaaaaagaaagcccgacatacaggcccaggcagaacaaagcgtccttgacccaggacatagctgaccagcaaaccaaaggccaccggaggtactggaaggccaggagaagtcagccatcgcagggggtcaatgtagcaaggcgagaagaggcaccagacgaaacgcgcgcactaacacacaagaagaaacggagcccgcctgggggtccatcaactatctagcggtgcggggagagaaacagcgaggggccggcagggaaggagcaattgcacaaacccag

SEQ ID NO: 129075 - DNA, 227 bp, Zea mays
  Clone ID: MRT4577_49189C.1
attaatttatttttttttttttctcgaaacaggcaggtatagtattaatttccctcaaatcacgccggcaagcatacatgccttatctcgcagacttcccaggggcgaggtcgatatatatgaagactagcatcaggactaataggcttggatgagggacacacgtaccgtattgaccagagcaccatgcatggaccatggatcatatcagcattatcatggcttta

SEQ ID NO: 129076 - DNA, 316 bp, Zea mays
  Clone ID: MRT4577_4918C.1
gactagttcttgattgcataaaaaaaaaaaaaaaaaaaaaaaaaaaaaaaaaaaaaaaagaaaaaaaaaaaaaggcggccaatctaaaaaaatccaaacttacatacacatacatacaaaaaaaataactattatataaaaaaaacctaaattcggcttcactttttcaaggttccacattttcttccccttgaaaaacccttaattttccttttttaatccccttaaatcacatcccccttcccccatttaacaaaatagcaattaggaaacccccggtctcccctaccaaaatttcctcaaacaaaatcccctt

SEQ ID NO: 129077 - DNA, 638 bp, Zea mays
  Clone ID: MRT4577_49190C.1
ggccgcttttttttttttttttttgtttttttttttttttttttttttttttttttttttttttttttttttttttttttttttttttttttggttttttttttttttttttttttttatttttttttaccattttgtaagaaacaagcccacagaagcaaaacaaaccacccacgccccctataggaacaaaaaaaaaaaaaatcaaaaacacaaccaaaaagaggaacaaaaaacccccacagaaaaaaaaaaaaaaaaaaaaaaacgacgaggatcaaaaaaccccaagggaaggcctcccagggaaaatcccccgggtaggctccacaaagggggtgccaggagacatcccttgtaagggggggggccgcacacaaagaagggattcatcagtcatgcacaaaaaaaacaggttcaccccaaaagagagaaactcctggggcccccccaaaaaaaaaacattcttcacccccaaaaaaaatttctcgctccaccccccaaaaaccccctttttagaaccaaaaaaaaaatcccccggggccaccaacaaaaggcccatgctccggaaccaacaccttctttctttgaccccggaaaaaacccccggggacttaaaaacggcagaaggccccccc

SEQ ID NO: 129078 - DNA, 471 bp, Zea mays
  Clone ID: MRT4577_49191C.1
gaaaacccactatgaataattcaactggctgataaaccatagtcacccaattaatattgatccatctacccaatgcaaatcaatgtttcaagaaacagatggccctatccttgaaatgtctccgtatactcttctcctaatgttagctacaatcctgtctgcaatttggacgtcagtttcttcaggatctttgagctcgcccagtttcttgggatccttgcaatccttcaaaacgtctgaaacggcctgggctttcaaaaatattgatttcttcttctctatagcatcatctccttccttatccctgtaacccccaggtaactttggggaatggggaactgagcccattaaatctgccaacttctgtaccagtttgactaaaccaagccgctttagctctctcataagcatccggtacgtgatatactggggcaccatccctttttaaaacatttgctcgaactccgcaaa

SEQ ID NO: 129079 - DNA, 719 bp, Zea mays
  Clone ID: MRT4577_49192C.1
ttcccgaggccggccgggaacacacaagctaaaataaagcaagcaccagaactcttttttccccaaactcgcaagtcgcaacggccatgtctccgctgccccgccgccgcctcgtggtcctcgtcctcctcgccgccgccgtcgcggccacggcgtccgccgcgtccctcagcggcgcggcgaacgacctgctgcccaagtacggcctcccgaaggggctcatcccggactccgtcacctcctacagcttcgacgaggccacgggcgccttcgagatccacctcgccagcacctgctacgtccacttcggctcccacctcgtctactacgagaggaccataaccggcaagctctccaggggcgccatctcggacctctccggcgtccaggccaagaagctcttcctctgggtctacgtcacggggatggtcgcgcaccccgaccagggcaccatcgagttccaggccggcttcgtctcggagtcgctatcagcctccatgtttgacgaggtgcgcacctgcggttccagcgctggcgcgcagctgcgcggcgcggctggggtcatcggagagcttgggctgctccccgttgcgcaggtattttttacgtctttactcttatataagttgcctagtgtcgaaccagttgggcggtggatccgtggatgggaatttagtcccgcttttgtttacttgattgatgatgaaatcgtaaggtag

SEQ ID NO: 129080 - DNA, 246 bp, Zea mays
  Clone ID: MRT4577_49193C.1
cggacgcgtgggttgaatttgaagcctatggctgccaatatcttgtggaataagatatgtgtgtaatctggttgtggagatccaaaaatccacgcagatggaaaaaaaaaaaaaaaaaaaaaaaaaaaaaaaaaaaaaaaaaaaaaacaaaaaaagaaaaaaaaaaaaaaaaaaagaaaatagagagagagaattatctggtacatgtacacatgagcaacataacttgtgtaaatgatgaattat

SEQ ID NO: 129081 - DNA, 328 bp, Zea mays
  Clone ID: MRT4577_49194C.1
ggggagaaaaaaaaaaagggccaccagggggggggggggttcattctttttggcccgaacaacaagggttttgggtcgggccattaaccaaccggggggcccacggggggggttttcccccccccggcccccacaccatgggcgggtttttaccacccagggtttttgtttgggcttttccaaaccaaggggttttttcaaaagcacttaaaagggggggggaaaaaaaatttatttgttgccccacaaaaaatttttcaaacccgatagggggctttctttttgcaaagccttttataaattttggccccgcagccgctaaattttt

SEQ ID NO: 129082 - DNA, 1258 bp, Zea mays
  Clone ID: MRT4577_49195C.1
ccggggagtggacacactcccaacaacagcagaagctggattaacgggcggtctgatttgggtgctgcgaattctacagataatcgatggaaaggagctcctgaatgtctgcagtgcagctaaagattggggagtggacacactcccaacaacaggctgaagctggattaacggactcatttgaggctaccattgggtacctcgaggccggccgggtcaacgaaccaaccagcctagcgacgccgacgccgacgccgccacgtcccaacgaaaaagaaacaaaaaagaagaagaggacagactgccagagtcatggcggccacgagctccgcctgcgcgtgcgcggcggtagcgctcgcgtccttcccgtccgccgcctccacctccgccccttcccgcgtctcggccagcagccaccgcggtcagcggcactccagggccgccaccgtcagatgttccagcacgtcgcccaacgtgtcccagggcgcgccggcgccggccccgccgcaagccgcaaatcgagctcgagttcgtcgggccgaagcccggtgccgacggctccttcccggtggaccgggcggaggcgaccagcggcgagaagctcctccgtgacgtcatgaacgagaacaagatcgagctctacgccgcatacggcaaggtgatgaactgcggtggcggcggaagttgcggcacttgcatcgtcgagataatcgatggaaaggagctcctgaatgagaggacgaacaccgagaatcggtacctgaagaagaaaccagactcatggaggctagcttgccagactattgtaggcaacaaagagaactctggcaaggttgtggtccaacggctgcctcagtggaagagatgaccgtgcagtgcagcaccacgttggtggatgatcgatcgtccagttgtatgtcactaaaacgccatgccctgtgcattagagaagagacagaatcacctcgtcatatcgcttgtgaccagttctctgatactagtttgcaagtctgggcttcggtccacagtatatatgtgggatatatatctgtaaacaaaaaaaacaagaaggcagggcatgttgggatatatatctgtaaacaaaaaaacaagtttgggcttcggtccacagtatataagctgttttcacaaatggagaccagagtaccccggtgtatgttggtagctttctgaaagaaaaaaaaacaagaaggcagggcactagaattttcaggcccttcaaaaaaaacacccacac

SEQ ID NO: 129083 - DNA, 408 bp, Zea mays
  Clone ID: MRT4577_49196C.1
gtcacgcgttcgttcaaagagcggtctgcatctgacgggtcctgcactaccaacgctatggtctctcacaactctgacttcaaggaacttctgaatggcgacaaggagggccttattaagctcccaagtgacaaagccctgctgagccaccctgtcttccgccctcttgtgcagaaatatgctgacgatgacaaggcattctttgatgactaccacgaggcgcacctcaggctctccctactggggtatcctgatgcttaaacgctccatatacaggagcgcgacacaaactgctgcctgtatggacacttgcgattcatgatgaaccatcagattgcctattgtcgcctttgtaataaaggcatatgctcttagaacttcgactatggctgaatctgaacccatttt

SEQ ID NO: 129084 - DNA, 256 bp, Zea mays
  Clone ID: MRT4577_49197C.1
gcaagagatagatctgtccgcggccatggcggcggcggcggcggcggcggagcaaggcgtggacgccgcgaggaaagaggaggacgaggcgcaggtagtgaatccgtgggaggagtcggcggtgaagggcggcatctactacgacaagctcgtggaccagttcagctgctagcgcatcgacgacgcgctcgtggaccgcatcgcacgcgctcatcgtgcgaccaccgcactgcgtcctccgacgaggcctcttctt

SEQ ID NO: 129085 - DNA, 125 bp, Zea mays
  Clone ID: MRT4577_49198C.1
ttcgtatagtgagctaattaacgacggagagccggacgatgtgaaggaggcgatgaatgccagcacccattcattcttcgagcttactgaggaggccaagaagcagtaccgtcaacaggcatgac

SEQ ID NO: 129086 - DNA, 131 bp, Zea mays
  unsure (1)..(131): unsure at all n locations
  Clone ID: MRT4577_49199C.1
gactcgagtcgatcgtcatgagtgatcgaagcgaatcggactnaatatgagacatcgctgtcatcgacataatcgtgagagctgctatcanagattgctctcgctgctgtgactcagattggtgagagtac

SEQ ID NO: 129087 - DNA, 466 bp, Zea mays
  unsure (1)..(466): unsure at all n locations
  Clone ID: MRT4577_4919C.1
gcacaaccagcgaaatccaatctagtaagacacgcccttctgctctctctatctcttcggcgtagcagagctccggatcccaatctaatcgacacctcaccgagatgggccgcaagttcttcgtcggtggcaactggaaatgcaatggaaccacagatcaggtcgagaagattgtcaaaaccctgaatgaaggacaggttcccccttcagatgttgtcgaggggggggggggccctccttatgtcttccttcctgcgntcaananccaggtgggccaagagttccatgcttgctgctcacaactactgggctgaggaggaagacactggcaattttcttacgggccgtgcttcaaccaaggtcctcgctgctcctggcgggggggggggcctgggctacctgtttttttttttctgangcccggggtggtgcgctcaccaaagttgttctgctttggctgttgtgt

SEQ ID NO: 129088 - DNA, 805 bp, Zea mays
  unsure (1)..(805): unsure at all n locations
  Clone ID: MRT4577_491C.1
cattgggtacctcgaggccggccggggaaaagcatgcagttggagagacgaatcgtccttcttatctccggcgggcggtgggcggcagcagtaccgtgatgacgagtagcagcaacaacggcggccagccagacgacggcggcgagttggtcctggaccacgagtaccaagaggtacgttcgtaggttatcgatggaatcggtaacacgatcgagaccccgtcgtccatccatccatggttcacggatctatcattccgctagtcgtaactaatctggtatgcatggtaggagtacgtgaggaactcgcgggggatgagcctcttcgcatgcagatggctgccggcagttgcaggcaagagggggagggctccagctccaaaggcgctcgtcttcctctgccacggctacgccgtggagtgcagcgtgacgatgcgcggcaccggcgagcgcctggcgcgtgccggctacgccgtctacggcctggactacgagggccacggccgctccgacgggctgcagggctacgtgccggatttcgacgcgctggtgctggactgcgacgagtacttcacctcggtggtggcggcggcggcgcagtcgcagtccaaggacgcccaccaacttccccggttcctgctcggggagtccatgggcggcgccgtggctctcctcctccaccggcggcgccccgagtactggagcggcgccgtgctggtggcgcccatgtgcaagatcgccgacgacatgcggnctcacccgctggtggtcaacatcctcaggggncatgacaccatcatcccgac

SEQ ID NO: 129089 - DNA, 173 bp, Zea mays
  Clone ID: MRT4577_49200C.1
tccaccgcggtggcggccgccctttttttttttttggtgacaacaccttactgacctaaccgttcaatctactaataaagataggggtccggtcattaccatctactacaccatagtgatactacagctgttacctagcgtgccgttttcacactttaaacatgcggcactca

SEQ ID NO: 129090 - DNA, 395 bp, Zea mays
  Clone ID: MRT4577_49201C.1
gtgttcttaggacagacttgcgatattcattaataagtatgaaaggatgacgcgatgacactttttgcgccagaaaatcttgagttattgcagtactgacacatcggcctttaaggaaaggagaatataaaaaaaagacttgggggccatcagggagcagcaaagtgattcacggtccagttcgatgagcaaaggctggctgggattcaatttactgagaagcgtgaaagttgtagagaatccacaggtagattcatataattttcacgctctggatcttgaccaagatcgggatggccttcttctccaggggcttgttccttgtttataggatgtggggatgtcttatggtaggatccgagcacggaccccttgggggcgttacttggcctctt

SEQ ID NO: 129091 - DNA, 274 bp, Zea mays
  Clone ID: MRT4577_49202C.1
gccccggcgttaatatactggctggacgagctgttcttacggcggccgccgtcctttttttttttttatttttttatttattttctgtggttttactacccaaaaactcatacattttccgagggctccccagatccatcgaaagaacacaccaatggacgggcggggtgcagattgtgccggggcccgcacctggcggccaaaacgctagaccaaaatgtggggggatccttgaagggggcaactgtttaactgtgcacgtaaaccacaattt

SEQ ID NO: 129092 - DNA, 228 bp, Zea mays
  Clone ID: MRT4577_49203C.1
cagctggaaacaaaaaccaccacgggggggctttcatggtttatccttatgtacagcgccaactcatcatctctactagtttataccaagcgacgtgaatcaaaaaaaacatgtgcgtcttgcaaaataaagggaccacttacgtccaccatctttgatggggacgacagtgacctcctataggataaccttcgagcttaggtgccggtgactaacttgccggaaaaa

SEQ ID NO: 129093 - DNA, 253 bp, Zea mays
  Clone ID: MRT4577_49204C.1
cggacgcgtgggaaaaaaaaaaaaaaaaatacaaaaattaaaaaaaaacaaaaaaaaaagaggaaaaggagggctgtaaagaagggtcgtatgttctataacatccacgtttatatgcgcttctatgcgatgctatagtgtctcctatgtacactccaaaagcccatagttttagcacgcttttttacagcgaaaaccattgggaaaaccctgcttattcccatcttagtacattcgcattacatccgctttt

SEQ ID NO: 129094 - DNA, 321 bp, Zea mays
  unsure (1)..(321): unsure at all n locations
  Clone ID: MRT4577_49205C.1
acaacgcagagnacgcgggggagaagcnnggtttttggannnngcaccnncangaggaaagggngcncgncngcncggggagccgnngagcnggannggancaggcaagnaaaaggggcncgcgncnncnnaacnngcacaacgnnggncaangngaaacnngnagcnggnacgcaanacgagaggaagaagcnaaanacacgacngggaanggaaaccacggcagcnnnnnnnngcaaggcngnananaagggggcanannatattgnacaaaggcnngnacnacgnnncnngngccncnanncnaaaangnaagnnncc

SEQ ID NO: 129095 - DNA, 166 bp, Zea mays
  Clone ID: MRT4577_49206C.1
gcactgtccagatgcgccctacaagaacgaccggagcaggacatgtctccacgaagctgtagaacaggaccggacggagttcgtcaggttcatcctcgacgacaactccaagcttcggaaactcgtcaacatggtagatgacgtcggtaacactgctctgcatctc

SEQ ID NO: 129096 - DNA, 408 bp, Zea mays
  unsure (1)..(408): unsure at all n locations
  Clone ID: MRT4577_49207C.1
nttagaaaaagaagtgttgttacatgattagtccaaatcatgaattacacaactaaccactgttatcatgtcagatggaagattgaagtacacttcatatcttagctttcatgagtagtatgcatctattggtatttcatatacaagattagatgcttaggcatacaacactataccacgtataatgtaatgacaaaagagtttgtcatactcattgcccttccctttttaatgtgcttatatatttgctttcaagcaaaatatatgaatacaaagtgttagtctacaacataatgtagacacatactcatccaacaacaaggaatcgctttgagatgaggagccacaagaaggggatcgatctctgcaggacaccatacgttggtaagcagatcaccttaaatacca

SEQ ID NO: 129097 - DNA, 307 bp, Zea mays
  Clone ID: MRT4577_49208C.1
caccatccaaggccctcccaaagtcccaaaggccgccgccgcccgccagcccaccatggccgcgcagtccttcctcctcgccgccactgccgccgccaggtcccccgcggtcttcgccgctccctattcttcggaaggccctttcaattcggtcaacttcgtcgccggcccttggggcgcggccgcggcaagggcgctcgtcgtcccggacgccactaggaaggccgtacccgtcctcaggggcgcgtctgaggtcgagggcgtggtcacgctcacccaggacgactagggccctaaaaggtgtgaa

SEQ ID NO: 129098 - DNA, 685 bp, Zea mays
  unsure (1)..(685): unsure at all n locations
  Clone ID: MRT4577_49209C.1
aattcggcacgaggttttccggtaaaaccaccgcaccgaaagggcagcagctcagacgcgcctcgatgcctcgtgctccataaccaacgcccacagcccagccattagccgtgctagtcatcagtaggcgcgcacactcgctcgcagcgcttcgctcggtgccagttgccaccgccattttcccctcgtcggactgaaagagcgctccccccacaccgcggcgggagtgggaaagagcgaaggagcatgcgggcgggttttcaccgcggcccgagaaaggaggacctgcgccgcgcgcatcgcgacgagccgctccccgctggcacgcacgccaaaaggcgaagaatctctcggctgagccccccgtcccctccgccaccgccgttgtagccagtaggaggtagctaccccagatctgctcgtctccgttcccgcccccgcacccgcccgccagattcgccccacccgccgccatgcggttgccgccgccgctgctctgactgggctctcttctgctgtgagagggaggaataaaaagcggntttctttcgggcggcaggccggtcggtcgccatggggtgcggccagtccaagatggaggaggagtacgcggtgcgccactgccgggtgcgctccggagctctcgcgctggccatccggcagcgctacacgcccgccgacgcgc

SEQ ID NO: 129099 - DNA, 874 bp, Zea mays
  Clone ID: MRT4577_4920C.1
aagtaggagctaaccactttgcaattgacgcacactagggatgcaaaagcaaaaatatattctgtagcatttaaagcaggcagcataacattacgttcaagatgcacaaaactacagtcggacgttctatgtacaacactgcattataaatgtaggaacgagcaaggcaaccgactctactccgtacaacattctccaagtgctctgattctggcgtgaagcgtggaactgcatctcgtggattcttttcttgggatcacgattcgttcttccttcccatgtctgcatcttgcttctgcttgcccaggaacgtgtgaggccgtaacatggtttttcatcagactaaaatccatcacgaggctggcagttggcatcatcctccatttttcttgagtaagctttcacctttctgcagaattccttaattgctgcatgatctgaaaacgtcacaggcgtttcttcctcaactggatctctctcataaaatagtttaataggcatcctttcaatgacatcgcttggaggatcctcgggtatatcacgatacaaatgtttgagaatgaagagagcagtatcatgatctcgccaatagttggtatgagctcccaaagcagatagatatggatgctgaaatgttttctcctgaagcacatgatcaattcgaccattcggtgaactggtcaacctttccatcataatggaaccatatgatttttctttctcattagcactctcaccatcctcttctgtgtcattttttatcttctataggtcaaagcagtacctgccatactagcattgagcagaaatgacacagaaaataaaaaatgaagatgtgaaagcacctcgagccgaattccgagcttacgtgcat

SEQ ID NO: 129100 - DNA, 244 bp, Zea mays
  Clone ID: MRT4577_49210C.1
gccgctcttttttttttttttttgcaggcaagaaaaaagggacagctctgcctgataagcaagcggacgaagcaaatcatatgtgagctaaacagagcggacgcggggcatataaccacaaataaaacagaggtcaggcaggcacaccagatcaggcaacaaggagggggacaaacagcagcccccaggggggggggcgggactagagtcagccagaccatgcaagatgagatcccacaggagc

SEQ ID NO: 129101 - DNA, 113 bp, Zea mays
  Clone ID: MRT4577_49211C.1
aacatttgtaattttacacgtgagaggactcttgtttactaatgaggcttcccaaatattaattcatgcgttcatcatttatgtgctagaatcacaatgaccatgttactaat

SEQ ID NO: 129102 - DNA, 727 bp, Zea mays
  unsure (1)..(727): unsure at all n locations
  Clone ID: MRT4577_49212C.1
ctgaggttagcaggatcttgcaggtaggggcaccatagttagcnatgagaacccactgaacgaatatgcataactacatttgcattaaacagaagattgaaccaaatgagctacaacataagattttatttgatagaagggtctaatgaaaacattggaccatgagagtgcagaggcagggccattgctactganagtcgcccctaagcctggtactaagagttgtaggaggcaagaattcacagttatcttagcctacatgctattctctgaacacaatatttacgagcttgataggcctgttttggaatacaaattatgtgtccgataggtaaataatttatgccatgattcttaggacgcgtgggcttactgcttcaaggattaatgtgtgactgtttagccttcaatccaagcggtatgccactaatctcaaaaattgcttctacgcaatatttacttgacaatttatagatttgttgtttcttagagatattttttcatgtaataggttataaggttgttcatgacataaagaggtttgttggtcataacttatactatatgaagattatgggagtcagccctaaattcacattttctgcaatctacagattcatgtaaaaaagttcaatctacaacagcattttctcaaaatgtctaacagacttgttttcttcaggctagggacccaggggctacacatcttataactgaaaaacacatg

SEQ ID NO: 129103 - DNA, 601 bp, Zea mays
  Clone ID: MRT4577_49213C.1
cacgaactggtcaagatgacaagaaaggacctctgcgctatgttgcatatccacctggtcgaccaatgcataatgtaactatacccggaggagttttttctaccgtcggaaaaaataccatgcaaaactctaaaaattggtcaccgctatgggactggccaagatgcagatggctaagaacaactacacaaacacaaaggactccaatcttactatacgtgcctgtgtgcctaggctgttcttattggtggtagactatgagacggcaaatttttccttcatacaaaataatggaactgatatgttatttgaactagaatgtaaaaattgtgtattaaccagttgttgcctgtgcacttgccctcacctcaaacaggtcctgtcactatctttttgactatgcaactgccttatttactattacctgttgagattaaaggcccttggtatgctaattatggttatcagtttgctgtaaaaatgcagctacaattaaaaagattgggctgttgatggccggtattgctgcattggttgctcttatagttactgctgctgcagcctctatggccttatcccagggtgtatagacagcacaata

SEQ ID NO: 129104 - DNA, 375 bp, Zea mays
  Clone ID: MRT4577_49214C.1
cagaaaaccttttggggggttttttcctcccctgggggggcccagagatgtaaaaagggcccagggatgttaaaacataccttaccggcccccccccaaaagaaatattgcccttttggaccaacaacacaattaatttttttcgggggccctttttgtttgaaggttattttttttcacaacggggggggttcaatgggggcaggccccccgaaaccaaaggttaaaacccacggggcttgggggggtcgccgttgaaacccggggccaaaaaaaactttgttgggggcacccacttcaccccagggggcccgcctttttggtacccggaattaaaagggggggatgcccaaggccaatttccccccctcccca

SEQ ID NO: 129105 - DNA, 539 bp, Zea mays
  unsure (1)..(539): unsure at all n locations
  Clone ID: MRT4577_49215C.1
attttatgccgttcctcagttatttaggcatcctgttcaggtagttagagagaactcggttcaaagcaagggtttggtaatatttccccagttggtgcagccagatttcgcgagatcacaagggcaaccacagtggcaggggctggttccccacatgcaacagaagccaggcaaggatgtactccgcccggacttgaacatcgggttcccatctccacgttcaccaccagcccgacaatcgtctggcatcaatttggaagcacagcagccagaccttgctttgcagttatgagctggggatagacactacctggatttatgctataatctctaagcgagaacaattgggacatccggtacgtggatcggtgatgatcgattgggatgtaggctttacatgccacatggcatcatcgcagctcatcaactcatcgcgtcactgtacaaaagatatcagaaaatggatggatggacactgctttgaatgagatcatgtctactggnggcattctgataggagttcaaatcccagcattcgg

SEQ ID NO: 129106 - DNA, 402 bp, Zea mays
  Clone ID: MRT4577_49216C.1
agctacctgagctacgccaccggcaggaacgccgacgagttcgccgacctgggcaaccccaggtacttcagctgggatgacaaacgcgccggcaccgaggttctcttgtccagggtgatgttcttcgccggagatggatctgatgccggacaagacgaggtccttgggtcgtataaggacaccgctgacgccgtcatgtgcatcctcctaccggagtcggacactgcggctttcagaacagaaggggggttgctgtacgtggcggagtggaactcgctgcagcacccggtggcgtcagcgtttcttgccaacgtctacagcaactacatggcgacgtccgtgaagtcggagctgacctgcagcggcaagagctttacggcgcttgaccttcgcaagttcgtc

SEQ ID NO: 129107 - DNA, 1661 bp, Zea mays
  Clone ID: MRT4577_49217C.1
taatgggcagcctaaacactacttccagtcacaagcagcagcttcctctgatatgcatgctatgccttcctcaaatgggcagcctaaacactacttcaagtcacacgcagcagtttcctctgtcgtgcatgatatgccttcctccaatgggcagcctaaacaaattttccagtcacaagcagtagcttcttctggtgggcatgatatgccctcaaatgggcagtctaaacccttgttccagtcccaagaagcaactatactacagcccaaaaatgaagcaacgtgggtgtaccatggacgacctggtgatggaaaggttggaacatcaaacaaaagcagaccatcgaccagtattgggttcatcaataaaaatcatcaatcagtaaatgctgcaacttttgccatgaatttgaatggacagaagattgtcagtgaccatgcaaaatcagcaggcacaactgcaatgcctgtccaggtaaatataccaaacagaggtcttgatgctcctcggaacatgttctcagcatttccagctgctgttagggagaaccatagcattccaccagctccaatggctcaatcttggatttcatttggtgctactacagagaacaaaccaaccattgtcagcccaacttcccttgacaataattgtggctggaaaatgccatttgctaacgtccaaccttctgatgataccaaaataaatgccgttcctcagttatttaggcatcctgtccaggtagctagagagaactcggttcaaagcaagggtttggtaatatttccccagttggtgcagccagatttcgcgagatcacaagggcaaccacagtggcaggggctggttccccacatgcaacagaagccaggcaaggatgtactccgcccggacttgaacatcgggttcccatctccacgttcaccaccagcccgacaatcgtctggcatcaatttggaagcacagcagccagaccttgctttgcagttatgagctggggatagacactaccgggatttatgctataatctctaagcatgtaaaggcacgatgagctgaggtgtgaaagaaagcgaggacaattgggacatccggtacagggatcggtgatgatcgattgggatgtaggccttacatgccacatggcatcatcgcagctcatcaactcatcgcgtcgctgtacaaaagatatcagaaaatggatggatggacactgcttgaaatgagatcatgtctactgggggcattgtgataggagttcaaatcccagcattcggagaaatgctttgggagtttgggtggcatacatgtaggtagcatactagcaatgcccatgatcagaatactttggaggaacctctctgaccacaatacagctttcttcggtggaaattttggcaccagaatttaggctttcatttggtagtgtagacccctgtgtaatgcccgtatcgaaatgtatgttggttgtaaatggttttgcgttgaatagattgttagagtagggcagtggggagtggcctttacccccgtcttctgaatgaaattgcttcttttgtccatgatgtatgtagtagcaggaagccaggaactgaggtctgtgccctattcagttcaaatggcatgctgaagctaaaaaaggttgccaattctctcgttg

SEQ ID NO: 129108 - DNA, 1299 bp, Zea mays
  Clone ID: MRT4577_49218C.1
tgcacaagctccgttgctgtcggccccttctcctccaacaacttgaaaaccaagaaacttatcatttcttattagggatgtctcgaagcacaaaactgccgttgagtgcctgtcagctgcgtgggaaatgcaatcagcagacaacactgtacatcgtcgctattgctagtgtgcataacataggggtccactagaagtgctttaacttttactgtacagatctccacatcccaatgctattgggcagatcaaacaggaactcgagatggagaatccccttgcctatcgagcgtggatcccgtttccttcccactttcagatgagttgtttttgttcgctgagtttttgctagccctttaactggacattcctgattctttgactgacttcgattaatgttgttttcacttggggaatccagtgatgacgctgagaacgatgaagatattatggatgataagtcagggcaaaatgagcttgacaacatatttccactgattatagcagcctggagtctgtctctcacgaccctcacaaatttgtaaagatcattattacaattaagatccttcaccaattcttcagcgccatccacagagggaacacattgtactaaggtgtatcttccttcaacaagctttatgcaaaaatagcactccttgtcaggtctttgcacatcaattttattgaacataaatttcacgccttctcctccaacaacttgaaaaccaagaaacttattgtaccatataagagctttctctaagttcttatcctcgtttgtgtcactttcagattcaagggattcaatatctttgagttgaattgatatggcattcatgcattcatctcttgtagccctacgacccgtaaccaagtgtgtgagctgctcatttgttgcagtggtttttaaaatcgactcagtcatgagattatgttttgaccttctgcttgtttggacggagagggcctgtgctagatctgattctaacttccggagatgttgtttttgttcgctgagttttgctcggttggagacggtctggttggcgatggagcgcgcctcgaggagggcggcactgaaggccgaggaggcggcggcggcccagttccgggagtcgatgaaccgccgctggatggcggcgcgctgctccttcatcctccggcgcagatcggcggcggcatccgccattggctgctgcggggtggcaccgcggtaggcgttggagaagaagaggagcctggagttcaaaattcttttggggggaaacgagaaaaaaaaacacgtcattttccatc

SEQ ID NO: 129109 - DNA, 356 bp, Zea mays
  Clone ID: MRT4577_4921C.1
aaaaaaaaaaaaaaaaaaaaaaaaaatttatataaaaaaaaaaaaaaaaaaaaaaaaaaggaagaaaaaaaaaaaaaaaaaaaaaaaaaaacatacaaatatagtatatccattcttactttcccatcctttctatccccttacactcttctttaatattcacctaaatttaacttacctaactcaatttttcatacccacattttttccaaaacccctctgttaacccactttattcccctcccttaatatccttttttcacaacctcttttaacagcgaacagtcctttccaaaaaccctttcccaactgttctttccaccttattcgcaactttaactccccatttgcccgcc

SEQ ID NO: 129110 - DNA, 278 bp, Zea mays
  Clone ID: MRT4577_49220C.1
tttaaatataccgggtgatagttgtattgagagtgagctactgagaggttgtacggaaggaataaactaaggatgaacaatatttagctgcatccatgtgggaaggaatcagtatggactaatgattgttccggattttggcgatggtcttgcctgcatttaacacaaatagaattagggccggagatgaatggtgacagattaaggaaccgcggggacctatagtggcacagttcgggagcatgggctgctgaaggacctccatgtgtggggttttt

SEQ ID NO: 129111 - DNA, 398 bp, Zea mays
  Clone ID: MRT4577_49221C.1
tccatcctcaagccattctctttctccttcagctctgccgctctcgaggcggccttctacaacgtcctgggctctcagctcgtcgccaatgccaccggtgagaactccattaagtcgcccgcacacgcaaagctaaacgtggcgatcaacggcttcagccgcatcggccggaacttcctccgatgctggcacggccgctaggactcaccgatcgacatcgtcgtcgtgaacgacatccgatgcgtcatgaactcgtcccaccttctcaagtactactcgatgctcgtcaccttcaatgccgacgtcaagatcgttgacgacactaccatcatcgtcgacggcaatcccatcacggtcgtcttcatcatggaccccctcaagcttccatggtgtgatct

SEQ ID NO: 129112 - DNA, 490 bp, Zea mays
  Clone ID: MRT4577_49222C.1
agcgacaggcaagggggttcttataaacaagaacaaaatttggccgggtggtctggcgaagaggggttaagggaacagctccccatttttctacccgcctgctttgggagggaaactaaaaaatgagccggcccggccgccccgccggctccatgtgccctacacccaccctcggaaaaccttgtaaccccaacaaggggcaggggcagggtccactcctatgctggatttacagaggtcgcaaccgggttcatttcctggaccatgggttcattctcgccttaacttaaaactggcccaacccggggggtccggggggctggttccccttgaccctgggagaccccaaaagcgaggagtaaaaattctccccgggcggggggagcatgttgaggcccctgtacatgccctggatgttgtcgtagctgggggccacaaacaggttggcgtttttggggctgtagccctccacctggttcttcttgggcac

SEQ ID NO: 129113 - DNA, 688 bp, Zea mays
  Clone ID: MRT4577_49223C.1
cccacgcgtccgcccacgcgtccgaagttctctcccatccccaaagtatcatccaatttccctccccgctagccacaatgccgactcttcgcagcgcgacggcgaacgcgtcccccgtggccaccccatcccctgccgcggcgagcacgccgcgcagcgtcaagcgccggctgacgccaggccgcgccggcgagtcgcccaaagcgtcgcggcacacctcccctcaccgatcccctcacgccggcaccggaactgtatgcattccgaagctgctctcggcgtcgcccaagtcctccaggaagcgtctctacggcgaccttgtcgcagccgagaagcccaagtggaatccccgagatgccgcgcagattagggctgtcaaggaggcgctgcacgtggcaacagtgccatcgtctgaattggtttgccgggataacgagctcaggcgtgtccttgagttctgcaaggtgtgcgtccaacaggagaaggctggtagtctctatgtctgcgggtgccctggcacagggaagacattatctattaacaaggtcaaggatagcttggtgtgttgggcagatgagatgggaatggagacacctgatgccttagcaatcaattgtacaaacctagcaaacacctcagagatttttggcaagatactaggcaaattgcagaaccaaaagaagggaag

SEQ ID NO: 129114 - DNA, 348 bp, Zea mays
  unsure (1)..(348): unsure at all n locations
  Clone ID: MRT4577_49224C.1
gacaggagattgtcaacaacaangcnactgggggaaagttcangcaaagnttttgnttgtngggaatggaaggtgttgcaacaagnttctgtcaagcaattgatgttcctacacgtgggnanttttctgctttcgggatttgttccataaagantcggctaaccctttgagaaaagcancntgggttaacaaggcttgaatcagttttcngaatgcngnaaactgcaacatctgcaaaaagctgcactngatggaagatgcattccnagcaatttgctaaccagactggagtggcctgcactttaggaataacctattcagcacacagtgtcccaaaggtcnagtaat

SEQ ID NO: 129115 - DNA, 457 bp, Zea mays
  Clone ID: MRT4577_49225C.1
gccggccggtttcccgaagctggttcggaagacgccaagtctgacaagtctccaaacccaatgtcgacatgctagtatccgctgcctgcctgcctcacagggtcacagccgcagggtgccaggattagggtcttagggactccacgatcagactcgcaccacgcaacggcaaagcatagcaacggcggcggcgcagtaagcagctcagctcagcacctcgccgggtcacccatcccctgccggacgactctacctggtccccagaacagcaagcatttcaccggagccggcgcaccaagtagtcaggcaagccttcatcccctggtccgcgactccccacgataccaccttggtcctcggtgctcggcggatctcaactacaggttgattaacaaggccatggatgatgggattgagatcactcaagctcctaagttctcacaaccaccagtgagcc

SEQ ID NO: 129116 - DNA, 437 bp, Zea mays
  Clone ID: MRT4577_49226C.1
tggttggcaccttgatctcttttactgtaatatcccttggcgctctaggactaatatcaaggcttaatatcggcgcacttgaactgggagactatcttgcacttggggcaatattctcggccacagactcggtttgcaccttgcagaactttgatcctggaaatatcagcagtgccaaattactgaacttcattggcagtttcctttatctgttcggctccagcaccattcttggagtagcttctggacttcttagtgcttataccattaagaagttgtacttcggcaggcattcaaccgatcgtgaagtttccattatgatgctaatggcttatttatcttacatgctagctgaattgctcgatttgagtggcattctcactgtgtttttctgcggtatcgtaatgtcacactatacttggcacaatgtaacagaa

SEQ ID NO: 129117 - DNA, 337 bp, Zea mays
  Clone ID: MRT4577_49227C.1
gtggggtccgggcgtcaccatagctgttggggtccggcagtcattttgagtctgggtgcttgaagacagtgttggtagtctcatcggcgcgtatagcgccatacagatacaatctgacggacagttaccttgcggttgctaaacacctgcgtgagaacgaggagaaagattctgagtacaggttatccgtccacatggtcatgtactcggaccggacaaaatgtaatcactttgaaacccgattggtctggtatatggtaacgcatgtgttcttggatagaaaattcagtgtctagtacttggtcaacatacttgatggcatttagcctttttcttt

SEQ ID NO: 129118 - DNA, 291 bp, Zea mays
  Clone ID: MRT4577_49228C.1
atgcggccgagttttttgttttcttagaaccgcacaagaaatcccgagagggacctggttacaaaaacaacaaagggcacggggaaccaccacgaaacaccacaaaaacaggaatgctgggatccaaaatacggcccggagcgagcaagagagcgcccggagacgagactccacgccaggggctcaaagaaacggaaaaggaggagccgaaccacagcctggggaaccaccaaaaaggggcgaaagaaccgcaagacatgcacccaaagctgagaccgaatcaccaaaaca

SEQ ID NO: 129119 - DNA, 395 bp, Zea mays
  unsure (1)..(395): unsure at all n locations
  Clone ID: MRT4577_4922C.1
gggcgagaacaacccgaacaagcgggttgcaagcacgacacttttaattgaagcaccacgcgccangcaccgggcgacgcgagaggaaacagacccacaccacaccacccaaccgcggcnaacaggagccccggacgaccaacaaaagacacccgagcagaaagagcccaccaaggaacacccggacgacaacccaaggacgcagggcgaaccaccacgcgcagcagaccagccacagcagccaacaacagcacccgccacaaacaaagaccccggcaccaagcccgccggacagccacgaaaagccaaaaaacccccccgaaggaacacgcgcangaagcacaagacagggaaggaacacgaggaaccaacaccaccacaagcacccagccgcc

SEQ ID NO: 129120 - DNA, 243 bp, Zea mays
  Clone ID: MRT4577_49230C.1
cccacgcgtccgcccacgcgtccgcccacgcgtccgcccacgcgtccggcatgctggacgagacgccccttgatgtgtgcggggacgaggaggtgcgggccaagctgctggagctgaagcacaagcacgacgccctcctgcgcgcccagagccgccagcgctccttgctgcgtcccgcacctccagcgccggcagccgcgggaaggtggtgaggcgggtgagcctaacccagcgcaccgacct

SEQ ID NO: 129121 - DNA, 815 bp, Zea mays
  unsure (1)..(815): unsure at all n locations
  Clone ID: MRT4577_49231C.1
atcctgccttcattctccacatccacactgcacacgccagcacgcccggcgacgcacccggcgtcctccgcaccgtgaccgagcggcgcttcacggccatggacccaccgctgagccagcagcccacgctgctggcgctctcgctgctcctcctggccctgtacctggcgcgccacgccctgctcggcaagcgacggaactacccgccagtggccggcaccatgctccaccagctcttcaacttcggccgcctggccgagtaccagacggagctctcccagaggtaccgcaccttccgcatgctcaccccgacctgcaactacgtgtacaccgtcgagcccgccaacgtcgagtacatcctccgcaccaacttcgccaactacggcaagggcaccatgacccacgacgtgctggaggacctcctcggcgacggcatcttcaacgtggacggcgccatgtggcggcaccagcgcaaggtcgcgagcttcgagttctccacccgggtgctccgcgagtacagcagcggcgtgttccgggaccacggccgccgagctcgcgggcatcgtggccgccgccgccgccgnccggggagagggtggacatgcacgatctgttcatgcggtcgacgctggactcgatctcttcacgattgggttcggagtcaacctggngcgggctgtcccagtccagccaggaagagcgcggcgttcgcccgggcgttcgacgacgccaacgagcaggtgctgtaccggttcttcgacccgctctggaaagccaagaggctcctcaacgtctcgtcggagcggccatgaaac

SEQ ID NO: 129122 - DNA, 378 bp, Zea mays
  Clone ID: MRT4577_49232C.1
gcctccgcgaccgccctgtgggacgcctgccacatcgccacgtgcatcagcctgctgttgaccttgcgcagcgcgcggatagccgaccctccggttccaagcatgatctcgccactctcaccatggctgacgtgccagacgccgtgtaacccacaatcgacttgctgctacaatgacgcactgctggatcaccgaagtgatcgcactacaaaaccttgaagccgtcgaagtcgaacatgtggaaccggatgtgcacggacgaccctggcggtccttaccaccatcgaacgcacgacgtccatgcccacgctcatggcgaacaccatcaacgactacctcccgcatgacgaggatagcctgtccatgaagccgatcacg

SEQ ID NO: 129123 - DNA, 394 bp, Zea mays
  Clone ID: MRT4577_49233C.1
aaagaaaggaaaagggcccgctctgcattaaaatcagacacaagaagggtgataaaagggaaagagggggggagggttttggtgatggaataggggcgagaaagtggttaccaaacaaacactcgtcgggctgaaacgcccccgggggccggcctagggagctgaccggtttacccgggggggaggcacaacccgggagctgtggccgcccttagtgaagggctcttgggcaggaggaactgaataaggtggagatggacaaagtacgggggaagcgccaacatgggggggaagttcaaagagctgtattcaagaggcacaagctatggtggtttggaagttagacggttcatggggacactgtggacaggctccaacgggtggttcatattag

SEQ ID NO: 129124 - DNA, 1148 bp, Zea mays
  unsure (1)..(1148): unsure at all n locations
  Clone ID: MRT4577_49234C.1
gccggccgggctgcgaaaaaaaaatcaactgattcgctgaaaaacggagaattgaaagcgaatgctgtctcccaccacactgcggccgctggttccggcggcggcgccatcgcaccttaccgcctgcttcttgcccgcgtcaaggcggcgtgcgccggcggcggcggtgcgcgcggtgcggaactacgactccatcccgaagcgggagcccttcacctccagccgcagcaccctcgacgagttcctccggctggacaagccgctcgtccagcgtaccaaggaccagatcacagattattgcatgaccgtcgaaggtgatgaatgttgcagctgttgggatgcttactttgaactgaataaacttgagcaagagctgcccaaagaggaaatctcaaggatggtgaaggactcagagggtgacgtgaggtacctgatcgagagcattcatcatcgctcagacttgcggaagaagatagcagagaaatctcgtaattcagtaccatcaggctcccaggggcaaactgcaaagccaaggccattccccgtgcctgatgggataccgaaaacacaggaagagctcaccgaagaagaggaggcgttgatgccagagtctccatacacaaggttgctgagaaggatgggtagataccctgaatggtacaccccacgccctgatcatgagactgactgaatcaagtcatctaccatccaggtgtcccttttggaagttttgcagcatgataatctgaagctgaagctcgttttatggtatgtggtaatattttagtgttgcacctatgctgctatgcattagacttgtccttttctacttattaatgaaaaccggtgtgtgcggtttatgctgtaaatacctggagtgttcagaatatgttttgttcgaggttctgtgtactgaagtacggagtactaatgaatttccttgtacataacatcgaataaaatcactgggttttactaaaaaaaaaaaaaaaaaaaaaaaaaaaaaaaaacgtggcgcttagaggaaaaaaaaaaaaaaaaaagctctgcgttgttactgctttcctctttttttttaccactncttaatttttaattccaacacactnntccccccttactaaaaaatccaaactccctaccaacct

SEQ ID NO: 129125 - DNA, 321 bp, Zea mays
  Clone ID: MRT4577_49235C.1
ggggggggggtagaaaataaacaaggcctaattgatggatccttgggcccggaaacccaccgcacaaaaaaatggccgtagtaaaactatcatacgggggagggggttcacgcttaacatgcacgacattgtcacccaccttcactggagaaatggtaacagtaaaacttgccccgggcggcgcccaagtagaaatgccttgcttacatggacccggacgggtgttgcccctcaccaaaggggcagcaggtaccaaaatttggcctgttacgggttgacctccaaaattttggccccccgacccggggggggccccctttt

SEQ ID NO: 129126 - DNA, 581 bp, Zea mays
  unsure (1)..(581): unsure at all n locations
  Clone ID: MRT4577_49236C.1
tccgagtgtattaattgaaaagactaatcatgaaagacatacacagtgccacacaggtttggtagcaccattacttccnnnnntaacatgaaattggttcaccgtagcaaataaggacattacaaaccttcatgtgctttgccagctgtatccnnnnnctgcgccagtttccacaagttaccattgcaacgttgatccacttgttacagtcagaattttaccatcagaagagactgtcatgtggtcaaactggcaaatagaacctttagagtcttgaagtggaattgtcataactctctagannnnnggatcctcatcaagatagtatcttactggtctttaggatcaggcagagaatcaatctcagagttgacagtgaggccatgatacatatcatccacattactacaattggcttcttggttcttatcgccatctgtcaagtcatttgactgttcttctgataacgacaccaatgatttagtgtcacgcttcaaattatatagcctagatgcaagcctgtttgtgtccctccagacacgaagaccttttgctctctgttccattgaggagataaagat

SEQ ID NO: 129127 - DNA, 262 bp, Zea mays
  Clone ID: MRT4577_49237C.1
cacgccgtagcctcgccgcgcgccgtcgcgtcggcgcgccggaggctgcccatcgtcgtgcagttccacggcggggggttcgtcaccgggagcaacaccgacgtgggcaacgacaccttctgcacgatggtcgcccagctctgtgatgccattgtcgtccccgtgggatacaggcttgcgccagagagcatatacccggccgcgtttgaggacggtgtcaacgtgctcaagtggattaccaaacatgcaaatctcgccatga

SEQ ID NO: 129128 - DNA, 566 bp, Zea mays
  Clone ID: MRT4577_49238C.1
ggccgctcgaggggccggccgggcctggaaaaaaaaaaaaaaaaaaaaaaaaataaaaaaaaaaaaaaaaaaaaaaaaaaaaaaaaattgacaaaaaaaaaaaaaaaagccccaaaaaaaaaagaaaaaaacaaaaaaaaaaaaaaaacccaaaaaaagaaaaaaaaaaaaaaaaaaaatggggcccccggggcccgggaggtttaaaaaaaaggggaccccccgggtgggggaattgggttaaacggttttacaaaccggcgaattaaaagggggggacgggaaaaaaattggccttaaagaaattaattttttggggggaaatgggcggtttttcaaaagggggaaagaggggaaaaccccgggggtttcccattttgagggggtttggaaaaattccccgtttaaaggatggggtaaaaagaaaaggggcctgaaagaaaacccctttttattgggggcaaaccttggttggaaaggggaaaggctaagggtaaaaatttcttaaaaatcccgggaaattttttgttaaacgggtttttttttttccaaaatggaaaaagggg

SEQ ID NO: 129129 - DNA, 384 bp, Zea mays
  Clone ID: MRT4577_49239C.1
ggggcccctaagcggggaaaaccctggggaacttttttttttggggttgggcttaaaatatttgcagttttttaaaaatggggcccacaaatatatttttttcggaataatggaaaatctttttgggggcccccccaacccgttaaattttccccagggacccagggaatgggggatttttttgaaaaaccccaaaacctttttttgtttaagggtttcccccggatttttacgggccttttcctttcttttgccccgggtggttgggtggccctccttttctttttgggtggccccctttcccttaagggcttcttccccttaaggggggttttggccctccctctccttaaaggggggcccctttttataaaaaaagccttt

SEQ ID NO: 129130 - DNA, 161 bp, Zea mays
  Clone ID: MRT4577_4923C.1
aacggttacatgcgataatacattatgatacactagtgtcctttctgccccaatccccataccatggagcaaaaatctcgacacagcaaataagaaggccccattacaagactaacatacagagatgttcaagaggtaaacccaataacctttacaacgct

SEQ ID NO: 129131 - DNA, 619 bp, Zea mays
  Clone ID: MRT4577_49240C.1
cattgggaccctcgaggccggccgggacaagcctgtgatactcgagagctggaccgccgctgcattggcgcgaccccgaccgaacctcaactgctgcagacctggggaccgctcctgggctcgctaccgcccctcctccccctctcctctgccggccccgaccttcctggacaagcctgacatcgagcttgacctggctatgctccgtgagcacaaccacttgactatggagggccaggtggctagcaacatctccgccgaccatattgccgacatggacacccagaactcgatgaacctcctcctccgcatgctcctctctccggccgccgccagtatgatgggccgctacggaaacgacttcgtcgctgacgaatccaagaacaacgctcaagctgacctacgcactgctcattactaccacgatcacactgctcctactggcacttgcgctgcatgtgccgacgaccgcgcactcgcattgattgtcaatctggaccccacgaactgttacaaagctgcagcgtctagacgatgcacacctatgggatctacgtcgagaggactcacatctctagcttgctgccttgttccttacagcgacaccagattctctgcc

SEQ ID NO: 129132 - DNA, 805 bp, Zea mays
  Clone ID: MRT4577_49241C.1
attgggtacctcgaggccggccgggagtcacacgcacacccgctagcccccgtcccccgtcccgcccgtaccttcctccgccgcctccgtcctcgttccaaccgtgggcagcaggcaggcccaagtatctgcagtagattggtggagaggaagaagacggcaggcacccacgcagatcaaacgtgctccgccacccttggtttcggcgaatcggcgccgtacgccgtaaatcgagccgtctccgagcagatcgacgcgctgcatagcaattcgacccgtctccggccaaatcgacgtccagagctgcaaattgacccatctccgcgctgacctccgcttgtgcctgccgaggagcgccgaagttacgcccttctcgtgaagatataccatggagcgtccacgatttagtgatcatcttgaagcaatcaaatttatctgcaaagacttctggtcagagctgttcaagaaacagattgacaatctgaaaacaaatcataggggtacctttgtccttcaagataaccgttttcggtggcttactcgtgtttctctagatccatatacagagaacagagattcaactgaaaatgattctgcagcattgggtgatacagcagcccaaacaactaccatgcttctgtatttcccatgtggattgataagaggtgccttgactaacttaggaattccgtgttctgtctctgctgacatgtcaaaccttccagcatgttcgtttgtggtgcgcataaagacatgaactgtgagaaacggatacagtacagcatgaagatctgacagtacctgc

SEQ ID NO: 129133 - DNA, 359 bp, Zea mays
  unsure (1)..(359): unsure at all n locations
  Clone ID: MRT4577_49242C.1
gtcgggcagggcagctcctccgcgggcgaccaaaacgagatcgccaatcttttcccgaaccggtcacaccagtcctcggcgtgcctgtttccggcgctcgagcccgtggcgaccactccactaacaataggctttgttctctgcactcaacacgtcccgtgcggtcacaatggcatttgatgcatattctactatctacaggtgcgtgcgtaaggcagcaccttgtctggattctaaggacgcccagctataatcatgtagtgcaagtatgtacaactcactatagaacatgtgtgtgcctacagatatcatggtagatccgaactgatccgcantgaaaggaacatgattgtaacacc

SEQ ID NO: 129134 - DNA, 1212 bp, Zea mays
  Clone ID: MRT4577_49243C.1
gcggccgcccgctcacgtcccggtgaacctttgccggacgcgtgggcgcgcgctcacgtcccggcggccacgggccgggacagactcgagcccgtccgccgccttcgccgcgccgcctccgcctcctccatcgcacgccggctccgctgcctccatccgcgcacgtccgcctccactgtctccatccgctcgggagccgccgccctccgcgctaggcctcgcctccgtctggtctggattcttcgacacctgggcgctccgcgtcgccgacttctcgcaggcggagagtgaagagctgtgttgatgcggtggtcatggagatggtagcagtctactgcggtggcctctacaccgccaaaccagagcttgctgcccgccgcatcgaggccatcggcttccaagtcgggcaccagctctctgagagatataccatggagcgccctcgatttagtgatcatcttgaagcaatcaagtttatctgcaaagatttttggtcagagctgttcaagaagcagattgacaatctgaaaacaaatcacaggggtacctttgtccttcaagataaccgttttcggtggcttactcgtgtttctctagatccacgtatagagaacacagattcaactgaaaatgattctgcagcattgggtgatactgcagcccaaacgactaccatgcttctgtatttcccatgcgggttgataagaggtgccttgaccaacttaggaatttcgtgttctgtctctgctgacatgtcaaaccttccagcatgttcgtttgtggtgcgcataaagacatgaactgtgaggaatgatacaagtacagtacgaagattcgacagtatctgcttgtggttcaagccgggttgaacattgaagatagcagagtttgggcatgcattagatgtattgtggtactgcagaaatattctgtgtagctgttggtttctgtttccgtttcttccagcagttacctgttttcactacctcaattgtttccccacctcttcgtgaccgtattccagagtttaggttggccattcctgcactctaggtagccgccactggcaccatttgtgagagttaaactatggttgttggttgcattatctctgtggcctgtgatagcacccttaaagcatgattcttgccatgaatcgtaaaaaagtactcttctaagcatgatttttgctaccatgattaattgattgtg

SEQ ID NO: 129135 - DNA, 1553 bp, Zea mays
  Clone ID: MRT4577_49244C.1
ggtaccctcgtggccggccggggtgcaaggggcgagccgccagctactgctggccttttccctcacacaagtcacacgcacacccgctagcccccgtcccccgtcccgcccgtaccttcctccgccgcctccgtcctcgttccaaccgtgggcagcaggcaggcccaagtatctgcagtagattggtggagaggaagaagacggcaggcacccacgcagatcaaacgtgctccgccacccttggtttcggcgaatcggcgccgtacgccgtaaatcgagccgtctccgagcagatcgacgcgctgcatagcaattcgacccgtctccggccaaatcgacgtccagagctgcaaattgacccatctccgcgctgacctccgcttgtgcctgccgaggagcgccgaagttacgcccttctcgtgaagacatccttgataaacctgatggctatcgcggagagctgtgttgatgcggtggtcatggagatggtggctgtctactgcggtggcctctatgccgccaagccagagcttgctgcccgccgcattgaggccatcggctttcaggttgggcaccagctctctgagagatataccatggagcgtccacgatttagtgatcatcttgaagcaatcaaatttatctgcaaagacttctggtcagagctgttcaagaaacagattgacaatctgaaaacaaatcataggggtacctttgtccttcaagataaccgttttcggtggcttactcgtgtttctctagatccatatacagagaacagagattcaactgaaaatgattctgcagcattgggtgatacagcagcccaaacaactaccatgcttctgtatttcccatgtggattgataagaggtgccttgactaacttaggaattccgtgttctgtctctgctgacatgtcaaaccttccagcatgttcgtttgtggtgcgcataaagacatgaactgtgagaaacgatacaagtacagcatgaagatctgacagtacctgcttctggttcaagcgggttgaacattgaagacagcagtatttgggcatgcattagatgtatcgtggtactgcatttagccccgtttgttttttgttttcttttcctccaggaattacttgttttcactatctcaaaatgactttcccgcaacctcctcatgagagcatgtacaaccccatttaagggctaagtgaaaaaatacaaaatacgggctcttcgcgaagaatccgtcttatcatgactttctatacacgtcttttagctgtatttatgggccattcctgcactctaggtagccccccctggccccatttgtgagagttaaactatggttgttggttgcattatctctgtggcctgtgatagcccccttaaagcatgattctgccgagcaggggcaaccccatttaaggggtaagtgaaaaaaaacaaaattcgggcttttcgcgaagaatccgttttatcaaaaaaaaaaaaaaaaaaaaaaaaaaaaaaaaaaaaaaaaaaaaaaaaaagaaaaaaaaaaaaaaaaaagcggcc

SEQ ID NO: 129136 - DNA, 114 bp, Zea mays
  Clone ID: MRT4577_49245C.1
attttcatagaagaaccgcggggacctcgggatcattcccaagggacccaagagatcacttcccgccccgctgatagagctcttcttggacctgaaccggaacttaatggtctt

SEQ ID NO: 129137 - DNA, 908 bp, Zea mays
  Clone ID: MRT4577_49246C.1
ggtacccaaaattccaccgaatcgctgtcattgggtacctcgaggccggccggggcgcgctcacgtcccggcggccacgggccgtgacagactcgagcccgtccgccgccttcgccgcgccgcctccgcctcctccatcgcacgccggctccgctgcctccatccgcgcacgtccgcctccactgtctccatccgctcgggagccgccgccctccgcgctaggcctcgcctccgtctggtctggattcttcgacacctgggcgctccgcgtcgccgacttctcgcaggcggagagtgagcatccttgatagacctgatggctatcgcagagagctgtgttgatgcggtggtcatggagatggtagcagtctactgcggtggcctctacaccgccaaaccagagcttgctgcccgccgcatcgaggccatcggcttccaagtcgggcaccagctctctgagagatataccatggagcgccctcgatttagtgatcatcttgaagcaatcaagtttatctgcaaagatttttggtcagagctgttcaagaagcagattgacaatctgaaaacaaatcacaggggtacctttgtccttcaagataaccgttttcggtggcttactcgtgtttctctagatccacgtatagagaacacagattcaactgaaaatgattctgcagcattgggtgatactgcagcccaaacgactaccatgcttctgtatttcccatgcgggttgataagaggtgccttgaccaacttaggaatttcgtgttctgtctctgctgacatgtcaaaccttccagcatgttcgtttgtggtgcgcataaagacatgaactgtgaggaatgatacaagtacagtacgaagatccgacagtatctgcttctggtcaagcgggttgaaca

SEQ ID NO: 129138 - DNA, 251 bp, Zea mays
  Clone ID: MRT4577_49247C.1
ctcgagccggccgggacccggtgccccaccagcttcaattccctaccgcgctgcgtgcaccttctgtaagctcttgcagtcgatgcgatgatggccctcgcctcccgcgccgccgaaggcggcgagttgaacaaagctgcgagagagccgaattcccgatccacatcgcttcatgttagtatccagcatcgataacgcgcgcctgccagctgtactgcctcgagtatggctctcagcgtgtggggcaaata

SEQ ID NO: 129139 - DNA, 335 bp, Zea mays
  Clone ID: MRT4577_49248C.1
gcgagcatgcgtgcgcgtctgcgctgtgtctctctctatgtagatctctttttcatcccactctacctctgagacgaccgggggggcctcaacgacgccctaaggcaagggcggaggcgcttgagggggtctatccccaccagtagggaagaccgacacagagaagggaacatgcggccagaatatggaccaacaacgcgagcgggaccacgagggggggcacgggagggggtattaagcgccacccacacccgactacacctactacagccctgaacacgagaacgaagaccacggccgggagcccccacgggggccacccaatctgcggcaca

SEQ ID NO: 129140 - DNA, 472 bp, Zea mays
  unsure (1)..(472): unsure at all n locations
  Clone ID: MRT4577_49249C.1
cttacggcaagcctgtccatcatggtgttaaccagctaaagtttgctcgaagccttcagtccgttgcagaggagcgagctggacgccactgtggggctctgagagtcctgaattcttactgggttggtgaagattccacatacaaattttttgaggttatcctcattgatccattccataaagctatcagaagaaatcctgacacccagtggatcaccaaaccagtccacaagcacagggagatgcgtgggctgacatctgcaggccgaaagagccgtggccttggaaagggccacaagttccaccacactattggtggctctcgccgggcagcttggagtaggcgcaatactctccagctccaccgttaccgctaatataagtaaagtttgtaaaattcatacttaataaacaatttaggacagtcaaatctgcttacaggtgttatttgtctgtataaactagtccnnnn

SEQ ID NO: 129141 - DNA, 625 bp, Zea mays
  unsure (1)..(625): unsure at all n locations
  Clone ID: MRT4577_4924C.1
gtaccggtnccggnnatatcccgggcctcagaattatcacacaggacgcttcacaggtagataccatcgctgcacacagagacaccggtcgtggatgccaatggcttactaccagaaggataactactgatggaccagagtgaagagagaaaacctagcctgattccgtcgacaggtagcaaaaatacaggaaaaggtccgaaaataaaaacttgacgaggatacactggtctaacacgcgggcacaaaacacaatgatcaccaccattgtcactacggatggaacaaatgatgctcgcgcaataccagaatcaaatatgacattaacacctgcacttgctaggactagaagcgcaaaagaagattcctatgcaataataactgaccacacctgctgcacgaatgcaaccgcggtcaagcctggacgatctgcttacataaatatgcaaaagactgtgcagtgcacagctcatctgtactatgtatatcggactgtgtagcgaacttagtcttcagtactgattaacacgatatgcaccactaacagaatgaaactctttttggttctacatgatatggacaccttggcgcgcttgtcttagacacaaacccacctacagatgac

SEQ ID NO: 129142 - DNA, 302 bp, Zea mays
  Clone ID: MRT4577_49250C.1
ggggcccaaaaggaagctaaaattggcttgagcaaaatttttttgggttccattcacctcccttgggtgaacccaagggggggtttggccctactaagggccgggtgcccaagcttttttttcccagcaaaccatcaattaattcctgggcccctaacccttcaagaggggggggcttctttttttcgcaggttaatcctaccctgggaaattcaagatttttaaaaaagcccccccccttgagaccagaccccctggaaaacaaacttctgggatggtaggtcccaccccccttttttttt

SEQ ID NO: 129143 - DNA, 286 bp, Zea mays
  Clone ID: MRT4577_49251C.1
ggagttaaaacaaagaagtatagtttacagggtatacatacatacatacgggcttacatacttacatgagagatataagatggtttacgggtctcttataatggactgtgagggcccgagacagccaccatacatgtgtatttatgctaaacatattataacagaacccgggatttgacaagttggacccaaccctaagctgagacgcatattttaggattgcttggggcccacaacactgtaacataaaaccggagggtccttatgccgggaaaacccaaggaaa

SEQ ID NO: 129144 - DNA, 551 bp, Zea mays
  Clone ID: MRT4577_49252C.1
aacaaattctattgttgcattattgctgtaaccataacattaataaagaaaccaggaagtctgatgtggtgcttcccatgactcacaccagcctaaacggaccactacaagaacattaccgacctgcttgcacactgatgcgtactcaaagggcacctgacatggtccagattgagcgcctgataatttgctccaaatccatagatacttattgcacggggaccgatcttaacttgtacatcataaccttgacgaactacttgcatatacatctgaccgtcgccgtagacgtcggccacacagatcatatcgtagacctgctaaccattcaggtcgtctcactagctggacttgacatgctcggagctcggcagccgagatgaaaccgttctggtgcttgtcgaagtaccggaaggactccttgagctccacctctgagtccttgtccttcatcttcctcaccatgatgttcatgaactccaggaagtccatggtgccattgccatccagatacacctggatgatcatgtcctggagctttgcctacatag

SEQ ID NO: 129145 - DNA, 140 bp, Zea mays
  Clone ID: MRT4577_49253C.1
accgacaccatttaaaagatcagagctattcaacagccactcaaaacagattgaatcgggcgactcaacccaatactgtccggaagcatcctctacttcacgttccgtcagggactcacctgtcatcaacgcgactttca

SEQ ID NO: 129146 - DNA, 397 bp, Zea mays
  Clone ID: MRT4577_49254C.1
gggggggacccagcatcccgaaatttttaaaacggggggcaggggaaagaaaaaccgggggggcggaattttaaaaaccacatgggaaacaaaacaaaggggaacgggggggggggcaaaaccttacacaggaccacaaccaagtccccaaggaaaacacgggccccaaggggctagaaaactaaaaaatcggggaaagaattatggcaaaccctggatttgggaaaaaaattggaaaagcccccatgcaaaggcccggaaaccggtaaagaattaaaaaaaaggggggaaaaaatcaaggtcccctcggcacccgggattttgggggggtcccaaacggggttttccagggggggggaccaaacgccgatttaaggggtccaaaccaaattttttc

SEQ ID NO: 129147 - DNA, 283 bp, Zea mays
  Clone ID: MRT4577_49255C.1
acttacttgttgatcgccccatcgttggacacggttaatccggtgatatgcgtctctactaaatactatgtgtatcgtataaattccaggcacaaaatgcatgatttgtctcggatgactcgtatcatatgtccacaccgggcaagatgtggggtgagtgtgcccattatccctaactacatggtggggaccaaagaagctcctggcttctgccggaagagctgcaaagggtgcccaaagtaaagcaaaaaaactgatgttctcctctgcggcatcccccctt

SEQ ID NO: 129148 - DNA, 5088 bp, Zea mays
  Clone ID: MRT4577_49256C.1
atggcggctgctgagaaggctggagcagtgaagtgggatcaagtgttgagcaccctggatacaatcgtgcagaggatcgaatcggtggagcgcgctcaacagcagttggcgggacaacagtcgttggcgaattcggtggctgagcaagcggcgcgcgctcgtgatgagatggcacgccagattgccgagacaggcaagcgggtggcttcgttgacattggagcagatggcggctggcatggaacagtttggggatggatctcctgcgtcgccttcgacttcacctgtgtttgcttctgatctgaggcgtgatgttcctcctgggggacatcgtgctccacacgatcgtggtggtcatcgtcgtcggcatggggagcgcggtggccgtcatgaaccagatgggcatcaggaatttggcgaggcacctcctccgttcatgaagttttcctttcccaagtttggtggtgaatctccttcgatttggctggacaagtgccatgattattttcagatgtatcaggtatcccgctctatctgggtaatggctgcttccatgcatatggaagggaaggcagccaagtggcttcaggtctttaaacttcatcatgctttggggaattgggagcacttttcttctgctgtgttggatcaatttggattgtatgaatatcctaaagctatggatgatctgttgaatttgagacagactggctctcttgaggaatatgtttcagtatttgatgatttgcgttacagtactgctgtccataatcctcagctggatgagattttctttgtcgctcagtttgttaaaggcttgaagcgcgagattcaaggtcctgtgcgttgtcaagtaccaactacggtgaatcgtgctgttctgttggccaccttacagcaggatgttttggacaagagtcggcctaagtttcagtccactgttggggggaaaagaggtattccagggctaccgcctgactctcaggaaggtgtggggttgtccaaggaacgacaattgcgggattatcgccgggctcatggtttatgttttacttgtggtgacaagtttgatgctggacatgctgctaaatgtggaaaacgagtaccggcggtgcttaatgttttgactgtggatgacatggctttggaattatcagatgaagttttacagcagttggatcaggaggatcactctgtggtggacttgtgcagtttgtcggttcatgcagtttctgggactgaaggagtggatagcattcgcttgcgtgctttggttcaaaaccaggtgtttctattgttggtcgattcaggcagttcagcaactttcatcaattccacgtttgtccaacaagcagggttgtttcctcaacctgtttccactattcgagtcaagactgctagtgggcaagaactggtgagcactactatggtgaaggcagttgagtggtggtgtggtggacacactttcaccactgacatgagggtattggatttggggccttatgatgctattttagggtgtgattggttgaaacaaaacagtcccattacttgtaattggaatcaaaagtctctgggattttcttatcaaggctcctgggtgcagttgcaaggtctgttacctacggtccagcagacggtgactgaattgtcggtggtccagttgagcaagtggttttctggcaatgaggtgtgggctttggctttgttggatttctatccggatggcacctcttcttctcagtctgctgctaccagtctagcagttcataatcttcttcttcagtataaggatgtttttgatgatcctaaaactttaccaccagcgagagtattcgatcatgccattcccctcattcctggtgctgttccagtgaattcaagaccttatcgttattctccatatcataagactgaaatagaacgtcagaaaaaggatgggtcatggcgtttctgtgtggattatcgcaagcttaatgagcttacagtgaagaatcgatttcctatgccagtggtggatgaaatcttagatgaattgcatggcaccaaatattttacaagtctggacttgagggcgggttatcatcaagttcgcatgaaggagggcgaggaatttaaaacagcttttaaaacacacagtggtcattttcagtttaaagtaatgccatttggattgaccaatgcccctgccacttttcagtgcgcaatgaattctattttgactccttttctgcgtaaatttgccttggtttttattgatgatatactcatctacagccctaccttcgacttgcatttgcaacatttgcaactggtgttagacaccctcaggcaacatcagttttatttgaagcagtctaagtgccagtttgcacagcagaaactcatgtatctgggccatattatttctgtggaaggagtctctaccgatcctagcaagactgaagtcatgttaaagtggcctactccttctactgtgactgaacttcgagcttttttgggacttactggttattatcgacgttttgttaaacattatggtctcattgccaagcctttgactactttgttgaagaagaaacaattcctttggagtgaggctgcgactgtgacttttactgctctgaaacaggccatggccagtacccctgtccttgcattgcctaatttcgctgaagtttttacagttgagactgatgctagtgatgttgggttgggtgcagtgcttatgcaaaaaggacagcctctagcatacttgagcaaggctttatctgagaagaacaaacatttgtccatctatgacaaagagtttttggccttgattatggcagtagaaagatggcatcttatttgcagtaccaagagtttgttattcttactgatcatcaaagtttgtgttatctggaaagtcagcaactgcaatctgatctccagaggaaggctatgtctaaactcatggactgtgtctgaagttcaaccaatgtggttgcaagaaatccttaattcttatatgacagacccggtggcccaacaacttttggctcagttggctgtcagtagtcctaatgaagaaggtttttccatacaccaaggtctgataaaaaaagggaatcagctttgggtgggtcacaattcagctctcaggaccaaacttatttctgttttacatgatagtgctttgggaggtcattctggtatcatggctacatatcaaagggtgaagaaagcattttattggcaaggtcttaagagggatgtggaggactttgtgaaacagtgctgcatttgtcagaaagccaaatctgagcatgtccaccctgctggtcttcttcaacctttacctattcccactggtatttggcaagatatctctatggattttatagaagggttacctaaatcggatggctattctgttattttagtggtggtggataggctatccaagtatgcccattttttccctctcaagcacccatttacaactggtcaagtggctcaagttgtgtttgacaacatctgcaagttacatggattgcctaaatcgattgtctcagatcgcgataaagtgttcactagcactttctggaagcagttgtttactctgatgcagaccaagctcttattgtctactgcctaccacccacagagtgatggtcaaactgaacgtgtcaatcaatgtcttgagatgtatctcagatgtgctactcatgattctcctactaagtggaagctgtggttacctttggctgaattttggtacaatactacatatcacacctctttgggttgctctccttttaaagtcgtctatggatatgatccccctgtggctgctgctcctagtcttttgttacctgaatctggtgggaatggggttgtgcctgcgattgatatggctgtccaggatctgctgttgtctcgcgaacgacatctggaattgcttaaggtgcagttggctcgagcccagaatcgtatgaaacagaaggctgatcgttcccgtactgagggggagtttcaagttggtgaattggtgctgcttaaactgcagccatatgtgcaacattctgtggtttttcgttcctgtccgaagctggcttttcgttactttgggccttataaggtgttgcagcgtattgggcaggtggcttacaagttggatttacccccggattctaagatccatcctgtctttcatgtgtctcagctcaagagtttcaccccaaatcattgtccagtgttttctgagttgcccactactctgtctttagatcagggcattctgaaaccagttcgtattttggatcgtcgtttggtccgtaaagggaatcaggctgttcctcaagtgcagatccagtggactaacaagaaggatgaagctacttcctgggaggattggaatgtgcttattcagctctttcctgaattaagtacttggggtcaagtaccaactgaagagggggcgagtgtgacgacttcgaaggtattttaccgaccgttcccgaccgttttcatccctaagcccaccaagccccgggtgttcttcctcgacgtcaatcctctatgcttccgcggctcccagcgcaacctcggggccttcgcgcgctggctggcgctcttcttcgcgcacgtcagcctccgtgaccctgtcgttgctgttgtaagagtccatggatacgaggctgatgatgtggtggctaccttgacagaacaggttctacagaaaggttacagagttgtcatagcctcaccagataaagaattcaagcagctaatatctgatgacgtacagttagtcatgcccattcctaagattggccgatggtctttctatacattaaggcattatgtcgctcaatacaagtgtgatccaactgcagacttaagccttagtgagtatatttcttcggtattgatccatggtttctgtaaccattgggactctgttatatttgagcaacttgctatctatgctgcacagggtgcttcatgggtgatgaagcagatggtgttccaggaatccagcacttggttctgggatttggcagaaagactgcacttaaactactgtaaaaacatggttcattag

SEQ ID NO: 129149 - DNA, 471 bp, Zea mays
  unsure (1)..(471): unsure at all n locations
  Clone ID: MRT4577_49257C.1
ggagggggggccttaaaaaagggggcaaattttttgggacgagggttccgttcgggggtatcctttgatttcggggttagccttcgttacaactactacaactacaaaaaacaactgccaacgattttggcagcagaaaagcaacagggtcggaacaagcaaatgcggaaaaggcgggttttacccaaaagctagtttattcgggggggtgagcagaatttccgggcgggccattttggccgacccaacgagcctaagccggcccgggggcccctcgacgggtccaaacgcatgggggcccggggggcactcaagcgcggcctccagggggggggggggcccccctgttgtctcccacggggtacccccccttggggacgggcccgggggggaacgcaacaacccaaccacaatgggggggcacgaggtccatcaccttctgggagttccaaatgaaacccggnggggacg

SEQ ID NO: 129150 - DNA, 1589 bp, Zea mays
  Clone ID: MRT4577_49258C.1
cgcttctatccacaaaccccagccgcagcgtccgtgtaccagtgatgttgccactgcccaccgtgggcgtgggggctatcgccgcgtcgccggccaccgccgcaggggtagcggcgcccataaggtttcgtccgctccgcctcgtcgcgagtcgagccagcactaccccttcttctccctctacgtccagctcggctatatccagcgcgtcaccagcggggcattcccgcgagcacctgtcgggcagggacggctccccatcgaagaccagcaagccccgggtgttcttcctcgacgtcaaccctctatgcttccgcggctcccaacgtagcctcggcgccttcgcgcgctggctggccctcttcttcgcacacgtcagcatccgtgaccccgtcgtcgctgttttggacggggatggagggaacgagtaccggaggcggctgctgccttcgtacaaggcgcatagggctcgcggcgtcggcactggcgctgacacgcgcgtcgtcgacgttctccgccaatgcaatgtcgcggttgtaagagtcgatggatatgaggctgatgatgtggtggctaccttaacagaacaggttttacagaaaggttacagagttgccattgcctcaccggataaagacttcaagcagctgatatctgatgatgttcagctagtcgtgcccattcctgagatcggccgatggtctttctatacattaaggcattatgttgctcaatacaagtgtgatccaactgcagacttaagccttaggtgcttcatgggcgatgaagcagatggtgttccaggaatccagcacttagttcctggattcggcagaaagaccgcagtgaaactactgcaaaaacatggttcgttagaaaacttgctaaacacggctgcaatcagaactgtcggcagaggttatgcccaggatgctctcactaagcatgcagattacttacggaaaaattaccaagttcttagcctgaagagggatgtaaatgttcagtttgacgacagttggttatccccgaggaacacatgcagtgacgccaatgttctagctgactttcttcttaaactgagtggccaaggcagaagctaaatagctggtacaacgacgcatttgcacaagctggacttgttcctcaccaaccacaggatttaacaagaaaagggagatgcataaaggttgaaggagccggttgctgtaaaaaaaattgcgtatatccttgctccaaagtagtagccatcacacattctcgcttgtgattcgtggaactggagcagccctacctgggttgaagctgggtggaaaaatggaagtttggaaggtctgtctgggtgggtacatggtgacgggacaagcttaagaatatacagggataagctatagtggtagtactactgtgctgtaggccgtaaagtccacaagtaccttgccaggagattacagatggcgtacttcgtactggtagcgactcgttgatgtacaactaaatgcacgcgggttttttttttgtaaagattgtactgagacacagtgtcccgacgctgtcaggaatcatctttaaatcatttttagtgacac

SEQ ID NO: 129151 - DNA, 346 bp, Zea mays
  Clone ID: MRT4577_49259C.1
aaaaaaaaaagaaaaaaaaaaccccacccatgcccaaggaggctccgcctctcctcgccgccggcatccgaactgccatcccagcgcagcacccatcggcgaggaaagggcccgctggggcaggttggatcggcagccggggcatcgccaaaagcaggcccagggcaaaagcaaagatcggagaggaagaggtggcgcctgaggggaaggggaagaacaccaccaaggaaaaggaggcaaaacaaaacggggaaaccgcggggaaaaggagaggaggagaacacaatgaggacacccatgcccaaaatcgtagccttcggaagggccacccccttcggcatcctcg

SEQ ID NO: 129152 - DNA, 650 bp, Zea mays
  Clone ID: MRT4577_4925C.1
cattgggacctcgagccggccgggagacagcacaaggagaggccgagaagcgctttattcgcattcgtagcgacaagagtgagatacctcggcgcacaccgactattgaggacacggaggactacgtggcgcaccacggagatacgcgcctccacgccgatccggaatacgatctcctccctcggggcaaggactgacagcttcgcttccaagatggaccgaagctctccctgcgcagggagaaggccgcttccgaggacacatctgtctccggggacgagttgatcgaaggacatcaaagctaagtgagaagccgatcgaagacaagcccaccgtcctcttgtacacgcggcggcaccggcagcaccctagtggatgacgaacacggtcgcgggcgacaacaacgacatgccgctgctccccaagatcctgaaggtcagtgtgctcggctacaccggctggatagagtaccgctaccttctgttcaagaaaatcatgaaagagttgaacgacgacattgatagcttgaacacaaaaatactatgaaacagaatagacgctcatggaaagatatagagcgtcctatcatctttggacagagatctatacgagcggagaaccaatgcaaatacttgagtactattattgcc

SEQ ID NO: 129153 - DNA, 479 bp, Zea mays
  Clone ID: MRT4577_49260C.1
aaacatttccataatcttcatgttatattatacataaaccaaattattcaatctttggtgttccagtcggtttcgtttctttgtatgtatatagaaagtaaatactagtaccgtcttcaacagtttacccatatggttatcaaaaacactgtcgcggagtgaagtttgaatgatgatgtggatgagtaagctgctggagatagcctaatgagtaagcacgaaccaactatcaaagaaacacaataactcaagtatgctttattacttacaaattaaaaactactccaattatgttcacagccgaaggtctcagttaaggctgtcaatagcatcccaccaaccaactgaaatgtttatctctatgttagagaactagcatgttcaaaactaactacaataaatgaattagaattttaaattacttacgagagttctttgccttttgttgctttattgccaattgcttcccaaagtttctg

SEQ ID NO: 129154 - DNA, 359 bp, Zea mays
  Clone ID: MRT4577_49261C.1
acgtaagctcggaattcggctcgagccgaatggagaagctcactataaggcgcccgcccagcttgtctttaacggggcgtcttttgacaacgattggcgggagaacagcggaccccattatggaggagcacggatctactgcaaactggcacagcaggcgatgcagtagggccaatccaactgggtcctgcatcgggcgaacggtttcagcaggtacacacgagggagggcacgcatacaagaaaggtgtgaacctgcagaccctagtaacgctgataaaaaggagaaccgcttcaacctacagatgggacgggcggactggatcacgcttgctcgccgcacggacggacactgacagt

SEQ ID NO: 129155 - DNA, 271 bp, Zea mays
  Clone ID: MRT4577_49262C.1
gtaaaacaccgaacgcgccgccgctcctgccctgccccctttatctataccaccgaaggcttaggaaggggggccaaggacgagcgctttttcgtgcccgctggccattgccgctgttcacgagcctcccgtcccgcgctgtcctgccctctgcggctttgccccaacgagccccaggagagccaggttatggatcctgtcaaaagcccccgccttggagagttcgcatggacatgtgtgtcttctgttaccctttagtccagttagaacc

SEQ ID NO: 129156 - DNA, 265 bp, Zea mays
  Clone ID: MRT4577_49263C.1
agcggcttccactgtagatccgagccggcgtgatcataccaaatcttacacgcatcatactagcatgcttgaaaacattgagcacctggggttctgtatttatcgactgggtcatgacatggatacttacaaactgcaacgcagagaaactattaaaggtattcagaaacgtgaagccagcaattgtttcgcaattcggcattttgaaaacaaatttgccgaggaaactttaatttgatcttgaacagtcaagaaaaacattatt

SEQ ID NO: 129157 - DNA, 502 bp, Zea mays
  unsure (1)..(502): unsure at all n locations
  Clone ID: MRT4577_49264C.1
ggccatggcgcgcgcggctgcctggccacgacgcaggccccgggggccgcgccaggctgggcccccggcggcacgggcgcagaggcccctggcggcgcgggcgctccggctaggccccagcgagccgagcatcccttggccgtcagcctcgtgcgtgcccccccttcccgtcggcgcgggtgccagccaaggcacggcggcggcggcccggccgcagcctcggcgcgcgggctcgggtgcggccccggctcaggcggcttcggccgcggcgcgaatgggcgggcgcgcagccccggcatgcggcgcgggtgcgtgtccgtcgacacgtgtgcgcaacccgcggtacgcgggccacgacggctgcgtgggcagcggtccccgcgtggcctacggcgctcgagcacgcggtttcagtccgaaccatgcgggcacggtggactttggcgcacgggcacgtggacccgtggggcgagcacctgccangcttgggcgcgcccgcccg

SEQ ID NO: 129158 - DNA, 286 bp, Zea mays
  unsure (1)..(286): unsure at all n locations
  Clone ID: MRT4577_49265C.1
gcaagctgaagacacggccaacaagcttgatttggatggacttgttgtcattggtggtgatgattcaaacaccaatgnctgnnnttttttttaatacttanngnnttttttttttttttgggnnnttaaaaaaaacaccccnnctcttttttttttttttagattcncngaggctncccccagggcccccttnaattcagcttggaagatatactctgaaatgattggnaatgttatgactgatgnnagatnnanngnaaaatactacnactctgngaggcttatg

SEQ ID NO: 129159 - DNA, 366 bp, Zea mays
  Clone ID: MRT4577_49266C.1
cattccaatccaacttcaaccccaatccaatccgttgtacgttcgcagatgggtccgagtgtgcaccaccatgcccaccaggaggcagaggaggacaccgaaggtgtcaccaaactcatcagcgccctggtctggggggtgggcttcgactagaaggccgacatggtctccaacatggtatgcaacatgctcacatacatggtcggattctccgagacgctctacggcaaggttcacttccaggatatcctcaccaatatcctcaacaatatcttccagtacttctattggtccttccattattccattggttatgaaacagcaaaggttatgatcgaacctctgatcaccctggagctcatgatg

SEQ ID NO: 129160 - DNA, 568 bp, Zea mays
  Clone ID: MRT4577_49267C.1
aacttcaaccccccacgccactcgccaacgcctccgccgtccactcgccttctcgccgccacttgctctgctcaccgcgagcgcgtgcgtgcgtgcgcgcccccggagcgacgatggccgccgcactgccaccgtcgccgcccgccgccctcgcggcgctgctgctcctggtgatgctttcgccggccgcggcgcgcgtccctggcgtgtacaccggcggcgactggcagagcgcgcacgccaccttctacggcggcagcgacgcctccggcaccatgggcggcgcgtgcgggtacgggaacctgtacagccaagggtacggggtgaacaacgcggcgctgagcacggcgctgttcaacgaggggcagaggtgcggcgcctgcttcgagatccggtgcgagaaccagcctgggtgggcgtggtgcctcccggggaggccgtccatcgtcgtcaccgccaccaacttctgcccgcccaactacgcgctcccctccgacgacggcggctggtgcaacccgccccgcccccacttcgacctcgccatgcccatgttcctccacatggcgca

SEQ ID NO: 129161 - DNA, 292 bp, Zea mays
  Clone ID: MRT4577_49268C.1
cacgcgtccgataaaaaaacaacaaaaacaaaaaaaaatcatcatcaggttaaaggttccttaaggttttgtaaaaagggcaatggcagaagactgatatgaaatagggttgccgtcctagaaggtcttaccttagttaccattaaatagtcgctgaagaatcttctagcctcctaccgaaatttacttcattggaaggtcattaaaaacctggagactgggaagactcgggggttacgcatcttaaccgtcttgcccaaaaaccccatttcccaagctggcgaaaaaatga

SEQ ID NO: 129162 - DNA, 708 bp, Zea mays
  unsure (1)..(708): unsure at all n locations
  Clone ID: MRT4577_49269C.1
cccccacccactcgccaacgcctccgcccgccgtccactcgccttcttgctctgcccaccgcgagcgcgcccggagcgacgatggccgccgcaatgccaccgccgccgctgcccgccctcctcgcggcgctgctgctgctcctggtggcgcttccgcccgccgcggcgcgcgtccccggcgtgtacacgggcggcgactggcagagcgcgcacgccaccttctacggcggcagcgacgcctccggcaccatgggcggcgcgtgcgggtacgggaacctgtacagccaggggtacggggtgaacaacgcggcgctgagcacggcgctgttcaacgagggggagaggtgcggcgcgtgcttcaagatccggtgcgtgaaccagcccgggtgggcgtggtgcctgccggggcggccgtccatcgtggtcaccgccaccaacttctgcccgcccaactacgcgctgccctcggacgacggcggctggtgcaacccgccccgcccccacttcgacctcgccatgcccatgttcctccacatggcccagtaccgcgccggcatcgtccccgtctcctaccgccgggtggcgtgccggaagtcgggcggngtgcggttcaccatcaacgggttcaggtacttcaacctggtgctgatcacccacgtggcggnggccggggacctggtgcgggcgagcgtgaaggggtccagcacc

SEQ ID NO: 129163 - DNA, 315 bp, Zea mays
  Clone ID: MRT4577_4926C.1
aatataatataaatttgttccatttaatatattataaattaacatttgtaaacaatgcatacttttgtgtgggctaacccgaacaaacatacaaggggttgggctcgggttacacccaactgtatatgatttcaccactccaaaaaaaagggtccaccgagtttccaaaccaggggggggggggcggtcatcaaatttgttacaacggggcatacctggaagccccccgcccaaatttttgggttaaacactgccctaaagctaaggctggatttggggactactacactccctgggatgggggcgacaaaaacc

SEQ ID NO: 129164 - DNA, 112 bp, Zea mays
  Clone ID: MRT4577_49270C.1
atccaattccaatcttagccgttctcagaggctgcttctaccagcgagcgacgcgtgccatgcgtctcgccgctgcgtccgccatacccaggctccgcttagcgtctggccc

SEQ ID NO: 129165 - DNA, 254 bp, Zea mays
  Clone ID: MRT4577_49271C.1
ctcgctgctcccctctctcgccggagcgagccccgggccggattgcggcggcacagcagctcctcccgcctccgcgatctcgtgatttacgccgacgccgacgccgccgcgatccgccgattgacgactccggaagggcaccaccacccgcgccaggggcggtgaccgtctccgccacctccgcactctctcctactccgccctccgccacttccgccgccgacaagtcctccctcgactcctactcgctttat

SEQ ID NO: 129166 - DNA, 500 bp, Zea mays
  unsure (1)..(500): unsure at all n locations
  Clone ID: MRT4577_49272C.1
ctgttgttgtttttttttggttttctttttcttctcttttgcgggggggaagggccagaagagcaaagtccaccaacaagaaacaaaaaagaagcgaaaatgatgcacggcggaagaacaagaagggcccaaaaaaaaaaagccggggggggggaaaaaggaaggaagccacaaaggacccccgggaaagcaaagcggggggggggccagggacaaagccttgacggcaaaccacagaaacgggaataactaacatatgggccccggaagcacgagggggagcaagccaaaacccgggcccccttctctccgggagaggcccggaccccccgggtaaaccccccccccccaaaccaaggcccgggaaaacaaagggcccccccccccactagctcgggcccaacggaaggggggccgcgggcaccttaacanacccccggccgaatggggccaggacaaagcccccgccccagaccccccgggcggtggggcaccctttt

SEQ ID NO: 129167 - DNA, 133 bp, Zea mays
  Clone ID: MRT4577_49273C.1
gcggccgttgccttgtcggtgtccctgacctcgctgttggcgaggcgatggggcgcagggcgccacgcgacggggggtgcattcccgctgccacacggaggatgtttagctcggtcgatttgtccgcatgtgc

SEQ ID NO: 129168 - DNA, 423 bp, Zea mays
  unsure (1)..(423): unsure at all n locations
  Clone ID: MRT4577_49274C.1
cctctannaccccttggtttttttttttttttttaaaaaaaaaattttgggggggttttttttttttttttttttttttttttttttttttttttttttttaaaaaccatcccttaaaaattttttttttaaatcccttttttttttttttaaccccaacaaaatttttttttttttgttacgaggccaccttttaaaaaaatccctttttttaactttttcaaaaaataatatttttaaaatanccaattttttataaccccccacatttacatttaccctttattttccccnaaatttccnaccctttccttcanncctccccctttttcctttannnantccttttaaaatttnncctaatcaanntcatatctttttccttttnaaaatttttttcccctcacaattccccacaaaatt

SEQ ID NO: 129169 - DNA, 478 bp, Zea mays
  Clone ID: MRT4577_49275C.1
accacaatgaatgtactgtttcagtttagtatcgatgagatgataccaatctcatgtttgtaagaccaacttttctaacgagacgggatgctaagttcttaggagctgaactaacatatgttggtgcctagcactaggcgtgaaccttcgatctgaagcttgccaaattccaggaagaggaagagttttacgatttgaagaatgcctgaacatgtaataaaacatgcagtggataagtggtgcgctggttcgcgactcgcgagtaaagggctcaacgaggttgacttcaaactgctaactgcacagactagagcttgtatttatgtttgctgcggtatcagatttggtgtagccattcctgatgtaacctgtttcccttcgggtgttggtcggctgcggggcttcttgtttggaagtctttggagttgctacgtttttttaaaaaaaaaaaaaaaaaaaaaaaaaaaaaacaaaacac

SEQ ID NO: 129170 - DNA, 458 bp, Zea mays
  Clone ID: MRT4577_49276C.1
gggggcaaaaaacgggttcacggccaaaggcaaaatagcagttttggaacaaatctcagcaacgggtaccctacgggaacaattaaacaacagggttcgaacaaattttagctaagggtccccaacagatgggcagattcaattcaatgggggggggaaaggcggggaaacaaccccaacgggggggatggccctggggaactttgagggtgcaaagggggcccatcatcagcgccccaaaaaggggggcggggcgacccacccgaagaaggctttgccccacctgaaacaatgttcttgaaccaagcccccgggaaacaagggcggcctttattttgatgggtccccggaaacccaggggagggttgatttttggaagacaggcccgccaaaaatcgggaggccaccctacgggcattcacgatttctggtttagcctgcctgaactaaactggggg

SEQ ID NO: 129171 - DNA, 574 bp, Zea mays
  unsure (1)..(574): unsure at all n locations
  Clone ID: MRT4577_49277C.1
cgagacgggatggctaagttcttaggagctgaactaacatatgttggtgcctagcactaggcgtgaacctttgatctgaagcttgccaaattccaggaagaggaagagttttacgattttggataagtggtgcgctggttcgcgactcgcgagtaaagggctcaacgagggtgacttcaaacttctaactgcagagactagagcttgtatttatgtttgctgcggtatcagatttggtgtagccattcctgatgtaacctgtttcccttccgtgttggtcggctgcggggcttcttgtttggaagtctttggagttgctacgttttttacccgccacttggccgacttgtggcacttgagtgttcatctccttggcttctagaccccgttagagcatcaccagcagctgcgggagatgctcttagcaagttccagtttatcagtgaaaaaaaaaaaaaaaaaaaaaaaaaaaaaanaaaaaaaaannaaaaaaannnaaaaaanaaaaaaaaaaaaaaannaaaaaaannaaaaaaaaaanaaaaaaaaaaaaaaaaaagggggggccgtttta

SEQ ID NO: 129172 - DNA, 2552 bp, Zea mays
  Clone ID: MRT4577_49278C.1
cattgggtacctcgaggccggccgggattgttcgcgtcgtccgccttctctctctctctaacccactgccagccacctctgcgaccgtcgcgaccactcgccaagtaaattttcttccgcccacctgactacgcctcgacctcggcctcggcgccgcctccgtccgccggacgcggcagccatggcgccagcggtggggctcaagcgctccgccacgcagaccatcactctgccgccgcccgacacgcggctggctgtgcgcgatgtcatgcggtccacgatcccgtcgcagcccgccgtggcgccggcgtccacggagaggcaggcgcccgccgcggcgttgcaggggttcctgtgcctggaggaggtggacgggaggcggtggagctacgtggtggacggcggggccgcgaaggggaggagcaggggcggggccgtccccgctggggccgccgtcagggccgtgccgctgcagtcgccgcttccgcctgccgaggaaataatggcattcataagatcatatgttgtgcctgaagggtttccagacagtgttactccttcatatgtaccttacatgacctggagggctctgaagcatttctttggtggagcgatgggggtgtttacgacaagaaccttgctgagttctgttggagtctctcaaagcaaggtaacaccaggtgccattgctatcaactggatcctcaaggatggtgctgggcgtgtcgggaaaatgctttttgcacgtcaaggaaagaagtttgactatgacctaaagcagttgcggttttctagtgatctcttgttggaaataggagctgggatagaattaactactgctgcattccctcagtttttcttgcctatggcttgcgtagccaatgttgtaaagaacgtcgctgctgttacgtcaacttcaactcgcactccaatctataaggcctatgctagaggagaaaatattggagatgtcactgctaaaggcgaatctgttgggaacattgcagatctgctcggtactggtttgagtatctttatctcaaaaaggaatccctcactggtgacttcgtttgccttcctttcctgtggatatctcctgagttcatatcaagaggtgaggtctgttgtgctgaataccctaaacagggcaaggtttaccgtcgcagtggattccttcattaaaactggtcacattccctccttgaaggaaggaaactcacaggagacgatatttaatccaccttggcggcatgagccagtcgcaataggttcaaggtttggagaagcatttcaagagccagcttcatttcttgccatacgacctctgtttgaggacgagagatacatggtaacatataacccaacaaaggataaagtatatgctttgctcaaggaccaggcaaaatcagacgacattatcaaagctgctttccatgctcatgtgctattgcattttattaatgcatcacatgctcggaggctgaagcagaagcagaagcaggcaaaccctgaccgatcagagtatctgtactctagaaacatggatttcctggcacacatcgctgaatcttgcaaaatcgtttcctcatcatatggaacattcaagaagaaagcaagggaacagggttggataatgtcagaatctctgctcaaccctggcaaggctcgattatgtgcagcaaaaccacaatgaatgtactgtttcagtttagtatcgatgagatgataccaatctcatgtttgtaaagactaacttttctaaccagacaggatgctcagttcttaggagctgaactaacatatgttggttcccagcaataggcgtgaacctttgatctgaagcttgccaaattccaggaagaggaagagttttacgatttgtaagttccatctcttttgtgtctaggcgttgtagggtgcacttctagtttctgatcgtttttgtgtttgaaattatcggcatataaacaggaagaatgcctgaacatgtaataaaacatgcagtggataagtggtgcgctggttcgcgactcgcgagtaaagggctcaacgagggtgacttcaaactgctaactgcacagactagagcttgtatttatgtttgctgcggtatcagatttggtgtagccattcctgatgtaacctgtttcccttccgtgttggtcggctgcggggcttcttgtttggaagtctttggagttgctacgttttttacccgccacttggccgacttgtggcacttgagtgttcatctccttggcttctagaccccgttagagcatcaccagcagctgcgggagatgctcttagcaagttccagtttatcagtgaagagtcaatcactgatgtcgtccatagctccttcaaaccttgtacatacatgatcggtaataactgcaagccttctttctgttgatatggcgtgctggtgtggacctgtagtatggtatccactgctgtgttattgtgtatgctcttttttacaaaaaaaagaagaagttattgttgtgtaattgtgtttgtcagatgagtgagccccaccgttactgatc

SEQ ID NO: 129173 - DNA, 341 bp, Zea mays
  unsure (1)..(341): unsure at all n locations
  Clone ID: MRT4577_4927C.1
aatttcgagacacttcctacaggccgagaaataanctccgtggcaattacaaagttgtttggatgaggatccccaaggcccacttgttacttgccgtgcgcggtacctacaaaggcctcaaggggaaggtgatgcatgtctaccgacgtcagtgtgtcattcacgtatcgcggatcacccgctactaggtgaacggctccaccgtgaacgtaaacatccacccctacaaggtgatcgtcactaatctgaatctcgacaaggaccgcaaggggctactggaccgcaaggcccgagaccgctccgcctacaaggctaatggcaagtttactgccgacaacgtt

SEQ ID NO: 129174 - DNA, 348 bp, Zea mays
  Clone ID: MRT4577_49280C.1
aagataaactgaggacatatgagtgcaatcagacacacaaactcgaaagctgaatgggcccaatgtacaaaggatagggaggttaacagcaactagcaggagggggatgccacagaagaaccaacagcacgagggtactgttactctagtcaatggcacggcatgagtaccatgtaaaagtgctcccatgctcattgcagatgctaataacggttgctatacagttacaggtctaaatcgctttcctggcagtacagtccaacggctttccttggagccttggaactgaggactctgtctaagttctgaggcactcatggagatctccatgatgaaacaaaaagttgg

SEQ ID NO: 129175 - DNA, 273 bp, Zea mays
  Clone ID: MRT4577_49281C.1
cgctcgagtccgaccctgtccatggcagcaggcgccgctggctgcccaccagccgtcgtcgtcacgctagtctcctgatagatgcatgggggccgcctcccgccgcgcggcgccggcgccggcctggcggtcgtcgtgcctagcgctgtgcctgctgcccgtcgagctgccgctgctgctgctctgtcggccgctgctctagattgttgtcgtcttcacccgcttacgccgtcgccggcgcatgctgttgttgacggctgctattagcaggat

SEQ ID NO: 129176 - DNA, 334 bp, Zea mays
  Clone ID: MRT4577_49282C.1
aaacccggtcgacctcgcgtccgggcttctgggacaacctgtacatcgacggcgtggcatccgggagcgcgattgaccggtgttcgaccccacgggcgcttcacacgacgccgtgctgggaaccccagccaggtggtgttcatggtggacgacacgcccatccgggtgtactagaacgccacgctgcaccaaggccgtggtcacggccaccaccggctctgcggctgcggatgcggaggccaacggcaccaacaccaccacctacacgttggctgatgctcctgctccgttgcctgggccgtagccgatggccgtgtatatcttcatttggaac

SEQ ID NO: 129177 - DNA, 448 bp, Zea mays
  Clone ID: MRT4577_49283C.1
tgctgatccgaagagctagcgcgcgatggccaacaacctcctccgtccgctcgcgctcctcctggccgtcctcggctgcgcgctgtgtccccgcgccgatgccaccgcgttcgaggtcggcggcgacgacgggtgggtcgtgccgccggccagcgacggcggcaggtacaaccagtgggcatccaagaaccgcttcctcgtcggcgacgtcgtccacttcaagtacagcgaggactcggtgctggtggtgacggaggccgactacgacagctgccgcgcgtcgcaccccgtcttcttctccaacaacggagacacggaggtgacgctggaccgcccgggccccgtctacttcatcagcggcgagaccggccactgcgagcgcggccagcggatggtcgtcagggtcgccggccagggcgcacccccgccggcgccttccagcccggcg

SEQ ID NO: 129178 - DNA, 350 bp, Zea mays
  Clone ID: MRT4577_49284C.1
ggttaacagacactaaaacaggtccgatagacagaagaatgttgatttacatcaaacagcgtttacttatatatggacctggatgttggaaactcggagacaatttgattaaagccggccaaatcctccgttttaccaacaagaagtggtgggtaactacaaaacaaagggacggtggccggcttgtagaggaaaggcttgacggtgtgcgggttcccccaagagctgtttgaaggaaacctcgcgccaaagggaggatcaccccggcgggtgcaatggagatggaagctgctcatagggctcgccaagcacgaatcccacctggcgctcttcgggggagaagtgtgatg

SEQ ID NO: 129179 - DNA, 779 bp, Zea mays
  Clone ID: MRT4577_49285C.1
tattgcaaaagtatttttacctcatcatttttctttgaatctctcttacctttgcagtgcagaactggtgcagaaagaagtaatactgtacaatgatttagtagaaaaatatgttcctagtgataatgtaaatagtgctctggaaaataattcttcagcagaagaaggtaattggacttgtatcatacattcatactataataatatctgtaaatcacaatggtgcaaggatatcagtatccctatccgtatcctagtattttaggatattatataattatattctaccgtgttggaatgataccgatcctcccgggtcaaaatgataccgatcctactgagtatcttcaatttcatagtatcccaaattcctgatcctatgattctacataaaaaattcatagtatcctgatcctacctaaaggctccatatgattctacataaaaattcatagcatcccgatactatgatcctacaataccacatagtagttgatataaattactttttaaatgatttagttttgtctatggtaaagtattatttaaagttaagaggtgttaaaataatgttaagaattgcgcttaaatatataaacagtgaaacaagttaatcaaaattaatattatagttgttcaatctatattctatatagcatattacaaattttacataaaatatatagtttgtgacatctgatagtatcccaatactacgatatgatcctacgatctaatactgtcagccaaaaaacgatagtgcctagtatcctgatcct

SEQ ID NO: 129180 - DNA, 510 bp, Zea mays
  Clone ID: MRT4577_49286C.1
atcacattgtgagccgacccatactactactctacccgtccgcctctctcgaaagcgcaacaccagctaccatgtcgccagacaatgcactcctgatagggcacgatggtgccgccggactcggacccgtccccagcgaggaacggccgccattactccgtcggcttctacccgctccacggctctcctccgcgaggcgctggaagctggagtgatcgtcgcggccatcgaaagaagggacccaggaccacaggaatacaggccaatagaacacccagacgggggacatcagtggtcgacatgatcaatagaagacgttgctgtcgctagcgtaggactggacgctcgaggtctaagatgcggcgtagaacgaggagtacgatctcgtcccgacaccagacgcgagtatggacatcaactggttcgccgtcatggcatgaggccagcgagatgtgactatcagtgacctttcttggggcaccgactatgaatggacaacgtttctattga

SEQ ID NO: 129181 - DNA, 440 bp, Zea mays
  Clone ID: MRT4577_49287C.1
agactcaatgccaccaaggccaacgagcgcgagaccgacttcgttaacgacaacgcgcggatgcatgcgcccgggggcacggcgctccacggaggcagctcacagggaacgcccatgagggcgcgcacggacaacaccacggggcgcccttgacaggacaagacgatgaggagcaacgcaacattgggaggtggggaacgactactacaacagctggcataagcgcaagatgaaggaggggcgcatccacagctagtactacagctactatggctcccagatcgacagggccgtcctacgagtacgcagctccagaggctgggcaaacccaggaccaaccacaagacaggagcgcggagcaacacaaccagaacatgaactgcctgcgactgacttagccatgaagaccgacgaggcagcggacatgctgaagctgatga

SEQ ID NO: 129182 - DNA, 364 bp, Zea mays
  Clone ID: MRT4577_49288C.1
tcgtttgaatctaacgcgctgtcaaactacaatcgttctacaaaaccactaaaggcggctgatcatttggcgggaaggccttttttgcgtgtagtccaatccttggaggcccgttcaacctttgcgctgcgcaataaaagttcgaccatcctatgatcattacttatgttctaggccaacccaatacatccttggttggtttttttaccgagtccgagagagttattcgaaatccaacctaccaccagggtttcttaaaccctagtaagactgctgtttaatgacaatcggcatttctttcagatgctacaaaactcaccatggctgggagttattttgacctggcccatcaaggaagtttaaa

SEQ ID NO: 129183 - DNA, 1315 bp, Zea mays
  Clone ID: MRT4577_49289C.1
tcctcagcccaaggggatgattgacaccttgcgctctgcttacccaacgctttgggaggagggcaggggacatgaagatggcaagcttggcaaattactttggactagggaagcaaagacacaggagtcttgatgatgttagaatgaaccttgaagttctcatatactgtgccgccgcccggttcctggaggcaagtcttccagaggtgcttactgttgagaatctggttgaacgtgcaatgacaaggagccgagctaatggaactgcatcccctgatttgctaaaacctgaagcgaactctccaccggattcctcaaaaaaggcaacggacagtctctccagttgactgtgtgatgcctgcggaaggtaatcaaggaacaagtgatccttctaccaacagggaatctgttgagttggtatcccacattgaagaaatgaagctaaataccaccacacatgtggatgcaagttctagtggttatcctggatttcttgagccagacgatgtttccattgagtgtattaaaatttcagttgctccattacaccaatttggcagaaggtcatctatccagcacagagattgccccctgcagctttgttgtgcaggcttgaaagtacagtttggtgtcagtacgaagtttctagataatgcagggcggccaaagatgagcatagtggttgagatccctgagaacctctgtaaagttttggaattctgcgatgttcttgctagaaagctgtcccaggaatctggtagcagttctgaatggagacccctgattaagaagtatggatacattaatcgtccaactatccgcctgaacatccctcctatttccaacagcgatgcggtggccttctcaactgatatatgccagagagagcctagtggtaacattcagaaacttgctttcggcaatgtgggcaccacggaattggactctctgttcgttaaagggagcaaggtggacgcattcttttcactggagttatacgattaccagcaaaatgctggcattcggctggttgcaaagaggctggttatacactcgaattagcaccaggctcatttattaaaatactagtactagaaactaacccttgcactgattcaggggcctttagaccaccatatgtatttaaccaattgtagtttgtagattatgccgagtgcgtaagatctcgccacaaggaggtattgagctgttgatggtaaattaaaattcaaatgttgcaaaaatgttttaacaatctgtgttatttatttgtgaatagaacgcacatttgttactactaaaaaaaaaaacaaaa

SEQ ID NO: 129184 - DNA, 618 bp, Zea mays
  Clone ID: MRT4577_4928C.1
gagtagcaatatgatcaatctagatggaggaaatatactcatcaacacggagtggggataaataaattttatgcttacaatgtagttaacatcttctctattccatggcctaggctgctaactaagcaagtaacaaccctattctctaaccaacaagcacgtgacgacgtgagcacaatgccatctgtacatagtttcagacttctggccatcactgcagatagaaacagctaccacttgcatcgcataagatcagcaaggcagctattggttcacttggcactaagatatactgcagatcaggatctgaaaattctaaaacctcagttcaataggatccttcacttggtctgcagcggcaggcgtggaacacggataagcacatgagaaacattagctataccaagggagatcccaccataccgcctcctcgttcatgttgcatcgccttcgttctgtttacttctcagatctgcaacaagcttgcacgtcttcatgaaagcgtctagcagaccaggatgctgatgcaaggtaggagagtaatgatcgagagctaaatatatctttcggagaaggctcaactgtgcggtgatcttgtcgcctataccataaccttgg

SEQ ID NO: 129185 - DNA, 471 bp, Zea mays
  Clone ID: MRT4577_49290C.1
aattccaaacttcaaaaaaaacaagaggtccaaaacaagaactggaagcagaaacagcaggcggcccggaaaaaaggggaggggggaagaaaggcaccgcggaagcggggggccccaccggaacaaacgaaaccccgtgccgcccaaaaaaggccaaaaacaccaaaacgggaaaaccacaaaaaggcgggaacgcacaaaaggcacaaaaggcagaaaggagacatgggggggctgcacaaaaacaagatgcggcaaaaacccaaaaaccccagtcccaaccagagggggcccccaaaggaaaacccctggcgaggggaacccaaaaaaaccgggccccccagggggggcggccaccaaaatgaacgtggatgccgacaaaaacgtaaacttgaaaaaaggggaggggctaaaccggacaatgcccaggccgataaaaggcccagcccccccccgacccgggggccgacc

SEQ ID NO: 129186 - DNA, 256 bp, Zea mays
  unsure (1)..(256): unsure at all n locations
  Clone ID: MRT4577_49291C.1
attataacanaccctgagagccaaaatgnncganaatctgttcgcttcattcattgcccccacaatcctagacctanccgccgcagtactgatcattctattnccccctctattganccccacctcnaaatatctcatcaacaaccgantaatcaccaccnaacaatgactantcanactaacntcaaaacaaatgntaaccntacaaaacantatgggangagcctgatcttnatantagtatcttaatcatttt

SEQ ID NO: 129187 - DNA, 341 bp, Zea mays
  unsure (1)..(341): unsure at all n locations
  Clone ID: MRT4577_49292C.1
ccttcttcnnnnnnnnaaaannnagncaaggcggaccagatggggagaacagccgggacaaccgancaccgcaaaccncagcnccagcaggacacacganaggcaccgaaacacccaacaggcaggggaacagcccagagcaggacccaacccaagcaaaaaccggcagcngganaaacacaccaaggcaaaccagggccccagnaccgggggaaacaaagagcagacaccaaagggccgaagaggganaaannaagcanccnccacagcccacnaagcacncggcnangcaaaaccgcaaacannaaaccaccaagacaaggagcccgagcccacaggca

SEQ ID NO: 129188 - DNA, 685 bp, Zea mays
  unsure (1)..(685): unsure at all n locations
  Clone ID: MRT4577_49293C.1
gggtatgcggagcactgatttttcctagatgctaacaacaattattcttaatcgtgcaggatccaagaacttagggcttcccgtcctctaatctactagttcaatatcgtgtgtcatagttatttgccttgagctcttctacatgtcactcattgccttgtattttaggagatttttccattaccatgtgagtcaatggtatgccaaataagttaatcaaatattcaaatacgcatgacttgaatgctctgccttctgcaaccatgcgtaattaatttaagaattacataaactgaattcatttgcataatttcaggaataacagatggtaaccacatggacagcagccaagcatcatagaactattctgcattgtgtgccatgatattaaaaatggtagattccatacatataagaatcttagacataattatcagctccattcattcaactaatgaggattctaacagagtgaactgtttcatgcttaagccaaatcaactaaatggattntctggttccattgcatgccacacacaatgtttcagtttgttaatcctattgagcaagattagggagcaaacacaggccccgcatgtttgcgattcgactccttttgtcagtgcatctgtttgcaaacagttaggagcctgtagttttggccgataaaggcagcatattacta

SEQ ID NO: 129189 - DNA, 385 bp, Zea mays
  Clone ID: MRT4577_49294C.1
acatgatctagagcattcgtgtatgcatgaacacactgtctgactatactcgcgcggacagcgccacgagagcggtcttctacgtgagggcgccggctcatgctacttatacacgccgttgacgtctcgaaacattgacgtgagctttgacacgcgtatccttatagagtggaggggtggatgcgaggacgaggcgacctgctgctcacccacgttcgacggcgtctgcaggtcgttgatctcagctgttatcagcgacccggccccgacgcactgcttggactcctccgacttgggtggctctggcttctcgttctgtgagccctgcaaaccacttgacggaggaggaggaggatggttcccgatgcccatggcttccatgccg

SEQ ID NO: 129190 - DNA, 341 bp, Zea mays
  Clone ID: MRT4577_49295C.1
gcttgtgtctcctccttcccttggctgctgacgagcggttcgtcggtgacagcaggggatggagcatgtcaaataattaacaatcttgccgagaggaataagcagtactagttctacctccatcgggagatggaggacatggagaatcaagccaagaagctgtaagtcaagaaattcatgatgaagatagatggtgcttaatataaacgtaaaggtggccaatttaaggtcggcaagaaaaaggagaagacgaatcttttatgcttagcataagccaaagccatgcttttctatcaaagttgacaagtgatctgcggagcacaagcactattagctttaat

SEQ ID NO: 129191 - DNA, 595 bp, Zea mays
  Clone ID: MRT4577_49296C.1
aaactgtataacgcaaagacaggcgtcttcgtactcgcctatctccgcgagccaaagcgttcccccttctcccattcttctctcattgcttactactgccgctgctaccccctttcgacgacaccatgagggagtgcatctcgatccacgtctaccaggccgatatccaggtcggaaacacgcggtgcgatctgtactgactcgagcatgccattcatgttgatagctcagatgcccagtggaacaagaccattggaggaggagatgatgctttcaacaccttcttctctgtatactgacgctgctaagcacatcccccagcgctgcttttgagagatcttgagcccactgtcatcgactacgtgatgactgccacctatcgcctgctcttctatcctgagcagctcttctacgcgaacgacgatgcgatcgacaacttcgatcgcgatcactacaccattgtcaaggacattgttgacctgtgcctcgaccgcatcaggaaacttgcagataattggactgctatcaagagcttcctcgtgttcgacgctgatgtgggaggaactctgtctgcgatgagttctctcctcctgga

SEQ ID NO: 129192 - DNA, 486 bp, Zea mays
  Clone ID: MRT4577_49297C.1
cacttttcccctgactcgtgcgtatgtttatgctggctgggtctggggttgagcaattgccattgccaccaccaaccgaccctagagggaaagaaatctcaggaaggagtggagcgacccctgctgttgctggtgccacattcgctcgcgttcgatgcctgcttaagaatacggtacattgtgccaagatcatggattagcttcgacatgataatcgctcactttctttccatcaagcgtgcattctttcctcctgctgagtcgggcaggatcttgttaaccccttcatacaaacccctcatcttattccagcagcctctcgccctcgccggatacgtatggttcttccttgccccccccgctagctggtctgctccctggaattcctcggtccaggtctcgagcgctggttcatctggagctaataaacctgcttctgcctaagaatacgattaatgcccgtctggacatggagttgacacacat

SEQ ID NO: 129193 - DNA, 337 bp, Zea mays
  Clone ID: MRT4577_49298C.1
cccacgcgtccgaccactcccttgagcttaccttctatctctgcacgtgaccgtaccggagcatagatcgccagaactaccgacgcgacatcatggcgcatgcctgagacaaggtatactacatattcaaggcggtgctgacctaagacttcattgcgggcaacatgcagatcctcgcacggtaaaaccgcaacaaggtcaacctatactccaacgccaccatcggagtatagatgcaaatgcgcaccatctttatcaagcacaggagcgtgcaggctcatacctggaacacctgatgccacaacaggtacaaacccgtgactagtgctgagtatag

SEQ ID NO: 129194 - DNA, 153 bp, Zea mays
  Clone ID: MRT4577_49299C.1
ggcatggatgttctaactgggacccaaatttcactttggcataaagttaacaaaactggccgcgacattaacagtagaacccaaatggacgttttgatcaacccggccaggggtttatttccgtacccctggggcgacccctggcctgacccc

SEQ ID NO: 129195 - DNA, 668 bp, Zea mays
  unsure (1)..(668): unsure at all n locations
  Clone ID: MRT4577_4929C.1
cttcctcctaccactcacctcccaagtccacaccacccccaacccagtctctccactgcggcgcaggcttcgcttcggctccgctcggctcgagcagaagaaaatgcaacgggcagtgcaagacgaaagataacacaggaaatgttaattaaaaatgctgtatctacaacacataagagctaccaagacagcnntgcttcctgctgccttttctcgtttaatgtcngtttcttctgctcgcctngaggatcgtggatttgaaactgccnctgtngcngntgtcttggggtctnnngggnngngtgctgntggntcttggctctggtgcnccncngnggntngcgtctntggcgctgtcnnntctntggctcngcncnncgtgggggctttggtggttgtcnnncctggncggggtnntcnntcgctggcnttgtcnctgggggggnttntctccggnnnntctttgtgcngggnnggtcttccnggtcnnctnnggttggcgncntcntggctggggngncnnnctggtcncngtgggtcccggcnccnnggtcctgcnggcnntgcngctcntggcngnnnnccgcgtcngncncntcccggtggtcggcggcncggngntgctggggntggtctccttcggtgncgtcntgcgcgcggtggtggcc

SEQ ID NO: 129196 - DNA, 533 bp, Zea mays
  unsure (1)..(533): unsure at all n locations
  Clone ID: MRT4577_492C.1
atgatgncgaacagctgagtggttaatttctaggtaagcgcggtctaataatttaatttagtcggtacgtatcactgagatgaaacggttcgttctgtaaagaagaaagcagcagggcaagcaagcagctagctatttgtcgccgtcctgctgctgctggtggtgctggtcgtcgtgcttggccttctgctccagctccgacgattccaggtcctcctgttccgtgtcgggtgatctgtggccgagccaggcgatgatgtcttggaaaacggcttggatgttgtcgggcgactcgcctgaggtgagggcgtgccacatgcccggatagaacttgagcgtattgtcctggctcgccgccgattggtacagcagctcgctcaccgacgggtccggcaccttgtttgtcccggcctgcacgatcaggaacgggaaccacacctatacacacgcgcgcccgcaacatattttatatcaattcaacaatcagcctgtcctaattggcagtattattagaatacattttttttagcttt

SEQ ID NO: 129197 - DNA, 821 bp, Zea mays
  Clone ID: MRT4577_49300C.1
gtaaacttcaaagtatatatcaccgtagcggctaacttttctagatattttgggttcgttacagtaggctaatatatttactaatgaataaagtagcccatttattctttctttgatgcgttgcaaaaaatagagtttttcatgaaatggactgataattgagagacaatcttttattgtgtttacacaattttcacaaaagttttgattagtcattttttcagaaatgaaatttagtggagcaataaaatagcattaaattatttaattggacattaataactattctattttttaaaagaattaatcgacttatataaaaattttactcatttatttcaaataagaaagatgcagttacaataaattgttatggatacagtttacttttcagcaactgttatggttactaatcagcttaactgtaatgcttttctaatttagaaacaaaaaatgaagcctaagtttatgacaacctcgcctaatcagaccctctaccaaacggtagcggatcaaattcatggactgattagcgaagggactttccagccaggcgatcgcctaccatcggtgcgaaaattacatcagcagtggtcagtaagtatttcaacagtcttggaagcttatcgcctacttgaggatcgaggattaatcgaagctcgtccccagtcaggctactttgtcaaaaccatattgaatttcctacccgacgagcctagtcccagcacacctcagtctgccgataatcctgttgatacgtctttagccttccgtgtaaataattcaatgttgaaacctggaatcattggcttaggggcggc

SEQ ID NO: 129198 - DNA, 615 bp, Zea mays
  Clone ID: MRT4577_49301C.1
cccacgcgtccgcgacgccaacaagatttgcgccgccgcgacgtcctccatctccatggcacagcagccactgccactgccagcagcctaccacgcgctcgagggctcgagcccggcgttctgctacaccaccacgcccccagctcccggcaccgccgcgcggctgggcgttgctgcgtcggacgccaaagccttcgaaatggctcctccttcgtcggcggccaccgtgaaccacgccggcaccgcggagcggcggccactcgaaggacctgctgatgagaacgcgagtccccagatgggggggaggagcttgtgggaagagggcgatgatgatctgcagagcctagtcctgatgggattccgggggcgacacgtgatcattggcggcccgatctgattggcggaaaggacgaacggacggacagttcagtttcaccgatcgccacatgacgacggcaggggttaggctccaatcattggacattctccatgattgtacatagcaacaggacgtgtcacacgctaatcgcctcacacttgagtttccagctcagcagtagcagaggccaagaaaacacacacacacacacaaaaaaaaaaaaaaaaaaagggtta

SEQ ID NO: 129199 - DNA, 1243 bp, Zea mays
  unsure (1)..(1243): unsure at all n locations
  Clone ID: MRT4577_49302C.1
gattgcaggccaacaagatgtgcgccgccgcgacgtcctccatctccatggcacagcagccactgccactgccagcagcctaccacgcgctcgagggctcgagcccggcgttctgctacaccaccacgcccccagctcccggcaccgccgcgcggctgggcgttgctgcgtcggacgccaaagccttcgaaatggctcctccttcgtcggcggccaccgtgaaccacgccggcaccgcggagcggcggccactcgaaggacctgctgatgagaacgcgagtccccaggtacgtacgtacgtacagcaagcttatttgccaagttcgtccatctcgatcgtatcgctagctgtgcgatcgatccactccaaaactgtggacgcgtgacgcgtcaagggcgaagaggtgagaaacctgccgtgaatttcagatggggggggaggagcttgtgggaagagggcgatgatgatctgcagagcctagtcctgatgggattccgggggcgacacgtgatcattggcggcccgatctgattggcggacggacggacggacggacagttcagtttcaccgatcgccacatgacgacggcaggggttaggctccaatcattggacattctccatgattgtacatagcaacaggactgtcacacgctaatcgcctcacacttgagtttccagctcagcagtagcagaggccaagaaaacacacacacacacacacacaaaaagacgctttgtttgttgcattgggttcccccacgaatttgcagtttgatccaatgtaatgtaatgatgcttatactctcataaacatcaagttgacgaaactttatatacatgtgaggcaacagctgctggacgaaaaaaaaaaaaaaaaaaaaaaaaaaaaaaaaaaaaaataaaaaaaaaaaaaaaaaagcggccgcttttttttttttttttttttaacgcagaaaaacacgcatatagatctaatattaaatccggcacgagacggacaggatcgacggaggcggcatcgccgtcgtgaagccgcgaggacgttcagacaaaccccaggaccaggagacccaggcgaggagcgagcgaccatggataatggcgggtgcagttgacaggatcttatttactggacgccgctattatatttatacgcctggtcgtcgtggttttttcgactttcgtgcgccatcgttgggccgggctggccgnttaaattgcagctgcagcaggagcagc

SEQ ID NO: 129200 - DNA, 252 bp, Zea mays
  Clone ID: MRT4577_49303C.1
gcaacaacccatcattggtggtgccctcttttagatttattattgaactataactcataagaaagctaaaagagggcaccaacaacgcatgattggtgcggacgcgttgttcgactcgaggcttacggactggttcatgcagacgtactagctatctatagtgtgagttatatatgacgacttggttgtatctgtagaagcatcagactgcgaaaacatggcaataccccactttaataccgtagctaaaca

SEQ ID NO: 129201 - DNA, 824 bp, Zea mays
  Clone ID: MRT4577_49304C.1
cagttccaagccgtcctcctttcacctcttcactcatcgacaactcacaagcaacgccgatcgacactcgatcgagatcgaccatggaggtggtgagcgcgatcgtcaaggtggtgcaggcgatagtgaaggcggcggagacggcccgggagaacagtgagaggtgccttgacctcgccaaccgcgcgcgcatcatcggcaacatcctcctcctcgactcctccacggccagcacgagcagcagcgccaacggctacacagcgaggctgagaacgcccccgctggagatgctgaaggacgtgctccaagaagcccttgagcttgtcgagtcccagcagccgggcggcttcggcgcggagctcatgaagctgctgacaagcggcccgacggccgccaggttcaaggaggtcaaggacaggatcgccgactgggtcaacatcgtctgcttggcggagcagtccgctgctcgggcccgccacgccaacgcagggaccggctcggcaaccacctcccttgccccggagcatcaccaccagagcttgcagtttgcgacgacgtcgtcgcaacaacacctgaatttccagtccgcgacgtcactgtcgcagcacctggagagcttcccgtccttgctggggtcgtcacagcagaagcagagctcgcagtctgcgacgtcgctgttgcaggagcaccaaagcttgccgcaacgcccgagcttacggctgccatcgttgcagcagaagcagagcttgaagtcaacgacgtcgctgttgcaggagcaccaagcttgccgcaacgcccgagcttacggctgcccatcgtgcagc

SEQ ID NO: 129202 - DNA, 380 bp, Zea mays
  Clone ID: MRT4577_49305C.1
ccactgctgagggtactactactgagggaactaccaccgctgctgaaaccaccacaactgctgaaggtacaaccaccacggccgagacaacaaccgctgagggtactaccactgctgctgacaccaccacaactgctgagggcacaactaccactgctgagggcacgaccactgccgacgccaccaccagtacctctgctgagcccactgccgaccaatcctgtgataacgccggcctggagtatgccatctacaagcacacattctacaactctgatcctcctcacttctcctccttcgatcccactttcttccataccgccacccccacctaccagggcgagaccactcgcattggtatccctcccggcacagcctcc

SEQ ID NO: 129203 - DNA, 266 bp, Zea mays
  unsure (1)..(266): unsure at all n locations
  Clone ID: MRT4577_49306C.1
ccgagctgaataggaaatgctcagatgtaaaacagggtcatcaaaatacaacagagaagtgaacaatncatgttatattgtgtacagaggtctttacatgccactacatactgtgcacccggcaatacacgttattacccatgcatatgcacacaggggagcncgatatgacaaggnatattggtgaatagaactaatctcagtatcaaccaacaatttgccccctaatcgtgagaggcatctatcgcatcgatcacatcccgatg

SEQ ID NO: 129204 - DNA, 539 bp, Zea mays
  Clone ID: MRT4577_49307C.1
cattgggtacctcgaggccggccggggtgaccttgtcgccacctgaaccccagccgccacttgaaacggccacaaggtagagaggaccatgtctgtgtcatactgtcgtgtgtgtgcgctgctggcttgctctcaagagcgcgtccctctggcaagcatcgagactccctcctgttttcgtctccgccgcctccctctctttgggttctgtctgcctgtccgagactcctaagtggaagaacgatgaagatgagttggtcttcctcctcttttagcactgtgaggacatgtgtcatctgaagagcaagttggtacctgtaatctcaagttcccaggtcaagaacgggtaccataggatgaggcgcatggaggatgccgcgatgagttcatgagaggtctaggccgtcgtctcccaatcaactttgggttgctagatcgttgtctccttataatgtattgatctatttattttgtacagaacttctattatatagtaaagttgtgacattcgatccaaaaaaaaaaaaaaaaaagcggcc

SEQ ID NO: 129205 - DNA, 237 bp, Zea mays
  Clone ID: MRT4577_49308C.1
ccgacacctatcgtgtgtaaggtgcttgtattgtatactgctgcgggtaacaagatttcatccacatggcttattgcaagatcgggctctgtgggcaaggcagggtcggccagctattgtccgatgggggcctgcaaagtgactacggagttcctgaagacgaaaacgattcgcaaagtagctgtgattacatctcctgcatgtccaagttctacgatgtatgctgtcagacgctgt

SEQ ID NO: 129206 - DNA, 275 bp, Zea mays
  Clone ID: MRT4577_49309C.1
gccagaaacagagattttggcgccacctgagagagcaacgagagatcgaggaaatcctccaccggcgttgtcgggtcatcggtgaccattccgggcgcttcttcgtatccccaggaattctctcgtggccccggtgctctgtgaagatcagtgggtgcccttcgatttctcaccgtcgtgggaaatcatcgtcgtgctgcacttcttcaacgctggcccctgctctgtccgaaatcccgctcgaggttacgagtcatctgaagatcatcctggta

SEQ ID NO: 129207 - DNA, 1672 bp, Zea mays
  Clone ID: MRT4577_4930C.1
gtcccgctcgcggccaccctccagttctggaaactctcccttccggttccttcatctccgcctccacggctccacctccaccgctgctccacacgggcacacctttgcctcgcccaaccgctgccttgctcgcgtccgccattccccagacctcgagagctaccgtctggtccgatcggacggatcccttcgcgcgccccagagatttcaggtaaggtgctgtaacagaagatgcaagggggaagaggtgggaggcagggcttattcggtttcggggacccttctggtggttccggtggctttggacaaccagggagccttatgcctggtttttttggtggcgcaaatccctttgacgaccctttcttcacaaacccctttggtagcatgatgcagactagtttctcagcccctttcagcggcatgatgcaacctagcttcatgaaccccttcggcagcatggtgcaacctagcttgcttggaccaagtatgtttgcgccccatggcaatctcaatggaggcatgtttggaagccagacacatctcagtcaaggtatcagcaatggcagtggtttcattcagcaggcccctgaaccaagcaggcctaaagggccaattatcaaggagttatcttcagatgatgaggatgatgtagatgatgatgaagaagatgagaagaagaatggtaactttaggaagcatcaaagggaaagcaaagagccgtgtgtggaggacccagatgatgaagaagataataaaagacctaagcatggacaatttgggagggagttcagcagagctgacacatcacgtccacagcctcagacatttatgtttcagagttcaactgttacatatggtggtccaaatggagcctgttatacatcttcaacaactaggaggactggtgcagatggatttacgctggaagaaaataaagaggctgacacaactactggtaaagccactcacaggatttcacgtggcattggcattaagggtcactcgttaacaagaaatcttaattctgatgggcgtgtgaacacccttcaaactttacacaacttgaatgaagatgagcttggtgggtttgaggaatcatggcaaagaaataccagggagaatatgcctggctgggatcctagaatgaacatgcttggcaatggaaatgttcgctctgacttccgagatgtgaatcaaatgcctgcacttccagccccagaactataccgtggcacgaattttcagaatggctcttccatgggccgtgcaccccgcacatgagttcctctgtggcatatgctggatcacagtgctcagtaccggtgacttgcactattatgcagaaaaatgttgaaacccaaactcagcttttgaaaaactactgtaacttgagacagttttaatagtcgagagctttccttagtttcagcagctctatccgagtactccaatcactgtagtttagtgctgcctgagatgcaactaaaatctgtttggatagggaggattatttcttgggaaatttactggtttttggtgaaatctgaagaaaatgaaccatcctgatcttacccatcacgtgttggtgatgtagcctgttaaaccttcatgaataaactgtgagcctcaaaaaaaaaaaaaaagggcggcaaccgaaaagtgagctcgc

SEQ ID NO: 129208 - DNA, 2128 bp, Zea mays
  Clone ID: MRT4577_49310C.1
agtccctcccctataataaacgggcgccacgcacgccacagccgcggcctgcgagcgaggcatacacatccacgggccacgcccaccggcatctcacggcggaagcagccaagcagccggccgggcgcctcccgtgccgccgctgagcatggccgctgctcccgtgggcgctcagaatcgctgcgtcttcgttggcaacataccatacgatgcgacagaggagcagctcgtgcagatttgcgaagaggttggcccagtcgtatccttcaggttggtgattgacaaagagactggcaagccaaaaggttatggcttttgcgagtacaaggacgaggaaactgctctaagtgcacggcggaaccttcagggttacgagatcaatggtcgtcagttacgggttgattttgctgaaaatgggaggaacactgacagaaatagagaaaagggtcgtggagggccagggatgacatctaatgttgatagtcagaaacagttagctggaacttctgttgttggagaggcaaaccttcaccagcctgttggtctcccaccagcaatacatgctgcgtctgtgatggctggcgtccttggtggagctcagactgcaaatgttcaaaacggtttacctgtccagtatggacttggaaatgatcctcttactcattatttggccagaatgtcaaggcatcagctgcatgaagtcatggctgaattgaagttcctagccactcaaaataaggaacaatccaaaactttgctgcaaggaattccacagctgccgaaggccctatttcaggcacaaataatgcttggaatggtgacaccacagatgatgcacatggcaaagagccaacagccctcgggctccttatcacaatcttcatctcacctcaatgagccatatccacagacagatgctatgattccgctagtctcaagaccttcaagtttgccaactaacataccaccgaacccaactgtcctacaggaacaaactgcaacactacatagtattcctcagcatcaacatgcatcccagcccctagtcaaaatgtttccacatggacatcagtctgggatcgccgcacaatctccaatgctacatcagcccctcgatggttcttctagtgttcctactcaatctcttgtgacctcagtaggcttaacctcacaagttcagctaccattggtgccacagcaccctggaccatctgtcatgcctacaagtgtaccacagctacctttgacccaccctcatcttgctcaggtagctgttgcacctgagaccctaccaaatgaaataagtactttggcagagtttacccatccttcaaagttgagaaaattggaggatggaacctcggtgcctggaatggtgaacagcagccatgctgtttatacagttccactgcaagcagtgggccctagcggaccatcagggagctatagtgctggttctgttagcttacagcaaccagggaatgaagagcagcttacgcctgatgtggagtcagctcttctgcagcaagtcttgcagctgacacccgagcagctgagttcgttgccaccagagcaacagcagcaggtgattgagctccagaagatgctttcagttagtaaatagaagcaactgagagctaacgcagcaaaaatgctggttgagaatctggcacatcacataatggcgagttggtaactagtggaaactggaaatgatcctcagatttgtttatgaagtcaccacgccgcctgtaacctgtaagcattgtcggcatcctgatgccatcaggatccatatggttttctttcttcagctcggagataaaagaaatgtgataggagaagagtagtgtggaaaaagggatacgcattatccatcactgttgtatcattatagggagaaaaaaaataatatgtattcaaaggaactatttttcagcgcttctcgaatgggctgtagcatcacacatttttgtccttagagttttcttgcaaaaaatgtaggtaggaaatgaattttgtgtaagcttatgacgaagagattttttttatatttgttgccataggtctgtttaattgtttgaggcaagtttggaattcgtggaattgcttcatctattatccttcc

SEQ ID NO: 129209 - DNA, 751 bp, Zea mays
  Clone ID: MRT4577_49311C.1
aatcactctctcgtgtcttcaccttcgagcaagccgaaggtatcaatgtaatatgaattttgtggatattcatacatgttttatgggtgtgaaatacgaatgaatcaatgagttaaactaaaaaaaaaaaaaaaaagggcgcttcttttttttttttttttttggagaaggcgcaactattatcattcacagaacgaagacaatacaacttctcagattaacagagaactccaaaggtggtaggaaaggctcttctacagtaaaaatttgaggatcgtcgaccttttctctatttctgtcagtgttcctcccattttcagcaaaatcaacccgtaactgacgaccattgatctcgtaaccctgaaggttccgccgtgcacttagagcagtttcctcgtccttgtactcgcaaaagccataaccttttggcttgccagtctctttgtcaatcaccaacctgaaggatacgactgggccaacctcttcgcaaatctgcacgagctgctcctctgtcgcatcgtatggtatgttgccaacgaagacgcagcgattctgagcgcccacgggagcagcggccatgctcagcggcggcacgggaggcgcccggccggctgcttggctgcttccgccgtgagatgccggtgggcgtggcccgtggatgtgtatgcctcgctcgcaggccgcggctgtggcgtgcgtggcgcccgtttattataggggagggactcccggccgggccggctcggagcgg

SEQ ID NO: 129210 - DNA, 2156 bp, Zea mays
  Clone ID: MRT4577_49312C.1
cacggtggaagcagccaagcagccggcctggcgcccctccccttccgtcccgccgctgctgccgtgcctcgtgcctgccagcggcggatgccgccccgccccgctgctgaccaccgccgctgctgagcatggccgccgctcccgcgggcgctcagaaccgctgcgtcttcgttggcaacataccatatgatgcgacggaggagcagctcgtgcagatttgcgaagaagtcggcccagtcgtatccttcagattggtgattgacaaagagaccggcaagccaaaaggttatggcttttgcgagtacaaggatgaggaaactgctttaagtgcacgccggaaccttcagggttacgagattaatggtcgtcagttacgtgttgattttgctgaaagtgggaggaacactgatagaaatagagaaaagggtcgtggaggaccagggatggcatctaatgttgatagtcaaaaacggttagctgggacttctgttgttggagagacaaactttcatcagcctgttggtctcccaccggcaatacatgctgcgtctgtgatggctggcgtccttggtggagctcagactgcaaatgttcaaaacggtttacctgtccagtatggacttggaaatgatcctcttactcattatttggccagaatgtcaaggcatcagctgcatgaagtcatggttgaattgaagttcctagccactcaaaataaggaacaatccaaaactttgctgcaaggaattccacagctgccgaaggccctatttcaggcacaaataatgcttggaatggtgacaccacagatgatgcacatggcaaagagccaacagccctcgggctccttatcacaatcttcatctcacctcaatgagccatatccacagacagatgctatgattccgctagtctcaagaccttcaagtttgccaactaacataccaccgaacccaactgtcctacaggaacaaactgcaacactacatagtattcctcagcatcaacatgcatcccagcccctagtcaaaatgtttccacatggacatcagtctgggatcgccgcacaatctccaatgctacatcagccccttggtggttcttctagtgttcctattcaatctcttgtgacctcagtaggcttaacctcacaggttcagcctccatttgtgccagagcaccctggaccacctgtcatgcctacaagtgtacaacagctacctttgacccaccctcatcttgctctggtagccgccgcacctgagactctaccaaatgaaataagggttgctgatcaagcaagtcatttggcagagtttactcatccttcaaagttgagaaaattggaggatggaacctcggtgcctggaatggtgaacagcagccatgctatttatacagctccactgcaagcagtgggccctagtggaccatcagggagctatagtgctggtgctggtagcttacaacaaccagggaatgaagggcagattacgcctgatgtggagtcagctcttctgcagcaagtcttgcagctgacacccgagcagctgagttcgttgccaccagagcaacagcagcaggtgattgaactccagaagatgctttcagctggtaaatagaagcaaccgagctagtgcagcaatattgccggtcgaggatctggcacgtcacataatggcgagttggcaactagtggaagctggaagtgatcctcagatttgttatcaagtcactaggccgcttcataacctgtcagcattttcttgtgggcatcttgatgccatcagttttgctcagaagtatccatatggctttctttcttcagatcagagataaaagaaatgttacaggagatggtagtttaaagaaagggatacacattatccatcactgctgtatcattatagggagaaaataacaataatctgtatccaaaggagctgtttttttttctgcttctccaaaatgggatatagcatcagatttttgtcctttccatttcgtgcaacagttgcaggtaggaaatgaattttgcgtaagcttgttatgttatcgagtagcatcctctatatttattctttatatcccttctttttctttatatcccttctttaccatttcttctaatgctccgttttgtatttcgcttttgg

SEQ ID NO: 129211 - DNA, 220 bp, Zea mays
  Clone ID: MRT4577_49313C.1
cggactcgtgggcggactcgtgtgtagactcgtgctttgatccacgcttcaccaaaccgggctactgattcatgctcaataccttcgtgacccttctaaacgaatagtacaagatcaatattatcatgaagataatgctaaccatattccaatcactcatcttctcactcatacataacaacctcctgaatatgtacaacaccatgaactatttcaaaca

SEQ ID NO: 129212 - DNA, 259 bp, Zea mays
  Clone ID: MRT4577_49314C.1
gtcttacctccagctacggcagaagggctggtacatgtgattgaaaggaggctctacctaacatatagaaaaccatagatcctgcactacccctgtaaagaaaactgggcatttcatgcaatgctatctaagtgtgctggatcaggactggactgatacttggttcatgtccacgaaccggcattttttatgatagcaaggcagtcttctcatattatacttgaaaacaacagatgatgctgtggtcttaaaaaaaaga

SEQ ID NO: 129213 - DNA, 395 bp, Zea mays
  unsure (1)..(395): unsure at all n locations
  Clone ID: MRT4577_49315C.1
tatcattgcaacagataccaacccagatcttgcaacaagataaccaacccgcatccngcgttgctcgttctattagcagatgcatttataccctccattatatgcactgttctgtgcttcttgacatggtaaccgagtggttgtctcacacttggatctatatgacttgcagggaagaagcctggcgcggtcagctatgcaattactagccatattatcagtgtggtttgtacagctcagacatctaatcattttgatgctgaacgcgcatttgtttgttataaacgatgatctcgtagataacctagcctatttataaagattatcagataggctggtttgaccaccatggggcttcgattgagtatctgattgttgggagctctgttgatctg

SEQ ID NO: 129214 - DNA, 850 bp, Zea mays
  unsure (1)..(850): unsure at all n locations
  Clone ID: MRT4577_49316C.1
agtcatgctatctaacattgtggaagtgcaggtaatgttttcttggtacaaatattgttatatgatttctaatatgatnccgtttggccaaaaaacatataggttattcactaaacatatatgttttcattaacattgcatattatttgtagaaaaatcatggttcagaccattctcattatcatatctgttagtgtgagttcaccaattatttattattgattcaggcaagcgtagtttgttaagcagatatgcttactggttagacaatggcatagacattaggcgatgtttggttcaacaaatggcaatgacaatgcaaagggaatgaataccagtggtagtgggaagggaagctttgattgtttgttttgtttgattgagtatcggatgcctaaatcattccattgatctgttacacctcaaaattgagcgcaacctggtttctgaagcatgtggacacattgccctggcaccaagatacatcgggccgtcagccaacagacaaacacaagtggttgacagtggaatctgatcacgccaataaatggccgaaccaaacagcaccttagcttcttgttatagacctagagctcatttttatctgatatgatacctataaaccaacagagtctatatcattttattgcttgtgaaaacatactcttttcctagtatgaccatggaaaatttagtacgaaactgattcaacaaggatctactgagcttacaggtttttgttgttccttgagtgtatatattctttcagatttaggtaggcaacatgtgtgaccgccccacaaaatcatctttgtggctcatgtggactaactgcaatatttttgcgggt

SEQ ID NO: 129215 - DNA, 417 bp, Zea mays
  unsure (1)..(417): unsure at all n locations
  Clone ID: MRT4577_49317C.1
ggccacgcgtnctgcaggatgcggcgaagggaggagatggatcggcgggcgatggccggggaggagctggggaggatgacggtgcgcgggagcaggatgccatcggcgaaggtggtaaggacgcggccggagttggaagagcgcagctagcacgccgccgtagcggtaggcgagctcctctccgagtacgttgcaccagccggggggtctggctcctcaactgatggcaacggggagttccccgccggaaatagctcaccgtctacgtccccgcgacgaaaaaacttccctgcagggatcctacgaacgctttgcgaagaatatttcttccttatccctgttcctcgcggggataaatccccaacgggatctcatccccgtttaaattacaattaagacatacgtactgtgctattg

SEQ ID NO: 129216 - DNA, 1667 bp, Zea mays
  Clone ID: MRT4577_49318C.1
caccgttccgatcctctccgccgtcgcgatggcggcctcctgccgccgccgccgtcacacgccaccgcagagctagctaccgacgaagacaaggcgggcaatggccaaggcgcccctgccgcttccgtcgctgctcgtcctcgccgccttcttcttccaccacccctgctgcacggcgcagggccgcgccgaaaacatctcggaggtcgaggccgcggtccgcgcccgcgcgtccgagctgctccgcgacgccaccagccagctcgtcgacctgcccctcccggccaacctctccggcgcgggcgtccgggcctcggccctcagcgtgcgcagcaacgcgctctgggccggcggcgtcaacaccaccggcttcaccgtcccgccgcgcgtcgtgccggccccgttcgcgcgccgcctcgccatcgtcttcgagctcttcgtgggaaactcgacggccgcgttcgccgcgccgcgcggctacgcgctggccacgcccgtggccggcctcctcgcgtacgacgcgtcggcggggcccgacgcgcgcgtctcgctccgggcgctcggcgcgccggtgcgcgtcgagttcaaggacgacctgtcggcggcggcggctctggacaaggggttcgagttcgacgccaccaccgcgcggtgcgtgacgttcgcggccagcggggaggtcgtggccacgcacgccgtcgcgccgggctccgcgtgcgcggtgaacggcacgggtcacttcggtatagcggtgctgctgcccgagacgccgccgccagcctcggccgtgagggccaggtggtgggcgtggacggtgggtgtcggcgccggtggggtgctgggagccagcgccttgacgctctctgtggccggcgcggtgagctggaccaggatgcggcgaagggaggagatggatcggcgggcgatggccggggaggagctggggaggatgacggtgcgcgggagcaggatgccatcggcgaaggtggtaaggaccagttcctctccgagtaccaccagccgctggcgctgaggattctaacgtttccctcgttgttttgccacacatggggtggcccaatcaactaactttcttgcagttttcagcgaaaaatcgtctgcggcgcaagagaagcgtacaactcaatttgcatgatccggattacagatgcagtcgaaatagatatttattcttttgggtcaactttataggattgttattgtacaaaatgcatttttcatagtacatcggaatacttcgttcaaaaaaaaaaaaaaaaaaaaaaagcggccggagttgaaagagcgcagctagcacgccgccgtagcggtaggcgagctcctctccgagtacgttgcaccagccggggggtctggctcctcaactgatggcaacggggagttccccgccggaaatagctcaccgtctccgtccccgcgacgaaaaaacttccctgcagggatcctatgaacgctttgcgaagaatatttcttccttatccctgttcctcgcggggataaatccccaacgggatctcatccccgtttaaattacaattaagacatacgtactttgctattaatgttaaatattgtcacttatacacattgtcagatataagaaatcattatgcatacatcaaaatgaatacacaaattattaaaaa

SEQ ID NO: 129217 - DNA, 631 bp, Zea mays
  Clone ID: MRT4577_49319C.1
atcaccgtcgcagaagaggaaggaatagagccgagcagcaccttagcatcctctcaccatcgccgttgcggaagatcgcggagcacgggaagccatgggttggcggtgatttctcgtcggtcacctagcaccaccacagatccacttctcatcgtgggcagctcggtccctgtctccgccttcagtgagatccccacctctttgtttcgctttgtccttctctttgcatagcaccgtttggatcggggtttggtgcatcggctcgacatattgtgaatcttcagcagggcgccaccgcgaggtaagaaatgccgccgtgtttctccagcagagtaaggacgatggcgccagatcattgatcgtccgacgcgggtaggattagatctccgtgcaccctatgggagattagatccgagaggatgaggatcatgaaggatgtcgcgatgagttcatgagaggtctaggtcgtcgtctcccagtcaactatggttgaggaggatcgttgtcttcatatgatgtaatgatttagctattttgtacataactgctatatatatagtaaagattcgacaaaccaaaagagcccgcccatcatagctgcgacttgttagtgatgtgaactgtttaaagg

SEQ ID NO: 129218 - DNA, 122 bp, Zea mays
  Clone ID: MRT4577_4931C.1
gcggtgcgatataaatctcactgtcacctcaactttgttctgctgtgtatgtagctcacggaggagggatgcagtgtgcacttgcgttgtacacgaactcttgtcctaaccagataagatct

SEQ ID NO: 129219 - DNA, 355 bp, Zea mays
  Clone ID: MRT4577_49320C.1
aattaacagaaaatttaatggaacagccccactccacagggggcaaacaaaaaaaccctagggggacaatttttttgggctcccacagctcccttaaaaaaaactggggcaacctggaggggttacgggacccccaggcaagcataaggccctcgctaacttgccggggaaaaaattgggggcgaaaccccaagcgttgttgttgacggggtcggcaaaggggccggcaaggttctcaagggggcccttgccggggacaaaagcctgcccaaaaaaacccaacatggaaaacatagggggggggccggtcttaatctccttcaccttgagctcgggaaacccctccgggtcgtcg

SEQ ID NO: 129220 - DNA, 735 bp, Zea mays
  Clone ID: MRT4577_49321C.1
cccgggtcgacctcgcgtccgagattttgaggaaggaatggggaaggggggatgaggaacattgttctgaactgctaaaaaagactagaacactgaggtgctctgttaaaggttctgaatcagatgattgtactagggctagttcccagtcgtcccagaagggggtttatcaaccacaaaatgaggttaacggggggtcttgcagggtgttgagaaccaagcgaaaacatcctattatgcatctaaataagcatgtgaaacagcttcacagacagaccaagtttttttgaaggtgatgagcaaccagatgccaagggcaattttcttggtggattagattcctatgatagaaagaggcaagtagaggatatgagcactctggataaaacaagacatcaccaggaagggagtcgagcatttgtccgcaaacttcctaaatatgtgtctctgaattgcattgttaatgaaccgaatactaacagtgaaggtgcttgcagtgggagtggtgggattgattctagtttaattgctacagggattacaaacgataacaggaaatctcccaaaattgttcctctcaatctggttcttaaaaaggctaagagatgcaatgctgttaaactccgtaagacagaaagcacccacttgtatgaggagaaaagctcagattgttctgtgaacaggtcagattattctagtagaaagtattccgtggatgatgaaatttgaggccaa

SEQ ID NO: 129221 - DNA, 2212 bp, Zea mays
  Clone ID: MRT4577_49322C.1
cctcgaggccggccgggccggggaacggcggacgcagtgtgcatgcatacaagcaacaagatactggcgcagaggagcaatgcccggcatggatgccttcgctgctgtgtcactactcgccacactctttctggttcgtgcggcagctgcccatcctccggcggcggctgcggacgccatgacgccgacggactattggcgagcggtgcttcctgggaccccgatgccccgggccatactcgacctattattgaccacatctacaggtgaggaaggctcaaggaaggtcaccacgtcatatgggtaccaaggccaggacttaaggacggtcaccacatcatatgtatctcaagatggtgaagaggacccaagaaaggccaccacatcatatggttcccaggatgaggagggatcaagaaaaatcacaatgtcatatgggtctaatggtgaagaggacccaagaaaggccaccacatcatatggttcccaagatgaggagggatcaaggaaagtcacaatgtcatatgggtctaatggtgaagaggacccaagaaaggccacaacatcatatgggttccaaagcatggaacatttaaggaaggccaccacatcatatggaatacaagatgaagagtatccaaggaaggccaccacatcatatggttcccaagatgaggagggatcaaggaaagtcacaatgtcatatgggtctaatggtgaagaggacccaagaaaggccacaacatcatatgggttccaaagcatggaacatttaaggaaggccaccacatcatatggaatacaagatgaagagtatccaaggaaggccaccacatcatatggatttcaaggtgagaaggatccaagggaagctaccatctcatatgggtcccaggatgagaagggatcaagaaaagtcaccatgtcatatgggtctaatggtgaggatgatccaagaaaggccaccacatcatatggaatacaagatgaagagtatcccaggaaggccaccacatcttatggagttcaaggtgagaaggacccaagggaagctaccatctcatatgggtcccaggatgacaaggattctagaaaagtcaccatgtcatatgggtctaatggtgaggacgacccaagaaaggccaccacatcatatgggtcccatggtgagtatgaatcaaataaggtcacaatgtcatatgggttccaaggcatgaaagatttaaggaaggccaccacatcatatggaatacaagatgaagagtatccaaggaaggccaccacatcatatggagttcaaggtgagaaggacccaagggaagctaccatctcatatggatcccaggatgacgaggattctagaaaagtcaccatgtcatatgggtctaatggtgaggacgatccaagaaaggccaccacatcatatgggtcccatggtgagtatgaatcaaataaggtcacagtgtcatatgggttccaagacatggaagatttaaggaaggccaccacatcatatggaatacatgatgaagagtataccaggaaggccaccacatcttatggaattcaaggtgagaaggacccaagggaagctaccatctcatatgggtccaaggatgacaaggattctagaaaagtcaccatgtcatatgggtctagtggtgaggacgacccaagaaaggccaccacatcatatgggtcccatggggacatccatcaccatgaccatgctgccgttcacatccacagcagcggcaacaagctagcagatgttttcttcttccacgacgtcctacgcccagggtccgtaatcacgccgaccatcccaccgaccaccaccttaccacctctgctgcctcgccgcgaggccgacgcgctcccgttctccaccaagcgcttcgccgacatcctcgccatgttcgcgccgacgacatccgacgccatgggcgaagagatacggtggacgctcgacacctgcgagaacacgcgcccgctccccggcgagaaggccgcctgcgccacctccctcgagtctctcgccaggatacccgccgtcctcctcgggacacgcaacgtccgcgctttctccggcgacatgcccaccgatcctgccggcacgtcggcgaagcgggggcggtataacgtaacggctgtgcagaagctctccgagtcactgacggcggcggcgtgccatgacctgacgtacccccta

SEQ ID NO: 129222 - DNA, 792 bp, Zea mays
  Clone ID: MRT4577_49323C.1
aacggcggacgcagtgtgcatgcatacaagcaacaagatactggcgcagaggagcaatgcccggcatggatgccttcgctgctgtgtcactactcgccacactctttctggttcgtgcggcagctgcccatcctccggcggcggctgcggacgccatgacgccgacggactattggcgagcggtgcttcctgggaccccgatgccccgggccatactcgacctattattgaccacatctacaggggacatccatcaccatgaccatgctgccgttcacatccacagcagcggcaacaagctagcagatgttttcttcttccacgacgtcctacgcccagggtccgtaatcacgccgaccatcccaccgaccaccaccttaccacctctgctgcctcgccgcgaggccgacgcgctcccgttctccaccaagcgcttcgccgacatcctcgccatgttcgcgccgacgacatccgacgccatgggcgaagagatacggtggacgctcgacacctgcgagaacacgcgcccgctccccggcgagaaagccgcctgcgccacctccctcgagtctctcgccaggatacccgccgtcctcctcgggacacgcaacgtccgcgctttctccggcgacatgcccaccgatcctgccggcacgtcggcgaagcgggggcggtataacgtaacggctgtgcagaagctctccgagtcactgacggcggcggcgtgccatgacctgacgtacccctacgccgtgttctactgccacacgaccaacccggcggccacgtacc

SEQ ID NO: 129223 - DNA, 2617 bp, Zea mays
  Clone ID: MRT4577_49324C.1
ggtccctcgaattgggccgggcggggatgaacggcggacgcagtgtgcatgcatacaagagcaacaagatactggcggcagaggagcaatgcccggcatggatgccttcgctgctgtgtcactactcgccacactctttctggttcgtgcggcagctgcccatcctccggcggcggctgcggacgccatgacgccgacggactattggcgagcggtgcttcctgggaccccgatgccccgggccatactcgacctattgaccacatctacaggtgaggaaggctcaaggaaggtcaccacgtcaaatgggtaccaaggccatgacttaaggacggtcagcacatcatatgcatctcaagatggggacaactcatggaaggccaccacgtcatatgggtgccaacgtggtaaggcatcgaggaagatctacactcgacgctcgacacatgggagaacacgcgcccattcccaggccagaaggcggactgcgccacgtcgctcgcgtctctcgccaggatacccgctgtcgtcctcgggacacgcaacgtccgcgctttctccggcgacatgcccaccgatcctgccggcacgtcggcgaagcgggggcggtataaggtaacggccgtgcagaggctccacgagacactgatgccggaggcgtgacatgtcgtgacgtacccctacgttgtgtcctactcccacacgacccaccaagaggccacgtacatgatgaagatggcagcatagggtggcgggacggaggatatggaggcgatggtcgtgtcacactttggaatgcaagagaaagatcaccccagcaaggccatcacatcgcatggagtcaagggagggaacgacccaagggaagctccaatctcatatgggtcccaggatggtgaggattctagaaaagtcaacatgtcatatgggtctaatggtgaggacgacccaagaaaggccaccacatcatatgggtcccatggtgagtatgaatcaaataaggccacaatgtcatatgggttccaaggcatggaagatataaggaaggccaccacatcatatggaatacaagatgaacaagtatccaaggaaggccaccacatcatatggagttcaaggtgaggaggacccaaagaaagataccatgtcatatgggtcacaagatgacgaggaatctagaaaaatcagcatctcatatgggtctaatggtgagaacgactcaagaacgtccaccacatcatatgggtcccaaggtaaggaatcctaagaaaggtcaccacgtcatgtgataggtaccacggttgtgaagatgatgcgcggaaggccaccgcatcacatagagctgaaggtaagcaggacatgaagaagatcagcatatcatatggatctcatcgaagtggggagcactcattgagaaccaccagtacaagagagaaaggtgacacaagtaaaggggacatccatcaccatgaccatgccgttcacatccacagcagcggcaacaagctagtagcagatgttttcttcttccacgacgtcctacgcccagggtccgaaatcacgccgatcatcccaccgaccaccaccctaccacctctgctgcctctccgcgaggccgacgcgctcccgttctccaccgggcgcttcgccgacatcctcgccatgttcgcgccgacgacatccgacgccatgggcgaagagatacggtcgacgctcgacacctgcgagaacacgcgcccgctccccggcgagaaggccgcctgcgccacctccctcgagtctctcgccaggatacccgccgtcctcctcgggacacgcaacgtccgcgctttctccggcgacatgcccaccgatcctgccggcacgtcggcgaagcgggggcggtataacgtaacggccgtgcagaagctctccgagtcactgacggcggcggcgtgccatgacctgacgtacccctacgccgtgttctactgccacacgaccaacccggcggccacgtacctggtgaagctggcagcccaggatggcggggcgccggacatggaggcgttggtcgtgtgccacctcgacacgtcgttgtggagtcccagacacccatttttggtggcgcacagtctcaagccaggggacgacgcagtcgtgtgtcattttctctctaagctcagcatcgtctgggtccccgctggcgagcaggggtggcgtgcgtgaagtgaagcccaatagcgttaagtacccgtgctcagagctctatctgtaacctgtgtggacctaacgtggctctgtaatgctaaataaaacctgcgtcaatcatgtatcgtgatattttatctgttttagcaaaatggtgtccaaaactatagtccaaagtgaaggaattcatgttgagaacaaaaaaaaaaaaaaaaaaaaaaaaaactccacttcggggtccctaatagcgttaagtacccgtgctcagagctctatctgtaacctgtatggacctaatgtggctctgtaatgctaaataaaacctgcgtcaatcatgttcgtgatattttatttgttttagcaaaatggtgtcataaaaaaaaaaaaaaaaaaaaaaaaaaaaaaaaaaactcggaggggggccggt

SEQ ID NO: 129224 - DNA, 682 bp, Zea mays
  Clone ID: MRT4577_49325C.1
ccaggatgagaagggatcaaggaaggtcataatgtcatatgggtctaatggtgaggatgatccaagaaaggccaccacatcatatggaatacaagataaagagtatcccaggaaggccaccacatcttatgtagttcaaggtgagaaggacccaagggaagctaccatctcatatgggtcccaggatgatgaggattctagaaaagtcaacatgtcatatgggtctaatggtgaggacgacccaagaaaggccaccacatcatatgggtcccatggtgagtatgaatcaaataaggccacaatgtcatatgggttccaaggcatggaagatataaggaaggccaccacatcatatggaatacaagatgaagagtatccaaggaaggccaccacatcatatggagttcaaggtgaggaggacccaaagaaagctaccatgtcatatgggtcacaagatgacgaggaatctagaaaaatcagcatctcatatgggtctaatggtgagaacgactcaagaatgtccaccacatcatatgggtcccaaggtaaggagaccctaagaaaggtcaccacgtcatgtgataggtaccacggttgtgaagatgatgcgcggaaagccaccgcatcatatagagctgaaagtgagcaggacatgaagaagatcaacatatcatatggaatc

SEQ ID NO: 129225 - DNA, 556 bp, Zea mays
  Clone ID: MRT4577_49326C.1
gtgattcctagtcgagcaccagtgtacgaagaatattgggatcgatgtccgtgagcgtgtggtcgttggggacgttcgtgttcattacgttccaacgagcttgtaatttgtcaacatcttcactaagtgtgtttcctcttcgttgttctaggactttagttacagtagtctcaacgttgcgaggtaacacatgtaatactaaaactgcagcccattgtaataatagggttttcattctaacaatgcatgccatccttgtatacgatgatagagaatatcacgcaccaggatatgtagcagttattgttcgtcacctatcccttcatccacaacactgcaacagaagatgtgtcattctcaactggaggatcttctacaactaaccggaatagagaatcacgcgcaatacagcaaccgttgtcgccgtgcgtgcagcggagttactgggtgggatgcatctgtctgtcatgagccggcaggccgatcgaccacaatgccggtcgatttcacgtactctacacacaacagcatgcatgtctccccggcctcgactagg

SEQ ID NO: 129226 - DNA, 267 bp, Zea mays
  Clone ID: MRT4577_49327C.1
tatgaacttgaacaggagcggggccagcggatatagaataagggagcttgcggccggatcgcatgacaacaagctaggaagcagcaagtacatctaatgcgaagagtgggatcctgacactgttgacctcgagagagattatgagaccgcatccatgtagaagaagcgagcgactatcatgaactattacctgcgggcggatgcgacattcaacatagagttgccggtgtactagattgaagacagtgatatttgaagagatttgcc

SEQ ID NO: 129227 - DNA, 334 bp, Zea mays
  unsure (1)..(334): unsure at all n locations
  Clone ID: MRT4577_49328C.1
cgtaaaataaaattataatntctatataanttgattctatttaatttactggaaaacacatgtaacggttcccatgtagaccggcgccgtgagacccacatagtgctcatctcatagcaacgcatagacataccatgcatgcaacatagctactttggtaagaccaatactgacatagcgccacacggcgaacatacagacacggcttacgcacatcatgatgcctcgagatacatccggttcatacatcatcaccttcatgtcagtgttccatcagtgaccgcacgcatggtggccggcactacatactaagctcccattacatgcgtgctcc

SEQ ID NO: 129228 - DNA, 1085 bp, Zea mays
  Clone ID: MRT4577_49329C.1
atgaaagcagcccagttacagaggttgagccatatatccccttcaacatcaatccaactggaatgcagcccttgcttacaacctcatacttactagcttttccaagtatcatggccagtatttttgcctcacccttttgggaaaacttgagggaacccttgcgtccacccacgtcaactggtggtagtccctgggtttattacttgacatatgctttccttgtcttcatcttcaatatttttgatattgctaacttacccaaagagatatctgattacctgaataagatgtgtgcgagggtaccaaggataaagcctggaagagcaacagtagactatcttacaaagatacaaacatcaacacgtttctggggaggtctactgctaagcttgcttgcaacttcctctttattgcttgaccgatatctcaggcaaataaatgaagggttgtcaatagggttcacatcagtcttgattattgtgggctcaattattgagcttagaagatcatatcaagcgtacaatgtgatgccagcactgagcaaagttttgaggagatatggtgcttaagagtatgtaagctgatacgttggtgatgatggcaccatccactagctcgtggtgttgcaaggtcgattggtctttagaaacagcatggatatgatgagaagtttaccgctcaagcttctgttagattaaaaggtggaaggaacatggctttacaatcacatcggactttatcgacaaggtgaactgaggaagcaacaaacatgcccaacaacatggctgtgtgtatttgttggaagtgatctaaaatcttccatgtcctaatcgccatactggatcacatagctaatctgttgggttctataaattctccaccgttcaaatgctccgaaaggaagggcctttggataagtttctctttttttccctttttttgtttgggtgtgcacacattgttggacgggctgtagttgaatgagtagagtgtacgcctcgggctgaagatgagtcggattcaacgacgaacatttttgttgtgcccgcgaatggccaatatttcgctttcatgtacaaaaaaaa

SEQ ID NO: 129229 - DNA, 2051 bp, Zea mays
  Clone ID: MRT4577_4932C.1
gccgggggttccctaaaattcttctcgtacgcggccgattgcgaccctcgctcgccctcgcttccccaccacagccccgaaactgccccgcctccgcagccgccgcccgcgcccgctcgtcctccctgcgccgcctcggggacgccccggtcggcgatgtggcgggagcatgctaggcccgctcctcaggctcctctcggcgtgcggcggggtctggcccacctcgccggcccccggcgccgcggcctcctcttccgcctcctccggggacgactctgagggccgcgacggccttctctggtggcgcgacctcgcgcgctgccacgccggcgacgtctccgttgccgtcgcccaggccaaccaggtgctcgaggaccagtgccgcctcgactccgccccgtccatcggcaccgtcgtcggcgtcttcgacggccacggcggccccgacgccgcccgcttcgcctgcgaccaccttgtccccaacctccgagaggcgtcctccggcccgcgaggcgtcaccgcagacgccatcagggaggccttcctggccacggaggaaggcttcctcgcgctcgtgtcaagcctctgggaggcccagccggacatcgccacggccgggacatgctgccttgtcggcgtcgtgcacaacaggacccttttcgtcgccaacctcggcgactcccgggccgtcctcgggaagaaggcgggccgcgctggccagatcgccgcggagcagttgtccagcgagcacaatgccaaccaggaggctgtcaggcaggagctcatggcgcaacacccagatgatgctcagattgttgcgctcaagcatggggtctggagagtgaggggcctcatacaggtgtctagatcaatcggtgatgtatacctgaaacatgcaaagtataacacagaccggatcaaacccaagttcaggcttcccgaatcattcagcaagccattattgagtgccgatccatctatcatctcccgcgatcttgaaccaaatgactgtttcatcatattcgcatcagatggattgtgggagcacctcagcaatcaagaagccgttgagattgttcacagccatcaacgtgctggaagcgcaagaagactcattaaagccgctctacaagaagcagcgcggaagcgtgagatgcgttactcggatcttacaaagatcgataagaaagttcgcaggcatttccatgatgacattactgtcatcgtcttatttataaactatgacctattattgaaaggtgctccgcagggacaacccctctccatcagatgtgccctagattattgacagtgagctagttcacccactggtattcaagctcctgcgggcagccatatccagagtcagctgacatggtcaaccggttgtgaaaagcgcacaacctccggcaccagtttccttttcgtttccccttttttgcacataaaattgacaagtcgctgaaattgccagttttcccctcttggattatgtcggataaaatgcgtatactcttcggttttggagatatatgtctagactctagagcgtgagggaaggttataaagtcttgtatgtctttgttctcttgcagtcttgcttacagttacagctagctctttttgtatgtaacaattgtcagcaatcagcatgtttaaccccctccgtgacgttttacagaagactgaaaaaaaaaaaccacaccgtcatgagcataaattctttacgacttcaaggcttgaaagcaaacagctggtgggcttgtgccagtgaggatctgcagaattctctcctttttttcataaaatgtccaattgttctaccagaattctcaaactagacagttaccgaatgtttcttttgtttaattcactgccttttgcattcattcacacacatcacagtcctccaaccagccatggttttcaacgtgcccatgaaatgaaaagaaacggaaccggaaaagccacagtttccagctctcaaaaaaaaaaaaaaaaaaaaaaaaaaaaaaaaaaaaaaaaaaaaaaaaaaaaaaaaaaaagcggcc

SEQ ID NO: 129230 - DNA, 173 bp, Zea mays
  Clone ID: MRT4577_49330C.1
ttctttttgcctcgaaagagcttctgctcagctcacgcgcctactgttgtagaaattgtgggctcgatattcagaaaggtctgtcacagaccttcacaccctagtctccaataatgggggggggggagagctctttgtgggcacactttttgaggaaggaaaaaatgtccaca

SEQ ID NO: 129231 - DNA, 263 bp, Zea mays
  Clone ID: MRT4577_49331C.1
gcaataaaattataaccacttaatggatttaaaaggaagacacggccggacaaggggctacagataagcatacatgcagctgcacactacctaggacgagtgaaatagaagctgatgcaggaaagccggtttgcacagaggcatgtggtgaataccacccgctccttgtgcacttggggcaagaacaggtggccatgcagctggaaccaaccattgaccgacgtcatggcttgccctgtcacctggacaaagccagggcaagc

SEQ ID NO: 129232 - DNA, 434 bp, Zea mays
  unsure (1)..(434): unsure at all n locations
  Clone ID: MRT4577_49332C.1
gtcctgaagatgaataattggatgtcatgatttgttgcaactagttatcggtgatatttctatgtaaaaagtggtgtagcggtgtatgtaaaatattatattcgtcagatctttttataccaataatatttactcataaaaaaaaaaaaaaaaaaaaaaaaaaaaaaaaaaaaaaaaaaaaaaaaaaaaaaaaaaaaagggccgnnaaaataaaaaaaaaaaaannaaaaaannnggggggggccccctttaaagatccaaaatttacacccccgggattggaagggtatatttttttttttgggcccccaaaataaaatcccggggcccctttttaaaaacgcgggaacgggaaaacccctggggttccccaatttattgcctttggagccaatccccttttccccagtgggggttaaacaaaaaaggccccc

SEQ ID NO: 129233 - DNA, 707 bp, Zea mays
  Clone ID: MRT4577_49333C.1
ccggccgggaactcccaaaggtatctcctccactcgtgagaaactccctctcctctgacctcatctctcgtccaagtaccttgtttctatgcggataccttccaaacctctcaataataactcggtgtctctcctcaaacttcaaactcgtctgtcctacagtctttgccttgtcaggatcggattgcacaacctctctcgcctttctctcatactcatccccaccgcctgtgcctgtagtcagacttaggatatcctcgttcatccgcttaaacgccaacactgcctcatcatgcgccgataaatcttcagagtgcatcagtggcatatagaaccaattgcggtgcgaaaacacccagcggatctctggcgctttgtctggaattccctgcgctatcgccttgagagagacttgcaccgcgagagggtcaaaataagtgaaacacacagaagctttgtcgccgcgataatgagttgcggggggatttgatcgagcaggatgatcagactcaaccagtctagagaatcacggggtttgacgatggatagaagctcttggcctgatgtcacacccgcggtgcgaatggactctagtatagggctgaattgagtgctagaggagttagacgactcgattggaggacggcgagtgacttacacacagacggcgtcgaattgcttgtctgaaacaaaccatctcttttggg

SEQ ID NO: 129234 - DNA, 650 bp, Zea mays
  Clone ID: MRT4577_49334C.1
ccggccgggagcctctgtctctgctcccggctcccccacggtactccagtcgctaccctgcgattccgacagtacgccaccaccaccgaccctggactaccgccgccgcccttctccgatatcttcaaaggcgaacagcgcccaccatatcccgcccctgcgatggattccgtggtgaaccccaaggcatacccgctggctgatgcgcaactgacgatggctatcctcgatatcatccgccatgacgccaactacaaacacggttaggaagggagccgaatgaatcgaccaagaccctgaataaggacatatcgcagatcgtattgatgccgactgacgctgagactctcgagatcctggtccacctccccttgctagctgacgatgagaacgagccatatgtgtttgttccatcaaagcaagctcttgcccgtgcttgtgtcgtgacaagaccggatattgcttgctcagagaccagcactgaggcgcaacccgctggaactacagatacgggatctcaaggactccattgataagcttctcatctgatctgtgcgaagacccttcagtgcgatgtgcctcatcgagacttttttcataggactggactggtgctggtgtctcgcctactttgcgctctgcctgctata

SEQ ID NO: 129235 - DNA, 1122 bp, Zea mays
  unsure (1)..(1122): unsure at all n locations
  Clone ID: MRT4577_49335C.1
atttcggcacgaggctcggggaacatgggggacatttctcgcacgcccagcgaatcgctatgccaatctctacagccgattcaaatctggggactctgttcaccccgcaggccgcacgtccgggtgagggccanaatcgaagtgatgcggggggacagatgtgcgccncgaggggggggggcangaggcggcatcaccggatcagctcattgcatcggccgctttgctttgcttgctgctctcttctctccgctttccgccgcggtgcaaggccagcgaattccatttccttccgcgtctatccccaaaagcgggaggcccgccgccggaacgagccagcaaagccaagcaagcatattgacggaggaggcggaacggcggaagcgtgaatccggaggctctgcagctgttctccagaagcagccgactgggtgtccgtccgcggaccggtcggtgtataaatggttggcgaggagagcggctgcggcgtcgagggagggacaggaggaggagaagtgccggcggcctctgctcccaacggggaccgctcagggaatagccgcctcgccgtgccgtcatcctccgcagatgatagaggcttccatagatcaagcaccatgccaggggtgattaagaatgatgaaattaccaatgaatctactggaccatcaaatttggaaaggtccagaactgagcgtcgtcggcaaaataatccagctattgatcctgctaaacagttacttgatgaaaggattccaataaaaaagaagctcaaaatgctaaatcggattgctacagtaaaagatgatggaaccgtggttgttgatgtgccaagtggtctggaaccaactatagttggtggaactgaggatatttatactgaagctgttgaagaagcattagatggaacggagatactatacaggcctcctatgcaaatagttatacttattgtgggtacacgaggagatgtgcagccatttgttgctatcgggaaatgtttacaggactatgggcatcgtgtgagattggccactcatgccaactttaagggagttgtactaacagctggtctgggagtttttccgcttggtggagatccaaaattcttgctgaatatat

SEQ ID NO: 129236 - DNA, 472 bp, Zea mays
  Clone ID: MRT4577_49336C.1
ccggccctgccattccatgctgccatctttagttctccagaaccgacagactacccagcgccgggggcaacgacacccttctagccctactgcacaccgatacccaccacctttacaaaagtaataactcttgcaagcaccccgactaaccccctctgtcttccaacaccacatgattctgcttagcgcccgaatccttcttgccaacatcgtagtgcgccatccccttcacctgcacaagcattcaaagcccacagtcaccgtccttctaatcaccgttcccacctttcttgacatctgctcgtggcaagtccactaactttgccatcatcttgaggtcaccgaacacgacgttatttttgaaaccgacgacctcgaagtccacctcatcgtcaaaattatcaaaactcgtcaaaaaacttgtctcctatctacacgaactcaatgttcaaacggtaacaataacttggcc

SEQ ID NO: 129237 - DNA, 310 bp, Zea mays
  Clone ID: MRT4577_49337C.1
ctgcagcttcggcgacggtcttttttgttgcgccgagaagagcacggtggggaggctggtgcgcttcagcggggagaaggtgtggggcgcgtggaactgatcgggctgtcacctcctagctcgccggtccttgtaggttagaggagggagggaacgaaggaaggaaggaaggaaggtggagagacagacagccaacaaggaggcggaggtctcgtcaattgtcggtagcagtagcagcccttttccttttctcttgcaactctgatgattgagcgtgccgagggttccaaagggttttggggcccggggt

SEQ ID NO: 129238 - DNA, 382 bp, Zea mays
  Clone ID: MRT4577_49338C.1
gaagaatctgaagaaggctcctcgaagaaacttctttacctcccatccacatgtggggttctagtttctgatatgcgttttttttttgggttaattcattcatcttatgttcgttgcttctgtgtgaggggaaagcacttcctcgctctactcgtgcggaagcgatccattctttcgtgtccaactcacacgtcaagaatatcgaaatgtggacccttttcagcgcgctctttaattcagcttacctgagcatcaatggtgaaggaagaatgcaagctcattgaccaaggtggcaatgatgtcgccgatccacaacgctatggagacgaggacagtgatctcctgtgcctgccctctcatgttcggctgtgcgcctgggttc

SEQ ID NO: 129239 - DNA, 330 bp, Zea mays
  unsure (1)..(330): unsure at all n locations
  Clone ID: MRT4577_49339C.1
gagctcactatgcggcgggcgccctttnttttttttttttggttttaagagactgatcacgagccaaactggaggccagaagacactaacaatgcaaagtttcccgcgcgaccttatatgacaagcgcgtatttactggcgaacaaacgacgcatggctcatcaaggccatgagccacagatgataacccacggggagcacctataaaactgcggcagggaaggtggcggaataggtcacatgccacgcccgatggcgtgctccatgggcggcctcctgactatttctggagttccccatgttgaaaccagggtggggaaccctggggcg

SEQ ID NO: 129240 - DNA, 380 bp, Zea mays
  unsure (1)..(380): unsure at all n locations
  Clone ID: MRT4577_4933C.1
aatacaacagnatttttcttgactcataccgcaaaaacaaacgagggggccagaacggggaaaacatccgccaggaaaacccaccacaacacagaaacatctgagacacaaaagtgggaacaagccaatgactataaaaatggtgcagacgagggcgagcagaccctgaactaaaaacaggaaaaaaaaggggagcggaacccacacggcccaagtgtgtgtggcctcaacataccttcgactgaggcgatcacacgtcatagactgtatccagcctgacggatatatatccgtaaaggaatacactgtttacattgaggggcaggggagcaaaagcttgaaagggcgcaaaagcgagatcgtgggctaaagctctaaca

SEQ ID NO: 129241 - DNA, 616 bp, Zea mays
  Clone ID: MRT4577_49340C.1
acttacttcaccggctctgtcccttctctttttccggtcgaccagatggcctgccgcgcgaacgtggtaggacaggtggagcgggacgacggagagtcgctatcctacgcggagatcgtccgccgcttcatggcgcccaaccgccccgacgatctcacgggtctcacctcatcctgaggggcccacaaggactggactctctccggtggctgggtgaccttcgcgcgccctaatctcggcttcttcacccaaaacttcccttcctctctcgttcaggtcgacgactgctcctcgagtgatttcacggaccagaagcggcttgagatgtccatgcaggagttcataaaccactgggttgcgggtcctcattgcggttcaagtgatggagatcgtgatggctctctgttgtatctgaaagactggtacttcgataaggaacctggactcctctgcatgctgatgttttgaggtcatacagctggtcagaaaatgtttgtgggcaaaaacagtggttgtttctaccaccatcacaaagtcattgtatatttgataggaacatgagatcttcggcctataacttacatgatgtatctgaatagcagctacctgagtgtag

SEQ ID NO: 129242 - DNA, 1792 bp, Zea mays
  Clone ID: MRT4577_49341C.1
ccgaattatcgctttcactttcgtccctaccaactacacagccgccgcctcagcgaagctgtggaagaccagcagcaagggccccttcagccttcgccgcctctgtcccttctcctccttccggtcgaccagatggcctgccgcgcgaaggtggtaggacaggtggagcgggtcgacggagagtcgctatcctacgcggagttcgtccgccgcttcgtggcgcccaaccgccccgtcgttctcacgggtctcacctcatcctggcgggcccacaaggactggactctctccgggtctggtgaccttcgccgccctaatctcggcttcttcacccaaaacttcccttcctctctcgttcaggtcgacgactgctcctcgagtgatttcacggaccagaagcggcttgagatgtccatgcaggagttcatagaccactgggttgggggtcctcattgtggttcaagtgatggagatcgtgatggttctctgttgtatctgaaagactggcacttcgttaaggagtaccctgattatattgcatataccacaccaaccttctttgttgatgattggctcaacatgtatcttgacagtcaccctatacatagagattctgacattgccaatcataaaaatgaaataaactgttctgattatcggtttgtttacatgggggcaaaaggaacctggactcctctgcatgctgatgtttttaggtcatacagctggtcagcaaatgtttgtgggcaaaaacagtggttgtttctaccaccatcacaaagtcattgtatatttgataggaacatgagatcttcggtctataacttacatgatgtttctgaaaagcagtttcctgagtttagtaagacagaatggctagaatgcattcaagagcagaatgaaatcatatttgttcccagtggatggtatcaccaagtccataacctggaggacactatatctataaatcataattggtgtaatgcctacaacctacactgggtgtggaacttgctttatgaagactacaaagttgcaaaagaatatattgaagacattcgagatatatgtgatgattttgaaggactttgtcaacggaatttggcagctaatacaggcatgaacttctatgatttctttgttttcatagtgaggtttgccttagccaatgtagttgagctttaccatcttcagcagccagaggttgcaaccttgtcaacagaaaccgcacaccatttggtctataatctgatgtcaattcgtaatgttgcatcaaaaatgacaactacagaggcttttactactgagaatcgtctttgtagtgtctcggaagataaccgcagtgctttctctaatatcaaacaaatattagaagaggagagtttcagaaggctatcgatgacactgtcaaaggcatatgaccacatagacagagggcaaagaagtctcaaatcttcgatctcgtatcggaagggctgttcgtcagtgatctgcttgaaatctgattgcaatgttgttgactacattacttctttggttgatgaaatttgtggacccgaggatttgacgagactaattgatagtgctctctctcatggataattttagtgtatctagcattgtaaacctatgcttgcatgaatccttattcatcagatatgatgggatacttaggtagtgtttggttttagagtatggttttatggagccatttcgttttcaaaaaaaaaataattgaattggttttacataggatgaaatgacgcaaaaaaaaaaaaaaaaaaggccccta

SEQ ID NO: 129243 - DNA, 363 bp, Zea mays
  unsure (1)..(363): unsure at all n locations
  Clone ID: MRT4577_49342C.1
attcggggggcgacccactcctgctatataaaaacaaactacccctctattttataccaacctcctaacaacaatcagggggcatatattaaccctcctggcgctacctaaacttaattcactcgcccaaatgcatacattattccactgtgctaacctcctcctaacccaattataccacaggtcctcccaccatctacttcaatgngctacgtacaaccaacagtgcatgtctaaacgctacttctagtgcttgcggcgagccacttacaacaaccaattcatcaatcgcaacaacattatctgccacatgtaacattacaatacattactaaaccacaccaacatcagtttcatccataa

SEQ ID NO: 129244 - DNA, 279 bp, Zea mays
  unsure (1)..(279): unsure at all n locations
  Clone ID: MRT4577_49343C.1
ggggttggggctccgntaacaaatttttttttttggggggggttatttatacatcaaacgttcaaaaacagaaaagggtggtacaggcaaagccaggcatagtttcgtattggctatacgggtgggtcaaactggagtaaaaaatagcggcggcaaatcttgagctagctggtcgcaattacccaactgtcctgtaaaaaaagcttaagcagggcaacccccggggacctaaacacctcgcagtctcaatgattggggtcttacgagagatgggtggag

SEQ ID NO: 129245 - DNA, 1582 bp, Zea mays
  unsure (1)..(1582): unsure at all n locations
  Clone ID: MRT4577_49344C.1
cagccaactgctgattccaccacggctgaccggcggcttcctttcgccttccgccgcccaccgccgtgtacacgtggccccataccgcttccacttacacgtgggccccgcgctgcctgattggcctgattcccttccgccttcaattcctacgcgcggtctcccttctcttccacctcaattcgtgtcgcctacgcctctcgctctcctcccgccgcgcgcgcgagaggagggaaagggaggggaggaagccggcggggggcgcgcggcatggacgcgcgggccagggaggctgcagagaccagcggccccgggttgccgctcgccgtgcgggagctcctcgccggaggggtcgccgggggagtcgccaagaccgctgtcgcgccgctcgagcgcgtcaagatcctgttccagacaagaagagcggagttccatggttctggattgattggatccttccgaacaatctatcggacagaaggtcttttagggttttacaggggaaatggagctagtgttgctcgaattgtcccgtatgcagctttgcattatatggcctatgaagaataccgccggtggatcattcttggctttcctaatgttgagcaagggcctgttcttgatctcgtggctggctctatagctggagggacagctgtcatatgcacataccctcttgatctagtccgcacaaagttggcttatcaggtgaaaggtgcagtcagtgtgggtttcagagaatctaagccctctgaacaggtttacaaaggaatcatggattgtgtgaaaacaatatacagacaaaatggattgaaaggcatataccgtggcatggctccttcactatatggaatcttcccttactctggtcttaaattctacttctacgagaagatgaagagccacgttcctgaagagcacagaaaaggtagaatagcaaagctcggctgcggtcaagccctttcgtcatccagccttgtgggtaggggaacatttgaaagcctggttatgatagcgaaacagcaaggctggcgacaacttttctcaggattatctatcaactatttaaaggtggtgccatcagtagccataggatttactgtttacgactcgatgaaggtctgtctaaaagttccgtcgagggaggaaactgctgttgctgtcttggcagaggagcgaagcaatacagctcctatcccctccagttaggcaggagtgtaggatagcattctttcttggatcttatcttctccaacgcgttggagacaataattcgacgaccatcaataagcgcataagcaagcagtcgaaaagtaattcctggcggattagcatttctgtgtacaggctcttgtgtgtgtatatgtatatatagctgatgaataaataggttgcgccccctccctattctatcgcgacgagtacaaaagaatctatgcgccttgcattccccaaaanaaaaaacggaaaggaccccaaagacctccaacaaaaagattgacgacggcgtagtggagatcccgtccgcttaacaagagggattgcagtctaggatggttgtctgtctactgaaataattctc

SEQ ID NO: 129246 - DNA, 1208 bp, Zea mays
  Clone ID: MRT4577_49345C.1
gaattgtcccttatgcagctttgcattatatggcctatgaagaataccgccggtggatcattcttggctttcctatgttgagcaagggcctgttcttgatctcgtggctggctctatagctggagggacagctgtcatatgcacactaccctcttgatctagtccgcacaaagttggcttatcaggtgaaaggtgcagtcagtgtgggtttcagagaatctaagccctctgaacaggtttacaaaggaatcatggattgtgtgaaaacaatatacagacaaaatggattgaaaggcatataccgtggcatggctccttcactatatggaatcttcccttactctggtcttaaattctacttctacgagaagatgaagagccacgttcctgaagagcacagaaaaggtatcatagcaaagctcggttgcggatcagttgcaggtttgctaggtcagacaataacataccccctagatgttgttaggcgacaaatgcaggttcaagccctttcgtcatccagccttgtgggtaggggaacatttgaaagcctggttatgatagcgaaacagcaaggctggcgacaacttttctcaggattatctatcaactatttaaaggtggtgccatcagtagccataggatttactgtttacgactcgatgaaggtctgtctaaaagttccgtcgagggaggaaactgctgttgctgtcttggcagaggagcgaagcaatacagctcctatcccctccagttaggcaggagtgtgaggatagcattctttcttggatcttatcttctccaacgcgttggagacaataattcgacgaccatcaataagcgcataagcaagcagtcgaaaagcaattcctggcggattagcatttctgtgtacaggctcttgtgtgtgtatatgtatatatagctgatgaataaataggttgcgccccctccctattctatcgcgacgagtacaaaagaatctatgcgccttgcattccccaccctgttggattgttgcgggctgcgcgcgcagcacgacatctaggattttttggtcagatcctcgcatatctcagattccttgcctatagcctgtactggtcctatggattgttcttcccagatcgaattcaaattcacattttacgggttggagagtgactgatggcatacatatgcttgggagagaaagccatttgtatgcctct

SEQ ID NO: 129247 - DNA, 367 bp, Zea mays
  Clone ID: MRT4577_49346C.1
cttcttatgctgctcggtctctcagcaagagctgatacggggaccattcaccgcaggctcgcaagctaatatagctggccttgttaaaccgtgcctgtcaccaggggtgtcttggggctgtgaaaacacaattcttgaaccctacacaatccaacaggcaaacacagatagcatcttacctttataaaacttgttacctccaacaaccatcaaccttattacatggaataccttgtgggcatttataagaaacaaaacattacaacgcaacaactacaacaactggaactaaaaaaccttgctgcctactctgagcaacagcagattgttccattcaaccaactaactgaaaagaactctgcttttt

SEQ ID NO: 129248 - DNA, 272 bp, Zea mays
  Clone ID: MRT4577_49347C.1
gcttgatctatcattacattctcccccacaaacctccatcatgggcacaaatacttcctcaacactgattgcgcattcaagacgcccggcaatgctcacgtacacctcctgtctcgtggacacagcgcatacgctttcccgtatgccactctatttaattggttggaagcgcgaggcagagattctagatgtttcgatgtttgagaatcttgaatttgcgcgtggatggcgcaatgtaccggctagtctgaggttggagattcagagccatg

SEQ ID NO: 129249 - DNA, 784 bp, Zea mays
  Clone ID: MRT4577_49348C.1
aaacttcgtgaacaccagtagaaatttgtttgaaccacattctcagtcttacagactcagactcccatactcacagattcaagcagacattctcgcacattgtcggataattaattcaagaagacaaaaccagaacacattataacataaagtgccacaaaccccacgatcactaagtatgttcgccacacgtgaaatgttcgttcaccgtctgcactctgcaaacctattcgtttatcggcagcacaatatgttgctagggttggggatgggttaaaaagcgttccggcatgcatcaggccgtccctagaaagaatacgggcagttcaaagaagaaaaagaatactaaattcaacaaatgaaaattcacagctcaatggctaggaagtctgaaacataccggtgggtggcacatcgaaggatccagcagcgtcgctacctccgaagaaagacgatgcagctagatctgattgaactcctacatgtcatgccatgggatgacgaggaactcctacaccatggaaagtatctcggtagtcgcctccactgtcgctcctgatctccatcaccggccatctcccacgggaggattcggccgcggacgaactccacttcccacaagatttgagccgacagtgttggagcagcagtccttgtcgggaccatcttacccgccttctcttcgaacgccgccgcctcctcctctccggccgccgccaccaccgcttcctgcctccaccacaacacctacacacacgacaaaagaaaaattggggagcctaga

SEQ ID NO: 129250 - DNA, 358 bp, Zea mays
  Clone ID: MRT4577_49349C.1
ccccccgggggtcccattccttgtgggggggggggggctcttcggggggggtggggggggttctttcctgctttcctgggcggttttttatttggtcccccgggcctcaaccctcccctcctgcccggccctccaaagagttgtggcccactcgccagcattttgcccccggctcggcctcgcccttaagggcttttggtcctggccccggccttgacccgctttttttggggcgggtcccccagggccgggcgcgttgtcggacgctttggtctcccccgggggctccccccggaaggggcgggggtcccgctttccggtttgggccccttttttgggcccgccctcaggaggggcc

SEQ ID NO: 129251 - DNA, 397 bp, Zea mays
  Clone ID: MRT4577_4934C.1
actgatcccagcccgcgcaaacgccaaagccgcttgcacactcacacgcacgtccaaagcgaggcacgggagcgcgctcatgcacatcctccgcctgctcgcggcgcggcgtttccgccgccgcgccgtgtccacgatcagagcgagcgcgacggcgccggccaacccgtgcgggtacggctacggcgaggacgagggcccgttcttcgacctcgacctgtcgtgctgctccgcctccgcctccgcctccgcgcccgcgtccagcgccgagtcgagctccgagtccgaggactcctcctgcgccggcgaggtcgacttcgtcatcctgctgcagcggagctgctccgcgtcgctgtcctacgacgagtgcctctccttcagccgctgcgggtggggg

SEQ ID NO: 129252 - DNA, 412 bp, Zea mays
  unsure (1)..(412): unsure at all n locations
  Clone ID: MRT4577_49350C.1
accatctttctacccctctccctccctccctccctccccctctcacgggctgcacgctgcctcgctccgacctaccaccacgccttcacatccccatctccatctctctccgcgttgctctgcctctgccaccgcttcacccgcgcgcggtcgggctcctagctagctgtggcctcttctccccttgatgtggcgccgggcgccgagctgctgctgctcgcgcaccagaggcgncggaggcgagctccccggacgcctggcggtctagcctcctcgcgctcctacaagagggagatccgggctttcttgcgtttggtggggccgtgtgaccccacgggacccaaagtggatccactctggcggaaatggggtcggggagcacgctctatgcgggtgaaggtcttcacattga

SEQ ID NO: 129253 - DNA, 276 bp, Zea mays
  Clone ID: MRT4577_49352C.1
ttaaagacacacaaacggggaactatattatttttcgcacaccactacacaaacatatggctttcagcacatgcatgccttaggggatcatttcccggccacatatgtacatatacacgcggtgggcatcttgtgctcaactgcaagagcagtggtgtcaacatcaagcttagttcaagacttatccaaacaactacttttttcgcaaggttacagctgtctctgtatagtgcgagatggaactatctcgacacatctatatagatgcgcggacac

SEQ ID NO: 129254 - DNA, 529 bp, Zea mays
  Clone ID: MRT4577_49353C.1
gaggagccggccaaccagtacccatcccgtcccggccctgcggtatcttattgactccagtttgtcctaaagaagattaacaacacccaatggagtacatggttggagaaaatgtcctcgtccgataaggaagcaaagcccatccaactgcatttgctaaaaacaatcacagaggatttttcagagaagatgaaagttggtagtggtggctatggagaagtttacaagggagtgcttaatggggacgaaattgctgtcaagaagctttttcccgtccctggacttaacgatgaggcatttgaaaatgaatttcgtcaccttaagaaggttcagcataaaaacatcatccgtatgattggttactgctatgagatagcacataaagatgttgagtacgaaggaaaattagttttttctgcagtaatagagcgagctctctgcttcgaatatatgaagggaggaagcctggccaagcatatttctgacgagtcgtgcatacttgattggccaacaacgtacaaaataattc

SEQ ID NO: 129255 - DNA, 442 bp, Zea mays
  unsure (1)..(442): unsure at all n locations
  Clone ID: MRT4577_49354C.1
cacccncccccacggacgccacaccgagccacaaagccaaaccctgggggacggcgcggcgngaaaaaaaacaaggnncgcccggcgggaggggcaagcagcccggccccccgggcgaccgcaagcagggagacggcaagaaagagaagaaagaggaaccacccgcggccccaacccgaggcggccggaagcagaagcggggggggggggagcgaggcggcggcgcggccccccgccgaggcgccgcacacaaagggccgccagcgccaacccaagcacgaacgcgacaaggaccacccacacagggaagaggagaacgangccagccagaagcgccggcaccccaacaaggaaaagacggaggaggaccgaaccaaggacgacgaccaccacgaaacagccaagaacgagggaacgaaggaggagaacaacgacaaaagcc

SEQ ID NO: 129256 - DNA, 443 bp, Zea mays
  unsure (1)..(443): unsure at all n locations
  Clone ID: MRT4577_49355C.1
gctgctggaagaaccccattggactgggagaccagnnnnnnaatagctctgggcactgcacgcggaatggcttatcttcactccgtgggtagcggcgggaagttcattcacgggaacatcaagtcaagcaacatccttctctcacaggaactcggcgcctgcgtcaccgagttcggccttgcccagctcatgtccacgccccacgtccacccgaacctagaggacgagatgctcacaggcaaagcccctctcaggtcccccgggcgcgacgactccatcgaacacctcccgacgagcggcctcggatggaggaggtggtcggcaggatcgaggagatccggagctcctactcggacacgaagacgtccccggaggacaatccgagggagggcgctttctaataaatcaccgagtaccacacgtaccggaacggcagtgacttg

SEQ ID NO: 129257 - DNA, 1221 bp, Zea mays
  unsure (1)..(1221): unsure at all n locations
  Clone ID: MRT4577_49356C.1
gctgaagtccttggggagggagagttatgggactacgtacaaagctgttctggaggatggaacaacagtggtggtcaagagattgaaggaagtggtggcgggaaagagggaatttgaacagcanatgnanctaagtgtcagggttggccatcatcagaacactgccccattgcgtgcttactactactccatgatgagaagctcttggtgtatgactatgtcccactaggtagcctttgtgctgctttgcatggtaacaaagctgctggaagaaccccattggactgggagaccagggtgaagatagctctgggcactgcacgcggaatggcttatcttcactccgtgggtagcggcgggaagttcattcacgggaacatcaagtcaagcaacatccttctctcacaggaactcggcgcctgcgtcaccgagttcggccttgcccagctcatgtccacgccccacgtccacccgcggctcgtcgggtaccggtcgcccgaggtcctcgagaccaggaaaccgacgcagaaatctgacgtctacagcttcggcgtcctcctcctcgagatgctcacaggcaaagcccctctcaggtcccccgggcgcgacgactccatcgaacacctcccgaggtgggtgcagtccgtggtccgggaggagtggacgtcggaggtcttcgacgtcgacctgctgaggcacccgaacctagaggacgagatggtccagatgctccacgtcgcgatggcatgcgtcgcggtcgtccccgacgagcggcctcggatggaggaggtggtcggcaggatcgaggagatccggagctcctactcggacacgaagacgtccccggaggacaatccgagggagggcgctttctaataaatcaccgagtaccacacgtaccggaacggcagtgacttgccgtctacagaaagtaggtcggttggtttgacagctctgtgtccagtgaagctttgcagtcagtcagttgattattcctgatcattctttggtaaaattgttttctgttcttgccttcttggttccatcttccatgaggtagccccggaacgctgctggtggtttcgtttcattagcgctgctgattagtgtagggtgttgtttgtggatcgtgccgcgactcggtttcgtttgaggcagcccgactctttcaagtttgatttattgaatgcgcataagtttttggtagtggccgtaattatt

SEQ ID NO: 129258 - DNA, 337 bp, Zea mays
  Clone ID: MRT4577_49357C.1
tcggccgggggagccgccagtctgagaacgcgagcgagtgaacaccaagcgtatcgtcctgactcgtgacccctaccgttcctctactgttgcggccttggtatcctccgcgacgctcgtccaccgccgccgatcccacccagttctaccggaccagcgctaaactgtacatgccgacgacaagggcttggctgaacacggtccgagagcgctcccaacttacctttgtatgccatggcgtagagcagtatcttcgacgacgcgactgcactgatgaaaaagctggaagctgagagagacctgcctcctgctaggcgccatctcgcattccaacgtg

SEQ ID NO: 129259 - DNA, 539 bp, Zea mays
  Clone ID: MRT4577_49358C.1
ttaaaaaaaaaacaaaaaaaaaaggaaaaaaaaaaaaaaaaaaaaaaaaaaaaaaaaaaaaaaaaaaaaaaaaaaaaaaaaaaaaccttcccggggggcccttttgaggggggattttttggatttttccccccctctgggggcctttggggcgtggttttttggggcccttttcccccttttgggggggggttttacttttttttgggggggtttttcccccttttggggggggaaacccctggttttccccctttttttttttttggggcgtttccctttttccccggttggccaaatttaaaaggggcgcgccccaattcccttttcccaagtttggggcactctgagggggagggggccgcccttttttccggcattttacccgcgggggggggggggtttccccccctggacccctctatttttgcgggcgctttggcgccggccccttgcgttttctcccttttttttttgcccgctttcgggggttttccccgtttttttttaatgggggggctccttttggggcccttttt

SEQ ID NO: 129260 - DNA, 279 bp, Zea mays
  unsure (1)..(279): unsure at all n locations
  Clone ID: MRT4577_49359C.1
agacggcgnnccagaccacccaagacanccncgncccgacggccccagcaaccgcaancccccagcaccgccaggcgcgagaggaggtttttttttttgncngcngaagcngacncacccggagaacaacaggggggggggggangcgcacccncaaggccaagcccccgggcgcancccggnggacccagncccnggcggcaaccccgacaacagcgcgcccnggcngnncgacggcgcccagaagaacccaaggggaaggcccccgggggggacgac

SEQ ID NO: 129261 - DNA, 542 bp, Zea mays
  Clone ID: MRT4577_4935C.1
gccacccacacctgccactacaccgatcaccgagatcatcctgctggccttcttgctcacatacctgctcacaaaagctgaaagagtcggggaaagagtaactgatggacaaactgatgatcatgctgttgctcattacctaccttactgccaagcatgcagcatatactgcaacgtatacaccaacctatataccaacctccgtagtgacgcacgcatagccacaatcataaatgatatgaagaacaatatcaatagcaatggatatcccattgaccatcccatgtacactttcatattcacacagaccactatccagcacaatgtcatgcatgataacatcaacccacagaccaacccacataaacccttacataaaggctgcctgctccctactggtcttcctactgggcttaatactgcaaagaatacatcaaactcagaatctgcctcatttggcgctggaacaggcctactaacagttgctacagcagcaaatgctgcagcaacttctgcaggtactggcatagacatcgacatta

SEQ ID NO: 129262 - DNA, 2552 bp, Zea mays
  Clone ID: MRT4577_49360C.1
atcagatcataggaagtgattatgtacagccatctaagcagacagccagaagcatttctcaatctggaattgctggagctggagtgtgtacagagcttcttaatggcagatcatcatctaataatggaagcactgctcaggctccacagatgggtactaactatttttatcagtttttatctggataaccattcttctaataatagggcacagaatcaacttaactttcctgagggaaagatggcttataacccttccgtgaacaatgaatttgggaagggttacccaagagctggctatgcaaagccaaagcagagtttctcaggaccttctgtgatggtttccagttcaccatcgcaaataaggagtcaagggcatcctggtctacctcgtgcaaaatatcattctaatcatttcaattcagatgccaggcaagatgatgtacaaactcggaacccatcaggtcccaatgtgtttagtggttctggcaacaaaattcagggttctacaggaagggtaaaagctcatagtggaggaccccaatctaacttaagatcattgaagttattgcgatcagttgagcagtactaccacacactgcagcaaatgaaatggggtccaatgaccgagcatgttctagacaatcttcattgcaagatagatgcattccaggcaaatcaagtactcaagctgcttcatgaccacactgtcgctcttggcttctttcaatggttaaagaggcaacctggattcaagcacgatggtcatacttacacaaccatgataggcatccttggacaagccaggcaatttggtgttttgaaggaacttctggatgagatgagccgagctcactgcaaaccaactgtggtgacctacaacagaataatacatgcatatggccgtgcaaattatcttaaggaggctgtcaaagtatttgaggaaatgcaggaagctggttatgagcctgatcgggttacatattgtacattgattgatatccatgctaaagctggatacctagacattgcaatggatttatatggcaggatgcaagaagtaggcttgtcaccagatacgttcacctacagtgtcatggttaattgccttggtaaaggtggtcaattagcggctgcttataagcttttctgtgagatgattgaaaatggatgcacacctagccttgttacttacaatattatgattgcgctccaagccaaagcaagaaattatgagaatgttgttaagctgtacaaagacatgcaggttgctgggtttcgtcctgacaaaataacttacagcatcgttatggaagttcttggtcattgcggccatctggatgaggctgaggcggtttttattgagatgaggcgtgattgggctcctgatgagccagtatatggacttttggtcgatctctggggcaaagctggcaatgttgacaaagcgctaggatggtaccaagcgatgcttcaggatggtttgcagcctaacgtgccgacctgcaattcgctcttgagtgctttcctgaagatgaacagatttcaagatgcctacatcgtgctccagaacatgcttgctcaggggcttgttccatctgtgcagacttataccctgctacacagctgctgcaccgtgggccagtcacagatgggtttgtgctgccagctcatggccatcactggacatccagctcacatgttcctgctgtacttgcctgatgcagaagctggtggccagaacgtcagggatcacaccggttatttcttggacatgatgcacagtgaggacagagagagtaaaaggggtctaatggatgctgtcatagacttcttgcacaagtccggtctcaaggaggaagcaggccttatatgggaggttgctgcacagaagaacgtctacccagattctgtaagggagaagagctcgtcgtattggctcatcaaccttcacctgatgtctgagggcacagcagtgactgcactctccaggacgcttgcctggttccataggcaggttctgacattgggcactggccctgaaagaattgacattgtcactggctggggcaggaggagcagggtaactggatcttcgctggttaggcaatcgattcaaaagcttctaaacctctttgaatccccattcttcaccacccgtggaaatactggctgctttgtcggctgcggggagccactcaacaagtggttgcacaatccttatgttgagcgcatgcatttattgtaagcttgcacagttttgtggaagaatcagcttggaatgaaatataagctgtgcaccatatatagttcgctctgatttagtcaggccaggtgtagtttggtagccggatagtctatgcttggaaactatttattgtgattgtgataacatttagagatggaatttttcgtttagcttgagataaattttctctcaagataaattttctctcaattagccagtgacagtcagctgctgagtgctgacaggtaatgttgttgaaaaaaacttgattattgttaatcagacagaagaatcatagctggatg

SEQ ID NO: 129263 - DNA, 271 bp, Zea mays
  unsure (1)..(271): unsure at all n locations
  Clone ID: MRT4577_49361C.1
cccacgcgtccgagcagctagcgtacangcgatggccaccgaactccggtcgccgctcctcccgccgccaccgccacagcgccgactaagcccgcgggcagccgcgtgggcggcgctcgccgtctcggcgacggtcctgctcctccccttcctgatcggcagcaccaccaggaccaccagcagcagcatcacgagacaccctcggccccgatcctccccaccatccaaccccgtggagctgaccctcctgaccggcgcccgcgacaagggc

SEQ ID NO: 129264 - DNA, 400 bp, Zea mays
  Clone ID: MRT4577_49362C.1
gaaaaatatctgatctaatccattatcattactcttctggcaatagttgtacacatgtataatacgactggatgtttatcccctgaatactagggtatttttttgcccgtttatatttcacaatcgtcttttaccacacgtccctcagatatctgccctccatttggagattctttacaaagctctcggccttagaactgtcgggggagccctgctcctgaacaatggtgtggagaactctatgtacatctctggccatgcctttggcatcaccacaaacatagatgtaagcaccttgggagatcatgtcccagatttcagatgctttctgtgccattttgtgctgcacatatttctttgtagggccctgacgctagaaggctataaccagctcaaacag

SEQ ID NO: 129265 - DNA, 1091 bp, Zea mays
  unsure (1)..(1091): unsure at all n locations
  Clone ID: MRT4577_49363C.1
aattagcttaattgatatatgcctaaattactattattagaagtggaattcaattccagggatccaaacggggcgtnagattattaaggttacactagggagctttgaagtgaagaagctttgaagtctctatatatgcaatcctcaatatacataagattattatataaggttacactagggagaacagaaggatgaccatatgtatgacacctgtggtgtgcattcagtcatttttgtccgtgtgaatctcctgcaggatgaccacaagcgccgagatgaacacgtagtcgacgttcgggaacacggtgaggctgaagtagtcctttcccagcaacatgctcgtggcgctgtgctcgcggtgcattttagcgatcaaggcgttggagttgttgccgccgaggtagaaagagcaggacctctccttgaagctgcccttcatgatgaagtcgcaggcctcgtgcgaggtgttggaggccaggtagatgagcatctcggtcttgaacggctggatgatggaggatttcttggcggtgaagagcaggtcgctcgatctcgtgctgtcccctctgtacgcttcccacgtgttgtgcatgctgattaccttctcgcgcaggcagaggagggggttgccggcggcgtcgaggaggcggcggcggttgtggatgctgatcaaggcacccttgaccgtgaccacgacggcgccgttggtgtcggtgatggtgaagtcgccctcccggaggctcaccttcttctccttcaccgccagctgcaccacgtagggcgcgcagaaatgcggggccaccaccgccaccggggatacgatgcctccgctgggctccggcggcgggggcgccggcatggacggaggtgctgccatctattaccaagtaccaagggtcgtcttcttgctgatacacaacgctcctatgctatgctacacgcaatgacgcaatgacgcacagtattactgccagccaccgcgcaaagtgagctgatccacaccacaaacgtaggctactctattttaaacagagaaccacaaaagtttactctgagcctcagaaaagatctaccgatcgagaaggatt

SEQ ID NO: 129266 - DNA, 476 bp, Zea mays
  Clone ID: MRT4577_49364C.1
gggtggctgaagatcccctccctggggccccacatacaataggacccaagggcccaaactggggcagggcacatcccatccccagatctagacccgagcatgccccagcccacagggcaaaggaaatccctactttctaagccctcgggggggaccaggcgcccctcttgggggacctgggctccttggtgccggcgctggcccccttttccgccaccttcttgggccggaacaccgagtggttttcggggaggaccccccccggccccagggacccccctcccaccaaattccccagctccccctgggtgcggatcccccggagcccctggcgcggaacaaaccccctctttttggtggctttcgccgagttccccgccaactccaaaacctcgcgggggaggccctccaggacagggggcaggcaaaccggggcgccacggcccaccccctggaactacccgcccttttttagg

SEQ ID NO: 129267 - DNA, 304 bp, Zea mays
  Clone ID: MRT4577_49365C.1
ggggcgggaattggcctcttaccagggccgaggcgcgggtgtaaatgtgttaccagagtccgtgacaggagacctttagctcttaggggtaaaagaaggggagatatgacaatatgctgtcagccatgagtaatacagactttaaatgcaatcaatacggtaaaagtcatagaatggaaacaatgtaatagaaaggaaaaatttataaaatgcaggcattaattattagagagcaggagctagaaatattaactatcaaaggagagttgagcatagggaatatcgcaaaataaaaaaagggaca

SEQ ID NO: 129268 - DNA, 404 bp, Zea mays
  unsure (1)..(404): unsure at all n locations
  Clone ID: MRT4577_49366C.1
ccacgcatccgctatatatanataatctaaatcgataagaactgtcttttctatatactttcccccgtctgtttctaccacaggtcttatgcaatcaatctgatcatatacatatcccttcaacacaacataactcatccaaagtatctcagacgactcaccaaatcacgaaacccaattataaaatgcattcctatatgaacagtgcctaaccgcatagataatctcacattaacccgtcaattttggatccaattcagcatttttcttcccaagtttctgcaagaaattgcaataatatcgattcatacatatgaaaaaattctctatttatacaaacgctttacctacacgataatcatacacgaatactgaaaaatcaaaatgaaataaataaaaaataa

SEQ ID NO: 129269 - DNA, 522 bp, Zea mays
  Clone ID: MRT4577_49367C.1
tgaaaaaaaaaaaaaaaaaaaaaaaaaaaaaaaaaaaaaaaaaaaaaaaaaaaaaaaagggcggacgatacataaaggaaccaagcataacaaacgcataacatgcaaacgggctgggctcttttttaggtgccaccttccatgcttcctcctcgggccgcgggcttacaccttctttttctgggaaaagcccctggaattaccctccctttgtccctcttgcagcccatcccgggtttggcctagatcccttccttaactcaaaaggcctctcaccgatgcgccctttcccccctgttggcccaccgctgaatggacggatggggaccccgcccttgtatcgccctctattaacccctggcggcatgcgggaggttacgacgcggccctgcacccgctacactttgccagtcgccctgagcggggggtgttttttctcatttcttaccctttactttttccgcctatgcccgcccgcctttcccctgtcacgtctctaatatcgggggcctccctttaagg

SEQ ID NO: 129270 - DNA, 568 bp, Zea mays
  Clone ID: MRT4577_49368C.1
tttttttttttttttttacccttgaattctgaaatggacatgttcatgtcacaccataatttctaatgtgaaactgaccgtcacgaaacaaagaaattcagtacttatacttacataatactactctgttctcgaatatttgaatatttgtcaccagttagtttattttaaaactaaaacgcgataaataaaaaagattatagggagtacaaattttctagtgacattacactttggtttccatatgctcgttagtgttcaaactattagcttgcggctgtaggaacatttgcttggagcacgaactcgaccaaacgctcgaggtcccgccgccttctgctgccgccacggcattctccttccgcactgttgctttcgccttcatgccttggcctttctcaccgtccatggcttcttttatgagccgtgccaccttgtcaatctccagtacaatgtcctagttggtgatcaaccgtagtggcacagaacaatggcatgagtggctgatcaaccgtagtggcacacaaaggtgtggagcgtgggctctggaaggacccaagccgacata

SEQ ID NO: 129271 - DNA, 471 bp, Zea mays
  Clone ID: MRT4577_49369C.1
attatgcataatttattttttttttaaattttgaacatttctttttgttttaaaaggcataaccagaatgctctcaacagactgattcctgatcaaggaccataaaaacacacacacacccacactcacgctcacacacactcacacatcttgacaaaatggcgcgaaatgggacactaaaatttaaatgggctaaaaaacactgagcggatcctggaacatgttgggcctgagctcgaaggaccttatggagagtataagaacgagcttctttttccttaggttgacaacatttgcgaacactaacaggcctaagaggaaggcgtttatttagccggtatagcctgtaaagacccgctatgggtaaagaatatgaaccgtgcccacgggcctatgccatttcactatgctggtacttgaatcagaggctgtagaaaaagctttttcgaatacaatgatctccttcaacag

SEQ ID NO: 129272 - DNA, 391 bp, Zea mays
  Clone ID: MRT4577_4936C.1
attatataaattttgaaataaagttatatatataactgccatggcaatgattttttttagaacccccctccaatgatttgaaagggcatccatatcaaaattacatatatccattcatttgtactccttcactacactactatcgtatttgttcttatgaatttgcatttgatggtcataccacgaggaaaaaactaggccttcatcatcttaacgtgcggagccgtaatacagcagcatcaacaaccccaccaccttgccagaacggaaggcgttgaccagcatgttgtactcattgcacagtgatctcaccggcgagaccacacttatatataactgctttcccaaggtaataccgctcccaaatgttgaaatgcacgctacacatgcc

SEQ ID NO: 129273 - DNA, 154 bp, Zea mays
  Clone ID: MRT4577_49370C.1
gtaagctcggaattcggctcgagcaatattggtaaccctatgttgtgacactcagccttactacgttaattggggggaacttttaaacagaggcggggggtcaactcacacaacatggacgcagagcaggatgttgtatacaacaacgaggtac

SEQ ID NO: 129274 - DNA, 591 bp, Zea mays
  Clone ID: MRT4577_49371C.1
atggcgccatcccctccgtctctgacccacctacccatccccaccatttgccgcccaatccgccccgccgcgctccgcattgcctcgactcgaattcttacgaaccgtttggggcttgaatttgaataccaggtcgaatcactcaggcgaccagccgggagcgagacttttcctacccggtttttagaaaaacgtgaggacacgcgcatcggactcctacagcagcaattcatggcattctctgggcacgagttattattgagattaggggcgatgtttgggatgctcgagggttggggcgaagaggtgccacggtgcctggctcgtgaggtgccctgggaccggggcaagaggtccctagggcctaggggccgccatgcgagatgcctcgagggccgatgcaagaggtgcaccagaaccgatgtttgtcaacaaattgacatcttctatctcaaaagtgaaaaaaacaacgacaacaagttcatagaacataatagatgtaaacatggtagcatcaagaatgatatgaaaaatggacatatttatttgttgctacaagatcattctagtgcaaaccatgtactatactag

SEQ ID NO: 129275 - DNA, 671 bp, Zea mays
  unsure (1)..(671): unsure at all n locations
  Clone ID: MRT4577_49372C.1
ggtaccctngaaggcctggccaccgccgtcctcatccttctaccacctcttcagggaacaagaagggcggcagtaagagccgccgcatccctccgttgcgccaccgagccgccacccccgcctccacccactcgccgaactaagaaaccaccaccgcctgcgtctcgtcttgcgcctcaagcaccaccagtcaggtacacggacgccgcgcgcccccgtgcactgcgcccacacatgagctcgacattggactacacatactacccgctcccgccgacgtcgccacccctaccttcacctccgacgtctccgttggtgccagagggcgaggatgactcactttcaatcacagcgtcaccggcgcctgcgtactgtgcgagccccgacgtgaacacaagagcggacaggttcatcacgagcttccgggaggggctgaagctgcagaagctcaactcgtaccggtagaagtggcacaggcagatccaagagaacgccgccgccgtcgatatcgaggaggaggggcgagttcatggtgatcgggtcgctctttggcgacgacgacgacgacgccggcggcatctcgttgccgcagacgccggcgaccgctgttgccatcggcttctaacgtataactaacatcgaagcaaaaaaaaggagttggattttttttt

SEQ ID NO: 129276 - DNA, 1975 bp, Zea mays
  unsure (1)..(1975): unsure at all n locations
  Clone ID: MRT4577_49373C.1
gtagggcctgagctgtttctgcaggtcaatatccagcacgatggccttggtcatggagttggccaggttcatgttgataatgtcccagcgtaggaacacaatgtcgtctgggttcaccatgggaaggaggctcttgaacggggcatagatctcctccccgttatagctgccgactctgatggtggaggcgtgggtgagggagccgtagtagttgtcttgctgcaccttgtcattggtcgctccatgagatcgcctaggtagtaggcaaggagtgcacgtgtgacgcgcggaccgcttgtgggtagtacgancgatcaaggaagcagagcagaacggggacgtagaaatcgaaaaaaacaggacacctacacctacacattacagccagtactgctgtcacctcacttagcaaagctaatacgtatgtcatagcagcttgccaccatggcgagcatcaccgtgacaaggaaatcccaatccttcgtcgtgccatcgtccacgccaactccgacgaccgagacgctcgagttgtcggccatcgaccgcgttccaggcctgcgccacacggtgcgatccctgcacgtgttccgccgcaaggacgccgccgcctccgccgcccactacgatgctgctgccgccggcaggccggccgaggtgatccgcgcggcgctgtcccgcgcgctggtggactaccgcccgttcgccggccgtttcgtcggctcactgtacgccggggaggcgagcgttgagtgcaccgacgacggtgcgtggttcgtggacgctgtcacagattgcagcctcgaggacgtgaacggcctcgactacccgcttatggtctccgaggaagagctgctgccggctccagaggaaggtgttgacccaaccagtattccgattatgatgcaggtcacggaatttgcttgtggaggatttgtggtggggctagtcgcagtgcacacccttgctgacgggctcggtgcagctcaattcatcaatgcaatttctgagtttgcccgtggagtagttaaacctacaatagcacctatatgggcacgggagttaataccaaacccacctaaaatgcctcctgggccaccaccatccttcgagtgcttcgggttcaaacattttgttatggatgtggcagttaacaatattgcacatgtcaagagtgaatactttcaaaccaatggacactattgctctacatttgatgttgccattgccaaggtttggcaagctaggacaagggcaatcaagtacgaaccaaatttcaaggtgcatgtttgcttctttgccaacactcgccacctcctcacacatgtgctacccaaggttggtggcttctatggaaattgcttctatccagtgactgtcacagcaactgctgaggtagttgctagttcaagattgcttgatgtgattaggatgataagggatgggaaggctaggcttcctttagagttttccagatggtccacgggcaatgtgaaagtagacccatatcaactaacattcaagcacaatgttctatttgtgtccgattggacacggcttggattctttgaagttgactatgggtggggtgtaccaaaccatatcctccctttcacttatgcagactacatggctgtagcagttcttggagctccaccgtctatgaagaaggggactcgaataatgacacaatgtgtcgaggaggagcatctcgtggacttcaaggccgagatgaaagccttcttttaggtcctcggattttacttgaaagttcaaacattatgcatttatgtgttcaattcaaataaaaatggtgttgacttgtacccttattagccatataaaacataacatttatattttcatagattttccacgaaatatatatgtagaaaccagtgacccaaaaaaaacatgtacaatagttatgttttagttttttatcgtgtttatggtatgaaagtacatgtagtctatt

SEQ ID NO: 129277 - DNA, 132 bp, Zea mays
  Clone ID: MRT4577_49374C.1
tattgattttgacaaccaggagtccccaacctgtcattatggccagaacgaatagaacaggcttggaagggcacatggtcggcagtatggtcaaacaggtggccctgcgcccgcagctatgatcagtcacca

SEQ ID NO: 129278 - DNA, 364 bp, Zea mays
  Clone ID: MRT4577_49375C.1
atcgcgtagccttattgacaagtggctactcagcgcacgttacttgaaatggagcatcgtatttgtcaatcgcgcaagccataatataacgaactttaactaagctattgacttgcatacgggtaatggctgccattatgaaaggctcatgatgtgccccccggtcgtttcccgcgcctggcaggccgactccgcctcttcctccgatgctgccaacgccaaccccgtcgttgccaaggtcgtcctttccctggacctgtttgtccaagaacaacgcccggaagagcctacgctacagttcaagatggaattggctcaaactaacaccgggaatacacctgagagctactctttggatatgggg

SEQ ID NO: 129279 - DNA, 231 bp, Zea mays
  Clone ID: MRT4577_49376C.1
ccaaagccatggctctactcacccttgcattaaataaagtcctatccttcccttggggaggctctaaccgaccgttggcagcttcagcatatacaagattgatgactactgttacatctactatacctctactactactacttcacgctgtaacatgccatctcacattagatcatacactagcaccaccaaaatcaccacaccacctactttatcaactactactaggca

SEQ ID NO: 129280 - DNA, 860 bp, Zea mays
  unsure (1)..(860): unsure at all n locations
  Clone ID: MRT4577_49377C.1
ctccccaattctccattgcccacctccccctcgcccatccgtccctcttccttcctcgccaaaccaaaccaaaccagaccaaaaacttcccctccccaactctctctccgcccctgcgtgaaccgcggagcaaggaaggaggagggccgtcgggctactaatctcggggggttccccctctgatccgggcggtttcggccgttagctgctgggggaggagccgcgcgggttcgtggcgccggcgtcggtgggcgggcggtggccaagggtcgtcggtccttccttggttctctcgtcatcggaaaaataaatcggtcgatctgcctccggtgagggatttctcagattgcgccgcgcggttgggcttctccggtggggcaaaggcaggattttgagccactttgcccctaaaattaaatctgatttaatgggcgaccaatccaaaatgtgcctgtagcatcatcggttgtgccgtttctggtgtcgggctttcgcagagggtttcctccatccatcatagaaggaaggaacggaacccttggcttgacttctccatggcttctactaattcctagtgtagagcttctaactccggtccattgtaaatattggctgtagttgaggaagctttcggcctcctgtaaccccactcgccaagatgtcgtcagctggtgtcattgcgcttgctccgatgaccgacgacctcgccttcttgcccatcangtttgatggtagtcgttcagcacactgtttctccgggtcacagctgcagggattcattctcatcttcctcgctgtgnctggtgcgccttcaatgccgatgagtgtgctgggcactgattccatcgcctcggtcagct

SEQ ID NO: 129281 - DNA, 567 bp, Zea mays
  unsure (1)..(567): unsure at all n locations
  Clone ID: MRT4577_49378C.1
gtgagccatgccgtgaggcgagactttttatctggctttaattttgttacttctcccaccgcagagagaatcaaatctttatctttactaatacagtgagcgaataaattttctctccgacgagnaaataaatattttaaaaataggatgtagggattcaaatgctacccgctagttttaattagtgctcggcttctaccattagaactcatgtctatttatgttatatgaatgtaaaggtaaatactaataattttaaaatacaaaaaaatataaccatattttaataaatatcttatttaaactagatctatctacatgatatgatatataaagaccttagcaatttacaagcaactaactagtgagcccgtaatgcatgagactatgaaggttctttgagatcgctttttggctccatagacttcatgatagagcagcttataaaagctagagtttaaatttacaaagcacccattaaacgctagctctccttgctttatctttttttttactaagcagagttggagcttagtctgaacaacatatcgtaacaaatcagaactc

SEQ ID NO: 129282 - DNA, 385 bp, Zea mays
  Clone ID: MRT4577_49379C.1
gaaatgaatagagtttcttatgatttaaaagaggaaataaagagtattggtatagaggaaaattagggccgtttgggattcggcagctcacaaggttaaaacgtttctgggagggggggcgttcaggtaccagggcatggaagcgtaaggtacacccccaatagggcggaggggagaacacactggcccttctggcagtcgaacgacagatgttcacatcggcttttgaagcgggcacttcctggactcacatgaagtgtaccttgttgcttgccccctgtgttggtcaatttctaatgatgctgggggggcggctcgtgagttgtacctcctgggcgttcccagtttttttgctggagtttactctgggaacatgattctgcag

SEQ ID NO: 129283 - DNA, 227 bp, Zea mays
  Clone ID: MRT4577_4937C.1
caaaaaaagaaaaagaatatcatgagcctttttaaaaattttgggtaccaagagagagcccagacagccgataaaccttgcccaaaaaaaaaaacaaagggacccaaggcaccacccctgaaccccctaagaaaaccccctcctaatacaccctctttgttcccccccaaggggcgccccaccggggagcgccaacccaacaggtgggaggcccgcacaacaacaga

SEQ ID NO: 129284 - DNA, 499 bp, Zea mays
  Clone ID: MRT4577_49380C.1
agcagtggtaacaacgcagagtacttttttttttttttttttttttttttttttattttttttttttttttttttttttttttttttttttttttttttttttttttttttttttggctccaaaaccctcgggggataaaaaaaaaaaccaataaagtttatgcttaaaggggcgaaagaacccaagggttttttgcacaagggcccccccccccgggtctaccctaaaaacaacccttctattggttcttttcccccctttattgcaggggaggccccttgctctgggggggagcccccacaatttagggggcccggattacaaaagaaatcattccgggggggggggggccaaaccggaagcaaaggccccggttatatgcaggatttatgccccccaaacagacagaaaacccaacaaactacacccttttacagaccggggccaagggaacctaacttggtaacaccataggaaggaacctcctaaacgagcaag

SEQ ID NO: 129285 - DNA, 160 bp, Zea mays
  Clone ID: MRT4577_49381C.1
acatccaccaagcaatctacaacatactcaccccatcaccacacgatcccatctacaaccatataactattccatctcacaacctactcaaactcccctccaatctgacaccaacacaattcctaccatcaatttacaccttcttccacccattctacca

SEQ ID NO: 129286 - DNA, 251 bp, Zea mays
  Clone ID: MRT4577_49382C.1
tagaaatcgcgctgcaggacgctagcggccgtacactaccaacaacgacccctacaccaaccaaacccagcgagcgaactggaccccgcgagctattggcagcaccctatactagcaccactgagccagctagctacagcaggcccagcgaacccagggacacagcaacagcggccgcgcgagctaccagcaacaggcagcgaacctcgcagaccctctcacaactgcaacaatgggcgaccatagaccaa

SEQ ID NO: 129287 - DNA, 411 bp, Zea mays
  Clone ID: MRT4577_49383C.1
ttcatgcgtccggaatttactcgccctcttaacccttcttgtaccggaaaagtagaatgcaagaacatcatcgatccaactacaccacttaaggttgtctgggccatgggtgcaagctggtcgggagatgatctgacagacagtaacatgcattcagtcacaagcagtcggcctatacgtgttttgttgttgagaggttcagctgaggcagaacaggatttgcgtcctgtcctggctgttcatgggtttatgatgtttgttgcctggggaatcttgcttcctggtggaataatggctgcccggtatttgaagagcttaaaaggagatggggtggttccaaatacatgtctatctgcagtatttaggaattgctataatgtttcttggcgtccttttcgctgcggctgagct

SEQ ID NO: 129288 - DNA, 202 bp, Zea mays
  Clone ID: MRT4577_49384C.1
cgtgtgtgttgttgacatgtgagattgttctctctgcctcagagagagagagagagagagagagagagaggaaggagagatgtcggtcgtctggttctagggaagagatgaggactgtggccagttttctgaagagaaaacaaggcctctctcatggttgctgtgccttgtgcctgtaaaataattttgttttgtttcatcc

SEQ ID NO: 129289 - DNA, 1329 bp, Zea mays
  Clone ID: MRT4577_49385C.1
agtacaattttgccagcatttatgtgggaagacaactactgtgtctatttctggtcagcacctgtactatcctgtacctgtccgaacgaattctgtgaaattttctcgcggtcaaaccacgtgatctagtggaccaagatttccacgtcaccaagctccggtccaaccgagcagccacatgtatatagtaagtaggtcgtgatagtgatcgtgcagtgaggccgctcggcgcgtcttacagtacgtagcagcagcccggcaccaccagcgtggccggcgccgtcgccgtcccggcggagcgcatgtggaaggtggccttcgccgagaccaagtcggcgctcctgcccaaggcctgcgccggctacgtggacgccgttggggacctcggcgccggcggggagtgagcacaaacataacagtcttacagtacgtagcagcagcctagcacgacgatggtgtccggcagcatcagcgaggagatcgccgtggccgtcccggcggagcgcatgtggaaggtggccttcgccgagaccaagtcggcgctcctgcccaaggcctgcgccggctacgtggacgccgtcgaggtcgacggcgacggcgggcccggcagcgttaccaccatgaagcttaacccatcgctgggtgagaacaagacgctcaagagccgcgtggtggcgttggacgccgcggcgcgcgtggtgaggacggaggtgctgcagggcggcacggtgagcgcgcagctcaggacgcacttcgccgagatcagggtggaggccgccggcgagggcgcctgcgtcgccaaggtcaaggtcgactacgagcgcctcgacggcgcgccgctcgcgcccgaggacgaggccaggctcgcgcaggggtacgtccgcctcgtcaggatggtggaggcatacctcgtcgcgcaccccgacgagttcgcctgagccgccacctttcctacgtacgtgtatgatcatgccatatggccgtcagtgtgttttggtttggaataacgggaggaaaggctcctctgtttggttgcttcaattcgcttcgaatcgagtatagaccgacgtttgtgagttggtgtatccgtgctgctaccaagtgtgtctacatctatggtctatttatctacatgttcttttgtttgtttgcttcgcttgtgcattgtgaggtcgcgtatagacgtattggttgtgttgcaaaaaatttgttaaatattgagatcgataataatgtatgtattatttatttttcaaaaaaaaaaaaaaaaaaaaaaaaaaaaaaaaaaaaaaaaaaaaagaaaagaaaaaaaaaaaaaaaaaagcggcc

SEQ ID NO: 129290 - DNA, 289 bp, Zea mays
  unsure (1)..(289): unsure at all n locations
  Clone ID: MRT4577_49386C.1
gnngnggangcgctgatcccngggntccccgacgacgcggcgcngaactgcctgctgcggctggccgtngagtcccacngcgcgtgcaggctggtttgccggnnctggcgccatctcctggcagnnaangcccggttcttcgcncangcgggntctggggccgcgcnctncgtggntgttcacgctggcgttccancgttgnacggncnagatccagtggaaggtgcttgaccgtgggcagcncantgnnacgccatcccggncatgncttcngcgacgcncnttncgt

SEQ ID NO: 129291 - DNA, 539 bp, Zea mays
  Clone ID: MRT4577_49387C.1
taggtagacactcatagtaaggtccggcgcggctgaaaagttatagaaaaataaatgactaattataaatggtggaaacaatcagagaaagaaataggaacgggactggttgcccatatagtagagctacccttgctcgaggcttaattgacacactaggggcccactaggggacagcctcctcggctgaaccgtgactgtttatcaccttacttagttgacatagcttacgaggactaagcgtacagcgcctagagtggggttcctagtgataaacctaactaacactaattgcggttcgctcactgcctgacttcctgaccagagcaaacctagagagacagatgactaacggatccaccacccccgtcctgaggcgggctcaatcgtgggcgttcagcctcttgcttgctacctaagtctgtactacagttttgcacagcttcgacgagcgccttctgtacactacgtgccgcaaatacggcaacgcattgaataagcggataatgtgggcaaagatcatgtaaggcacccgttca

SEQ ID NO: 129292 - DNA, 153 bp, Zea mays
  Clone ID: MRT4577_49388C.1
tggttaacccggtggctgatgcccaaatgacggtgggtatccgggatgggaggcaggaagccgccaacttcaaacaggttaagaagggggccaaaggagctcccagaccctggatagggccatataggagtgcgctacaacctcggcttccaa

SEQ ID NO: 129293 - DNA, 450 bp, Zea mays
  Clone ID: MRT4577_49389C.1
agattgtgtaaggtggggcttttggatcttggtacctccgaacagaaacaattacccactgatgagagtactgcacggacccatgagggcagaacataggagaccatgtggaccggccaaatgtgggtctttgcggggggggggggggccaagcgaggggttttcgaaaagaagtgggggggcgggggggaattaatcacggcggaattacggccgaaaaaaacgggagcgtttacttaaacccatggagggcgaaggtaaaccattacttttgggaccaggtgacagaacgccgtgccgtgagccctgaggacccaggcgggcgacgaccctgcttgagccctggcgaagagacccggccggacccggggcctacgttggggctgccgggggaacacgtgcctcctaagcgatgcggtgaatggcctctgcctatatctctatggattg

SEQ ID NO: 129294 - DNA, 413 bp, Zea mays
  Clone ID: MRT4577_4938C.1
ggggggaacttttgcctttatttcgggtctaacaaagcacgaaacgcaaggtaaaacaaggacccaagggggggggggggacaagacactttacatgggggggggacaccacaaacaggggcaaaaacacccagcgggcggggcagggggaaccggattgaaaaagggtcttttttaaaccccccaccacaaaagtaaccccaccatgttttttgaaaagggggggggaaaaaaaaacaacgttggggtcccccaaccccaaattaaaaaaaaaaacggcggccccctggaacaaaggccccccacaccaggcccccttggtcagcttgagaaacctggggccaaaaacccggaacacgaaaaaaaaggggggatcagggggccgctaaaagtgccctgaggaaaaatgcaaa

SEQ ID NO: 129295 - DNA, 398 bp, Zea mays
  Clone ID: MRT4577_49390C.1
acaaaaaaaaaaataacctctctgaagcggacgcggttcaaaagcagaacaccattcattacaccatcctttttttacaacgaccttagcgggtgcggaacactggccaacggagacaggcccactcgtgggaaagcacgactcgtccccaaattgacggctgccccggtggacgaactgttgattgatacaactgcgctgcacatactggctccctgaaaaggaaccactgagccacaatatgtactctacggttgctgctttcccgcggaaatacccatacaacaatggcattaaccaagccaatggaaacactatccaagttacttctgttgccccaaagcacatgaggaaatggttaccatcttcaggatctcaacggcgatgacttctcaaca

SEQ ID NO: 129296 - DNA, 687 bp, Zea mays
  Clone ID: MRT4577_49391C.1
cccccaattgaggtgcttcagcattgaaggaagttgctggcagtcatcatggtggttcaagaccaacaacaccacaaagaataaactggacaaaatgaaaccttgcttcaaatggtcactatgatcatccccatcggtgccattaagtagtacacgtgaaggcagactgacaagcgtgtgcaacttagtgcccaatgatttgccatgaccattctcatgaggaactaaagaatgttttgtatcgaaagcttatcctactgaattcagttgtgtcttaaaactaactactaagagaagaatatctgctcatattgtcatgaatagatcttgcgacaggtttagatttatgctctgagatgctctaaccatcgctgctgggagatgcaaattgccttctctgcaaaagcaccttaagttatctcacgacttattttagatttccttcatgtttcttccccttctttataagtttattcctagtgaccatgctgatacaggttgacagatatattgaaaccttccatgtacctcctttcttccccttctttgcagtttgttaaacctcaccattccttgagtaccaaacacaagagtggacctatagtcaggtcgaaaatcatggccctatttagaaacacaatggacctcatcaatggcaaaaagtgcaatccctagcttttttgcaag

SEQ ID NO: 129297 - DNA, 373 bp, Zea mays
  Clone ID: MRT4577_49392C.1
caccagaaaaaaccccttgatttatggggtaaaacccgccggccctcacaacatagcaaacgggcccataaaaacataatcttctggggcgggcgttgcccttctggaaaacaatcccaacgggctttacccagtcaaaagcgacagtaccttaggggagcaggacccctaccaaataacgggggggcctccaccgaggggcgcaaaaaccaacctacaactatatccggggggaaagccgagggaacaacaaaaccaccatcttactgggacaaaccccttggaaacaacaacggatcagcccaccaaatcctacggggggggggaactgcaacaccatacacaaaaagggttttgaaaaaggagggggggg

SEQ ID NO: 129298 - DNA, 296 bp, Zea mays
  Clone ID: MRT4577_49393C.1
gacccacgcgtgcactcataccccactacactaaccacactaccagtttccgttacacgaacctaccgaaacactgttgagatgactgcattgcactagccgcggcccatacaaaacatcctccccctcatcccctcctccatccccaactcttcaccaccatcaaccgtcctacaaatctatctacttatcttattgaataaaccacgaaataaatacccttgaatatattcatgcccttcttttcaaaatattctacttctacccttcaaacatcttcatcatattcatctttt

SEQ ID NO: 129299 - DNA, 309 bp, Zea mays
  Clone ID: MRT4577_49394C.1
gcgtgcagatcgactgcgtctacctcatccattcctctgctgatgccggtgctagctgccctgagggtggatggttcggtgcaccatcggcggttaccttccacgtcgggcagggcttcaagcccggccacttggtcctcacccccaacgttgtcaccatctctaacatggagatcaaggatcaccggggggacgactgcccctttacactcaaagcgggagcgactgtgacttggacgctcgacatccagaccccggtcatgtacctgatctgcaaccgcttatgtgccaagttcggttgctaccgca

SEQ ID NO: 129300 - DNA, 274 bp, Zea mays
  Clone ID: MRT4577_49395C.1
ctggcaaaaaaaaattccagatgacttttgcacaggccgtatgtccttatttgtaccccagttgctgggccaaaaccatcagggttttagatttcttcctgctccaggaaaggggcaataattttaacctttaccagccaaaaattggatgggcgggcatgaacccaaaacgcctatcccaaatactttttggttggctaaaagatttttaccacaaaaggctcgggaactctttgattaacgtttgccggcacatatgattaccccaaaacaa

SEQ ID NO: 129301 - DNA, 141 bp, Zea mays
  Clone ID: MRT4577_49396C.1
atgggtctagcgtaaccgcacatgccccatggggggctttggttggaacctggggtagtccaaccccgagctgctgggcccgggcagtcgcccttatgtccctgtctagttgcgctggtgcactcattctcgttctctttt

SEQ ID NO: 129302 - DNA, 402 bp, Zea mays
  Clone ID: MRT4577_49397C.1
ggaaaaaaaaccccaaggggaaattgcattttttttttaagagggaggggagcacacacatcaacttaaaagcttggtttttaacgggccccaaaaataaaacatttttggtcagatgacacccacattcattccccccccccttttttttgatggtgggttttggtaaaaccctttggaaagttgattttttctgaaaaacttccaaccatgcccgggcccctgtttccaaatcccctaaaaaaaggggggtttttttgaacccctggggaaaaaaataaaaatttaaaaaaaaaaaaccgtacaaaaaaaaaggacccgcttttttttgggggcgggaaataaaagaaaaatgtcccgtaaaaaagggaattttttccaattccttccttcctttttttt

SEQ ID NO: 129303 - DNA, 307 bp, Zea mays
  Clone ID: MRT4577_49398C.1
tttcggtcgcgggagcaaacatttcgcacgcgcatgtttgtgccaatatgggccaaaacgcagaacctccttttcgaaaacacaagctccaggaattcacattatatgaggacccgatggacattcctggaccacaggcgtaccttatgcactgtttacctgcacagcgagcacttgctatgactgacagccccattgaggctccaaactcaatcgtgttcccccaatctgataacacaatgcactctcacaactccatcatgcttcatgtgctctgcgcttaactctcctattgcacactcaagac

SEQ ID NO: 129304 - DNA, 121 bp, Zea mays
  Clone ID: MRT4577_49399C.1
tcacaatgaaagccatccacatcaactaaatgccctctctcaactcatgacatggaacacatctctaacaccaaaaccatatagtgcaacaaaccaagggatcgggtgctttccagaaaaa

SEQ ID NO: 129305 - DNA, 120 bp, Zea mays
  Clone ID: MRT4577_4939C.1
agtacacttgcctgcgtgcatggtgccacgttttcactgttgggtgtggagaaaattatgattgcatgatagcattgtaaggcatggtgttgagcctttagccagtcatgttaagaggca

SEQ ID NO: 129306 - DNA, 501 bp, Zea mays
  unsure (1)..(501): unsure at all n locations
  Clone ID: MRT4577_493C.1
nttttattgtaattgatgacatatggagtacccaagcatggnaaaacaattaaatttgctttggttgagaatacttgcggcagtagagtaatagtgacaacaagaattggtactattgccaaatcttgttcatccccattccatcatctcgtatatgagttgaggatgctaggtgaagatgactccaaaaggctattctttagaagaatttttggctctgaggacaagtgccctcaccatttaaaagaggtttcagttgaaataattaagaagtgtggtggtttaccattggcaatcattactatggctagtttgttgactactaaatcatataccaaagctgactggttgaagggttctaattcaattggatctgggctagagaaaaatgtgatgtggaggaaatgaacatgatattatctctgagttacaatcaccttcctcatcatttaaagacttggttattgtatctaaagatgtttcctgaagaatatgtgatca

SEQ ID NO: 129307 - DNA, 423 bp, Zea mays
  Clone ID: MRT4577_49400C.1
cggacgcgtaaggtcatccacactaacgaacgaactcttgctccgatcacgagctagctgagggcgaccatcgcggctgtgctgaacagcatgaagactccgcaagtggtgtccgtgctgctaatggctgcgctgctggcttcgtccgcgtcggcggcgatcacctgcgggcaggtggggtcgtcgctggcgccgtgcattccttacgcgacggggagggccagcgcgctcccctcgtcgtgctgcaacggcgtcaagagcctcaacagctcggcgcggaccatctcggaccgtcaagcggcgtgccgatgcctcaagagcctcggcaacagcgttaagagcgtcaacatgggcaccgtcgccaccatccccggcaagtgcggcgtctacgtcgtattccccatcagcatgttcaccgactgc

SEQ ID NO: 129308 - DNA, 876 bp, Zea mays
  Clone ID: MRT4577_49401C.1
cggacgcgtgggttcaacgacatcatccttccacctatcatggccaacaaatacgcatgtccgcctcctcctctattccaaggatattaagctctatggagagatggtcgaccaagaatgaattgaacaacaatatataaggtcgcatgcgcaaccaaacagctacatgtacattgcaggcgtgtgtgaaattgcacactaacgaacgaactcttgctccgatcacgagctagctgaggtcgacgatggcggctgtgctgaacagcaggaagacgccgcaggtggtggccgtgctggtggtggcggcgctgttggcttcgtccgcgtcggcggcgatcacctgcgggcaggtggggtcgtcgctggctccgtgcatcccatacgcgacggggagggccagcgcgctccccacgtcgtgctgcagcggcgtcaagagcctcaacagcgcggcgcggaccagcgcggaccgccaggcggcgtgccgctgcctcaagagcctcgccaacagcgtcaagagcgtcaacatgggcaccgtcgccaccatccccggcaagtgcggcgtctccgtcggattccccatcagcatgtccaccgactgcaacaagatcagctaaattacgacgaccaagctaataagcctaccgaacgtacacgtacgtacgcgtcccgcgcgctgcacgagtgatgaagccagggaagaaataaaataaagctagctgtattgccaggagcagcatgcagtatcgatctatatatatactgtactgtagtactctattatatatgtatgtgtggcctgcagtgcgagttgcttcgatccacctacttgttcagacagtttaatggttttggtaaaaaaaaaaaggggcggccctc

SEQ ID NO: 129309 - DNA, 680 bp, Zea mays
  Clone ID: MRT4577_49402C.1
attgggtacctcgaggccggccgggagcagcatttccacagtcgtccacactaacgaacgaactcttgctccgatcacgagctagctgaggtcgacgatggcggcggcgccgaacctcaggaagacgccgcaggcggcggtcgccgtggggcaggcgggggcgccgctggcgccgtgcatcccgtacgcgacggggagggccagcgcgctccccgcgtcgtgctgcagcggcgtcaagagcctcaacagcgcggcgcggaccagcgcggaccgccaggcggcgtgccgctgcctcaagagcctcgccaacagcgtcaagagcgtcaacatgggcaccgtcgccaccatccccggcaagtgcggcgtctccgtcggattccccatcagcatgtccaccgactgcaacaagatcagctaagttacgacgaccaagctaataagcctaccgaacgtacacgtacgtcccgcgcgctgcacgagtgatgaagccagggaagaaataaaataaagccgctgtattgccaggagcagcatgcagtatcgatctatatatatactgtactgtagtactctatattatgtatgtgtggcctgcagtgcgagttgcttcgatccacctacttgttcagacagtttaatggtttttggtgcctgttaaaaaaaaaaaaaaaaaagcggcc

SEQ ID NO: 129310 - DNA, 524 bp, Zea mays
  Clone ID: MRT4577_49403C.1
ggccaaaccagaaatcacatttttaaacatatccaaaaccacctgataaaaaaacatttacggggggaaaaacccccaaaagggcccttgccccccctttatataccagttttccaaaataaacatcaaaacttggccggggggttccctttaaaccccattgattgttctaaaattgcccttttaaaaatgcgttttgaatagggccctgaggcccttggtttttaaacccccccacccctccccgattgggggaaaaaggggcccccccccccaaaaaaacttccttttattcccaaaaacctaggccccccccacaaaaaaaaaagggggacgggggggcaaaaagtgggggggagcttttctttgacgggttaccagggccttgcccttaaaaccaaaaagggggtcatgcccctgccttttttgaaaaccaacttggagcctgtaagggccccccccatggggcatccctttccccattgaaaaaccttgaagaaaggcaaggggaaatctgaatcccc

SEQ ID NO: 129311 - DNA, 759 bp, Zea mays
  Clone ID: MRT4577_49404C.1
atcgaaaaaaggagcagcacagtcatccactttcacgaacgaactcttgctccgatcacgagctagctgaggtcgacgatggcggctgtgctgaacagcaggaagacgccgcaggtggtggccgtgctggtggtggtggcgctgctggcgccgtgcatcccgtacgcgacggggagggccagcgcgctccccgcgtcgtgctgcagcggcgtcaagagcctcaacagcgcggcgcggaccagcgcggaccgccaggcggcgtgccgctgcctcaagagcctcgccaacagcgtcaagagcgtcaacatgggcaccgtcgccaccatccccggcaagtgcggcgtctccgtcggattccccatcagcatgtccaccgactgcaacaagatcagctaagttacgacgaccaagctaataagcctaccgaacgtacacgtacgtcccgcgcgctgcacgagtgatgaagccaggggagaaataaaataaagccgctgtattgccgggagcagcatgcattatttatcgatctatatatatatatatatatatactgtactgtagtactctattatatatgtatgtgtggcctgcagtgcgagttgcttcgatccacctacttgttcacacagtttaatggttttggtgcctgttatgaatcatccaatatatatatatatatatatatatcctcctgatattaataaacggaggtggcaaagtattgatgaaaagaaaaaaaaaaaaaaaaaaaggccccta

SEQ ID NO: 129312 - DNA, 784 bp, Zea mays
  Clone ID: MRT4577_49405C.1
tattgcgaattataagccgtttcagaggtaacctcgaggccggccgggagcagcagcagcacagtcatccacactaacgaacgaactcttgctccgatcacgagctagctgaggtcgacgatggcggctgtgctgaacagcaggaagacgccgcaggtggtggccgtgctggtggtggtggcgctgctggcttcgtccgcgtcggcggcgatcacctgcgggcaggtggggtcgtcgctggcgccgtgcatcccttacgcgacggggagggccagcgcgctcccctcgtcgtgctgcagcggcgtcaagagcctcaacagcgcggcgcggaccagcgcggaccgccaggcggcgtgccgctgcctcaagagcctcgccaacagcgtcaagagcgtcaacatgggcaccgtcgccaccatccccggcaagtgcggcgtctccgtcggattccccatcagcatgtccaccgactgcaacaagatcagctaagttacgacgaccaagctaataagcctaccgaacgtacacgtacgtcccgcgcgctgcacgagtgatgaagccagggaagaaataaaataaagctagctgtattgccaggagcagcatgcagtatcgatctatatatatactgtactgtagtactctattatatatgtatgtgtggcctgcagtgcgagttgcttcgatccacctacttgttcagacagtttaacggtttaaaaaaaaaaaataaaaacaaaaaaaaaaaaaaaaaaaaaaacaaaaaaaaaaaaaaaccccaccc

SEQ ID NO: 129313 - DNA, 3978 bp, Zea mays
  Clone ID: MRT4577_49406C.1
atggacctccggccttcccctgctcgagatgggcgcctcatggcggcgctgcaactcatggccaattatctgttccccccgggccggccgggagcagcagcagcagcacagtcatccacactaacgaacgaactcttgctccgatcacgagctagctgaggtcgacgatggcggctgtgctgaacagcaggaagacgccgcaggcggtggtggccgtgctggtggcggcggcgctgctggcttcgtccgcttcggcggcgatcacctgcgggcaggtggggtcgtcgctggcgccgtgcatcccgtacgcgacggggagggccagcgcgctccccgcgtcgtgctgcagcggcgtcaagagcctcaacagcgcggcgcggaccagcgcggaccgccaggcggcgtgccgctgcctcaagagcctcgccaacagcgtcaagagcgtcaacatgggcaccgtcgccaccatccccggcaagtgcggcgtctccgtcggattccccatcagcatgtccaccgactgcaacaagatcagctaagttacgacgaccaagctaataagcctaccgaacgtacacgtacgtcccgcgcgctgcacgagtgatgaagccagggaagaaataaaataaagccgctgtattgccaggagcagcatgcagtatcgatctatatatatactgtactgtagtactctatattatgtatgtgtggcctgcagtgcgagttgcttcgatccacctacttgttcagacagtttaaaaaaaaaaaaaaaaaagtatgaatccccagaccatctactcaccacttcaaacggtccctatgagcacacttccctccccctgtctagtctccagctccaccagcgcgggggcagtgctgccaccaaccccaatgaacgacaccaacggccacaagcaccacagtaacctctccgaccaccaccaccagtgagcccacctccgccaccaccaccagccccggtaagctcacctcctcctgcggtaacctctgccccaccaaagaaagaagaagattcaacggcaccaccggcagaagccctacctccaccttcattcaacgacatcatccttccacctatcatggccaacaaatacgcatctccgcctcctcctctattccaaggatattaagctctatggagagatggtcgaccaagaatgaattgaacaacaatatataaggtcgcatgcgcaaccaaacagctacatgtacattgcaggcgtgtgtgaaattgtttatttattttttgcatgtgcacgcgtgagtatttgcttctccgtacatactctatgtatgaacgtgtgcatgtgtgaactaactacatgagacgacaaggtgcaagagacatgtctggggcgtcatttgtatggctttaattttttttattatatatagataaggaaatattttccttaaaaatgaagtacaagggactgtcgagcactgcagtttcatcatccagctgcctccaccccacctccgtcactggtgaagttgtctcctccgcaggcaccagtgggatcaccaccgccacctgtgaagactacttctccaccggcccctattgcttcaccatctccaccaccaccagcgccagtggtctcaccaccaccgcccgtgaaatcacctcccccacccgcgccagtgggatcacctccaccacctgaaaaatcacctcctccgccagcaccggtggcctcaccaccaccgcctgtgaaatcacctcccccaccaacgctagtggcatcacctccacctcccgtgaaatcacctcctccaccggcaccagtggcatcaccaccgcctcctgtgaaatcacctcccccaccaacgccagtggcatcacctcctccgccagcaccagtggcatcttcacctccaccgatgaaatctccaccacccccgactcctgtgagctcacctcctcctccagagaagtcaccaccgccaccgcctcctgcgaaatcaaccccacctccagaggaatacccaacaccacccacttcggtgaagtcatcgccgcctccagaaaagtctctacctccacccacactgattccatctccgccaccacaagagaagcctactcctccatcaactccgtctaaaccaccttcatctccggagaagccttctccaccgaaagaaccagttagctcaccacctcaaacaccaaagtcttcacctccaccagctcctgtaagttcaccacctccaacaccagttagctcaccaccggcactagctccagtaagctcaccaccgtcggtgaagtcttctccaccaccagcgccactaagctcaccaccgcctgcacctcaagtgaagtcttctccacctccagtacaagtgagttcaccaccgccggcgcctaagtcatcacctccacttgctccagtgagttcaccacctcaagtagagaagacttctccaccaccagcaccactcagctcaccaccattggcgcccaagtcatcacctccacatgttgttgtgagctcaccacctccagtggtgaagtcctctccaccacctgcaccggttagctcgccaccattgacgcctaagccggcaagcccacctgcgcatgtgagctcaccacctgaagtggtgaagccatccacaccaccgacaccaacaacagtcatctcacctccatcagagcccaagtcatcaccgccacctactcctgtgagcttgccacctccaatagttaagtcctctccaccaccggcaatggttagctcaccaccgatgacgcctaagtcgtcacctccaccggttgttgtgagctcaccaccaccaactgtgaagtcttctccaccaccggcaccagtcagctcaccaccagcgacacctaagtcgtcacctccacctgctcctgtgaacttgccacctccagaagtaaagtcttctccaccaccgacaccagttagctcgccaccgccagcgcctaagtcatcacctccacctgctcccatgagctcgccaccacctccagaggtgaagtctcctccaccaccagctccagttagctcgcctccacctccagtcaagtcgccacctccacccgcccctgtgagctcacctcctccccctgtgaagtctccaccaccaccagcaccggtcagctcgccaccacctccagtgaagtcaccgccacctccagcaccggatcagctcaccaccacctccagtgaagtcaccgccacctccagcaccagtgagctcaccaccacctccagtgaagtctcctccgccaccagcaccagttagctccccaccacccccaataaaatctcctcctccaccggcaccagttagctctcctccaccagcaccagtgaagccaccatcactaccaccaccggccccagtaagctcacctcctccggttgtcacccctgccccgccgaagaaagaagagcagtcattaccaccaccagcagaatcccaacctccaccatcattcaatgacatcatccttccacctatcatggccaacaagtacgcatctccgcctccccctcagttccaagggtattaagcgccacagagacatggttgatgaagcatgaagggaacagtctataaggtcacacgcgcagacaaactgctacatgtaaaacactgtaaacgtgtgtgaaattgttttttcttttgcacgtgcacgtgtgagtatattcttattcatacatatgtacggacgtgtgtatgtgtgaactaactacactacatgaggcggcaagttgtaagagagtgtgatttgtgtgccttatgtatcacttttttacatatagaaaaggaaacgacaatttccttaaaaatggggtacaagatgatggaacgaagttaagggattattatgaaaagcttaaaaacttgttattaatataccatgcttatgtgacctgtgatgcaaatttcatgcaaaaaatttgcggcaaaggggcggcc

SEQ ID NO: 129314 - DNA, 933 bp, Zea mays
  Clone ID: MRT4577_49407C.1
gttcaacgacatcatccttccacctatcatggccaacaaatacgcatctccgcctcctcctctattccaaggatattaagctctatggagagatggtcgaccaagaatgaattgaacaacaatatataaggtcgcatgcgcaaccaaacagctacatgtacaagcagcagcagcacagtcatccacactaacgaacgaactcttgctccgatcacgagctagctgaggtcgacgatggcggctgtgctgaacagcaggaagacgccgcaggcggtggtggccgtgctggtggcggcggcgctgctggcttcgtccgcttcggcggcgatcacctgcgggcaggtggggtcgtcgctggcgccgtgcatcccgtacgcgacggggagggccagcgcgctccccgcgtcgtgctgcagcggcgtcaagagcctcaacagcgcggcgcggaccagcgcggacccgccaggcggcgtgccgctgcctcaagagcctcgccaacagcgtcaagagcgtcaacatgggcaccgtcgccaccatccccggcaagtgcggcgtctccgtcggattccccatcagcatgtccaccgactgcaacaagatcagctaagttacgacgaccaagctaataagcctaccgaacgtacacgtacgccccgcgcgctgcacgagtgatgaagccagggaagaaataaaataaagctagctgtattgccaggagcagcatgcattatttatcgatctatatatatatatactgtactgtagtactctattatatatgtatgtgtggcctgcagtgcgagttgcttcgatccacctacttgttcacacagtttaatggttttggtgcctgttatgaatcatccaatatatatatatatatatatatatcctcctgatattaactacaaaaaaaaaaaaaaaaggccccta

SEQ ID NO: 129315 - DNA, 133 bp, Zea mays
  Clone ID: MRT4577_49408C.1
tcggtggaggtttagaggattaggcttatttacctgatacttcaagaactccatggtggaacctatagggaacatgaacgggacggagctctactggctttacatgaccgcgaaacattcacagatacaaggg

SEQ ID NO: 129316 - DNA, 6197 bp, Zea mays
  unsure (1)..(6197): unsure at all n locations
  Clone ID: MRT4577_49409C.1
gggtacccctccgaggtcccggcccggctcgaggccggccgggagcagcagcagcacagtcatccacaaacgaactgaggtcgacgacgactgatcgagcagcgacgatggcggctgtgctgaacagcaggaagacggcgcaggtggttgccgtgctggtggcggcggcgctgctggcgtcgtccgcttcggcggcgatcacctgcgggcaggtggggtcgtcgctggctccgtgcatcccgtacgcgacggggagggccagcgcgctccccgcgtcgtgctgcagcggcgtcaagagcctcaacagcgcggcgcggaccagcgcggaccgccaggcggcgtgccgctgcctcaagagcctcgccaacagcgtcaagagcgtcaacatgggcaccgtcgccaccatccccggcaagtgcggcgtctccgtcggattccccatcagcatgtccaccgactgcaacaagatcagctaagttatacgacgaccaagctaataagcctaccgaacgtacacgtacgtcccgcgcgctgcacgagtgatgaagccagggaagaaataaaataaagctagctgtattgccaggagcagcatgcagtatcgatctatatatatactgtactgtagtactctattatatatgtatgtgtggcctgcagtgcgagttgcttcgatccacctacttgttcagacagtttaatggttttggtgcctgttatgaatcaaaaaaaaaaaaaaaaaaggcccctacaaagtcgtcacctccacctgctcctgtaagcttgccacctcctgaagtaaagtcttccccaccaccagcaccgattagctctccaccacctccggccaagtcaccacctccaccggcccctatgagctcacttcctccccctgtgaagtctccacctccaccagcgccggtcagttcgccaccacctccaatgaagtccccaccgccgccagcaccaattagctctccgccaccagcaccagtgaagccaccatcgctaccaccaccagccccggtaagctcacctcctcctgcggtcacctctgccccaccaaagaaagaagaagattcaacggcaccaccggcagaagccctacctccaccttcattcaacgacatcatccttccacctatcatggccaacaaatacgcatctccgcctcctcctctattccaaggatattaagctctatggagagatggtcgaccaagaatgaattgaacaacaatatataaggtcgcatgcgcaaccaaacagctacatgtacattgcaggcgtgtgtgaaattgtttatttattttttgcatgtgcacgcgtgagtatttgcttctccgtacatactctatgtatgaacgtgtgcatgtgtgaactaacatggaccctcctctccggctgctgcccgatgggcgcctcatggcagcgctgttgctcctggcagcctgcatgtccgcctgcagcgtgcaggcggtgacgagcgcggaggcctcctacatcgcgcgccgccagctgctggccatgtgaaattaaaatatatgatgaatatttcttgcgccggcggacttcgagttcgacgaccgcgtcggcgccgccaacnnnnnnnnnnnnnnnnnnnnnnnnncgtacatcgcgctgcaggcctggcgccgcgccttctactccgaccccaagggctacaccgccaactgggtcggcgaggacgtgtgcaagtacaacggcgtcatctgcacggaggcgctggacgaccccaaggtcacggtcgtggccgggatcgacctcaacggcgccgacatcgcggggtacctgccgcccgagctcggcctgctcaccgacctcgccttcttccacatcaacaccaaccgcttctgcggcatcatccccaagagcatgtcgcggctgtcgctgctgcacgagttcgacgtgagcaacaaccgcttcgtcggcgtcttcccctacgtctgcctcgagatggtgtcgctcaagtacctcgacctccgcttcaacgactttgagggcgagctgccgccagcgctcttcgacaaggacctggacgccatcttcgtcaacaccaaccgattcgtgggctatatcccggagaacctcggcaactccacggcgtccgtcatcgttttcgccaacaacgccttcgtcggatgcatccccaagagcatcggccgcatggtgaagacgctggacgaaatcatcttcctcaacaacaaactcgacgggtgcctgccgctggagatgggcctgctggtcaacaccaccgtcatcgacgtcagcgggaacatgctcgtgggcaccatccccgagcagctnnnnnnnnnnnnnnnnnnnnnnnnnnnnnnnnnnnnnnnnnnnnnnnnnnnnnnnnnnnnnnnnnnnnnnnnnnnnnnnnnnnnnnnnnnnnnnnnnnnnnnnnnnnnnnnnnncttgttcaactcggaggccgtcgtgtgcatgccgtccgacaacgcgctcgtcaacttcgacgacagggacaacnnnnnnnnnnnnnnnnnnnnnnnnnngaagaccgcgctgcagtnnnnnnnnnnnnnnnnnnnnnnnnnnnaggtcgactgcagcaagcacgtgtgcgctggctaccccacacccggagggcggccggcgtcgtcggtgccagggaagccgccttcggtgccagggaagcctgctgcacctgcgcccatgccaaccccgcatacaccgccggatgtgtcgccagaaccgcttccagaaccttcgccggtgcctgcacctgcacccatgccgatgccgacccctcgttcaccgccggcggacgaatacattccaacgccacctgtacccgcgaagtcaccgccagcgacctcgccaccggcatcacgtggtgctccaccgcctcaggcacaacctccagctgcctcctccccgcctgcaacacctgtgaaatcgtctcctccgccagcagcagttgttttaccaccacctgcgaagactccttctcctccggcccctgttgcttcaccaccaccagaagcaccagtgagctctccacagcctcaagtaaaatcacctcctcctccagcaccggtggcctcaccaccaccacccatgaagtcgcctcccccaccagcgccagtggcatcacctccgccgctgatgaaatcacctccaccaccagcaccagtggcctctccaccccaaccgttgaaatctccaccaccgccagtactgtggctctccactccatcggtgaaatctccaccaccgccggtaccagtggcctctccacctccaccggtgaaatctccaccaccgctggctccagtgagctcaccttctcctccggtgaagttgccaccactaccagctcctgggaaatcaaccccacctccagnnnnnnnnnnnnnnnnnnnnnnnnnnnnnntaaagtcatcgccgcctccagagaagtctctacctccacccactctgactacctctccaccaccacaagagaagcctactcctccannnnnnnnnnnnnnnnnnnnnnnnnnnnnnnnnnttgagacactacctcctccatcaaagtcttctccaccggaagaaccagttagctcaccacctcaagcaccaaagtcgtcatctccaccagctcctgtaagctcaccacctccactgaagtcttctccgcctccagtaccagagagctcaccaccaccgacacctaagtcatcacctccactggctccagtgagctcaccacctcaagtggagaagacttctccaccaccagcaccagtcagctcaccaccaccgacacctaagtcatcacctccactagctccagtgagctcaccacctcaagtagagaagacttctccaccaccagcaccagtcannnnnnnnnnnnnnnnnnnnnnntcatcacctccactagctccagtgagctcaccacctcaagtagagaagacttctccaccaccagcaccagtcagctcaccaccattggagcctaagccatcatctccacctagttctgtgagctctccacctacgacggtgaagtcttctccaccaccagcaccacttagctcgccaccaatgacgcctaagtcatcaagcccacctgcacacgtgagctcgcctcctgaagcagagaagtcatccccgccactggcaccgatcagctcaccgccatcagagcccaagtcaccgtcgtcacctccaatggtagagaaaacttctccaccaccggcaacggttagctcaccaccacctacgcctaagtcgtcacctccacctgctcctgtgagctcaccacctccagtggtgaagtcttctccaccaccggcaccagtcagctcaccaccaccgacacctaagccattacctccacctgctcctgtgagctcaccacctccggtggtgaagtcttctccaccgccgacaccagtcagctcaccaccaccgacacctaagccattgcctccaccgccgacaccagtcagctcaccaccaccgacacntaagccattgcctccacctgctcctgtgagctcaccacctccagtggtgaaatcttctccaccaccggcaccagtcagcttaccaccaccgacgcgtaagccatctccaccacgtactcgtgtgagctcaccacgtccagtagtaaagtgttgtccaccaccaacactagtcagctcaccaccaccagcacctaagtcattacctccacctactcccgtgagctcgccgcctccagaagtgaannnnnnnnnnnnnnnnnnnnnnnttagctcaccaccaccagcgccgaagtcgtcacctccacctactccagtgagctcgccacctccagaactgaagtcctctccaccaccagccccagttagctcaccaccatcagcgccaaagtcgtcacctccacctgctcctgtaagcttgccacctcctgaagtaaagtcttccccaccaccagcaccgattagctctccaccacctccggccaagtcaccacctccaccggcccctatgagctcacttcctnnnnntgtgaagtctccacctccaccagcgccggtcagttcgccaccacctccaatgaagnnnnnnnnnnnnnnnnnnnnnnnnagctctccgccaccagcaccagtgaagccaccatcgctaccaccaccagccccggtaagctcacctcctcctgcggtcacctctgccccaccaaagaaagaagaagattcaacggcaccaccggcagaagccctacctccaccttcattcaacgacatcatccttccacctatcatggccaacaaatacgcatctccgcctcctcctctattccaaggatattaagctctatggagagatggtcgaccaagaatgaattgaacaacaatatataaggtcgcatgcgcaaccaaacagctacatgtacattgcaggcgtgtgtgaaattgnnnnnnncttttgcacgnntgcacgcgtgagtatttgcttctccgtacatactctatgtatgaacgtgtgcatgtgtgaactaactacatgtgacgacaatgtgcaagaggccggcgctgctggcttcgtccgcgtcggcggcgatcacctgcgggcaggtggggtcgtcgctggcgccgtgcatcccgtacgcgacggggagggccagcgcgctccccgcgtcgtgctgcagcggcgtcaagagcctcaacagcgcggcgcggaccagcgcggaccgccaggcggcgtgccgctgcctcaagagcctcgccaacagcgtcaagagcgtcaacatgggcaccgtcgccaccatccccggcaagtgcggcgtctccgtcggattccccatcagcatgtccaccgactgcaacaagatcagctaagttacgacgaccaagctaataagcctaccgaacgtacacgtacgccccgcgcgctgcacgagtgatgaagccagggaagaaataaaataaagctagctgtattgccaggagcagcatgcattatttatcgatctatatatatatatactgtactgtagtactctattatatatgtatgtgtggcctgcagtgcgagttgcttcgatccacctacttgaacacacagtattagggcaaaaaaaaaaaaaannaannnnncctctgcccagctaagctaagctccctccgttcatcgggatggggactaccactactaccatcctcctcctcctcctc

SEQ ID NO: 129317 - DNA, 585 bp, Zea mays
  unsure (1)..(585): unsure at all n locations
  Clone ID: MRT4577_4940C.1
gccggccgggttggaagacattaacgcacttctgactgacactgtgacgcgccatgatcaccgaacgccccatgcacagataggacaatgatggcgaagaagctggatgacactagcatctctcgctcgggcaccgcccgtgctcgccctggctctgtcgtcgtcgatgctggcgaccgcatcaccatgcagccacaacgccgagaacgctccccagagcatatgacacgaacctgaccgacccaagtatcttggcccggtctccgaacagactccgtcaaacctgaccggcgagctccccgatgactatgggcgncagaccgcgggcctctcaggcgacccggaaaccttggcgcgccaccggctagctagaggtgatccactcccgagcggtgatgctggccgcgcggcactgcatgttcccgcacatcctggataacaacgccgtcatggtcgaccacgcggtgtggatcatggtcgtcgagtacatcttctcggaggatgtattgaagtacgtggggaaccccaagctggagctagcgaagagcatgctgaacatctgttcgagccaatatgatgctcatg

SEQ ID NO: 129318 - DNA, 466 bp, Zea mays
  Clone ID: MRT4577_49410C.1
gaaaaaaaaaggggggttctagggggggctttgaccggttttttcccgggggaaagaaacccggttcggccgggcccggggccggggaaacaaaaaaaattttgggttggttccccccccccaaggggtcccggccccttggttggtttaaaccccggggcccaaaaaaaaaccccaattggggggcccccttggggggacagggggcccccgaaaaagggggcccccgccttccaaaaaagggccccaaaacccgggggttttggggcccccctggggggcaacccccccctggggggcaacctttgggtccaaccttgaaaagggcaggggctttgttccaacaaaaagggcggccccttgaaccctggaacccttgccggggaaagcaaaaaaggggggccccactttcccccggggggaaccccccggagggcaaaaaaagggtggcccccaaaaacccggg

SEQ ID NO: 129319 - DNA, 470 bp, Zea mays
  Clone ID: MRT4577_49411C.1
cccaatcccaacaacaaaaacgggcaagggagtcatgtgtttcttcctgcccccaatccctatgacacaaacccaatactcatccaagatcttcagtggaattaagccgggggttccaaaacaacagggtccatttgccggaccatgaacattgcgcccccaaagcctgggggccaccccgggaataaacactggaggggcacccctcccgatctacaaacaaagattactctaaaaaaacacttgggggccattcaggaattaaaccacacacgtggggctaccctgcaatacctgaccggtccctcttgatggacccagttttcctgttgcgcgtctcatttgacccaccagggatgaaggtcatcggaggcatccgcggaaaaccttcccacatggaaagtttccggaacattggagcccgaaacataataggtccaggcaaaacatgcccaaggagagaaataacc

SEQ ID NO: 129320 - DNA, 812 bp, Zea mays
  unsure (1)..(812): unsure at all n locations
  Clone ID: MRT4577_49412C.1
cattgggtacctcgagatgggccgggagccatggtctctctccgctccgacgcgcccgacccaccaccacatccctcatggctgccctcgccgacatcgactcctcggcacttccgccgtccgagtcatccaaaggcaagggcaagatggacgaggaggaggaggacgaggcggagggcgcggagaagatgtgcggcatctgctatctcgacggccggcgggccatccgcggcgagctcgactgctgcgcccatttcttttgctttgtctgcatcatggcttggggccgcgtcgagtcccgctgtcccttctgcagggcccgcttccacaccatccgccgcccgcccgtcgccggccggttccccgacgagcgaatcgtctcgatccaagagcgcaaccaggtacaccatcctcagggcaacgggagcagcatagtgggcggagatccttacgtgaacaccatatgcaccgtttgcagcagctccagcgatgacgagctgctgctactctgcgagctctgcgactcagctgcacacacttactgtgtcgggctggggaccaccgtgccagagggggactggttctgcaaagactgcgggacgatcagagatgatcaattgagatggcaggctgagaatcagggtgaatttgagatcagcatggatgttcctggagctgagccagttccagccccctcgatttctggtgttgtggatgaggaccatgatctggaaaggcatatgcgcgnagtggtggcgnttcgacggatgacccggttcctccatttatgaaattgtgggtgatgatttgct

SEQ ID NO: 129321 - DNA, 321 bp, Zea mays
  Clone ID: MRT4577_49413C.1
ttcagacgtggcgagactattacccgatcttccattcgaaggttaggcgagcccggcctttggccatgggcaggcgtgcagctgacggagatcccctcctgcctgtatcggctcgtggacgggcgagggcaaacttcgcggagcgctgagaatcaggggataaggactggactactacgggggtcacacatggccgcccctagatgctgacactcacgccttgagaggccgggggggagcggtctatagtgttcgagtacaccggagtttataccccaactttaccaccatctgtctgccagagcctcatgatcctgctgc

SEQ ID NO: 129322 - DNA, 347 bp, Zea mays
  Clone ID: MRT4577_49414C.1
ctttatattatgttttttctccatcctacattttcccccaaaaaacatttcctgcggaggctttttaaacttatggcaccccaaaaacaaccaccattttccctcaatgctctcaagcaccaatatctaccctcctctcccccaaacctatcaccatctgtatcttctctatgtgaaaacccaattcttcaaccctacacgatccaacaggcaatctcaactttcatcttacctctatcaccctagaaccttcaacaatcatcaatccctattacaacagatacctttgttgcattcatagacacaaaaaattaatgcacaacatccacaacaacattgttctattc

SEQ ID NO: 129323 - DNA, 1162 bp, Zea mays
  Clone ID: MRT4577_49415C.1
aaaacgaaccatccaaactgcgaatataattccctgcaatttatttctcattttttacatcatcatgcacacggttcattttccatacatccaaacattcctcgccattttttcgtcgtcaggaaactctaataaacaccacaaaacctcgggacagttcatcttcaccaccatgatttaggaattaaacaccttagagtattgtgcacctgtttatgccaacagacgagaagatcctcctcgcagaaggccacaagcggccaagaagcccaggcctctcttcctcgaatgcgtactctgattctctggtcggactatccactgcatttgcacctctatcagcacttgttgcctcaccagagccccttgcatcacccgcatcctttccaccctctgattctacaccaacttcagatatctctcccggcttcttgtcaaagagccctttgaactgcttcctcgccttcttttcagcttcctgttccttctgcttaagtttaaggagggcagctgtagcgtccggttctgatgacttgtcaacggtaatcatcttctcaaaatcattcctcgcatcatcaaattccccgagtaacatgtaggacattcctcggcggtaaagagctttcacatgcacgggatttgcgtccagcaccttattgcatgtttcaatggattttctgtattcgcccatcttctggtagcaaaaggctacatttagatgtagggaacttcttgaattagcaaagatttttccctcttcatcatcatgaggatgcacgtggttatattccctaagcaccttatcatatttcgcctttgcaagttcgaattttccttctttaaacagtctgttatcctgagaaaggcctccagctcagaactagatgttaatcaacccaaaataacaaaccagtcaatgcacaaggagaagtatttgacagaagatacacaatcaacatgtgccatgtaactaagtactggttgaaacacaggacagaaaccaccaacaaattcagaatcagctgacagactatgcttcattgcttcaatgctttcacatattcactactgacatcttaaacaaaattgaccatcttcagaaacatggttgatttctatcaagcactcaaaaggcagttaacagtttgctcaaatgaaaaca

SEQ ID NO: 129324 - DNA, 625 bp, Zea mays
  unsure (1)..(625): unsure at all n locations
  Clone ID: MRT4577_49416C.1
ccggccgggattacctttgccctattcctcggggaacaagaagacgaggaaagatcaaccccaccagagagagcaaacagcttcttcttcctcttcctcctccatgctgtcgtagaaagaacctctggttctttagctagtcagaccaccaaaatccaaactgagcggtctcacagcgagcggcaggacgtttcatgagagaatcatgcagtcactgaattggctatgcagcagcagtagcaccaccagattacacgtgccttcctttggtattgccttggttgtcctcctctcctgtgtgtccgtcgccagctcctgcacagatcaagagaggagctccctcatcgacttccgagatggcctctcgccggacggcaatggcggcctccacatgttatgggccaacagcacagactgctgccagtgggaaggaataacctgcagcaacgatggcgcggtcacggaagtcttgctgccttctagaggactcgaagggaggatcccaccatctctcggncatcttacggggctgcagcgactcaacctgtcatgcaattcactctacggcaatctgccaccagaactggtgttctccagcagcagcagcatcctggatgtcagcttc

SEQ ID NO: 129325 - DNA, 1483 bp, Zea mays
  Clone ID: MRT4577_49417C.1
attgtttttgttagcaatacttatttgacaaagtcctcactaatgccagagcttgaaggccttgaagaagttcatttttacattgaattggttcagtttatccaggtgagagacatgcttggtgatggtcgtctaataaaacgacgtgtagttgatggaaaaggtgaatttccaatggactgccctcttcatgacagcctattaagagtgcattataagggtatgctccttgatgaaccaaagtcagttttttatgatacacgtgccgataatgatggtgaaccgttggaattctgttctggagaaggcttggtaccagagggttttgaaatgtgtgttcggctaatgcttcctggtgaaaaatctattgtcacctgcccaccggattttgcatatgataagttcccaaggccagcaaatgttcctgaaggagctcatgttcagtgggaaattgaactacttgggtttgaaatgcccaaggattggactggcttaacttttgaagaaatcatggatgaggcggacaaaataaagaacacgggtaacagactgtttaaagaaggaaaattcgaacttgcaaaggcgaaatatgataaggtgcttagggaatataaccacgtgcatcctcatgatgatgaagagggaaaaatctttgctaattcaagaagttccctacatctaaatgtagccttttgctaccagaagatgggcgaatacagaaaatccattgaaacatgcaataaggtgctggacgcaaatcccgtgcatgtgaaagctctttaccgccgaggaacgtccttcatgttacttggggacttcaacgatgcaaggaatgattttgagaagatgattaccattgacaaatcatcagaacaggacgctacagccgcactccttaaacttaagcagaaggaacaggaagccgaaaagaaggcgaggaagcagttcaaaggactctttgacaagaagccaggagagatatccgaagttggtgtagaatcagatggtggaaaggatgcaggtgatgcaagaggcaacggtggtgaggcaacgagtgctgatagaggtgtaaacacaaatgacagtccgaccagcgaatcagagtacgccttcgaggaagagaggcccgggcttcttggcagcttgtggccctctgcgaggatgatcttctcgtctcttggcatgaacaggtgcgcgatactctgaggtgtccagtttgtactgaggagacatccaaaatcatggcagtgaagaggaactgccccgaggtttctggtatttatttattagagtaagtttggatgtatggaaaatgaaccgtgtgcaagatgtaaatgagaaacaatatgcagggaattttaatagctatctaggattcattatcttccacggcataaaataatttcccaggtttcttctaatgaaaaataaaaaacagggaattatattcgcaaaaaaaaaaaaaaaaagtcgacgcggccgc

SEQ ID NO: 129326 - DNA, 926 bp, Zea mays
  unsure (1)..(926): unsure at all n locations
  Clone ID: MRT4577_49418C.1
ttgggtacctcgaggccgattccacgcgtccgggtttatgtaccggtgacagcgaccgcgacaggtcctctcccccggaccgcacccgctgtagccgccatgtcgtccgccgccgccacagcctttgccggagtctccgtcgccaccccgaacctcaccactccatttcgcggtcgcgtgcgccttccgctacgcggggtctccgctgccccacgccgcgccgtcgcttcgatggccgtgtccgcccccaggtccggcgccgccgcctcgttcctggagcgccgcgagtccgagcgcgctctccacttcgtcaagtaccagggcctcggcaatgacttcattatggtggacaacagggattcgtcggtgccgaaggtgacgccggaggaggccgcgaagctgtgcgaccgaaacttcggcattggtgccgacggcgtcatcttcgtcatgccaggggtcaatgatgccgactacaccatgaggatcttcaactctgacggcagcgagccagagatgtgtggtaatggagtccgttgctttgctcggtttataggcgaacttgaaaatctgcaggggacacatagcttcactattcatactggtgctgggaagatcattcctgaaatacaaagtgatgggcaggtaaaggttgatatgggagagcccatcctttctggagcagacatccccacaaaactggtagctaccaagaacaaagctgttatccaagctgagttggcagttgagggcttaacatggcatgtcacatgtgttagcatgggcaacccccactgtgtcacatttggggcaaacgagttaaagatgcagtcgacgatttaaaactcagcgaaattgggcctaaatttgagcatcatgaaatgtttctgctcgcacaacacagagnttggtacaggttttgtctcgct

SEQ ID NO: 129327 - DNA, 1741 bp, Zea mays
  Clone ID: MRT4577_49419C.1
atcgaggccggccggggcgctgtaggttccctacagcctttcccctgaaaaaaaaattaccccccggacctcctcctccgatcggcttcctcctcccagtcccgaaccgcacgcgctcgatttcccgcaccccctctagcctctagcggccatgtcgcccgccgccgccaccacaaccttcgtcgcaatctccatcgccgtccccaaccctaccgctccatcccgcggtcgcgtgcgccttccgctaggcggggtccccgctgctccacgccgcgccgtcgcctctatggcagtgtccgcccccaggtccggcgccgccacctcgtttctcgagcgccgcgagtcggagcgcgctctccactttgtcaaataccagggcctcggcaacgacttcataatggtggacaacagggattcgtcggtgccgaaggtgacgcccgaggaggccgcgaagctgtgcgaccgaaacttcggcattggcgccgacggtgttatcttcgtcatgccgggggtcaatggtgccgactacaccatgagaatcttcaactctgatggcagcgaaccagagatgtgtggtaatggagtccgttgcttcgctcggtttatagccgagattgaaaatctgcaggggacaaatagattcactattcatactggtgctgggaagatcattcctgaaatacaaagtgatgggcaggtaaaggttgatatgggagagcctatcctttctggactagacatccccacaaaactgctagctaccaagaacaaagctgttatccaagctgagttggcagttgagggcttaacatggcatgtcacatgtgttagcatgggcaacccccactgtgtcacatttggggcaaacgagttaaagatattgcagatcgacgatttaaaactcagcgaaattgggcctaaatttgagcatcatgaaatgtttcctgctcgcacaaacacagagtttgtacaggttttgtctcgctcacacctcaaaatgcgagtctgggaacgtggtgctggagcaactcttgcctgtggtactggtgcttgtgcggtggttgttgcagctgttcttgagggtcgagctgagcggaaatgtgtagttgatttgcctggcgggccattggaaattgagtggagggaggatgacaatcatgtttacatgactggtcctgcagaggccgtcttttatggatctgttgttcactaggtactggggagtggggaccaagatagaagggttggctgccactcaaagcttgtgagattggttacaatatccatgaaactgaatgttctggtgccagtacactcgtttagatattttaaattatggttgcttgatttgggtagcagtagaggcttccttttgaagcattctagtgttgtccaccttttgtactcctttagtctgtcaggtttgaactacattgttagcatgtctttccaaccattttctgtttcttttctttgcaagttaacgtcaatgcagcttcagtattgttttctacagatttatcttgatgcactgcagaatgaatgggcttactagtttgctggtatgaatgttgcctatttcctggaaatcgttgtcatctaaagtgcttctgacaaaagacagcatgggttattggttatgactcactgctaatttcacctgcaacaattaataaagtgccacattctgtgcttaaaaaaaaaaaaaaaaaaaaaaaaaaaaaaaaaggcggacgcgtgg

SEQ ID NO: 129328 - DNA, 1479 bp, Zea mays
  Clone ID: MRT4577_4941C.1
gccgtgtaaaaaagggaaaaagaaaaaaccagagcaacgcagccgcaggctgggtgagcggcgcgggtcttcgtcggccggccccttcaccggtggcgagcatccaccagaccaccagtggatgcgcccctgccccccatgccccaggtcgagtcggccactgcctcggaggcgccgccgccgcaggacgcatggctcgtcgagctcggcagtcgcctcccgcagtgggagtcgctgcgggattcctccaaggtcattatcccgatttcaatatctagggtgaaccagtttgatgctgcaaggctagatgttgagatgtcggccatgttgaaagagcagctagtcaaagtgttctctttgatgaagccaggactcttattccaatatgagcctgaacttgatgctttccttgagttcctcatctggaggttctcaatttgggctgacaagcctacccctggcaatgcactgatgaacctgaggtacagagatgagcgggcagcacccatcactggaaaagaagttagaacaggtttggaaggacctgggctttctgtttctcaaaagatattttattgtattagctttgttggtggccaatatgtatggtcacgattacaatctttttctgctttccgtcgatggggcgattctgaacagagaccactagctcgccgtgcttgggcgttgatgcggaatgctgaagtattttatagggctgcttcattctttaacctattattgtttctttatggtggaaggtacaaaactgttgtagaaaggattctgaaggcaagacttgtttatgggagccccaacatgaatagagctgttagttttgagtacatgaatcggcagctggtctggaatgagttttcggaaatgttgcttttgcttcttcccctcctaaactcgtcttcggtaaagaagttccttctccccttctccaaagataagtcaggaggttcttctggtgatgaagcagattgtcctatatgtcggtccagtcctagcattccatttattgctcttccatgtcaacacaggtattgctactattgcctacgcacacgttgttcggctacgacttcttacagatgcacacgttgtgacggggcggtggttgcaattcaaagactaggatcaggttagttttacgacctagttgggttaaagaattctcgcccgtttctacagagaatcagcacttcggtgtttcatacggttacaagtttggatacgcgtcattcactgtatgtacatgtaattgccccaagtgtggacagttcggatgccatgagcccataactgacttgttgtatatcgaatgaatagtccgtcacaaaactaacacggattcactatgcgttttcttttcgattcgtctatttcaaaaatcgtgtattgaaaaaaaaaaaaaaaattattggaaagagcaactgattcactgattcctcattgaaaagagattaggttttt

SEQ ID NO: 129329 - DNA, 420 bp, Zea mays
  Clone ID: MRT4577_49420C.1
gagtccggccgggctctctgtctctctaaggtgttagattttagccgccgccgctgctcatctcacatccctcgagaagacgcctgctcctcgccgatcgatacgatggccgtcttctccgacctccacaccgccgacggcctcaagtccctcgaggctcacctcgccggcaaaacctatgtgtctggtgactccattactaaggatgacattagttctctagtaatgtagtggactccctgcgccagtttgtcataccttgtcgctgcgcaaaattttgtcacatgtaaacactgtatcatcacttctgttattgttgagctgatatcttctgtttaaaaaaaaaaaaaaaaaaaaaaaaaaaaaaaaaaaaaaaaaaaaaaaaaaaaaaaaagggaaaaaaaaaaaaaaaaaggggcc

SEQ ID NO: 129330 - DNA, 592 bp, Zea mays
  Clone ID: MRT4577_49421C.1
agtccgcaatcgccaaatgcaggcgctcctactcccatcgcggctgccgccgccgctgctccggcagcgagggcttcccgctgttgcgtctctcgccagccatcccctcaacggagctaccctccctaccgggcgcctctgcttcgggggcggcgaagccgctccgcggcgtctcactgtggcggcggcggcgtcctcgtcttcgtcgggccctctctacccgacgcctccccccaccgagcagacaattgagcgcgccaagctcgagcaggttatcaagaggctagagaaaacagctaggtatttcaagaatttgggtaccctagggttctggtcccagttggtgtgcacgtttgtttctgctggaattttgtcattctccacagttgttactgggaaggttacatcaccctttacattctacacaactgctgctggcgttgctgcagcttttatttcagtcttctggtcatttggctacatccgtctttctgaaagacttcggaaaacagcaagcgcacccgcaaaggctcctccacgggctgatgtgattaaaagtctgaaaaatggcattgtgctcaatattcttggg

SEQ ID NO: 129331 - DNA, 576 bp, Zea mays
  Clone ID: MRT4577_49422C.1
aaaaaaaaaaaaaaaaaaaaacaaaaaaaaaaaaaaaaaaaaaaaaaaaaaaaaaaaaaaaaaaaaaaaaaaaaaaaaaaaaaaaaaaaaaaaaaaaaaaaaaaaaaaaaaaaaaaaaaaaaaaaaaaaaaaaaaaaaaaaaaaaaaaaaggggggtggggtttttgaggggccaaaggttttaggggtgggggggggggaagttttttagttttttttttgggggcccggaaattaaaataatggggccgggggtttaaaaattttaggggggggaaaaagggggggggtcacccaattttaaaagttttgggaaaatttccccttttttccttttgggggttattgggaaaaggggcacggggggtaatcccttttcaaaatatttgggaaactggaatgggaaaggggaaccccccttttcgggggttttaaaccacgggggggggggggtttccggaaaagggaccgtttaatttggaaaggtctttagggccggggacttgggttttttcctttttttttttgccaagttggggggttttccccgttaagtttaaaatgggggggtccctt

SEQ ID NO: 129332 - DNA, 339 bp, Zea mays
  Clone ID: MRT4577_49423C.1
caaacataaagcttatttatgaacgggcacaactctgggttggacgcacacacaacagatccaacgcattttcaaaccaacaccgacactacttatggcacgaacaggggatactttgccatcctgcatatggagagaggtgaccagacgacgcaagcacatctggctgcttatacgacccatgacttactgaccaacacggagacggatcacacaggcggagggagctctccatttggatgccgcagccgctatggtgcggcatacttcaggtggtgacgctaacatctacgctgttggtcctgggggatgccctccttggcctggatcttggccttc

SEQ ID NO: 129333 - DNA, 313 bp, Zea mays
  Clone ID: MRT4577_49424C.1
tgtacttatctgggaaaatgaaataatcctttgaaaaaaaaaaaaaaaaaaaaaaattttatgccgccgccgcgccgggtgtacttatctgggaaaatgaaaatattcctttgaaaaaaaaaaaaaaaaaaaaactgagtttatgcgccgcccggccgcgtgtccttatctggaaaaacgaaaatactcctttgtaaaaaaatgaagagcctaaaagaagtgtttttgctccccctcaccgggttgccctaactggcagattgaaaatagtccttcctgacaagccaaaatgaattaatgaatttttctcccc

SEQ ID NO: 129334 - DNA, 203 bp, Zea mays
  Clone ID: MRT4577_49425C.1
atttatttttttttttttaaaacaattaaaattgttttttttacaaacaaaagggttcttaactcatcaaccaattaacatatactatagtatacaaactacttttcctcaactttcactttcaaatcctaccttataaaaccacccttgattaaaataactccactcactctatttatttacttgtaaccgtggtcactttc

SEQ ID NO: 129335 - DNA, 372 bp, Zea mays
  Clone ID: MRT4577_49426C.1
gttgggtaacaaacgttttcgagcgtagcttgcccaaaaaatttaattttggggggtctaaccccccaaacccaaaacttgaactaacggatcgaaaactggacttttggaaccgaagttttattaggccaatacaagcgggtaaaattgccgcaaggtgcctactggtgggggcactgaaccctttgcccaccgcctgggacaattatattcttaagggaggcccccgggggctgttgcttccccctccccattttctttttgaagttcacctcgtaagggattgtctccttgcacttgtccaggtccataaaaagggactgggaaaccgggttgggggggaaaaaaaccttcaaggcctttcactgtttc

SEQ ID NO: 129336 - DNA, 727 bp, Zea mays
  Clone ID: MRT4577_49428C.1
ggtggcctaataaatttaattaagggggaattcaacccatcatacatcttctggcccataccccaggaaatattaacccaaggccagagggcgccaccaaatccccaaaacatagaaaaccacccaaaggggcgaagggcggccaccacaaaaaaaaaaagggggagagaaagaaataaataccaaaaaaccaatctccaaatacaagaaaaacaacccccccccaaaaaagacaaaacaaccccccataaaaccgcgaaaagaaaagaaaagggcagaaaaacctgcacaaaccggctttttcttaaaaacccacaaaaaaaacccccaccaacagcccccgcctggagacccccccccctaaaaaacccctacacagggggggcaaaatgaaaacacccgaacaaaggcccgggcaacaaaaaaaatcccggcgctgggggaagctaccccaaaaggggggcctaaccataagacccccgggggtgaggaggcccccaaaagaaaaacccccccctgagtaaaaaaacacagagaaaaaaaaaccttccaaaaaggggcgcacccaacaaaaaaaaggggcccaccccaccggcaggaaaaaaaaaacccaaaaacccatgagtgcgagagaaaaaaaaagggccccaaagaaagacccaaagggggcccaacgctttggacttaaaaaaaaaaaaaacacaaatctcaaagggggggggaaccc

SEQ ID NO: 129337 - DNA, 370 bp, Zea mays
  Clone ID: MRT4577_4942C.1
gccgggctgccgttcttcaacctgccgctcagcaacatgtccggtggcgggtcgccgctcccgcccggtgctgacggccatggttgggccggtgcacggccgccgttctgacaagtccatgatgagccggtggtgtaattcaggtttgagagaacacgaagatatcaagaagaaagcaatggacggcacgatggttaagggcggcttgcaaaaggttagcgcacgtatgctagcttgcaaggatatcatatctatctatttctatctcgatctctgtacaactccgtagtgcatgtttgctcggtcggtctctctgatttcgtgttctcaatctcttctttattttctttttctcctctcatgtgcctct

SEQ ID NO: 129338 - DNA, 884 bp, Zea mays
  Clone ID: MRT4577_49430C.1
acttcacgccttcgtccagtccttccctcgcgatcgcccaaatcctttcctccccgcccgcgccgctccgaatcccgagacgcccccgatgcccgccgccgccgtcgctgctgctgctgctgcggccgctgcgtcggccggtgcggtcctgctctgcctgctcctcaactgccgcccacagccggcgctggacgcccagagggagagtgaaaggggggaggacgaggcgtcgccgctcctgtcgggctcggggccggggagcgaccgcgaggaggaggaggagccgtggccggacagggcgcccgtgacctgctgcgaggcggccgcggtagccgcgcgcacggcgcggcgcacgtgggagctcaccgtcgggcggtggggcctccacgggctcgccttcggtatcaacccccacatgaagcgccaggtggatttgcagcatgagtacagtggaaatgactgtctccaacttaaaggacatcagacatatactgaagtatcttctctccttgagcacttgaagctttgcatgttcttctcaaagaaatctttttcagcatttctgaagtttggtgggtacaaacaagaagacattcttattcacaaggctagggcgaggctcatgcagccttctttcgcattggtgtgtgacaaaagaaccaagtgcttgctgcttttcattcgaggtgctatcagcactaaagagcgcctgactgcagcaacttctgctgaagttccttttcaccatataattctatctgaaggaaagatcagcaatgtagttttagggtatgcacactgtgggatgcttgctggagctcgttggatcgcaaaacttgttattccccattttcataacaaaatgcaggaattttctgggtacc

SEQ ID NO: 129339 - DNA, 426 bp, Zea mays
  Clone ID: MRT4577_49431C.1
ataaaaactttatttaaccattttttggtcgtgtttatttttacattaccatcattttctacaacgaaaaacaaaacgctttttttttcaactcaataaacttaccaattctataaattatcctagcctaaaatgcactgtcatattcccaaactaaaacactctgaaacgatccaaagcccttaccagctaaaaaacaatgttcctttcacataaaatatcaattttccttttcactacatattctaaatacccatcatcactagcatatactctgccttcctcttccctgatcggttccggccacgcgctttcaaacaccaccccacaaatttgaaaaactcctacatcagcacaactgggaatgccaatgacaccaccaagagccattttttaaaacttatgggaaacgatcccaaacacttt

SEQ ID NO: 129340 - DNA, 653 bp, Zea mays
  Clone ID: MRT4577_49432C.1
ggcattatcatgactaaccccacatacaccacttgcgaaggaggtgggcctgaccgatatctgaaagcgaagcaagagaaagatgagggtgtaggatccacctctacattgttcacatgctcggccctatcttgaacatggactatggactgtcagctatgattaattggtctgccctttttacttgtagaaacctgttaactcactgggtctaatgatctggctcaattacctgagtgcaagccatttgggggaagaactgatgaagtacaacgcgtcaagtgtatcagaatcagggtattgccaatgcctgctactgatgcatcgtctttggtgatggagcctgttcactgtaaagcaggctgcgattgtgttgatgaatgttcaatcaatagtgtgaaaaagtatgtgatggaagctagagaaaattggtatgattctgtaggtgcagcactccttcaaggagttgggtttctatgacatggtgtaagaggttgcctcaatgtggccagaagatgaggaacgtttgctccagcaagagggctacgctaaaccgagcttctctgcgcaggaactattgcgatgaacttgctattgccttgccttccaagtacagcaaagagctagtgagctactacttcaatgtcttcatg

SEQ ID NO: 129341 - DNA, 384 bp, Zea mays
  Clone ID: MRT4577_49433C.1
cttgaacatttccccacattcatttgggcgatacacataataaaccagcaaacccttatcgtacccagacagtacacacgatgctgcataaccatatgggtccgacccgactttcttttactcgggcggtacggcaaaaaacaggccgggagcgcagaggtccgcggtttccttttcttgggcggatcacggaggctgacggctgcacactgagggtatggtacgtggcctgggacgactcggctttcatgacattcatatccagacagagctgtgatgcacgtcggaccgcatggacacagccgtagaattgatgcagactgagcatgtgctctatgtgctgcaccggcatgactgggcaatcgtttagcctggagatatggg

SEQ ID NO: 129342 - DNA, 282 bp, Zea mays
  Clone ID: MRT4577_49434C.1
aatggtacaattttcaagtccccgaaacttcagtatttgttctaaactgaagtataatatttggaagtatcgttcttttaggtagtctatataatatttcatttttccataattgcatgatcatttctttaatcctatcaagaagcttaacaatatgtaagcctttaatgtctcgtctctgattattgaagatctttttctgtattcaatattgacctctaatgatattgaaccttagcaagaggtcttcaataacaagatataagacattcaagacttaag

SEQ ID NO: 129343 - DNA, 304 bp, Zea mays
  Clone ID: MRT4577_49435C.1
ggccgcttttttttttttttttttgggaatgtacaaatgtacttttttatttccgcgaacccacaacacatcatccaaaaaactgcattattgcactataactcataagcagtggaaaagagcgcaccaccaatgatgggtggacgctggaacactgctgaaatcaggaaagcaagatggctgaatgtcaagaattggtacaagtgtaccagggtgccacgcataggcatagcagaacggtagaacgtgagcaactgttaatatggtaagaaggctcacaccatctcattagctgactggctga

SEQ ID NO: 129344 - DNA, 882 bp, Zea mays
  unsure (1)..(882): unsure at all n locations
  Clone ID: MRT4577_49436C.1
ccggccggggacgtcccggcccggccccgcacgcacggcacttcccagcgatttcctcgtcctctctctctctctctctctcgcgctccctctcccactcgacggaggagaaaggggggaaagcaatcggaagcgcgagccggcgagcgagatgggcgccgggagcagccgcgcggacgcgccgtcgcggcgccgggcgcgcctcggcctcggagggtgcttcgggacccgatcctcctcctccccagccgccgccgccgaagcgcacgacggcgggagcttcaccttggccgggtcctcctcctccagcgctatcgaggtacaatcagggcgaccagtacgtgccctgaattttcaggcttctctagctgctaaggatctccagatttccaccgcgtcaagtccaaggctgcattcctcttcaagtaccataagccatcacctcagattcaatcacctcaattgccatgaaaacaaggaagatggcctggggactgaaaatgctgaaacaagtggccttgaaagctcatctaggaaggctgtcatggttaggggaagtttcagtaatgaagctgttaatagtgatatgtcaggagaagggataagttttataggatcagagctggaaaatattcctagcacagtctccactaatgaaactggtggctcagccgctgaatctggtttgggcccctcattgatggcatctgaaaggatcatgtctgacttagaaggagaggtatctccgcaagggacctcatccacaactgccatgacnagtgaaagatcagatgtatctcaagctagcttaacatctatgtttcctaactcttcaattgcatcatctgtgattgtggaaaccatggcagatccaatctctac

SEQ ID NO: 129345 - DNA, 725 bp, Zea mays
  unsure (1)..(725): unsure at all n locations
  Clone ID: MRT4577_49437C.1
gcatacagctcacgccagtcagacatcggacactgctgagctctgcagcctgcactctgcttagctccgagctctagcagccttccatgctagactgccagctccacagtctacagatccacacacacgcccagctgcactgaaccaatggcgcaggcaggagaggtccaggtcccgactgccgctcccgtcgaggaggctgatgctgctgctgcagcgggagaggaggctgcccagatggccgacgcagagaccccgaacgaggagaccgatgatccggcggcggacaccgaaggaggcgctcgctaacgagccggagtcggacgggggctagactgaacgcaaggagggcgaggtcgaggccaataccgcacattaggctgagccaaccgaggactagcccaaggaagcaaagtcttacgccgtgcggccgtcatcagagacagaggctgtgtgctgtcacagtcgaggctgctgacccacacataggcgccggaccaaggaggtctgggctgtggccgcatacgaagactaggtgacaggctgcacctgcctncagtgctactggctgattcaatgccgatggtggaggcactggctctggccttggttctgtccttcttgagcgcctgtctgtggagtacgggaagaaatcaagctgggcttcactgtgtacccatctcccccagtgtcaacctcttgtggggagccttacaacagcgtgc

SEQ ID NO: 129346 - DNA, 415 bp, Zea mays
  unsure (1)..(415): unsure at all n locations
  Clone ID: MRT4577_49438C.1
tattcgttttttcgtacaagatactgtggtgcaccatcctgcgaaagatttcgcacaagacctaaagggggagggggctatctcttggatcaagacgtacagaggcgtacagacctcgtacgaccagaaataacagcctgagcattcgtgncggctcttaaaagttctaaggttgcaacctagacacaagtactgtgtactttgagagctttctaacgaggtgggcaggaactaccatcactccatcaggaagcttgacgtgtacatgaatgagatagccaaggtggcctatgagaggaggaagcatctatccaacctgctcctaaaggctcacgctacagcacgagtaaaagctatggttacagcttgacattcttactaccatcaaggactgacactggcgtttcgtgcctat

SEQ ID NO: 129347 - DNA, 648 bp, Zea mays
  Clone ID: MRT4577_49439C.1
ggccgcttttttttttttttttttctttggttttttggggtttttttttttttttttttttttttttttttttttttttttttttttggggggaaaagacttcaaaacccaaaaaaacgctaaaaaaaccccggacatgcttttaaaaaccagggaaaaaaaccagcccaaacggacttaggggggggggggggaaacaaaaaaaaagggggaacaaattcaaacactacccccctactaaaaaaaaaaaaaagggggggaacaggaaaacagctacaaaaaaaacacgggaaaatttaagctttgacaggaaaaaacatttaaaaaaaggggctcaaaaaaaaagccctctcccaaaaatactggcccttaatggccggcaccaacccaacctttgggggcttttttgcccctaaaaaaaccaacctccgggggggcaaaggcccaaaggggaaaggtggcccctaagagctgcatgaacaaagggcaatctttggaaaacccccccccaaggggggtaaaaggggaaaaaactttaaaaaacccccgttttgaaagggtgaaagctttgtctggggaggtcaaaacttcaataaaaaacattggaaagttaaaaaaaagcccaagccttaacgggaggggaggggg

SEQ ID NO: 129348 - DNA, 592 bp, Zea mays
  Clone ID: MRT4577_4943C.1
gagctggctcgctccccacccttgctcgccgcttacggaggagacgcgtgctctctctgtctccctcgaagacgattcggctaccgctgccgccctaggccaggatgccggctcttcgacaggcccctctcccgcgaccagggcccccaggccgccgcgacacatcatgcaaggacaggatccgctgatttgcctcgtatcaacaacccgcagccctctcaactgctaaacaccacatgttctcgcgaatcagcgcgaccggtagggagcagattgatcagcaccaagactcacccgtgcccgccttgcctcgatactctgatcccgccaaaaaagtgttctggaagtaacactggaggtcgtcaattgacgaccccaaggataagatgaggaagatctgggctgccgtctacaacatgtgtgactgccaagtgctgaaggtcctgtcctcgaccacggactgatggctggatcatggctgacgtgaagctgactctctactgtgatgctcgtgatcgcggactattcagctactgcatctactggcggcgttagacgtccgagtccatctggtgtgcccgaggtctatgtg

SEQ ID NO: 129349 - DNA, 264 bp, Zea mays
  Clone ID: MRT4577_49440C.1
atcatatcaaggacccaactgagcaaagaagagtagattgtaagcagcgaaaatcggtaggaagcagtagttacaaccagtcgaaactagttgaaagcaagtgcaaggagctgagttatcttctcacgcgtgctcttttcatggctaccagaatgctttgttgttcatgttcagaatataagaaatgcattctagttattattttacgcgtgttctaaaaatagtactaactagtctacagggttggtctggtccttttttgta

SEQ ID NO: 129350 - DNA, 289 bp, Zea mays
  unsure (1)..(289): unsure at all n locations
  Clone ID: MRT4577_49441C.1
agatagatatgtaacagttagcatcctccgtccatattgactacggacataaaaaaanttttggtcccccnaaaagtaatgtcnacctgcactcgattacatttttgcccagtggcatagttggccctcttggccttttcacgtccctccatccgctctgtgtcaaatcttgattgttctgttcggctgtggccgcatctgtatccacgctcccacactcccgtcacgtgttgtccatgttgttgtcgtattgtgctttttcctccccactctcatcctcggcgtcgac

SEQ ID NO: 129351 - DNA, 828 bp, Zea mays
  unsure (1)..(828): unsure at all n locations
  Clone ID: MRT4577_49442C.1
ccggccgggtacctgacggcccgagagtacgacggccacgtccaactgcttgccaccgactacgagcccaagtggatcgccaagtacaaggccatcctcgccgcactgtccagctacccagtcatcgacatggacaccgaggacaccgtgcgctgcttccagtcggcccatgtcgggctggagagccacaaggagctgggcatcgtcccggctctctcccgcaacggctacacgatggtcagcttccgggacttcatccgctccgcctactcgctgcagcgggcacgggtgacacccgtgagcaggagcacaaccgggcggaagcctcggctcgtcatggtcctgcggcgcaactcgaggcaactcaagaacgaggccgacgccatcgccgccgcggccggtgtcggcttcgaggtggtggctgcgggaccagacgacgtcagtgacctggagcgctttccccggggtggttaactcctgcgacgtgctcatgggcgtgcacggcgctgggctggccaacatgctcttcctgcctcacaacgccacggtggtgcagatcatcccgtgggcgggctcaggtgggcgtgccggcattcgtacggagacccggtgccagacatgggactccgctatctcgactacgnaggcctcggcggaggagaccacgttgaaggagacctaccccggcgaccacgccgtctttacggacccgctctccatacatcaccagggattcgacaagatgtggaacatcttcatcaacggacagcatgtcatcgtagacatcgaccgggttcacagggttcatgaagcagctttacagtccat

SEQ ID NO: 129352 - DNA, 1544 bp, Zea mays
  Clone ID: MRT4577_49443C.1
gcacccccctccccttccccgccccgctcccgcgtaatctaaccgctgctccgattagcgccatcccaccgctataattacgctcccgccctgcgcgcgcgggcctatcagcgctagcttagctatccggccgcatccgctgctcgcttcctcacttgcgcgtgtgtcgtgtagcatttagtcagctgctcctgcttgctagggttagggtttgcgggggcgcgcgcgcgtgcccgcgcgtgagctggccgcgggagggatgacgccgcaccggtcgccggcggggaccggaggaagtggcggcggagggccgccggcgctacactacctgagcggcccttacggagacaccaccttcaccaaggttttcgtgggcggcctcgcctgggagacgcggagtgaggggcttcgcgcccactttgaggtctacggggacatcctcgaggccgttgtcatcaccgaccgcgccacaggccgctccaagggctacggattcgtaaccttccaggacccagagtcggcgaggatggcctgcatggacccatatccagtgatcgatggccggcgtgctaattgcaatcttgccatcttagggcgtcctggtccagctgtgcctttcgtagcacctataaggccggtcatcccttacaatggaggtgtggcggttccagggggcatgtatgtgcaaagcccaacatatcagcaatccccttacaactacccacaggcctttgtatattcttcttatgggccatcagcatatggacctgaatacctatatcagcagaatgcatatggtccatatgttgggcaacagtatattccagtttacggtggcccaaggacagtaggcccagcagtctacccatatgggcagtctggccaacctgtaccaagtgatcatgcttattctcttggttatgccccaagtcgtgttctcccactatcgaatcagaatgttaacgctgcaaatgttgtgcgcataccaccacttcaacaatttcctccaggagctccacgacctcagcaacagcttttggcccctgctcgtgcaccgccattcccacagaacaacgtttctgaacaagcgacaggttgacaaggatgccagaaagtgacgaattttaggtatcctatagtctgcagcaggactaagaaaagttgtaccgctaaattgggcggcatgcttttttcttgcaaattgttttcgtttgctctctaaagtctgcaggttgtccctatccatggttacctgaacttcttataacgtgagtgtctgatctgctccgcgggaaggggcaggcaagctcgagcgactgaaaataaagccccctcttgctcagcttctgtcagtgtgtgtgtacattccccatctcctgccaaaaattttaataactggtggtctgtgcatggaccaaagtggatggccggaaatgaagtccggcctccaacctgtgtataataatataggtcatgcagtaggtccaaatcgtagaacattctttcaaaacatctggttgtgtaaattaattctttttttcgcc

SEQ ID NO: 129353 - DNA, 2985 bp, Zea mays
  Clone ID: MRT4577_49444C.1
tgaatttctcactgtgtttgtgtctgtgctcgagctagcgtaaagtggagattccttgccccctttccgcttcaccatcgtacgaaaccctagcccgcgcctcgccgccggcacgccggatcggtcggtgccatgtccaacgccagggtctacgccgacggcaacgtgctgcgccccaaggagtactgggattacttggcgctcactgttaaatggggtgagcaagaagactatcaagttatcagtagagtcgggagaggaaaatacagtgaagtatttgagggaaatattgttaaccataatgtgaaatgcatcattatgatcctgacgcctgtgaagaataagaggaagcggtgatgaattcggatggaacagaatcctagtggaacgaattacatcgcgatgctttttgatattgcgagacatctaccgtaaaagatgcccaggttggtctatgattttgttgctaacgcaggtggcgagcgtaattgacaaaactataatttctaattgaatactgtaacttatactgaggatagtctaaagaaagtccaaatgctactaaagaaccaacaagagatgttactgtactgggatcatctgtattcttaagcctggccgaacagaaagaacctggtacatattgtgttcgatatccatttgaacagcatctgcttgaacttagaatatgaaaaatgcacagctttaagagagctgtagccaacattaagaggttatgacattcggtattagagctacgagttactcaaggcattagattactgtcattctcaagttaatatgcagcaaagatgtggtgccgcctcataataagaataggtcacaacctttgcaagatcagactgataaactaagctcttcttgtagactatcttcgggggaatattaacacaatcgagccggccctccttcctcggctcggcagcggcctgatcgagtttgtactgttcggcgagcagcaccaggcatgtatcgacatggttgacgatttgcggcgccgatgggcgcgctgagactgtggggtgataaacgatcttggtgctgctccgtccaccagagttcaaattattgagatagccaatatgttccagcttcgtagggcaaatgcttgttagggaaatcattgtatgcgggccggacattacattagaaacctgttgggatagccaagttaaatagcgaagattgactgaatgtttatttgaaccagtacagaattgaggctgtacctcatcatgttgccctagttggaagggcatgatggaaaccatgagtagaattattgaatgcaggtaatcagccactagtgcctcctgagtttatctcaaacacatgacagacttatggggtgcttatcataaatacaggtatcccgtcctttggggataacggtaccacaagttctttgagatgatggcctgggtattttctgcaagaagatagcacaagagcaaaacgggcatctacaatacagttctttaggctatatccatatcatcaagacaagggtaagaaggctgatgatacagtaactattccatcatatggtcatagatgtgatagctgcagccgagaattctctgatgtagcttcggtggaggggacttttagagcagtaagattcaagcaacgacagaaccatgaaaagttgatatctgggaaaagctttgcgatgggccaaagacaaaaaaattaataggtaaaactatcacgattgccggaatagatggattagattagctgaacttggactagcactagtgcattacttgacttgcatctgatgtatgttgttttgagggatttcttggtaaaaagcactaaaaaatgctgcaaatgtcgtgccattaacgcctatagcctgggagtgacatacataaatcatccaagtcttaggcgtgtgagcgaatggtaggatttaattgagatgtatattatgaatggtagaagttgctacctgtgactggttgatctgctggtattgctctgattttaaagactaaagacaaaatgcatggatcatgttgagcactgccgattaggtcttgaaatctaggccagtctcttcttgaaacaaacgaggatatgggagccggagatccctataccagaactaaccgcgacaatgtgtggctgaaatgcatagctcagcattgggggggaaacgaatctatcaaaatgaagatatccacgtttactttgtccatggaaaagaagcaccaaagtctattaaagaagcatctaaagctgttactgtaccagatcgtcggacatcgaagcgttcccggagaacaagctctggaaactcaatcagtttgaaagtctctggctctacatctgtctatcagttgaaactgatgatatgggaatctttagggattgttaaggagaaccaaatgcttcacaaaggctctgttgagattgaagatgattttgctactcttgctgataagagtatttttcctggggattttctctgggtcagagactctgaaatatatgagaaccgtgacattgcagatgagatttcagaacaaaaggatgatatgctacaggctgaggaaggctttcgaggaactctgttgacatcaactgtctcagctcagctttgtcaggatatagcttttagtgaatgagttcccacatcagatatgtagctgcatatctgctgacttaagctggtgaagcctgctgggaggtgatgctgactagcttattctttgtttttattgcatattgctgttttttctgaatggcgatcactacttctacatccttctccctctgactatcaaagtcccacttgtatatgcacctgcttccactgtcgatcatgcaaccgacagaacttcaaagttaactacggttttgaacccttattttcattatgtatatattattcatcttccgttcaaaaaaaaaaaaaaaaaaggcccctagggccatcaacaaagttggaatgtc

SEQ ID NO: 129354 - DNA, 348 bp, Zea mays
  Clone ID: MRT4577_49445C.1
tttcgtcccggtacgcgtgggcgggggaccgccggcgctacactacctgagcggcccgtacggagacaccacctttaccaaggttttcagtgggcggccttgcctgggagacgcgaagcgagggccttcgcgcgcactttgaggtctatggggacatcctcgaggccgttgtcatcaccgaccgcgccacgggccgctccaagggctacggattcgtaaccttccgggacccagagtcagcgaggatggcctgcatggacccatacccagtgatcgacggccggcgtgctaattgcaaccttgccatcttagggcgggctgttccagctgtggcttttgtaggaccta

SEQ ID NO: 129355 - DNA, 443 bp, Zea mays
  Clone ID: MRT4577_49446C.1
ggccgcttttttttttttttttttctttttttttttttttttttttttttttttttttttttttttattttttctttttttggtattttattttttttttttttgttcttttttggtgtttttttttttgagaaaaacatcaaacctgtaaacaaaaccccctaaaagaagaagggagccacgcgaggggcgacaagccaccacacaaaaaaagacgcaaacaagcccgcgccccccccctgccaacagaagggccggcgcgagccagatactccccaaaaaaaaaatggagtgcgccccactccggacacacaaaacagggggttaaaactgacaaaaaaacactagcagaaagggcgctctcgcttttgcagagggaaactcttcgcaacgatgttttttttgattgcaacaattctcccaccctacacacgagactgagg

SEQ ID NO: 129356 - DNA, 342 bp, Zea mays
  unsure (1)..(342): unsure at all n locations
  Clone ID: MRT4577_49447C.1
cgtcgcccagcgtccgtgaaaagaaaaaaaaaaaaaaaaaaaaaaaaaaagaaaaaaaaaaaaaaaaaaaaaaaaaaaaaaaaaaaaaaaaaaagggggggggtttgtttttatggatctaactttcggttggctggcttgctatgtctttttttttttgtagtgtaggttgggtggggtggactggcgtttttttttaaaacggattggattgggcaatggcgtggcgtaacttaatttattttgctttgcatcacatttttttttggtggggtggtgtnataagaggacaggcccgtatggatttttctttccgttcggttgccctgattggattggtgg

SEQ ID NO: 129357 - DNA, 446 bp, Zea mays
  Clone ID: MRT4577_49448C.1
gttatttgagtattcttagtattctgagttttttttgtttatttcctttttccttatgagtattaagctgcaagggttagtagatgtgtagatgcttgttaaaccatggattggtttaagcaacttctagaaattggcataatgcaaaagcatgcagtttgcaacctagatgtattatagtcatggggggtctataaattggcataatgcaaaagcatgcggtttgcagcctacatgtattctagtttcagtgtttgtcatggggtgttctggtttgccatcctgatgcctctgcactaacagtggagattggaatacacatattcgttgatgctgtgttggatcatgtacttcctcctattccaagttcagtccatcgatctatccttgcgtattccaccctgattttcttccaccaacctggctgactgggctccgactaggat

SEQ ID NO: 129358 - DNA, 684 bp, Zea mays
  Clone ID: MRT4577_49449C.1
gaaaaatctcatacccaagaaacattaaagggattcttgagacgggctcaaaacgagttcggcttaaggatcaagaaaattaggagcgacaacgggacggagttcaagaactcacaaattgaaggcttccttgaggaggagggcatcaagcatgagttctcttctccctacaccccacaacaaaatggtgtagtggagaggaagaatagaactctattggacatggctagaaccatgcttgacgagtacaagacttcggatcggttttgggccgaggcggtcaacaccgcttgctacgccatcaaccggttgtatctacaccgaatcctcaagaagacatcatacgaactcctaaccggaaccaaatgggtcttccgcaacaagcaagacgagcatggtgtggtgacaaggaacaaagcccgacttgtggccaagggatactcccagtcgaagaaattcgagatgtctatgatgggggagttgaagtacttcctaggatttcaagtaaagcaactccaagcgggcaccttcctaagccaaacgaagtatactcaagatattctaagcaagtttggaatgaaggatgctaaacccatcaagacacccatgggaaccaatgggcatctcgacctcgacaaaggagattccaagccgaccctaaggaagctcaccttacggccgtaa

SEQ ID NO: 129359 - DNA, 466 bp, Zea mays
  Clone ID: MRT4577_4944C.1
gaaaaagaaaaaccgagcaacgcagccgcaggctgggcgagcggcgcgggtcttcgtcggccggccccttcaccggtggcgagcatccaccagaccaccagtggatgcgcccctgccccccatgccccaggtcgagtcggccactgcctcggaggcgccgccgccgcaggacgcatggctcgtcgagctcggcagtcgcctcccgcagtgggagtcgctgcgggattcctccaaggtcattatcccgatttcaatatctagggtgaaccagtttgatgctgcaaggctagatgtcgagatgtcggccatgttgaaagagcagctagtcaaagtgttctctttgatgaagttttgatgccttcttttcatatcagccaggactcttattccaatatgagcctgaacttgatgctttccttgggttcctcctctggaggttctcattttgggctggcctgccttcccc

SEQ ID NO: 129360 - DNA, 3714 bp, Zea mays
  Clone ID: MRT4577_49450C.1
atgctttatgagtacaagacaccggatcggttttgggcggaggcaattaacactgcttgctactccatcaaccgactctatcttcaccgaatcctcaagaaaacatcgtatgaactcctcaccggtaaaaagcccaatgtttcttattttagagattttgggagcaaatgttttattcttattaaaagaggtagaaattctaaattttcttctaaagtagtagaagactttttacttggttatgactcaaacacaagggcatatagagtcttcaacaaatccactggattagttgaggtttcttgtgacattgtgtttgatgagactaatggctcccatgtggagcaagttgatcttgatgagctagatgatgaagaggctccatgcgtcgcactaaggaacatgtccattgaggatgtgtatcctaaggaatctgaagagctcacacaagttcaagatcaaccgtcatcttccaatcaagcatctccaccaactcaagatgaggatcaagctcaaaatgatgaagacaaagatcaagaagatgagcaacctcaagaggaggacaatgatcaagggggagatgaagttgatcaagacaaggaagatgatcaagaaactcagggtcaaagaccgccacacccaagagtccaccaagcgattcaaagagatcaccccgtgaactccatcctcgacgatattcataagggggtaaccactcgatcacgagttgctcatttttgtgaacattactcttttgtctcctctattgatccatatagggtagaggatgcactaagagattcggattgggtgttggctatgcaagaggagctcaacaacttcacaaggaatgaggtatggcatttagttccacgtcctaatcaaaatgttgtaggtaccaaatgggtattctgcaacaagcaagatgagcatggtgtggtgacaagaaacaaagccagacttgtggctaggttattcacaagtcgaagcctcaacagccgtcagcggtcagccgaaggcaagcaggcaagcagcgccgcaataagaagtcaagaacaactgaacaaggcaacgagcaaatattcatcaaagaaggctgttgtttcatcgtctccagctgcaactgtggtggaagatgaacctcaagtacaggagagagttactgaagaaattatgaactctataccatcttctccgccatcaattccaactgatgatgtctcgacgcagccaacaccgatttatgatatcaatcgccttccacatgatccaggtgaaagaatgcccatccaaagttaccctattaatgatcaagatgcaattcatagattatatattcttaaaggtccaatccaaccatatgcacatgaatttccaaaaagaaaaataggaaagatatatcgtcaattcaattttgtttggtttcataaacatcattggcttgaatatagtatcaagaaggattatgtattttgctttatatgctatttgttcaaagacgacaaatgtaagagcaagggggcagatgcatttgttatagatggttggagaaattttaatataggagagaaggcacttttgaaatatgtgggttatagtgcgcacaatgcagctcaagagaggtatagtggcttcgtgaatcctgaggcaacaattgattatcacattgataagtggagtaaagaggatcttcgtatttataagatcagattgacttattcacttaggtgtttgaagtttctattgtgtcaaggattggcatttcgtggacatgatgagagtgaagagtctaacaacagaggcaactttcttgaacttttgaaatttcttgcatcaaacagtgaagaggtgaagaaatatgttttggagaatgctctagatgatacttgttctttgtcacttaaggaagcaattgaagctcttcttgttagccatgatttgactatggctcaaatccgaggtcaaggttatgatggagccatcaacatgaaaggagagataaaagggctgaaaacattgataatgaaagagtcaccttctgcttattatatacattgctttgcacatcaactacaaatagttcttattgctgttgctaaggggaataccgattgtgtgacattttttgatcaaataactctcttgctaaatattgttggagtttcttgtaagcgccatggtatgcttcgaaatgctaggcttcataatatcagaaaatcactagattgcggtgaacttgaaactgggactagattaaatcaggaggtggggttgcctaggcctggtgagactcgatggggctctcattacaaaactgtttgtagcatcatttctatgtaccccacaattcatgacgtactcatcgctctaggggctgatatgtcacataagggcgattggacaaaaattcattttgttcttggagcatttgagtcctttgagtttgttttctttgcacaattaatgtttgttattcttgggcacacaaatgaattatctgagtgtttgcaaagaagggagcaagatatcatcaatgcaatctcacttgttaatgtggcaaagagcagaatgcaagaattgaggtctaatggttgggatcaattcctacaaagggttacattgttttgcaatcaatatggcgtccgagttcctgctatggaggataattatgtgccttatggaaaatcatcacgatacactcgaaaccaaacaaatgatgatcactttagaagagaaatatatattggtgtcattgatcaaattagtcaagagcttgataaccggtttgatgagaagatacaaagactagctgaattttaccctaatgacatatttgggaatgatttgctgaaacttgagttgcagcttaataattatattgatgcaatgaggcaagatgataacttcaaaggccttcattgtcttgttgacctgtctactaataaatctacttgtgaagagtttagtaggatcatgattcaaaaattcgagatgtctatgatgggggagttgaagtattttctaggatttcaactcaagcaactccaagagggcaccttcatcagccaaacgaagtacattcaagacatacttaacaagtttggaatgaaggatgtcaaacccatcaagacacccatgggaacaaatgggcatctcgacctcgacacgggaggtaaatccgtagatcaaaagatgaggcaaaccctcagggactatggctacaaattgagcaaagtccctctcctatgtgataatgagagtgcaatccgcatggcgggtaccaagtgggtattccgcaacaaacaagatgagcatagtgtggtgacaaggaacaaagcccgacttgttgcaaaaggttattcacaagtcgaaggtttggatttcaatgaaacctatgcacctgtagctagacttgagtcaattcgtatattacttgcctatgctacttaccatggctttatgttgtatcaaatggacgtgaagagtgtcttcctcaatggccctatcaaggaagaggtatatgttgagcaacctcccggctttgaagatagtgagtatcctaaccatgtttataagctctcaaaggcgctttatgggctcaagcaaaccccaatagcatggtatgaatgcatgagagactttcttatcactagtggcttcaaagttggaaaagctgaccctactctcttcactaaaacaattgctaaagactag

SEQ ID NO: 129361 - DNA, 259 bp, Zea mays
  unsure (1)..(259): unsure at all n locations
  Clone ID: MRT4577_49451C.1
gggggggggngaaacaaaaagggtgaggggatntncaagtnaaatagaaaaggtgagggtnctggncatntaacaggtncagaataacaggaatacataaattcatatctagaacaagctctaggtgctaaagaggggggggggggggaactattagggcacagagtgctcccgtggttgactcgtactccaggggggggggagcttcttggtacgcctgttgtagcgggcaaggggggggatcccgcccccaacaaga

SEQ ID NO: 129362 - DNA, 1833 bp, Zea mays
  Clone ID: MRT4577_49452C.1
atgacgactgacaggccactggagctcctacacatggacctattcggcccgattgcttacttaagcatcggtgggactcaaaatgagttcggcttgaggatcaagaaaataagaagcgacaacgggacggagttcaagaactctcaaatcgaaggcttccttaaggaggagggaatcaagcatgagttctcttctccctacacgccacaacaaaatggtgtagtggagaggaagaatcaaactctattggacatggcaagaaccatgcttgatgaatacaagacttcagatcggttttgggccgaggcggtcaacaccgcctgctacgccatcaaccgagtctttggcagcaaatgctttattcttgttaaaataggtagaaaatctaaatttgctcataagactgtagaaggctttttactaggatatgattcaaacacaaggacatatagagtctttaacaagtcctatggacaagttgaagtttcttgtgacgttgtgtttgatgagactaacgactctcaaatagagcaagttgatcttgatgagataggtgatgaagaggctccgtccatcgcgctaaggaacatgtccattgaggatgtgtgtcctaaggaatccgaagagcctccaaatgcacaagatcaaccatcttcctccacacaagcatctccaccaactcaagacgaggataaggctcaaaatgatgaaggagaagatcaagatgttgagccacctcaagaggagagcaatgatcaagggggagatgcccatgatcaagatgaggaagatgagcaagttccaagaccgccacacccaagagttcaccaagcaatccatcgagatcaccccgtcgacaccatcctcggcgacattcataagggggagctcaacaacttcactaggaacgaggtatggcatttggttccacgtcctaatcaaaatgttataggaaccaagtgggtcttccgcaacaagcaagacgagcatggtgtggtgacaaggaacaaagcccgacttgtggccaagggatattcacaagtcgaaggtctggatttcgatgaaacctatgcacccgtagctaggcttgaatcaattcgcatattacttgcctatgctacttaccatggctttaagctttaccaaatggacgtgaaaagtgccttcctcaatggaccaatcaaggaggaggtctatgttgagcaacctcctggctttgaagataatgagtatcctaaccatgtttacaaactctctaaggcgctttatgggctcaagcaagccccaagagcatggtatgaatgcctaagagattttcttatcactaatggcttcaaagtcggaaaagctgatcctactctattcactaaaactctcgacaatgatttgtttgtatgccaaatttatgttgatgatattatctttgggtctactaacgaatctacatgtgaggaatttagtaggatcatgacacagaaattcgagatgtctatgatgggggagttgaagtacttcttgggatttcaagtgaagcaactccaagaaggcaccttcattagccaaacaaagtatattcaagacattctaaacaagtttgggatgaaggatgccaagcccatcaagacacccatgggaaccaatgggcatctcgaccttgacgcgggagggtgtaagattaatagaaagagcacatcggggacttgccagttcttgggaagatccttggtgtcttgggcttcaaagaagcaaaattccgtagctctttctaccgccgaagacgagtatattgccgcaggggaagaaagtagcaccttcaaaaatttagtatcttaa

SEQ ID NO: 129363 - DNA, 4641 bp, Zea mays
  Clone ID: MRT4577_49453C.1
atgtcgggagatcacgccaagagggagatcgtgaccggcggtgacaagtccgcaagctcggggaaaactcattcgagggagttcggccacaagcataaggaggaatccgcttcctccatcaagtcacaacggaggggtgagaagaagaagaaaatgaagaaggttgtctactacgagaccgattcttcgtcaccctctacatttgggtccgaattgtcgtccgtcacttctaaacgccatgagcgtaagaagtatatgcgcaacctcgggagcacaaaatgggatgaccatgaaatggtcaaggttattctaagatcactcatttttcataatcctacgcaagttcaattaatacatggtgatcctagatacaagctaatgtctcctgagaaagttatagtaaagtttgtgagctttgagttgatgatcaaaggctccaaacaaattgtcgagcaaggtggcacctccacacccgagatgcaacccgtcgtattcaaagcgacggaggagaagaaagaagagtctacatcaagtaggctccccatcgacgcctccaagcttgacaatgagaaaatggcgctcatcataaagagtttttgccaaatcctcaagcaaaggaaggggaaagactacaagccccgttccaaaaaggtgtgctacaagtgtggtaagtccgatcactttattgcaaaatgtcctatttctagtgatagtgacaggggcgccgacaagagagggaagaagaaggagaagaagagatactacaagaagaaaggcggcgatgcccatgtttgttgggaatgggactccgacatgagctccaccgactcctcctctgacgaggatgccgccaacatcgccgtcaacaagggacttctcttccccaacgtcggccacaagcgcctcatggaaaatgacgacaagaaaaagaagaaagaaaaattaaatgaattgataagtgctattcatgagaaggatgaacttttggatagccaagaggaattccttattaaggaaaataagaagcatgttaaggtaaagaatgcttatgctcaggaagtagagaaaaatgaaaacttgactaaggagcttagcattcgccatgacaccatttccaaccttagagatgagaacactagtttaattgctaaggttgagaaatcaaaagtttgccatgattcaattgacaatcttagaaatgaaaatgctagtttatttgctaagattgataaattgaatgaatcaattgctagccttaaaactgagaatgataagttaatttctaaggctaaagatttgaatgtttgtaatgtttctatttccaatcttagaaatgagaatgccatgttacatgctaagattgatgaattaaatgcttgcaaaccctctacatctaatgttaatcatgttactatttgtactagatgtagagacattaatgttgatgctattcatgatcacctagctttaattaaacaacaaaatgatcacatagctcaactaactgctaaaatcaatgagcatgaaatagaaaatgaaaattttaaatttgctagaagcatgctttataatgggagacgccctgacattaaggatggcattggctttcaacagggagacaatgtcaagcttaatgcccccaagaaattgtctaattttgttaagggtaaggctcccatggctcaggataacgagggttacattttatatcctgctggttatcctgagcacaagattaggagaattcatgctaggaagtctcattctgttttccatcatgtttttatgtacaagaatgaggcatctagctctaggcattctacccatgctaaaatgcctaaaaagaaaactcctattgcatcaaatgatcctaatgtttcatttaagacttttgatgcatcatatgttttaactaacaaatcaggcaaagtagttgccaaatatgttgggggcaaacacaagggctccaagacttgtgtttgggtacccaaggtttatgcatccgggggctcgagttggattattgatagtggatgcacaaaccacatgacaggggagaaaaagatgttctcctcctacgagaaaaacgaagatccccaaagagctatcacattcggggatggaaatcaagattctttagattacaatttgctttttgtatctcaattatgcaaaatgggttacaactatctttttacggatataggtgttactgtctttagaagaagtgatgattcattagcttttaagggagtattagagggtcagctatacttagttaattttaatagagctaaactcgatacttgcttaattgctaagactaatatgggttggctctggcatcgccgactagcccatgttgggatgaataatcttcacaagcttctaaagggagaacacattttgggactaaccaatgttcatttcgaaaaagacagggaaaaatctcaaacccaagagactttaaagggattcttgagacgggctcaaaatgagttcgaattgaggatcaagaaaataagaagcgataatgggacagagttcaagaactcacaaactgaaggctttcttgaggaagagggcatcaagcatgagttctcttctccctacacacctcaacaaaatggtgtagtggagaggaagaatagaactctactggacatggcgaggaccatgcttgatgagtacaagactccggaccggttttgggctgaggcgattaacaccgcttgctactccatcaaccggctctaccttcaccgaatcctcaagaaaacatcgtatgaactcctcactggtaaaaagcccaatgtttcatattttagagtctttggtagcaaatgctttattcttgttaaaagaggtagaaaatctaaatttgctcctaaggttgtagaaggctttttactaggatatgactcaaacacaagggcatatagagtcttcaacaaatccactggattagttgaagtttcttatgacattgtatttgatgagaataatggctctcaagtagagcaagttgatcttgatgaattagatgatgaagaagctccatgcgtcgtgctaaggaacatgtccattggggatgtgtgtcctaaggaatccgaagagcccacacaagcacaagatcaaccatcatcttccatgcaagcatctccaccaactcaagatgaggatcaagctcaagatgatgaaaatgaagatcaagaggatgagccacctcaagaggaggacaatgatcaagggggagatgaagctaataaagacaaagaagatgatcaggaacaaagaccgccacacccaagagtccaccaagcaatacaacgagatcaccccgtgaactccatcctcggcgatattcataagggggtaaccactcgatctcaagtcactcatttttgtcaacattactcttttgttttctctattgagccatacaaggtagaggatgcactaagagattcggattgggtgctggcaatgcaagaggagctcaataacttcacgaggaatgaggtatggcacttagttccacgtcctaaccaaaatgttgtaggaaccaagtgggtattccgcaataagcaagatgagcatggtgtgatgacaaggaacaaagcccgacttgtggccaagggttattcacacgtcgaaggtttggatttcggtgaaacctatgcacccgtagctaggcttgaatcaattcgtatattatttgcctatgctacttaccatggcttcaagctttatcaaatggacgtgaaaagtgccttcctcaatggaccaatcaaggaaggggatttcaagtcaagcaactccaagagggcaccttcatcaaccaaactaaatacatttcaagacatacttacaaagtttggaatgaaggatgccaagcccatcaagacacccatgggaactaatgggcatctcgacctcgacacgggaggtaaatccgtagatcaaaaggtataccggtcgatgataggatctttactctatttatgtgcatctcgaccgtatattatgctttctgtatgcatgtgtgcaaggttccaagccgatcctaaggaagttcactttaaggccgtaaaaagaatcatgagatatttagtttatacacctaagtttggtctttggtaccccgagggatccacctttgatttaataggatattcagatgctgattgggcagggtgtaaaattgataggaagagcacatcaaggacttgtcagtttctaggaagatccctggtgtcttgggcttcaaagaaacaaaactcagtagctctttctaccgccaaagccaagtatattgtcgcaggccattgttgtgcacaattactttggatgaggcaaaccctcagggactacagctacaaattgagcaacgtccctctcctatgtgataatgagagtgcaattcacatggcggataatcctgttgaacacagtcgcactaagcacatagacattcggtatcactttttgagggatcgccaacaaaggggggatatcgagatcgcttatgttagcaccaaagaacaattagctgatatctttaccaaaccactagatgagaaaacctttaccaaacttaggaatgagctaaacattcttgattctcagaattttgattga

SEQ ID NO: 129364 - DNA, 587 bp, Zea mays
  unsure (1)..(587): unsure at all n locations
  Clone ID: MRT4577_49454C.1
ggccgcgggttttttttttttttttttgcagcgcacacaaaggcatttataacggttatctctgcttcgcgatggaaagaccggcggtgcttaattcttattcctcggagcaaacagagaacaaacagtcggcgctcccggcgaccataatgaaccactagccaggttgcacataggcgatgacataccggaggggggtcacttcgccaaaaacaggggccgccccctatggctgaacgggaagttgtcggcggccgcgtacctttggtctccgaacgcccccccgcgcctctggctggcttggtnctttagcctcgcctgtttctccctngtgggagtttttccccgccctcgcgcgctctctccccccccccccccccttcctccctcccgtccctcccccccgccccccctcttcccccccctccccctccctcccccgcctcgtgccccccccccccctcccccncctctccccgcctcctccgcccccccctcccccccctccccccctcccccccccccctctcccccccccgccccccccgcgctcgccgctgccgctccccccccctccccgcctcccc

SEQ ID NO: 129365 - DNA, 603 bp, Zea mays
  Clone ID: MRT4577_49455C.1
ctttcgagggtccgggctcatcatgctctgttacatactgacctttacatgacttgcatgataactcagagatgtcaatacacatccatccaagggacctgtcgacccattgacatctcgtagattccaattgctcatgcgtatctttctctctctctctgtgtcctacatcattataaactcgtaggcgccattaacctattcgccaaatccaccacagcttatgatctcgagcgtatgcaggtgcctattaccatacccatcaatactctcactttctcacatcattagcagatgaaagcccaagaagttgatacggacactcatacgtgcttgcagacctattcgtatttgtttcagtatgaacgctgctttcactaggcctttatatgtcacatgatcgctgcatataacggcattcacacaccagattaggatgctcctctgcggtacgatgagaagctagagagaatgcctcagattaaacctgatgcaagcaatgggggcttacgctaggttcaaccctgtaatggctgacctcactattgacaacagctaacagtgccattatagagtcgacaactagctaggagtgatggtcca

SEQ ID NO: 129366 - DNA, 4179 bp, Zea mays
  Clone ID: MRT4577_49456C.1
atgtcgggagatcacgccaagaaggagatggagaccggcgacaaacccgctacaagccacgggaaggcttcatcgaaagagtcccgcaacaaggaaaagaggaaggacaagaagaaggaaaagattacttcttctcacaagtcgcatcggagtggcgacaaaataaagaagatgaggaaggtggtctactacgaaaccgacacttcatcaccttctacctccggctccgacaccccctccataacttctaagcgccatgagcgcaagaagtttagtaagatccctctacgctaccctcgcattactaaacatactccattagtttccgttcctttaggcaaaccgccaacctttgacggtgaagattatgctaggtggagtgatttaatgaaatttcatctaacctcactccacaaaagtatatggaatgttgttgagtttggagcacaggtaccatccgtaggggatgaggactatgatgaggacgaggtggcccaaatcgagcacttcaactcccaagcaacaaccatactcctcgcctctctaagcagggaggagtacaacaaggtgcaaggattgaagagcgccaaggaagtttgggacgtgctcaaaaccgcgcacgagggtgatgaactcaccaagatcaccaagcgggaaatgatcgagggggagctcggtcgcttccgtcttcgccaaggggaggagccacaagacatgtacaaccggctcaaaaccttggtgaatcaagtgcgcaacctcgggagcaagaaatgggatgaccacgaggtggttaaggttattttaagatcactcattttccttaacccaactcaagtacaattaattcgtggtaatccaagatatacactaatgactcccgaggaagtaatcgggaattttgtgagctttgaatttatgatcaagggttcacggaagatcaacgagcttgacggtccctccacgtccgaagctcaaccggttgcatttaaggcgacggaggagaagaaggaggagtctacaccaagtagacaaccaatcgatgcctccaagctcgacaatgaggaaatgacgctcgtcatcaagagcttccgccaaatcctcaaacaaaggagggggaaagactacaagccccgctccaagaaggtttgctacaaatgtggtaagcttggtcactttatagctaaatgtcctatttctagtgacagtgataggggtgacgacaagaaggggagaagaaaggagaagaagagatattacaagaagaagggtggcgatgcccatgtttgtcgagagtgggactccgacgaaagctctagcgactcctccgacgacgaggacgccgccaacatcgccgtcaccaagggacttctcttccccaacgtcggccacaagtgcctcatggcaaaggacggcaaaaagaagaaggttaaatctaaatcctccactagatatgaatcctctagtgatgaaaatgctagtgatgaggaagataacttgggcactctttttgccaacttaaacatgcaacaaaaagagaaattaaatgaattaattagtaccatccatgagaaggatgacctcttggactcccaagaggacttcctaatcaaggaaaacaaaaagcatgttaaagttaaaaatgcttattctctagaagttgaaaaatgtgaaaaattatctagtgaactaagcacttgccatgagaatatagacaaccttagaaatgagaatgctaatttgttagctaaggttgattctattgcttcaaaattagatgctaaaattgccgagcatgaacttgaaaatgaaaaatttaaatttgctcgtagtatgctttataatgggagacgccctagcattaaggatggcattggcttccaaaagggggacaatgtcaaacttaatgcccctcctaagaaattgtctaattttgttaagggaaaggctcccatgcctcaggataacgagggttacattttgggtgagacatctagctctaggcaaccaacccgtgctaagttgcctaagaagaaaactcctagtgcatcaaatgaacataacttttcatttaaaacctttgatgcatcatatgttttgactaacaaatccggcaaggtttatgcatctgggggctcaagttggatcatcgacagcgggtgcacaaaccacatgacaggggagaagaagatgttctcctcctacgagaaaaaccaagatccccaacgagctatcacattcggggatggaaatcaaggtgtcactgtctttagaagaagtgatgattcaatagcatttaagggagtgttagagggtcagctatacttggtagattttgatagagctgaactcgacacttgcttaattgctaagactaacatgggctggctctggcatcgccgactagcacatgttgggatgaagaatcttcacaaacttctaaagggagagcacattttaggattaacaaatgttcattttgagaaagacaggatctgtagcgcatgccaagcagggaagcaaattggtgcccatcatccacacaagaacatcatgacgactaacaggccactagagctcctacacatggacctattcggcccgattgcttacataagcatcggcgggagtaagtactgtctagttattgtggatgattattctcgcttcacttgggtattctttttgcaggaaaaatctcatacccaagagaccttaaagggattcttgatacgggctcaaaatgagttcggattaaggatcaagaaaattagaagcgataacgggacgaagttcaagaactctcaaattgaaggcttccttgaggaggagggcatcaagcatgagttctcttctccctacacgccacaacaaaatggtgtggtggagaggaagaatcgaactctattggacatggcaagaaccatgcttgatgagtacaagacttcggatcggttttgggccgaggcggtcaacaccgcttgctacgccatcaaccggttgtatctacaccgaatcctcaagaagacatcatacgaactcctaaccggtaaaaagcccaatatttcatattttagagtatttggtagcaaatgctttatacttgttaaaagaggtagaaaatctaaatttgctcctaagactgtagaaggctttttactaggatatgactcaaacacaagggcatatagagtctttaacaagtcctctggacaagttgaagtttcttgtgacgttgtgtttgatgagactaacggctctcaagtagagcaagttgatcttgatgagatagcatctccaccaactcaaaatgaggataaggctcaagttgatgaaggagaaaatcaagcaaatgagccacctcaaaatgacggcaataatcaagggggagatgcaaatgatcaagataaggaagatgaagaaccaaggccgccacacccaagagtccaccaagcaatccaacgagatcaccccgtcgacaccatcctcggcgacattcataagggggtaaccactagatctcgtgttgcacatttttgtgagcattactcttttgtttgctctattgagccacacagggtagaggaagcacttcaagattcagattgggtggtagcgatgcaagaggagctcaacaacttcactagaaatgaggtatggcatttagttccacgtcctaaccaaaatgttgtaggaaccaaatgggtgttccgcaacaagcaagacgagcatggtgtggtgacaaggaacaaagctcgacttgtggccaaaggatactcccaagtcgaaggtttggattttggtgaaacctatgcacccgtagctaggcttgagtcaattcgtatattattggcctatgctacttaccatggctttaagctttatcaaatggacgtgaaaagtgccttcctcaatggaccaatcaaggaagaggtctatgttgagcaacctcccggctttgaagacagtgagtatcctaaccatgtctataagctctctaaggcgctttatgggctcaagcaagccccgagagcatggtatgaatgccttagagatttccttatttcaaatggtttcaaagtcggaaaggccgatcctacactctttaccaaaacacttgaaaatgatttgttcatatgccaaatttatgttgatgatattatatttgggtctactaactga

SEQ ID NO: 129367 - DNA, 2313 bp, Zea mays
  Clone ID: MRT4577_49457C.1
atgtcgggagatcacaccaagaaggagatggagaccggcgaaaagcccactacaagccacgggagcacttcatcggaagagtcccgcaccaagaggaaggagaagaagaaggactcctccaagcggaaggagaaaaagtcctcctcttctcaccacaaagagaagaaggaaaaatcttcttcccacaagccgcatcggaaaggcgacaagcacaaaaggatgaggaaagtggtctactacgagaccgacacttcatcaacatcgacctccgactccgatgcgccctccgtcacttctaagcgccaagagcgcaagaagtatagggacgaggactatgatgaggatgaggtggcccaaatcgagcacttcaactctcaagcaacaacaatactcctcgcctctctaagtagagaggagtataacaaagtacaagggttgaagagcgccaaggagatttgggatgtgctcaaaaccgcgcacgagggagacgagctcaccaagatcaccaagcgggaaacgatcgagggggagctcggtcggttccggcttcgcaaaggggaggagccgcaacacatgtacaaccggctcaagaccttggtgaatcaagtgcgcaacctcgggagcgtaaaatgggatgaccacgagatggttaaggttattctaagatctcttattttccttaaccctactcaagttcaattaatccgtggtaatcctagatatactaaaatgacccccgaggaagttatcgggaattttgtgagttttgagtgcatgatcgaaggctcaagaaagatcaacgagcttgatgatgccaccacatccgaagctcaacccgttgcattcaaggcaacggaggagaagaaggaggagtctacaccaagtcgacaaccaatagacgcctccaaactcgacaatgaggaaatggcgctcgtcatcaagagcttccgccaaatcctcaagcaaaggagggggaaggattacaaatcccgctccaagaaggtctgctacaagtgtggtaagcccggtcactttattgctaaatgtccattatcaagtgatagtgacaggggcgacgacaagaaggggagaagaaaggagaagaaaaggtactacaagaagaagggcggcgatgcccatgtttgtcgggagtgggactccgatgaaagctctagcgactcctccgacgacgaggacgccgccaacatcgccgtcaccaagggactcctcttccccaacgtcggccacaagtgcctcatggcaaaggacggcaaaaagaagaaggaaaaatctcaaacccaagagaccttaaaaggattcttgagacgggctcaaaatgagttcggcttaaggatcaagaaaattagaagcgacaacgggacggagttcaagaactctcaaatcgaaggcttccttgaggaggagggcatcaagcatgagttctcctctccctacacgcctcaacaaaatggtgtagtggagaggaagaatcgaactcttttggacatggcaaggaccatgcttgatgagtacaagacttcgaaccggttttgggccgaagcagtcaacaccgcctgctacgccatcaaccgggtagaggaagctctccaagattcggattgggtggtggcgatgcaagaggagctcaacaacttcactagaaatgagagccgaggtgaccgccgtcactccaccgctccactggccaatctgacagaaggacagcgccgcctgcgccactccgactgcagtgccactcgacagagtgagtctgacaggcaattaggccttgccaaaggcgccacggcgaactccgctccgcccgaccccagggctcggactcgggctaagacccggaagacggcgaactccgctccgcccgaccccagggctcggactcgggctaagacccggaagacggcgaactccgctccgcccgaccccagggctcggactcgggctaagacccggaagacggcgaactccgctccgcccgaccccagggctcggactcgggctaagacccggaagacggcgaactccgctccgcccgaccccagggctcggactcgggctaagacccggaagacggcgaactccgctccgcccgaccccagggctcggactcgggctaagacccggaagacggcgaactccgctccgcccgaccccagggctcggactcgggctaagacccggaagacgacgaaactccgcctcgcccgaccccagggctcggactccgccctggcctcggccggacgacttccgcctcgcccgaccccctggctcgggctcggccacggcaactga

SEQ ID NO: 129368 - DNA, 1578 bp, Zea mays
  Clone ID: MRT4577_49458C.1
atgggttacaactgtcttttcatagatacaggtgttactgtctttagaagaagtgatgattcaatagcatttaagggagtgttagagggtcagctatacttattagattttgatagagctgaactcgacacttgcttaattgctaagactaacatgggctggctctggcatcgccgactagcacatgttggaatgaagaatcttcacaagcttctaaagggagaacacattttgggactaacaaatgttcattttgagaaagacaggatttgtagcgcatgtcagtcagggaagcaagttggtgttcatcatccacacaagaacatcatgatgactgacaggccactcgagcttctacacatggacctattcggcctgatagcttacataagcatcggcaggagtaagtattgtctagttattgtggatgattattctcgcttcacttgggtgttcttcttgcaggaaaaatctcatacccaagagaccttaaagggattcttgaaacgggctcaaaacgagttcggcttaaggatcaagaaaataagaagcgacaacaggacggagttcaagaactctcaaatcgaaggcttccttgaggaggagggcatcaagcatgagttctcttctccctacacgccacaacaaaatggtgtagtggagaggaagaatagaactctattggacatggcaataaccatgcttgacgaatacaagacttcggatcggttttgggcggagacggtcaacaccgcttgctacgccatcaaccggttgtatctacaccgaatcctcaagaagacatcatatgaactcctaaccgatgatgaagagactccgtgcgtcgcgctaaggaacatgtccattggggatgtgtgtcctaaggaatccgaagagcctccaaatgcacaagatcaaccatcttcctccacacaagcatctccaccaactcaagatgaggatgaggcccaaaatgatgaaggagaagatcaagaagttgagccacctcaagagaagagcaatgatcaagggggagatgcccatgataaagatgagaaagatgaacaagttccaaggccgccacacccaagagtccaccaagcaatccaacgagatcaccccgtgaacaccatcctcggcgacattcaaaaggggccacacaggatagaggaagcacttcaagattcgtattgggtggtggcgatgcaagaggagctcaacaacttcactaggaacgagttgaagtacttcttgggatttcaagtgaagcaactccaagaaggcacctttatttgccaaacgaagtatattcaagacattctaaacaagtttgggatgaaggatgccaaacccatcaagacacccatgggaaccaatgggcatctcgacctcgacacgggaggtaaatccgtagatcaaaagaaagagcacatcggggacttgccagttcttgggaaggtctctggtgtcttaggcttcaaagaagcaaaattccgtaactctttctaccgccgaagccgagtatattgccgcaggccattattgcgcgcaattactttggatgaggcaaacccttag

SEQ ID NO: 129369 - DNA, 6822 bp, Zea mays
  Clone ID: MRT4577_49459C.1
atggcaaggaccatgcttgatgagtacaagacttcagaccgagtctttggtagcaaatgctttattcttgttaaaagaggtagaaaatctaaatttgctcctaaggctgtagaaggctttttacttggttatgactcaaacacatgggcatatagagtcttcaacaaatccactggattagttgaggtttcttgtgacattgtgtttgatgagactaatggctctcaagtagagcaagtagatcttgatgagctagatgatgaagaggctccatgtgtcgcgctaaggaacatgaccattggggatgtgtgccctaaggaatccaaagagcctccacaagcacaatatcaaccatcatcttcaaatcaagcatctccaccaactcaagatgaggatcaggctcaagacaatgaagaagaagatcaagaagatgagccacctcaagaggaggacaatgatcaagggggagatgacaataatcaagacaaggaagatgatcaagaagaacagggtcaaagacagccacacccaagagtccaccaagtgattcaaagagatcaccacatgaactccatcctcggcgatattcataagggggtaactactcgatctcgagtcgctcatttttgtgaacattactcttgtgtctcctctattgagccatacaaggtagaggatgcactaagagattcggattgggtgctggcaatgcaagaggagctcaacaacttcacaaggaatgagctttaccaaatggacgtgaaaagtgccttcctcaatggaccaatcaaggaagaggtctatgttgagcaacctcccggctttgaagatagtgagtaccctaatcatgtttataaactgtctaaggcgctttatgggctcaagcaagccccaagagcatggtatgaatgcctaagagatttccttatcactaatggcttcaaagtcggaaaggccgatcatacactctttactaagaccattgcaaatgatttgtttgtatgccaaatatatgttgatgatatcatatttgggtctactaacaaatctacatgtgaagagtttagtaggatcatgattcaaaaattcaagatgtctatgatgggggagttgaagtattttctaggatttcaagtcaagcaactccaagagggcaccttcatctgccaaacaaagtacatacaagacatacttaccaagtttggaatgaaggatgccaagcccatcaagacacccatgggaaccaatgggcatctcgacctcgacacgggaggtgctaaaggttcaacacaaaccaataaaaagatccaagttggggttcaaaataaaggagcaaaagaaaccgaagagaaccctggtctgccgcaccggactgtccggtgcaccactgggcagtgtccgttttcgcctattcaccccccctctaggcgacttttagtgtgctacaagtgtggtaagcccggtcattttattgctaaatgttctatgtctagtgatagtgacaggggcgacgacaagagggggaataagaaggagaagaagagatattacaagaagaagggcggcgatgcccacatgtgtcgggaatgggactccaacgagagctccaccgactcctcctctgacgaggatgccgccaacatcgtcgtcaacaagagcctcctcttccccaacgtcggccacaagtgcttcatggcaaaggacgacaagaggaagaaggtacaatctagaacctcacccaaatatactacatctagtgatgagggtagttctagtgatgatgaagatgatttgcttaccctttttgccaacattaacatgcaacaaaaggaaaagttaaatgaactgataggtgccattcatgagaaggatgaactcttggacaaccaagactcaattaaagcaaaaattaatgagcatgagaaagaaaataaaaaatttaaatttgctagaagcatgctctataatgggagatgcccaggcattaaggatggcattggtttccaacatggaagcaatgtcaaaattaatgcccctaaaagattgtctaactttgttaagggcaaagctccaatgatacagaataatgagggctatattttatatcctgctaattatcctgagcacaaaattaggagaattcatgctaggaaatctcatactatttcacatcatgcttttatgtataacaatgaggcttctagctctaggcaatcaacccatgttaaattgcctaaaaataaaactcctactgcatcaaatgagcctaacatttcatttaagacttttgatgcatcttatgatttaactaacaaatcaggcaaaatagttgccaaatatgttgggggcaaacacaagtggggtagaaaatctaaatttgctcctaaggctgtagaaggctttttacttggttatgactcaaacacaagggcatatagagtcttcaacaaatccactggattagttgaggtttcttgtgacattgtgtttgatgagactaatggctcccaagtggagcaagttgatcttgatgagctagatgatgaagaggctccatgcgtcgcgctaaggaacatgtccattggggatgtgtgtcctaagaaatccgaaggcctacacaagcacaagatcaaccgtcatcttccaagcaagcatctccaccaactcaagatgaggattaggctcaagacaatgaaaatgaagaccaagaggatgagccacctcaagaggaggacaatgatcaagggggagatgaagttaatcaagacaaggaagatgatcaagaaatacagggtcaaagatcaccacacccaagagtccatcaagcaattcaacgagatcaccccgtcaactccatccttgccatacaaggtggaagatgcactaagagattcagattgggtgttggcaatgcaagaggagctcaacaacttcacgaggaatgaggtatggcatttagttccacgtcctaaccaaaatgttgtaggtaccaagtgggtattccgcaacaagcaagacaagcatggtgtggtgacaaggaacaaagcccgacttgtggccaaaggatattcacaagtcgaaggtttggactttggtgaaacctatgcacccgtagctaggcttgagtcaattcgtatattacttgcctatgctacttaccatggctttaagctttatcaaatggatgtgaaaagtgccttcctcaatggaccaatcaaggaagaggtctatgttgagcaacctctcggctttgaaaatagtgagaaccctaaccatgtttataaactctcaaaggcgcttaatgggctcaagcaagccccaagagcatggatcatgattcaaaaattcgagatgtctatgatgggggagttgaagtattttctaggatttcaagtgaagcaaatccaagatggcaccttcatcagccaaacaaaatacattcaagacatacttaacaagtttggaatgaaggatgccaaacccatcaagactcccatgcgaacaaaagggcatctcgacctcgacacgggtgatggacatcttagcatgtaccaccataagtttagaaactaccacattcctgctggattgatgaagatcaagaagaaggagtttctgtcattaaaacaaggcaacatgtctgtcagcgagtaccgtgacaaattcatccagctgtcaagatatgttcctgatgaggtggcagatgataaaaggaagcaagagcacttcacagaaggactcaataggcccctacagtatgcactggttgctcacacatttccatcatttcagaagctgctggataaggctcttgctattgaacacaagcgtgttcaattgggagatttgaagaggaaggccattacccaggggcagggctacaccaactcatctaggaggaggaccacgcccagctcagtagactccacaggggtctccacgacacctcccactcgtcaagctacccccactggcaccccgacgaggcctacaggacagaagataggccccacatgcttcaagtgcagtcaggttgggcattatgctaatgcttgtccggcggggaattctagtgcatcagctcagaacaagcaacagactcctggcaagggattcagcattgccagggttaatcaagtcagtgctgaggccactgctgacggtgcagacatcactattgatagggaagtcgaatttgttattgatctcttacctggtactgctcccatttcaaaaaggccatataggatgtcagtggaagagttaaaagaactgaagaaacaattaacggagttacaggaagcagggtacattcgtccgagttcctcaccttggggagcaccggtactgtttgtacagaagaaggatggttcacaacggatgtgtgtggactatagatcacttaataatgttactgtaaagaacaagtatctgttaccccgcattgaggatttatttgatcaaatgagaggtgctagggtattcttgaagattgatctccgatcgggttaccatcaaatgaagattaggccatcagatattcccaagacgactttctcgacccgatatggtttatatgagttcacgtttatgtcatttagactaactaatgcaccggcttatttcatgaatctgatgaataaggtgtttatggagtatctggacagatttgtcatagtattcatcgacgatattcttatttattccaagagtgatagcgatcatgaggaacatctgagattggtgctacagaagctacgaaataaccaactctacgccaagtacagtaaatgtgagttctggattgatgaggtgccattccttggacatatcgtttctaatggtgggatatcagtggatcctgctaaagtcagggagatagtggcgtggagcatacccagtatagttattgaagtccggagtttcttgggacttgcaggctattatcggcgatttattgaagggttctctaagattgctaagcctatgacctcacttctggagaagggaagagagtttaagtgggactcgaagtgccaagataaactggcagtcgtagtgcatgcactcaagatatggagacactatattatgggaaccaagtgccaagtgtacacagatcataagagtttgaagtacatattcacccagaaggatctcaaccttaggcaacgccgatggttggagctcattaaggactatgacttggagattcattatcatccgagcaaggcgaatctggttgcggatgccttgagtcggaaggaacacgttcattccgctattgttgcccagctacccgatgagattgtagaggatttcaggagactcaacctgggaattgttgcgcacactgaaggagtcaccatcgaattggaacctaccttggagcatgaaattcataggggtcaggttggtgatgctaaaattcaagagattaaagatctgattactgaaggtagaggtccagaattcacggaggatgagcaaggcactgtatggttcaaggagcggatatgtgttccggagattgatagccttcgtgagactatattgaaggaagcccatgattctgattactctatccaccctggtagcactaagatgtatcaggatttgaagcaaaagtactggtggtatgggctaaaaagagatgttgctgcagacgtggctaagtgtgatgtgtgtcaaagagtcaaggccgaacatcaaagaccagctggactattgcacccgcttaagatacccgagtggaaatgggaagaaattggcatggatttcattgttggactaccctgcactcctgcagggtatgactctatttgggtaattgtggatagactgaaaaaagtggctcacttcataccagtgaggactaattacacgggagccaagctagcagaattgtatatgactcggatagtttgtctacatggggtgcctaagaagatcgtgtcagaccgagggtcacagtttacttctcagttttggaagaagttgcatgagagcttggttacacagttgaattttagttcggcctaccatcctcaaactaatggacagaccgagaggactaaccaagtgctggaggatatgttaagagcttgtgctcttaaacatggtggtagttgggataagagcttacaatatacagagttctcttataataatagttaccaggctagtctgaagatgtcaccatttgaggctttatatgacaggaagtgcatgactcctctatattgggatcagactggagaaagacagttctttgggcctgaacttatacaagagacagaagaacaagtgcgaatgataaaagagaatttgagaattgcacaatcaagacagaagagctattctgatacccggagaagactactgaagtttaaggagggtgatcacgtgtatctgaaggtgtcaccgatccggggtatgaggagatttaaagttaaagggaagttgtcccctcgcttcattggacctttcttgatcttaaagcgagtgggagtagttgcatatcaactagaactacccgatcacctggcagatgtacatgatgtcttccatgtatctcagctgaagaaatgtctcagggtacctgaaaagcagctaccactggaggatcttagtgttcaggatgatctgacatatgctgagtatcctatcaagattcttgatacattgactcgtgtcacaaggagcaaagtgattaaaatgtgcaaagtacaatggagtcaccatggagaagatgaggctacttgggaaagagaagaagagcttcgcatagactttccccacctctttcctagttctacctaa

SEQ ID NO: 129370 - DNA, 194 bp, Zea mays
  Clone ID: MRT4577_4945C.1
tgctaggacaggagcgtctagcactccttcgagagtctcaagtagcggatggacgcgaggttctttgtggctacctatgtggctaccaaaggcctcgtgacctcgtgctatgcatctccagattatagggacaacaaccgtctcactacacacagtgatatgtggagctttggagtactcctatatgagatcct

SEQ ID NO: 129371 - DNA, 3219 bp, Zea mays
  Clone ID: MRT4577_49461C.1
ctaagggtttgcctcatccaaagtagttgcgcgcaacaatggcctgcggcaatgtactcggcctcggcggtagaaagagctacgaaattttgcttctttgaagcccaagacaccaaggatcttcccaagaactgacaagtcctcgatgtgctctttcttttgatctacggatttacctcccgtgtcgaggtcgagatgcccattggttcccatgggtgtcttgatgggcttggcatccttcattccaaacttgcttagaatgtcttgagtatactttgtttggctaatgaaggtgcctcttggagttgcttcacttgaaatcccaagaagtacttcaactcccccatcatcgacatctcgaatttttgtgtcatgatcaaacaaatcattgttaagagttttagtgaatagagtaggatcggcttttccgactttgaagccattagcaataaggaaatctcttaggcattcataccatgctcttgggtcttgcttgagcccataaagcgccttagagagtttataaacatggttaggatacttactatcttcaaagccgggaggttgctcaacatagacttcttctttgattggtccgttgaggaaggcactctttacgtccatttgataaagcttgaagccatggtaagtagcataagtcccgccgatgcttatgtaagctatcaagccgaataggtccatgtgtaggagctccagtggcctgtcagtcgtcatgatgttcttgtgtggatgatgagcaccaacttgcttccctgcttggcatgcgctacaaatcctgtctttctcaaaatgaacatttgttaatcctaaaatgtgttctccctttagaagtttatgaaggttcttcatcccaacatgggctagtcggcggtgccagagccaacccatgttagtcttagcaattaagcaagtgtcgagttcagctctatcaaaatctaagtatagctgaccctctaacactcccttaaatgctattgaatcatcacttcttctaaagacagtgacacctttgaccaaaccttggtttccatccccgaatgtgatcgctctttggggatcttggtttttctcataggaggagaacatctttttctcccctgtcatgtggtttgtgcacccgctgtcgatgatccaacttgagcccccggatgcataaaccatatgatcacgaatagcatcaatatcaacatctctacatctggtgcaaataggaacatgctcaacggtagatgtagagggtttgaaggattttaattctacaaccttagcatgtaatatatcattttcacttctaaggttagaaatagtaacattgcaaacatcaaaatctttaaccttagcaagcaatttttcattctcaatcctaaggctatcaagagatatatttaattcttcaatcttagcaagcaaatcaacattttcatctctaagattgggaattgaaacatcacaagtattagaatcaactttagcaattagtttatcattttcatttctaaggttggtaatagtgtcatggcaagtgcttagctcactagataatttttcacatttttctacttctagagcgtaagcatttttaaccttaacatgcttcttgttttccttaattaggaagtcctcttgagagtccaagagatcatccttctcatgaatagcactaattaattcatttaatttttccttttgttgcatgttgaggttggcaaaaagggtgcgcaaattatcctccttatcactagcattatcctcatcactagaggtttcatatttagtagaggatcttgattttaccttcttctttttgtcgtcctttgccatgaggcacttgtggccgacgttggggaagagaagtcccttggtgatggcgatgttggcggcgtcctcgtcggaggaggagtcggtggagctctcgtcggattcccactcgcggcacacatgggcattgccgcccttcttcttgtggtacctcttcttttcctttcttctccccttcttgtcgtcgcccctgtcactatcactagacaaaggacatttagcgataaaatgaccgggcttaccacatttgtagcaaaccttcttggagcgggacttgtagtctttccccctcctttgcttgaggatttggcgaaagctcttgatgatgagcgccatttcctcgttgtcgagcttggaggcgtcgatggggaccctacttggtgtagagtcttctttcttctcctctgttaccttgaagtcgacgggttgcacctcgggtgttgaggtggcgccttgctcgatgatcttcttggagcctttgatcatcaattcaaagctcacaaattttcctataacttcctcgggagacattagcttatatctaggatcaccacgaattaattgtacttgagtaggattaagaaatacaagtgatcttagaataaccttgaccatttcatggtcatcccacttggagctcccgaggttgagcacttggttcaccaaggtttttagccggttgtacatggcttgcagttcttctccttggttgagcataaagcgaccgagctccccctcgatcgtttcccgcttggtgattttggtcacctcatctccctcgtgcgcggtcttgagtacgtcccaaatctctttggcgctcttcaacccttgcaccttattatactcctctcgacttagagaggtgaggagtatagtagttgcttgagagtagaagtgctcgatttgggccacctcgtcctcatcataatcttcatcccctacggatggtacctgtactccaaactcaacaacatcccatatgcatttgtggagtgaggttaggtgatatctcatcatatcactccacctagaataatcttcaccgtcaaacgtcggtggtttgcctaatgggatcgaaagtaatggagtatgtctaggaatgcaagggtagcgtagggggatcttactatacttcttgcgctcttggcgcttagaagtgatggacgcggcgtcggatcccaatgtagagggcgatgaagagtcggtctcgtagtagaccactttcttcattttcctcttcttttcgccactcttgtgcgtcctaatgcgtgaaggggatccctccttctttttgttgccggactcctttgatggaaccttcccatggcttgtggcgggtttctcgccggtcaccatctccttggcgtgatctcccgacat

SEQ ID NO: 129372 - DNA, 1236 bp, Zea mays
  Clone ID: MRT4577_49462C.1
atggcaaggaccatgcttgatgagtacaagacatcggaccgattctgggctgaggcgattaacaccgcctactactccatcaaccggttgtatcttcatcgaatcctcaagaagacatcgtatgaactcctcactgcatctccaccaactcaagacgaggatcaggctcaagatgatgaagatgaagatcaagaggatgagccacctcaagaggaggacattgatcgagggggagatgaagataatgaagacaaggaagatgatcaggaaattaaggatcaaaggccgccacacccaagagtccaccaagcaattcaacgagatcaccctgtcaactccatccttggtgacattaataaggggccatacaggatagaggatgcattaagagatccggattgggtggtggcaatgcaagaggagctcaacaatttcacaaggaacgagcaagatgagcatggtgtgctgacaaggaacaaagcccgacttgtggctaaaggttattcacaagtcgaaggtttggactttgatgaaacttatgcacccgtagctaggcttaagtcaattcgaatattatttgcctatgctacttatcatggctttaagctttaccaaatggatgtgaaaagtgccttcctaaatggacctatcaaggaagaagtttatgttgagcaaccttccggctttgaagatagtgagtaccctaaccatgtctataagctctcaaaggcgctttatgggcacaagcaagccccaagaacatggtttcaggaaaatcctaaggaagttcaccttagggtcgtgaaaagaatcatgagatatttagtttatactcctaagtttgggctttggtaccccaagggatctacctttgatctaattgggtattccgatgatgattatgctggatgtaaaattgatagaaagagcacattagggacttgtcagtttctggggagatccctggtgtcatgggcttcaaagaaacaaaactcagtagctctttccaccgccgaagccgagtacattgtcgcagaccattgttgtgcgcaattactttggatgaggcaaacccttagggactatggctacaaattgagcaaagtccctctcctatgtgacaatgagagtgcaatccgcatggcggataatcccattgaacacaatcacactaagcacatagacatccggtatcactttttgagagatcaccaacaaaaggggatatcgaaatag

SEQ ID NO: 129373 - DNA, 381 bp, Zea mays
  Clone ID: MRT4577_49463C.1
ggccgcttttttttttttttttaatcggtgagcggacgagtgcacaaacctcataccgctaagacaacccaactacgtgtcacacgttattatgacacgctccccagacgccacatgatttacaagacacgcatggcaagctgcgggtgcactacacacacactctacattgtaacttaataaaactagtagttgctgcggcgagggcgttcacagcacacacagcattcctaccttgtcagaacggacttaagggagccgccaaacaatgcctaagcctattaagcactgatctataaaagtcatccttgtacacgtgctggcttcattcatcatctgacaagcctaccacatctatctccgaaccaccatttgtagtac

SEQ ID NO: 129374 - DNA, 1033 bp, Zea mays
  Clone ID: MRT4577_49464C.1
ttgggtacctcgaggccggccgggagtctgttgtgattcatctagccatctttcatatactcatctagtcatctgaaattgattcatctgagtaggaaggagccacaccatcgagcgtagaaggtggagttgacgtcgaggaagagcgatacaagagctcggatgatgggcacaacaacagcttgagcatggaggttgagcagcgtcgagagttggggtaggagcgtcgtcatctgcgacatcgttggagaagacgtcgtctgccggagaggagacggtagtcgttgcttgtccgtcggggaggagacggtagtcgctgctcgtcgatggaattaggatccatatgaacaagcacaaattgataataatggagtaaatctcagaagtattgagatgcacggtacccaaatccatgcatcaagaaatgagcaaaaataacttcattggtgctcgacataggatatgtctacttcgcggtgatttttcactggtttatcttcttttcttgaagcaatcctgccacaatcgaagctctatggtccttggattcaatggtggaggcctcgtactcatgcggatgagacgtggtgttgggagccatgatttggcagaagcatagatttggcagaaacgtttactatccttgctagactcttcggccagatcggctaaaatgtcttcaatgacttcgccaaccgcagcagagtcctcaaccacaccaaccaaagcaccgctcgcaacgactgggatttctcctgccctcccaatagcatccgaagatgccacaatggccaactcgatactcgatttatcccctaccattgctaatggaatgaacctggcaaagcatgaagattatgagaaagcagaaggctgaaaggagtttcggaggtagagaaagcaggagcagcaggtcagcaacaacagcaaatattgtacctcgttgtcaggtcatcatctgacgcgagattcgagcaatcacattcattttttatactatgagctctaggaatgtgtttttcggacctaaaaa

SEQ ID NO: 129375 - DNA, 525 bp, Zea mays
  Clone ID: MRT4577_49465C.1
gcgtgcgtgtaccgggctgctattacacggtcgacctagtcgttcgtttactagcaactatacatattgatgtacactagctacatcttggcgccaatggcatacaagattgtaggactttcttgtcctagttgctcttttagcaagcgttgctaccgggacttcattggaagtgctcacaacaatgggcgtgtcgtgctggtgacagaacgaagagtattttgaatgcgcaactatacaagcctacgggctacgaggagctctcgtggcaagcattgtgacgtggaatgagcattagaccgtgcaacaaccatgaaggcctattggaacaaccatacttaatgaatatatgtctgcaaagaatggcagcgcagcaacgtacaacaacaggtgcttccaacattgaatcaagtatgtgcagagaaccttgttgcttacctacagcaacaacaatttcttccattcaatcaactagctggggtgaaccctgctgcttacttgcaggcacaacagctactatcattg

SEQ ID NO: 129376 - DNA, 1277 bp, Zea mays
  Clone ID: MRT4577_49466C.1
ctcgaggccggccggggagaggcatgtttcactcgcttgaccctcctcctcttcactcgcttctcccagaagtcacgcaccaaacaccaccaccaaagaaggcgagaacgctccccttcccctcacaggctccaggaccgtctcctcgcctgctcatctgccgctgctccccttctctgggctcggagaatcggagagaagcgcgcgcggccatggcgtccagcgcctctcggttcatcaagtgcgtcacggtcggcgacggtgccgtgggcaagacatgtatgctcatctgctacaccagcaacaagttccctactgactacatacctacggtgttcgacaatttcagtgcaaatgtagttgtggatggcaccactgtgaatttgggcctttgggataccgctgggcaggaagattacaaccgcctgaggcctctaagctaccgaggtgcagatgttttcgtgcttgcattctcacttgtgagccgagctagctatgagaatatcatgaagaagtggataccagagcttcaacattatgcacctggggtgcccgttgttttggcaggcacaaaattggatcttcgtgaagacaagcactacttgatggaccatcctggattggtgcctgttaccactgcacagggggaggaacttcgtagacaaattggtgctatgtattacattgaatgcagctcaaagacacagcagaatgtcaaagctgtgttcgatgctgccatcaaggtagtaattcagcctccaactaaaataagagaaaagaagaagaaaaaatcacgcaaaggatgttctatgatgaacatcttcggtggaagaaaaatgctatgcttcaagtcctgaatggttcaagggggtcttacatggactgataccacgagtgttaccccaagttcgcgaagcttgaaatcttgatgtgcttgttgcgcatgtgtatatttgcacctttggttattaatgactagaggtaggtaattgaaactagtctgcttaagcgttctgcactgctggtgtggttagctctatgagttaggcagttcgacagaggccaaaccgacagtgagattttgctctttcatggcaatgtcacagctttttcgtgaatctgagctcatcatactgtctgttagtttatcccccacgattccatgttagaatcgatccatagcaacattgtgttgaatggaccttttgcatttgctcttgagcctgagcatataattattccagtttttgtgtactttaaaaaaaaaaaaagcggcc

SEQ ID NO: 129377 - DNA, 1170 bp, Zea mays
  unsure (1)..(1170): unsure at all n locations
  Clone ID: MRT4577_49467C.1
acgcggacgcgtgggggacgggagagcgacctcagcagacaagagccagacgagactcagagagcgagcaccgtgacctctctgtttctctctcttcccttctcgtcttctgcaagaagccacaacaaatgtgaccgtctctgtttctctcatccccttcatcactctgctggtctccctcttccacctctggtcttggccatggcctccagcgcctcccggttcatcaagtgcgtcacagtgggggacggcgccgtgggaaagacctgcatgctcatctgctacaccagcaacaagttccccactgattacatacccactgtcttcgataacttcagtgcaaacgtggtagtcgacggtaccacggtgaatttgggcctttgggatactgcagggcaggaagattacaacagactgaggccactgagctaccgcggagcagatgtgttcgtgctcgccttctcgcttgtcagccgagctagctacgagaatgttatgaagaagtggctaccccacgcgtcgcattatgcaccgggtgcctgttaccactgcacagggggagaattgtcgtagacaaattggtgctatgtattacattgaatgcagttcaaagacacagcagaatgtcaaggctgtgttcgatgctgccatcaaggtagtaatccagcctccaactaaaataagagaaaagaagaagaaaaaatcaccccacgcgtccgctatgatgaacatcttcggtggaagaaaaatgctatgcttcaagtcctgaatggttcaagggggtcttacatggactgataccacgagtgtgaccccaagtccgcgaagcttggaatcttgatgtgctcgttgcgcatgtgtatatttgcacctttggttattaatgactagaggtaggtaattgaaactagtctgcttaagcgttctgcactgctggtgtggttagctctatgagttaggcagttcgacagaggccaaaccgacagtgagattttgttctttcatggcaatgtcacagctttttcgtgaatctgagctcatcatactgtctgttagtttatcccccacgattccatgttagaatcgatccatagcaacattgtgttgaatggaccttttgcattngtttttgagcctgagcatataattattccagttttggtgtacttt

SEQ ID NO: 129378 - DNA, 1576 bp, Zea mays
  Clone ID: MRT4577_49468C.1
gggtacctcgagccggccggggcaagttagtactccgttttgcctctcaggggcccatcctagatagaggaggggttccttgaccgtaccaatagcttgaagaaaccatgcctatacaaaacaccaacaggagaactggggcctggggtgaggagggcgcttctctaggcacggcagtgccagtgtgccactggtgaggtgagacttgggagttgagaggcatgtgaccctcttcactcgcttgaccctcctcttcactcgcttctcccagaagtcacgcaccaaacaccaccaccaaagaaggcgagaacgtactccgtccctcccctcccctcccctccccttcccctcgaggctccaggaccgtctcctcgcctgctcatccgccgctgctccccttctctgggctcggagaaccggagagaagcgcgcgcggccatggcgtccagcgcctctcggttcatcaagtgcgtcacggtcggcgacggtgccgtgggcaagacatgtatgctcatctgctacaccagcaacaagttccccactgactacatacctacggtgttcgacaatttcagtgcaaatgtagttgtggatggcaccactgtgaatttgggcctttgggataccgctgggcaggaagattacaaccgcctgaggcctctaagctaccgaggtgcagatgttttcgtgcttgcattctcacttgtgagccgagctagctatgagaatatcatgaagaagtggataccagagcttcaacattatgcacctggggtgcccgttgttttggcaggcacaaaattggatcttcgtgaagacaagcactacttgatggaccatcctggattggtgcctgttaccactgcacagggggaggaacttcgtagacaaattggtgctatgtattacattgaatgcagctcaaagacacagcagaatgtcaaagctgtgttcgatgctgccatcaaggtagtaatccagcctccaactaaaataagagaaaagaagaagaaaaaatcacgcaaaggatgttctatgatgaacatcttcggtggaagaaaaatgctatgcttcaagtcctgaatggttcaagggggtcttacatggactgataccacgagtgtgaccccaagttcgcgaagcttgaaatcttgatgtgctcgttgcgcatgtcagcatgtgtatatttgcacctttggttattaatgactagaggtaggtaattgaaactagtctgcttaagccttctgcactgctggtgtggttagctctatgagttaggcagttcgacagaggccaaaccgacagtgagattttgttctttcatggcaatgtcacagcttttttcgtgaatctgagctcatcatactgtctgttagtttatcccccacgattccatgttagaatcgatccatagcaacattgtgttgaatggaccttttgcatttgctcttgagcctgagcatataattattccagtttttgtgtaaaaaaaaaaaaaaaaaaaaaaaaaaaaaaaaaaaaaaaaaaaaaaaaaaaaaaaaaaaaaaaaaaaaaaaaaaaaaaaaaaaaaaaa

SEQ ID NO: 129379 - DNA, 1505 bp, Zea mays
  Clone ID: MRT4577_49469C.1
cctcgaggccggccggggaagtttcactccgttttgcctctcaggggcccatcctagatagaggaggggttccttgaccgtaccaatagcttgaagaaaccatgcctatacaaaacaccaacaggagaactggggcctggggtgaggagggcgcttctctaggcacggcagtgccagtgtgccactggtgaggtgagacttgggagttgagaggcatgtgaccctcttcactcgcttgaccctcctcttcactcgcttctcccagaagtcacgcaccaaacaccaccaccaaagaaggcgagaacgtactccgtccctcccctcccctcccctccccttcccctccaggctccaggaccgtctcctcgcctgctcatctaccgctgctccccttctctgggctcggagaatcggagagaagcgcgcgcggccatggcgtccagcgcctctcggttcatcaagtgcgtcacggtcggcgacggtgccgtgggcaagacatgtatgctcatctgctacaccagcaacaagttccccactgactacatacctacggtgttcgacaatttcagtgcaaatgtagttgtggatggcaccactgtgaatttgggcctttgggataccgctgggcaggaagattacaaccgcctgaggcctctaagctaccgaggtgcagatgttttcgtgcttgcattctcacttgtgagccgagctagctatgagaatatcatgaagaagtggataccagagcttcaacattatgcacctggggtgcccgttgttttggcaggcacaaaattggatcttcgtgaagacaagcactacttgatggaccatcctggattggtgcctgttaccactgcacagggggaggaacttcgtagacaaattggtgctatgtattacattgaatgcagttcaaagacacagcagaatgtcaaagctgtgttcgatgctgccatcaaggtagtaatccagcctccaactaaaataagagaaaagaagaagaaaaaatcacgcaaaggatgttctatgatgaacatcttcggtggaagaaaaatgatatgcttcaagtcctgaatggttcaagggggtcttacatggactgataccacgagtgtgaccccgagtttgcgaagcttgaaatcttgatgtgctcgttgcgcatgtgtatatttgcacctttggttattaatgactagaggtaggtaattgaaactagtctgcttaagcgttctgcactgctggtgtggttagctctatgagttaggcagttcgacagaggccaaaccgacagtgagattttgttctttcatggaaatgtgccaatgtcacagctttttcgtgaatctgagctcatcatactgtctgttagtttatcccccacgattccatgttagaatcgatccatagcaacattgtgttgaatggaccttttgcatttgctcttgagcctgagcatataattattccagtttttgtataaaaaaaaaaaaaaaaaagcggcc

SEQ ID NO: 129380 - DNA, 193 bp, Zea mays
  unsure (1)..(193): unsure at all n locations
  Clone ID: MRT4577_4946C.1
ctcaactggtaactcttatctaccaatgaaatctcatgagcaatgcagtcccgcaaaattaaatgggtgttatctaagaactggtggtacacaagnaaaacccttaatttggatgcgtcagaccattcccataaaggggtgtgtaagctcataccgagaactagctaattaaacttaactacctaatcgtggt

SEQ ID NO: 129381 - DNA, 260 bp, Zea mays
  Clone ID: MRT4577_49470C.1
gcactacgttatattgtctaactacgtccttgctctttatgatggcaacaactgaactgagtgctggtctgatgcttctattgccatacccaatcatgtactaacttatgctaacaattattataccatgaatcacttgtttgaaagagacttcatcacgtaatcacatcataacgtaatttaactttaccaaaatatttatgacaatcatcctaaacttagaccctagacataatatccaacttatgcacaatcatgct

SEQ ID NO: 129382 - DNA, 289 bp, Zea mays
  Clone ID: MRT4577_49471C.1
catggaatattgatactgaacgacacctgtggaaacagagaatctggtacctgcacacagataccatatgataagcaaggtgcattacttggaagaaaaaataatgacttaactgaggtcgaactgagtccatgcttatagaaaggagtaccttcacatggtcattgttatgttaacggtgataatggcgcatatggtgtaggctcacttgaaaatagctctaacacttgaaatctgatctgatggacatgcttatttcaactctgatgattcacattcttatattcac

SEQ ID NO: 129383 - DNA, 337 bp, Zea mays
  Clone ID: MRT4577_49472C.1
gcccggccggaacccggggacccacgcgtcggcgtcactgacggctattgatagttccgactgggagcagatcatcgcatcgcgatgcacatcgcaagagaacttttctagtgcaagacttttagatatgcgaatgagaaagcgatctttgaagagtagacgaatgggatggccaagtcactctaagattcaaatgacaggaaggcggtgcaagagatgtcagaatgtcagctcaaagacttttttgaaatcaattgggggagcaatttatccttgaggaacagaggaagcaccatctcagctatccacgtgtgttggcaagttggacattacagat

SEQ ID NO: 129384 - DNA, 2189 bp, Zea mays
  Clone ID: MRT4577_49473C.1
cggacgcgtgggcgcgttcgcctagtctccttccttttcctctcgctctccgcctccatcagctcgagccgcttccttccacccaccacgcaccacctgacctcccttccctcatcggctcctcctcgttcccactaggcaggaacgccgcgcgccgagccgagctagcggccggaatgcccgcgcagaagcgcccgctcccgtcgtctgcctcgcccggctccgacgccgacgtcgaggaagctcctggcgccgacgcggacggctgcggcggggccgaccaacggtcgccgaaggtgacgctgaacggagtggaggagcgggacggcgggccgctgcaggccaaggaccagcgccacgattccgacgctgacgacgaggaggaaggagaccgcgaaggcggcggcggcggggacgggagcgggagcggaggcgacgacgactgcgacagccagtcgtcgcagagtgacggcgtgatggacgagtttacgcttgtgaaattagtggatgttcggaaggaagtgcaatgccctatatgcctaggaattattcggaagacaaggacagtcatggagtgtttgcaccggttttgcagggactgcatagataaatcgatgcggcttggaaataacgaatgcccagcgtgccgcactcattgtgctagtagacgttccttgagggatgatcctaactacgatgctttgattctagctttatatccagatattgataagtatgaggaagaggaacttgcattcagtgaagaggaaaggacccgtaacaaaaggattcaagaatccattgctgagacatttcggaggcaaacagaagcacttgtgaagaagcgctccactgtaaaagcaacagatgcagcttctacaaggaagactcgacggaatatgcgaccaaggaggagaggacgaattagttctcctgatattgccccaactgattttgacgatgatgatagagaagagaacggtgatgatggaagcaaggagtcgtcttctgttgatgatcactccccagatgtaaggccaaaaagatctcggaggtggcccatgccacgccgttcccctgctaaggccattggcaataccgacaatagcattgaggataatgacgactcaggaggtgctagggactttatgactgcttctccgctgcggggagagatgcttgcatgggggaaaaatggcacccgcagccaaacccggcatggcaactccagtggctccagcggaaggatgggcaggagtggccgtgttgccaagttggtagatcagttccgtaatgctgatgacttcgataatgagttgaacctgtatcttgtcctgcttccacttgatggtcaaagtgtgcctaaactggaaaagccctacctcagttgcctgccaacactatctgttcggcatctctgccagtttgttgctctccagttgtctcggcaacccaaagaagtcgagatatatatcaggaaaagcaaggatgcatgcttgtcagccaattacacctgtaaatacgagacaaagccagaacagcctaatggtttagagagactgtgggaagagaagtctctttcggatctctacccttccctcgccacccgtcaaggagatctggaattgttatactctctgaaagcacaaggacaggggtagatcagatattcactatcaactcgaccagtcgcctcaacgccactgtctgcaaggaccttcaactggtggaagcttgtacataaggctttcaatatagaaaaagatctgaaagtagcttacttgttttaaatttgctctgatatcttgtgaggtatatggtatacccaggttcattagtaaaaatgtgtggagttgagcagtagcaaaccaaccatctgaaacaggctgagcaaagcttgtctatttctgcagccagtattaattgtgtcccatttgaactgatgcaagtactgaggacctctgttccaggatgatccgtggcttgctgtcgtcgccttgtgtgacgcgttcgcgttatccatgttgtcacgccacgtgtccgcgaattagaatgtccagttgttaaccagtaggaaatggtaaacatctgcagctttgtagggacagtattgaaatttttgttgtttatacaataaagctcacgggtcgttgctgaaaaaaaaaaaaaaaaaaaaaaaaaaaaaaaaa

SEQ ID NO: 129385 - DNA, 414 bp, Zea mays
  Clone ID: MRT4577_49474C.1
ggtatgtagagaatttggttgtaagtgcagtctataggatttagaatctgaaagtaaagtgtggatttctcttaaaaaaaaaaaaaaaaaaaaaaaaaaaaaaaaaaaaaaaaaaaaaaaaaaaaaaaaaaaaaaaaaaaaaaaaaaaaaattggcggtttttttcccttcttccgccctgttttcctctgttttttttcccggaaacaggaggaacccggcttgccttgggggcgaacccgtttttttttcccaagagggaatggaatctggacccaggcagggggggagcggccccaaaacaatgtaaggtgggggggtcttctcaccccatgtattactttttgtgacctcagggggcgcgtttaaaacccttccagaggggggggccggcggcctccccttttttttccc

SEQ ID NO: 129386 - DNA, 654 bp, Zea mays
  unsure (1)..(654): unsure at all n locations
  Clone ID: MRT4577_49475C.1
cgggtttacccttgggtccttggaaaaatggagttgccaatctagtaataataaggttaagctctagctagctgctggaatcatcttttgcgacaatgacatttgtgctgccttacatgacattttggctttcagattacacggacaatgcgaatcccgctggcagatgttggagagataattggcgtaaggggagaaaacgttgaattcattcgttctgttagtggagcagttgtcgttcttgagaaaatcggaaatggtcaagaggttcgagtcatgattgaaggcactccttcacaagttcaaactgcacatcgacttgtacaggaggctcttcaggtgacagagtgctaccgtccgggagcagttactacagcgctgaggggcgcgacggtgacccaagtctggtaaagcccccacatgctgacccaaggtttctgcaccccatctcagcaatcgaagcaagttgggactacctgccatggcagtaccaacaacaaacgccccgtgacgaccatcggtggaaccctactctctgtgattacagaggctacttgccataggaagcgcactcagctaccaagctaccttntgcagccaccgttacaggatcgtgtggacgattgatgtggaatgcaacatgtagtagtagct

SEQ ID NO: 129387 - DNA, 397 bp, Zea mays
  Clone ID: MRT4577_49476C.1
ctcgttttacaatggctttggaattgtctacttcaatggacgggggcgcgcggaattgacagactgatttggctgaagggaaaatcgagtacaaggacactcgtcttgctggcgctgaatgggctgcctttaaaccacaaactcccaacggacaaatgccagcactgaaggtcggagacaaagtctatgctaaaagccatgctattgaacgattcttggcacgcaaggcgcacctttaccctgccgacgggactgctcagctgctggtggaccagtatgttgaggacgccattgatttaggccaagaatatgccaaggctgcttgggctcctgcgaatgagaaggaggcaaaaacaaaggagtttgtggaaaagaactgggttcattgggctggcat

SEQ ID NO: 129388 - DNA, 144 bp, Zea mays
  Clone ID: MRT4577_49477C.1
cccccccccccccccccccggactgcccaacattatcttgtaaaccatagatgcaacacacagtaggcgcatgtttacatagactcatttcagaggggcacctcgataacttacaatgtatttctcgcggcagaacattctacc

SEQ ID NO: 129389 - DNA, 501 bp, Zea mays
  Clone ID: MRT4577_49478C.1
atgcaagggttgaaaagtgccaaagagatttgggacgtgctcaagaccgcgcacgaaggagatgaggtgacaaagatcaccaagcgggagacggtcgagggggagctcggtcggttcgtcctcaaccaaggagaggagccacaagccatgtacaaccggctcaagaccttggtgaaccaagtgcgaaacctcaggagcacaaaatgggatgaccatgaaatggtcaaggttattctaagatcactcgttttttatccctacacaagttcaattaattcatggggcgacgacaagaagggaagaaggaaggaaaagaagaagtacaacaagaagaagggcggcgatgcacgtgtgtgtcgggaatgggactccgatgagagctccaccgactcctcctccgatgaggacgccgccaacatcaccatcaccaaaggccttctcttccccaacgtcggccacaagtgcctcatggcaaaggacagcaaaaagaagaagatgtag

SEQ ID NO: 129390 - DNA, 2736 bp, Zea mays
  Clone ID: MRT4577_49479C.1
atggcgccgggtgtgacatacaagaagaagggcggcgatgcccatgtatgtcgggaatgggactccgatgagagctccaccgactcctccgacgaagatgccgccaacatcaccgtcaacaagggcctcctcttccccaacgtcggccacaagtgcttcatggcaaagaacgacaaaaagaagaagaaggacccaagactgtttgggtatctaagaacaaggcctaaattgttttgtaggtttatgcattcggggggctcaagttggaaaatagacagcggatgcacaaaccacatgacaggggagaaaagaatgttctcctcctgcgagaaaaacgaagatccccaaagagctatcacattcgaggatggaaatcaagatataggtgttactgtctttagaagaagtgatgattcagtagaatttaagggagtattagagggtcagctatacttagttgattttaacaaagctgaactcgatacttgcttaattgctaagactaatatgggttggctctggcatcaccgactagcccatgttggaatgaagaatcttcacaagcttctaaagggagaacacattttgggactaacaaatgttcattttgagaaagacagggtttgtagcgcatgtcaagcaggaaaaaccgacaatgggatggagttcaagaactctcaaatcgaaggctttcttgaggataagggaatcaagcatgagttctcttctccctacataattcaacaaaatggtgtagtggagaggaagaatagaactctactggacatggcaaggactatgcttgatgagtacaagactccgaaccggttttgggcggaagcaatcaacaccgcttgctactccatcaaccagctctacctccaccgaatcctcaagaagacatcttatgaactccttatcggtaaaaagcccaatgtttcatattttagagtctttggtagcaaatgttttattattgttaaaagaggtagaaaatctaaattttctcctaaggctgtagaaggctttttacttggttatgactcaaacacaagggcatatagagtcttcaacaaatccactggattagttgagatttcttgtgacattatgtttgatgagactaatggctctcaagtagagcaagttgatcttgatgaattagatgatgaagaggctccgtgcatcgcgctaaggaacatgtccattggggatgtgtgtcctaaggaatccgaagagcctccacaagcacaagatcaaccgtcatcttccatacaagaatcccctccatctcaagatgaggatcaggctcaagacaatgaagatgaagatcaagaggatgagtcatctcaagaggaggtcaatgatcaagggggagatgaccatgacaaagacaaggaaggtgaacaagagattcagggtcaaagacctccacactccagagtccaccaagcaattcaaagagatcaccctgtgaactccatcctcggtgacattcataagggggtaaccactagatctcgagttgctcacttttgtgaatattactcttttgtgtcctctattgagccatacagggtggaggatgcactaagagattcagattgggtgttggctatgcaagaggagctcaacaacttcacgaggaatgaggtatgtcatttagttccacgtcctaatcaaaatgttgtaggtaccaaatgggtattccgcaacaagcaagacgagcatggtgtgatgacaaggaacaaagcccgacttgtggccaagggttattcacaagtcgaaggtttggactttggtgaaacttatgcacccgtagccaggcttgagtcaattcatatattacttgcctatgctacttaccatgactttaagctttatcaaatgcacgtgaaaagtgccttcctcaatggaccaatcaaggaagaggtctatgttgagcaacctcttggctttgaagatattgagtaccctaaccatgtttacaaactctcaaaggcgctttatgagctcaagcaagccccaagagcatggtatgaatgcctgcgagattttcttatcactaatggcttcaaagtcggtaaagtcgatcctacactctttactaaaactgttgcaaaagatttgtttgtatgccaaatttatgttgatgatatcatatttgggtctactaacaaatctacttgtgaagagtttagtaggatcatggtacaaaaattcaagatgtctatgacgggggagttgaaatatttcctaggatttcaagtcaagcaactccaagagggcaccttcatcagccaaacaatgtacattcaagacatacttaacaagtttggaatgaaggatgccaagcccatcaagacacccatgggaaccaatgggcatctcgacctcgacacgggagggtgtaaaattgatagaaagagcacatcagggacttgtcagtttctgggaagatctctggtgtcttgggcttcaaagaaacaaaactcagtagctctttctaccgctgaagccgagtacattgtcgcaagccattgctgtgcacaattactttatatgaggcaaaccctcagggactatggctacaaattgagcaaagtcccactcctatgtgacaatgagagtgcaatctgcatggcagataatcccgttgaacatagccgcactaagcacatagacattcggtatcactttttgagggatcaccaacaaagggggatatcgaaatag

SEQ ID NO: 129391 - DNA, 810 bp, Zea mays
  Clone ID: MRT4577_4947C.1
cattgggacctacgcgtccggccacgcccgccggggcaagcacgccgcagaaacaaacaaaaaaacacccgggaaatccaagcagctgttgcaaccggttccttcgaggagaacgtgagaaagaagcatgaggccccaggtgctgctcgtcgcactggccgtcttcgccgtcctcgtagctctgccactgggcaaagcgcacgaggaggaggaggaggaagggcttgaactcgaagccagcaggaggcggtggccgtgctgcgaccagtgcggcatttgcaccaggtcgcagccgccgatatgcgagtgcagggacacgtcgacgaccggctgccacccggcttgcaaggcgtgcgccctgtccatctccgacggcctcttcgtgtgcaaggacaagatcgtcaacttctgcaagcgccgctgcacccgtcgtactgatgatgatgatgcgtgacttataatctaagtgggcaaataaccttgccaataaataatttccgttcggagctccatttgcatctttctcaagatgcagacgacagggtttaaataatcaaggcgatgcttgcttgctcgtcgcctttttactcgtacagtttctgaaataaagagcatgggtatgttatgctcggagatatatgtagtcatgagacgtaaaagaatgcaataaaggctttggttatgtgcatctttagatgccatagaccgaggcatgattatttcgcggtgatagctaataacgcatggctactttagcgtctgggaagcttccagaagaaaggcaaaaggggggagaattttataatatgg

SEQ ID NO: 129392 - DNA, 348 bp, Zea mays
  Clone ID: MRT4577_49480C.1
tctacttatttgggggagtgggttctttttttggaaaacacaaaaaaggaaatccttttattacaagaattcaaaaaactggagccacctccactgtcttttggctgtacaaagcaaccctacaggcaaaccatcctcaaccacatattattcgtccccaaaaacaccagaacaggaacctacgcccccaagcccacagggaatcccactgtcccggaacaaacacacatccctcaacggcctgcacgggcaagaacaactacaagcacccactataacaacaatggagatggggaatccaccatttgtaattagccccaatcgttcttctaagacaccgcgcacaaa

SEQ ID NO: 129393 - DNA, 422 bp, Zea mays
  Clone ID: MRT4577_49481C.1
cggtttgagcggtcgccgggcaggtcactaaacttatcttgtacggcaactgtaggtggcctgaaagtatttgataatcactggaatacctgaatgctgaatacggatcctgttgcttggaaacaaatcttacccacaaacatgtgagagggagtgacacaatctcttcaaatacgtataatggctaaggtcgataacatattcttggtacgacatcaagtacggactcgatgagagagcatcgctcatggatactatctacactggggagatcatgcagacatcagattgctatgactatcgaaggcatagaagataactggaatattgatatttacatcacactgattgcctcttcagtatggatgtcttaggtatacttcgatctatacactgacattttacaaaggaatgcacaaccc

SEQ ID NO: 129394 - DNA, 1293 bp, Zea mays
  Clone ID: MRT4577_49482C.1
atgacgactgacaggccactcgagctcctacacatggatctattcagcctgattgcttacataagcatcgacaggagtaagtactatctagttattgtggatgattattctcgcttcacttgggagaccttaaagggattcttgagacgggctcaaaatgagttcggcttaaggatcaaaaagattagaagcgacaacgggacggagttcaagaactctcaaattgaaggcttccttgaggaggagggcatcaagcatgagttctcttctccctacaccccacaacaaaatggtgtagtggagaggaagaatagaactcttatggacatggcaaggaccatgcttgatgagtacaaaacttcggatcggttttgggtggaggcggtcaacaccgcttgctacgccatcaaccagttgtatctacaccgaatcctcaagaagacatcatacgaactcctaaccggtaaaaagcccaatgtttcatattttagagtctttggtagcaaatgctttattcttgttaaaagaggtagaaaatccaaatttgctcctaaggctgtagaaggctttttactaggatatgattcaaacacaagggcatatgaagtctttaacaagtcctctgggctagttgaagtttcttgtgacattgtgtttgatgaaactaacggctcccaagtagagcaagttgatcttgatgagctaggtgatgaagaggctccatgtgtcgcgctaaggaacatgtccattggggatatgtgtcctaaggaatccgaagagtctccaaatgtacaagatcaaccatcttcctccacacaagcatctccaccaactcaagatgaggatgaggctcaaaatgatgaaggagaagatcaaggagttgagccacctcaagacgagagcaatgatcaagggggagatgcccataatcaagataaggaagatgaacaagttccaagaccgccacacccaagagtccaccaagcaatccaacgagatcaccccatgaacaccatcctaggcgatattcaaaagggggtaactactcgatctcgtgttgctcatttttgtgaacattactcttttgtttcctctattgagccacacagggtagaggaagcacttcaagattcggattgggtggtggcgatgcaagaggagctcaacaacttcacacgtcctaatcaaaatgttgtaggaaccaagtgggtcttccgcaacaaacaagacgagcatggtgtggtgacaaggaacaaagcccgacttgtggccaagggatattcacaagtctaa

SEQ ID NO: 129395 - DNA, 254 bp, Zea mays
  Clone ID: MRT4577_49483C.1
tctagaattacttatactactacctctctcacaccttcgtgaatattctacgcgacgagggcccctctcatctttaccattttcttacacccatcctcatccgcttatttccctactcctcctgttacttttactcctactagactcttaaactgctctaccctcttaccaccataccttgtttcctctcttactttttccccttttctactcttctcatctcatcctctgattctccattttcatctctttca

SEQ ID NO: 129396 - DNA, 3705 bp, Zea mays
  Clone ID: MRT4577_49484C.1
atgtcgggagaacacgccaagaaggagatggtgatcggcgagaagcccgccataagccacgggaaagctccatcgggagagtcacgcaacaagaagaaggaggaatcacctcctcacaagtcgcatcggagtggcgacaagaagaaaaagatgaagaaggtggtctactacgagaccgattcttcatcgccatccacctccggctccgacgcgtcgtccgtaacttctaagtgccatgagcgcaagaagtttagtaagatccccctacgctatccttgcatttccaaacgtactccattactttccgttccattaggcaaaccaccggttttttacggtgaagattataacatgtggagtgataaaatgaggcatcacctaacctcactccacactagtatttgggacgttgttgagtttggagtgcaggtaccatccgtaggggatgaagattatgattcggacgaagttgcccaaatccggcacttcaactcccaagctaccaccatactcctcgcctctctaagtcgagaggagtataacaaggtgcaagggttgaagagcgccaaggagatttgggacgtgctcaaaaccgtgcacgaaggagacgaggtgaccaagatcaccaagagggagacgatcaagggggagctcggtcgtttcatgctcaaccaaggagaagacccgcaagccatgtacaaccggctaaaaaccttggtgaatcaagtgcgcaaccttgggagcactaaatgggatgaccatgaaatggtcaaggttattcttagatcacttgtttttcttaaccctactcaagttcaattaattcgtggtgatccaagatataaactaatgtctcccgaggaagtgataggaaaatttgtgagctttgaattgatgatcaaaggctccaagaaaatcatcgagcaaggcgccacctcaacatccaaggtgcaacccgtcgcattcaaggcgacggaagaagaaaagaaagactctacaccgagtagggtccccatcgatgcctccaagctcgacaatgaggaaatggcgctcatcatcaagagcttccaccaaatcctcaaacaaagaagggggaaagactacaagccccgctccaagaaggtttgctacaactgtggtaagcccggtcattttatcgctaaatgtcctttgtatagtgatagtgacagggataacgacaagagggggaagaaggagaagaagagatattacaagaagaagggcggcgatgcccatgtttgccaggagtgggactccgacgagagctccaccgactcctcctccgacgaggacgctgccaacatcgccatcaacaaaggcctcctcttccccaacgtcggccacaagtgcctcatggcaaaggacggcaaaaagaagaaggtaaaatcaagatcatccactaagtatgcaacttctagtgatgaggataattctagtgatgatgaggacaacttgcttactctttttgccaatcttaacatacaacaaaaagagaaattaaatgaattgattagtgctattcatgagaagtatgaactcttggatagccaagaggacttccttattaaggaaaacaaaaagcatgttaagactaaaaatgcttatgctcaggagattgacatgttgaatgaatctcttgctagccttaagtttgagaatgataaattaattgctaaggctaaggaattagatgtttgcaatgtttctatttccaatcttagaaatgagaatgctattctacatgctaagattgttgaattaaatgattgcaaaccctctacatctactgttgagcatgtttctatttgtactagatgtagagacattaacattgatgctattcatgatcaccttgctatgattaaacaacaaaatgatcatatagctaaactagatgctaaaattgccgagcatgaattagagaatgaaaaatttaaatttcctcgtggcatgctttatagtgggagacgtcctggcattaaggatggtattggcttccaacagggagacaatgtcaagcttaatgcccctcctaaaagattgtctaattttgttaagggcaaagctcccatgcctcaggataacgagggttatattttgtatcctgctggcaaagtagttgccaaatatgttgggggcaaatacaagggctccaagacttgtatttgggtacccaaggccactggagctactccacatggatctattcggctcgatcgcttacataagcatcggcatgaagtttttggtagcaaatgctttattcttgttaaaagaggtagaaaatctaaatttgctcctaaggctgtagaaggctttttacttggttgtgattcaaacacaagggtatatagagtctttaacaagtccactggactagttgaagtttcttgtgacattgtgtttgatgagtctaacggctctcaagtagagcaagttgatcttgatgagctagatgatgaagaggctccgtgcatcgcgctaaggaacatgtccattggggatgtgtgtcctaaggaatccgaagagcctccacaagcacaagatcatcaaccatcttcctccatgaaagcatctccaccaacccaagatgaggatcaagctcaagaggatgaaaatgaagatcaagaagatgagccacctcaagaggaggacattgatcaagggggagatgccaatgatcaagacaaggaagatgatgaggatccaagaccgccacacccaagagtccaccaagcaatccaacgaaatcaccccatgaacaccatccttggcgacattcataaggggccacacagggtagaggaagcacttcaagattcggattgggtgctggcgatgcaagaggagcttaataacttcacgaggaatgaggtatggcatttagttccatgtcctaaccaaaatgttgtagcaaccaaatgggtcttccgcaacaagcaagatgagcatggtgtggtgacaaggaacaaggcacgacttgtgcccaaggggtattcacaagtcgaaggtttggattttggtgaaacctatgcacctgtagctaggcttgagtcaattcgtatattgcttgcctatgctacttaccatggttttaagctctatcaaatggacgtgaagattgccttcctcaatggaccaattaaagaagaggtctatgttgagcaacctccaggctttgaagatagtgagtatcctaaccatgtctacaaactctctaaggcgctttatgggctcaagcaagccccaagagcatggtatgaatgcctaagagattttcttatcactaatggcttcaaagtcggcaaggccgatcctacactctttactaaaacaaatgaaaatgatttgttttttagtaggatcatgattcaaaaattcgagatgtctatgatgggggagttgaagtattttctaggatttcaagtcaagcaactccaacagggcaccttcattagtcaaacgaagtacattcaagacatactcaccaagtttggaatgaaggatgccaagcccatcaagacacccatgagaaccaatgggcatctcgacctcgacatgggaggtaaatccgtagatcaaaaggaagagcacatcagggacttgtcagtttctggggagatccctggtgtcttgggcttcaaagaaacaaaactcagtagctctttctaccgccgaagctga

SEQ ID NO: 129397 - DNA, 102 bp, Zea mays
  Clone ID: MRT4577_49485C.1
tcgaccagctcgctagggactgtgaccgggcccagacttcgctactgggacctgcagagcgcgctacatggcctgattctgagtgctgttagagctgaccgt

SEQ ID NO: 129398 - DNA, 918 bp, Zea mays
  Clone ID: MRT4577_49486C.1
atgtcgtgggcagcggcggcgcgctgggcgctggactttatgatgaaattctcgtcggtgcagccatacaggatagatgatgcattaagagatccggattgggtggtggcaatgcaagaggagctcaacaacttcatgaggaatgaggtttggcatttacttccacgtcctaatcaaaatgttgtaggtaccaagtgggtattccgcaacaagcaagatgagcatggtgtggtgacaaggaacaaagctcgacttgtggccaaaggttattcacaagtcaaagagggcaccttcatcaaccaaaccaagtacattcaagatatacttaagaagtttgggatgaaaaatggcaaacccatcaagacacctatgggaaccaatggacatctcgacctcgacactggaggtaagtccgtagatcaaaagggatctacctttgatctaattgggtattccgatgccgattatgccggatgtaaaatagatagaaagagcacatcacggacttgtcagtttttgggaagatccctggtgtcatgggcttcaaagaaacaaaatttcgtagctctttccaccaccgaagtcgagtacattgcagcaggtcattgttgtgcacaattactttggatgaggcaaactcttagggactatggctacaaagtgagcaaagtcactctcctatgtgataatgagagtgcaatctgcatggcggataatcccgttgaactcagtcgcactaagcacatagacatccggtatcactttttgagagatcaccaacaaaagggggatatcgaaatagcttatgtgagcacccacaaccaattagctgatatctttaccaagccactagatgagaaaacctttagcaaacttaggaatgagctaaatatacttgattcttggaactttgattga

SEQ ID NO: 129399 - DNA, 2889 bp, Zea mays
  Clone ID: MRT4577_49487C.1
atgccacttcgttactcccgtatttctaagcgcactccattactttccgttccattaggcaagccaccatgttttgatggagatgattattctatgtggcgtgataaaatgaggaatcatctaacctcactccacgctagcatatgggacattgttgagtttggagcgcatgtaccaaatgtgggggacgaaggttacgatttggacgaggtcgcccaaatccggcactttgactcccaagcaactactatactcctcgcctccttgtgtcgagaggagtataataaggcacaagggctaaaaagtgccaaagagatttgggatgtactaaagaccacacacaaaggggatgaggtgaccaagatcaccaagcgagagacgatcgagggggagctcggtcgattcatcctcaacagaggagacgagccacaagcgatgtacaaccggctcaagaccttggtcaaccaagtgcgcaacctcgggagcacaaaatgggatgaccatgaaatggtcaaggaggtaattgggaagtttgtgagctttgagttgatgatcaaaggctccaaacacatcgttgacttggagcaaggcggcacctccacacccgaggtgcaacccgcctcattcaaagcgacagaagaaaagaaagaagagtctacatcaagtaggctccccatcgacgcctccaagctcgacaacgaggaaatgtcactcatcatcaagagcttccgccaaatcctcaagcaaaggagggggaaagattacaaaccccgctccaagagggtgtgctacaataatagtgacaggggcgacgacaagaggggaaagaagaaggagaagaagaggtactacaagaagaagggcagtgatgcccacgtgtgtcgggaacgggactccgatgagagctccaccgactcctcctccgacgaggatgccgccaacatcgccgtcaacaaggctcttctcttccccaacgtcggccacaagtgcctcatggcaaaggacgacaaaaggaagaagatagaagaattaaaatcttgcaaaccctctacatctactattgatcatgttactatttatactagatgtagagatgttgatgttgatgctattcatgatcaccttgctttaattaaacaacaaaatgatcatatagctcaactaactgcaaaaatcaatgagcgtgaaattgaaaatgaaaaaattaaatttgctagaagcatgctctatagtgggagacgccctagcattaaggatgtcattggtttccaacagggaagcaatgtcaagcttaatgcccctaaaagattatctaattttgttaagggcaagactcccatggttcaggataacgagggctatattttatatcctgctggttatcccaagcacaaaattaggagaattcatgctaagaaatctcattctatttctcaccatgcatttatgtataagaatgaggcttctagctctaggcaatcaactcatgttaaattgtctaaaaagaaaactcctgttgcatcaaatgagcctaatatttcatttaagacttttgatgcatcttatgttcttactaacaaatcaggcaaagtagttgccaaatatgttgggggcaaacacaagggagaaaagaatgttctcctcttacgagaaaaacgaagatccccaaagagctatcacattcggggatggaaatcaaggaaaaaatcacaaacccaagagactttaaagggattcttgagacgggctcaaaatgagttcggattaaggatcaagaaaataagaagcgataatgagacggagttcaagaactctcaaatcgaaggcttccttgaggatgagggcatcaagcatgagttctcttctccctacacacctcaacaaaatggtgtagtggagaggaagaatagaactctattggacatggcaagaaccatgcttgatgagtacaagacactggactggttttgggcggaaggaatcaatactgcttgctactccatcaaccggctctaccttcaccgaatcctcaagaaaacatcatatgaactcctcaccggtaaaaagcccaatgtttcatattttagagtctttggtagcaaatgttttattcttattaaaagaggtagaaaatctaaatttgctcctaaggctgtagaaggctttttacttggttatgtgtcaaacacaagggcatatagagtcttcaacaaatccactggattagttgaggtttcttgtgacattgtgtttgatgagactaatggctcccaagtggagcaagttgatcttgatgaactagatgatgaagaggctccgtgcgtcgcgctaaggaacatgtctattggggatgtgtgtcctaaggaatctgaagagcccactcatgcacaagatcaaccgtcatcttccatgcaaggtagaggatgcactaagagattcggattgggtgctggcaatgcaagaggagctcaacaacttcacacgaggaatgaggtatggcatttagttccacgtcttgaccaaaatgttgtaggaaccaagtgggtattccacaacaagcaagatgagcatggtgtggtgacaaggaacaaagcccgacttgtggccaaggattattcacaagtcgaaggtttggatttcggtgaaacttatgcacccgtagctaggcttgagtcaattcgcatattacttgcctatgctactcaacatggctttaagctttaccaaatggacatgaaaagtgccttcctcaatggaccaatcaaggaagaggtctatgttgagcaaccccctggctttgaagatagtgaataccctaaccatgtttataaactctcaaaggagctttatgggctcaagcaagccccaagagcatggtatgaatcctaa

SEQ ID NO: 129400 - DNA, 4500 bp, Zea mays
  Clone ID: MRT4577_49488C.1
atgtcgggatatcacgccaagaaggagatggtgaccggcgagaagcccgctacaagccacgggaaagctccatcgggagagtcccgcaacaaggggaaggaaaaggaatccccttcacacaagtcgcgtcggagcggtgacaagaagaagatgaggaaagtggtctactatgagaccgactcctcgtcgccatccacctccggctccgacacgccgtccgtaacttctaagcgccatgagcgcaagaagtttaccacaactatactcctcgcctatctaagtcgagaggagtataataaggtgcaagggttgaagagtgctaaggagatttgggaggtactaaagaccatgcacgaaggagacgagataaccaagatcaccaagcgggagacgatcgagggggagctcggtcgcttccggcttcgccaaggggaggagccacaagaaaagtacaaccggctcaagaccttggtgaaccaagtgcgcaacctcgggagtaagaaatgggatgaccatgagatggttaagaaaatcaacgagcttgatggcccctccacgtccgaagcacaaccggtcgtattcaaggcgacggaggaaaagaaggaggaatctacatcaagtagaacacccatcgacgcctccaagctcgacaacgaggaaatggtgctcatcatcaaaagcttccgccaaatcctcaagcaaaggagggggaaagattacaagccccgctccaagaaagttgctacaaatgtgaaagggagaagaaaggagaagaagagatactacaagaagaagggcggcgatgcccatgtttgccgggaatgggactccgacgagagctccaccgactcctcctccgacgaggacgccgcaaacatcgccgtcaccaagggtcttctcttccccaacatcggccacaagtgcctcatggcaaaggacggcaaaaagaagaaggttaaatccaaatcctccactaaatatgagtcctctagtgatgataatgctagtgatgaggaggataatttgcgtaccctttttgccaacctaaacatgcaacaaaaagaaaaattaaatgaattaattagtgccatccatgaaaaggatgaactcttggacacccaagaggacttcctaatcaaggaaaacaagaagcatgttaaggttaaaaatgcttacgctctagaagtagaaaaatgtgaaaaactatctagtgagctaagcacttgccatgacactattgccaaccttagaaatgaaaatgcaaatttaattgctaaggttgatccaaatgtttgtgatgtttcaattcccaatcttagaaatgataatgttgatttgcttgctaagattgaagaattgaatatttctcttgctagccttaggattgaaaatgaaaaattaattactaaggctaaagaattagatgtttgcaatgttactatttctaaccttagaagtgaaaatgatatattacatgctaaggttgttgaattaaaatcttgcaaaccctctacatcaaccattgagcatacatccatttgtactagatgtagagacattaatgttgatgctattcatgatcacatggctttaattaaacaacaaaatgatcatatagcaaaattagatgctaaaatttccgagcatgacttagaaaatgaaaagtttaaatttgctagaagcatgctctatagtgggagacgccctggcatcaaggatggcattggcttccaaaagggagacaatgtcaaacttaatgcccctcctaaaagattgtctaattttgttaaggacaaggctcccatgcctcaggataacgagggttacattttataccctgccggttatcccgagagcaacattaggagaattcactctaggaagtctcactctggccctaatcatgcttttatgtataagggtgagacatctagctctaggcaatcaacccgtgctaaattgcctaagaagaaaactcctagtgcatcaaatgatcaggacatttcatttaaaacttttgatgcatcttatgttttgactaacaaatccggcaaggtttatgcatccgggggctcaagttggataatcgacagcgggtgcacaaaccacatgacaggggagaagaagatgttctcctcctatgagaaaaaccaagatccccaacgagctattacattcggggatggaaatcaaggtttggtcaaagatgaaaaatctcatacccaagagaccataaaaggattcttgagacgggctcaaaacgagtccggcttaaggatcaagaaaattagaagcgacaacgggacagagttcaagaactctcaaattgaaggcttccttgaggaggagggcatcaagcatgagttctcttctccctacaccccacaacaaaatggtgtagtggagaggaagaatagaactcttttggacatggcaaggaccatgcttgatgagtacaagacttcggatcagttttgggccgaggcggtcaacacctcccgctacgccatcaaccgattgtatctacaccgaatcctcaagaagacatcatacgaactcctaaccggtaaaaagcccaatatttcatattttagaatctttggcagcaaatgctttattcttgttaaaagaggtagaaaatctaaatttgctcctaagactgtagaaggctttttactaggatatgattcaaacacaagggcatatagagtctttaacaagtccttaggactagttgaagtttcttgtgacgttgtgtttgatgagactaacggctctcaagtagagcaagttgatcttgatgagataggtgatgaagaggctctgtgcgtcgcactaaggaacatgtccatcggggatgtgtgtcctaaggaatccgaagagcctccaaatgcacaagatcaaccatcctcctccacgcaagcatctccaccaactcaaaatgaggatgaggctcaagttgatgaaggagaagatcaaaaagatgagccacctcaagatgacggcaatgatcaagggggagatgcaaatgatcaagacaaggaggatgaagaaccaagaccaccacacccaagagtccaccaagcaatccaacgagatcaccccgtcgacaccatcctcggcgacattcataagggggtaaccactagatctcgtgttgcatatttttgtgagcattactcttttgtttcctctattgagccacacagggtagaggaagcactacaggattcggattgggtggtggcgatgcaagaggagctcaacaacttcactaggaatgaggtatggcatttagttccacgtcctaaccaaaatgttgtaggaaccaagtgggtattccgcaacaagcaagacgagcatggtgtggtgacaaggaacaaagcccgacttgtggccaaggggtattcacaagtcgaaggtttggattttggtgaaacctatgcacccgtagctaggcttgagtcaattcgcatattacttgcctatgctacttaccatggctttaagctttaccaaatggacgtgaaaagtgccttcctcaacggaccaatcaaggaagaggtctatgttgagcaacctcccggctttgaagatagtgagtaccctaatcatgtgtataaactctctaaggcgctttatgggctcaaacaaaccccaagagcatggtatgaatgcctaagagattttcttatcactaatggattcaaagtcagaaaacccgatcctactttatttactaaaactcttgacaatgatttgtttgtatgccaaatttatgttgatgatattatatttgggtctactaacgaatctacatgtgaggaatttagtaggatcatgacaaagaaatttgagatgtctatgatgggggagttgaagtacttcttaggatttcaagtgaagcaactccaagaaggcaccttcattagccaaacgaagtatattcaagacattctaaacaagtttgggatgaaggatgccaagcccatcaagacacccatgggaaccaatgggcatctcgacctcgacatgggagatgccgattgggcggggtgtaagattaatagaaagagcacatcggggacttgccagttcttgggaagatccttggtgtcttgggcttcaaagaagcaaaattccatagctctttctaccgccgaagccgagtacattgccgcaggccattgttgcgcgcaattgctttggatgaggcaaacctttagggactatggttacaaattaaccaaagttcctcttctatgtgataatgagagtgcaatccgcatggcggataatcccgttgagcatagctgcactaaacacatagccattcggtatcattttctaagggatcaccaacaaaagggagatatcgagattgcatacatcaacactaaggaacaattagccgatatctttaccaagccactagatgaacaaacttttaacaaacttaggcatgagctaaatattcttgattctaggaatttcttttga

SEQ ID NO: 129401 - DNA, 343 bp, Zea mays
  unsure (1)..(343): unsure at all n locations
  Clone ID: MRT4577_49489C.1
gcgtgggcggccgcgtggggtcgcagctcatcgtgcagtacatccacgagaccttcgccggcactggtggcccgtcccttctccctgccgncccgcnccngngcgctgttgctttcttctgtgttgcctccnttgttgttgcttttttttttttttcccccccttttgtggggggggggggggggtcttttcttccttttctcttccttcttcttttttccttttcttttctttcccttcttccttttccctttcctcctctttttctcccttcccctctcttttttttttttttctttttccctttcttttttttttttttttttttttttttctttttttt

SEQ ID NO: 129402 - DNA, 392 bp, Zea mays
  Clone ID: MRT4577_4948C.1
aacacgcgtccgaaaaaacacccgggaaatccaagcagctgttgcaaccggttccttcgaggagaacgtgagaaagaagcatgaggccccaggtgctgctcgtcgcactggccgtcttcgccgtcctcgtagctctgccactgggcaaaggtgaggcttggacctttcgtttaatttctccatcgccagaaccacttgaaacgacgggggtcggtcggttcggcggcctggtctttggttaccgcagcgcacgaggaggaggatgaggaagggcttgaactcgaagccagcaggatgcggtggccgtgctgcgaccagtgcggcatttgcaccaggtcgcagccgccgatatgcgagtgcagggacacgtcgacgaccggctgccacccggc

SEQ ID NO: 129403 - DNA, 1206 bp, Zea mays
  Clone ID: MRT4577_49490C.1
ttatttttccttaataaggaattcctcttggctatccaagagttcatccttctcatgaataacccctatcaattcatttagtttttccttttgttgcatgttaaagttggcaaaaagactaaggaagtcatcttcatcatcactagaactaccctcatcactagatgtagtatgcttgggggtggttctagcttgtaccttctttttcttgtcgttctttgccatgaagcatttgtggccgacgttggggaagagaagtcccttgttaacggcgatgttagcggcgtccccgtcggaggaggagttagtggagctcatgtcggagtcccattcctgacacatgtgggcatcaccgcccttcttcttgtagtacttcttttcctttctctttcccctcttgtcatcgccactgtcactatcacttgacataggatatttagcaataaaatgaccgggcttaccacacttgtagcacaccctcttggagcggggtttgtagtccttccccctcttttgcttgaggatttggcgaaagctcttaatgatgagtgtcatttcctcgttgtcgagcttggaggcatcgatggggagcctacttgatgtagactcttctttcttctcctccatcgctttgaatgcgacgggttgcacctcgggtgtggaggtgtcaccttgctccaagttgactatttgtttggagctaaacttcttgcgctcatggcgcttagaagtgacggacggagcgtcggagccggaggtggagggtgacgaagaatcggtctcgtagtagaccactttcttcattttcttcttcttgtcgccactctggtgtgacttgacgcggggaggtgattcctcccttcctttggcgtcggacgcccttgatagagccttcccgtggcttgtggtcgtttctatctccctcttggcggatcctcgcgacatcgtcggagtcccactcccggcaaacatgggcatcgccgcccttcttcttgtagtatctcttcttttccttcctctttcccttcttgtcatcgcccctgtcactatcactagataatggacatctagcaataaaatgaccgggcttaccacacttgtagcaaactttcttggagcggggcttgtagtccttccccctcctttgcttgaggatttggtggaaaattttgctgatgagcgccatcttctcattgtcgagcttgg

SEQ ID NO: 129404 - DNA, 424 bp, Zea mays
  unsure (1)..(424): unsure at all n locations
  Clone ID: MRT4577_49491C.1
gggtaccctncgaggccgtccgggctggctgtcgtgcctactgtctgttacatgtatatatataaaaaatgatgcgtggaccaatgtttgatgcanaaaaaaaaaaaaaaaaaaaaaaaaaaaaaaaaaaaaaaaaaaaaaaaaaaaaaaaaaaaaaaaaaaaaaaatttttaaaccctacccgattccgccgccgttccgcctaagggaatggcccgccgggacctaatcgatcaccttaagttttaaatcatggcggacgtcgatgtcaaaccggaggttgccgccggagctcccaaaaaaaggacgttccgcaagtacagctaccggggggtcgacctaaatgcgcttttcgacatgtccacggacgaccttgtccagtttttccccgcgcgcgccaggaaaaggttccagaggggtctga

SEQ ID NO: 129405 - DNA, 1344 bp, Zea mays
  Clone ID: MRT4577_49492C.1
atgactcccgaggaagtaatcgggaattttgtgagctttgaatttatgatcaagggctcacggaagatcaacgagcttgacggtccctccacgtccgaagcacaaccggtcgcatttaaggcgacggaggagaagaaggaggagtctacaccgagtagaacacccatcgacgcctccaagctcgacaacgaggaaatgacgcttgtcatcaaaagctttcgccaaatcctcaagcaaaggagggggaaagactacaagccccgctccaagaaggtttgctacaaatgtggtaagcccggtcattttattgcaaaatgtcctatttctagtgacagtgacaggggcgacgacaaaaaggggagaagaaaggagaagaagaggtactacaagaagaagggcggcgatgcccatgtttgtcgtgagtgggactccaacgaaagctctagctactcctcctccgacgaggacgccgccaacatcgccgtcaccaagggactcctcttccccaacgtcggccacaaatgcctcatggcaaaagacggcaaaaagaagaaggtttatgcatctaggggctcaagttggataatcgacagcgggtgcacaaaccacatgacaggggagaagaaaatgttctcctcctatgagaaaaaccaggatccccaacgagctatcacattcggggatggaaaccaagattctttagattacaatttgctttccgtttctcaattatgtcaaatgggctacaactatctatttactgatgaaaaatctcatacccaagaaaccttaaagggattcttgagacgggctcaaaatgagttcggcttgaggatcaagaaaattagaagcgacaacgggacggagttcaagaacttacaaatcgaaggcttccttgaggaggagggcatcaagcatgagttctcctctccctacacgccacaacaaaatggtgtagtagagaggaagaatagaactctattggacatggcaagaaccatgcttgatgagtacaagacttcggatcggttttgggccgaggcggtcaacaccgcctgctacgccatcaaccggaatcggaagagcctccaaatgcacaagatcaaccatcctcctccacgcaagcatctccaccaactcaaaatgaggatgaggctcaagttgatgaaggagaagatcaagcaaatgagccacctcaagatgacggcaatgatcaagggggagatgcaaatgagcaagacaaggaggatgaagaaccaagaccgccacacccaagagtccaccaagcaatccaacgagatcaccccgtcgacaccatcctcggcgacattcataagggagtaa

SEQ ID NO: 129406 - DNA, 621 bp, Zea mays
  Clone ID: MRT4577_49493C.1
tggaattcggcacgaggcgcccatctcgccgtggcggctgtcgacgatggggggcgccgacgactcgcacgagaccggcgctggtggtggtgagagccgtggcaaggactacacggaccctgcgacgccgccactcatccacgcgggtgagctggggcacctgccgctggaccgcgcccgaaccagcgcttttttttccacgccgctggtcctgtacatcacgggggccaccgggatcgggtacaagcaccatacggacgcgttcgcgtagggtgccgacgcggcgtgcggtggcgtgggggcgcagggcatagcctgggacttctgccgaatgatcttcgcgctcgtttactgcaccgctcgaagtctaagggggccagagcaaccccggcgtcaccttcggcgctatcctgacgcacaaggaccctctggtgcgcgcgctgctgtacattggggcgtagctacctggcgccatctgcggcgtcggcctacataaggaggaccagagcgcctacttcgacaggtacggcagtggcaccaactcgctcgactccggcatactcccgcggcaccgggctcggcgccgagatcataaacaccttccagcccgtctacaccgac

SEQ ID NO: 129407 - DNA, 341 bp, Zea mays
  Clone ID: MRT4577_49494C.1
tttgggctgatttatgtgcttgcgatcatgctttcgtttttatttaggttataatcttcggaacaaaaacgatagaaaggaaatcgcacagcctgacgaacgggtagcccgttgcggccccggaacaaaaaaaaaaaaaaaagcaaaaaaaaaaaaaaaacaaaaaaaaaaaaaaaaaggggtggttgcctccgaggatttaaccccacgattttcgttacgtaatgctaaagcctcctaccagggtaattcaacccaaactaacgcggttgggcccaataatcctggaatcggaaaaattccggggcaattaatccaaactgtctcggagaaaacttttc

SEQ ID NO: 129408 - DNA, 297 bp, Zea mays
  Clone ID: MRT4577_49495C.1
ttaataggaagagcacatcggggacttgccagttcttgggaagatccttggtgtcttgggcttcaaagaagcaaaattcggttgctctttccaccgccgaagccgagtacattgccgcaggtcattgttgcgcacaattgctttggatgaggcaaaccctttgatcatatctctttcatatgctatgactaatgtgtttttcaagtccattttacaccaagtcataggtatattgaaagggaattggagtcttcggcgaagacaaaggcttccactccgtaactcatccttcgccat

SEQ ID NO: 129409 - DNA, 316 bp, Zea mays
  unsure (1)..(316): unsure at all n locations
  Clone ID: MRT4577_49496C.1
ggaatcccggtcgaccagcgtccgtaacaaagcttagagactgagtctgagcctttgaggaaggggaggagaaggcaagctacaaaggtgctacgcctgggttccggccgctccctgtcatgaactggcttcacgtctcctcgcgtctcttctcgttcctgctgcgcctctctcatactcgcnccgacatatccagatcgcgcagccgtaccgcgacctctctcgtgctcgcggcccgcgcgcccggcgcgggaccagcggcggaggcctcgcggctccacgcctgcctccggttcctcgccccggccaaccccac

SEQ ID NO: 129410 - DNA, 337 bp, Zea mays
  Clone ID: MRT4577_49497C.1
gcggccacttgtcaccgacgaatgccggaagataacagaaatgtattatatcgaccaataaaaaaaaaaaaaaaaaaaaaaaaaaaaaaaaaaaaaaaaaaaaaaaaaaaaaaaaattgggtttcatcacctatttaagacaatagacaggggcctatacttacaacattcctctatcaagcgccaataaataccctaaccttaactacagaaatgccagccaaaacaataagaatagcatttaacaacttgcaaaaaaaaaggacttgacacaccccacaaaaaactagcctctctaaaaaagaaaacaaaaatactaccctaaagaataaaataa

SEQ ID NO: 129411 - DNA, 474 bp, Zea mays
  Clone ID: MRT4577_49498C.1
ctaaaatattggtaatcacacatggattggatatcatagtatttattaggggtttattttgcagagaatgataatgctaggagttatgtttctgaaagcaccgccactccttccctttatggcacaaatcaatcttatacagccccagaccattctcagaatgtttaccaggttcctcctgtaccatcattttgatttaccagttcaatgtttgccagaataaactaatatatatcctaacaaatgtgccgttttaggttttctttctgtcaaacgttttctgtaagagttgcatagtagatttacatcgcaatattgatgttgctaggttcatcataaaaatgaattcacaatatttgacatatttatttaaaatgtcatattctcatagaaactaaagtcaagtgtcatcttgaaggctgggacaatgtcttgaacatcaaacatttttttatcaatgggaggggcattttt

SEQ ID NO: 129412 - DNA, 297 bp, Zea mays
  Clone ID: MRT4577_49499C.1
cggccggggcaacctgtctgctctatatcctacgactagctagctagctagctactgtgtagctactagcgtactctacgctgcagctgggcaagaatcgacgatcgacgccacacgacgacgacgacgatggcttatttccttgccagtaataagtgcgtgctgctgtccctcttctccgtcgtcgtgctcctctgtctcggcggcggcgcctccgccatgggcagcctgcccccgccaccgccgatggtgaacttcagcatcggcgtgcagggcgtggtgtggtgcaacacgtgc

SEQ ID NO: 129413 - DNA, 309 bp, Zea mays
  Clone ID: MRT4577_4949C.1
acatatgagggaaacatctttgtaatcatacaaagtacacttattcaatgacaggcagaggaaaagcctcatttagaaaaacagatgtggtttaccacgaaaaaaagcacaagggcaagggagggacgaacagaatgggctggggcctacacaaaaaaaggacaacgagagccccgtttagactcttgacaaggaaataatgaacctggaaaaaaaaccatccggaagctgggggatcctgaagggcgccagagaagggatacacatccatacctggaccaacatactttggcaaaaggggacccacgg

SEQ ID NO: 129414 - DNA, 280 bp, Zea mays
  unsure (1)..(280): unsure at all n locations
  Clone ID: MRT4577_494C.1
cgcttccgcgtgctggcgcttgttgggcggccgtcggggcgcgttggctcgtgcgctgccgcctctgccttcgaagtggctgcgccggccgcgggatgggtcccatattatgcgttgtcgcccctgcgcgttcctctcctccggcactgcgcaatccgggaggaaaaaacaattttttttttaggccccnccgccgagggggggaggaccccccggggcgggacggggccgccccgcccccgccccgcgggcgaccgcagccgccgcccaggcacggcag

SEQ ID NO: 129415 - DNA, 148 bp, Zea mays
  Clone ID: MRT4577_49500C.1
aacatgcatcgggaccgtctatgggtgtgtgtgtcaaaagcatgtggacgtctttgtgggcacaggttgcgatggttatggcgttggagtacttggtgaaaaggtcattgtgaggacctcccaatctcccaccaggcataaacatcac

SEQ ID NO: 129416 - DNA, 243 bp, Zea mays
  Clone ID: MRT4577_49501C.1
caggcgtccgaacaaccccggcttcccttacaatgccgtttttgtttatgacaaggcgccaaacgccgtggacaggtcaattatataatagggggggcacctcaacaccccatgcgagacctactccgtcaccctcaccgtgccgggcacctacggtttctactgtgtgccgcaccaaggcccggaatgggcggcatgaccacactcaactaaagctagctatccattccatgcatcttgatc

SEQ ID NO: 129417 - DNA, 253 bp, Zea mays
  unsure (1)..(253): unsure at all n locations
  Clone ID: MRT4577_49502C.1
cgaagctgatgttccaggcacacttcgtctgcgacgtccagcagccgctgcacgcatgctttcagaggatgacgtctggcagcttcacatgcagaaggccatgggttctctatttatgcatactctgagcagttctatgactatatcctaggcgtgattgattgacttaattctggattgagttcacgtgaaatcatgagcacccccaatgcaaangggttagggtatgacatgcacacagctgcggcgctta

SEQ ID NO: 129418 - DNA, 354 bp, Zea mays
  Clone ID: MRT4577_49503C.1
tttgggggacatgaaggttatacacgtgtcacgaacaaagcatgacaaaaccggatgttacacaaaacgcctggggggccgttgcacgtaaggcacaacatgcgatgggtaaataaaaaagaggccatcaaacaccgtgaaaaaaaaaacacgggctgggatggtatactggaagcccaccagaattagggtaccagactcgcatgcactagaacaaaatggacaggatgaaacctgtaaaacccacgaacagaatttgcaggcaagcataatactgtacacgatatatggccctggagaatgggctcaggaagacaagagggacagattccgatgccttaaagaaacatttta

SEQ ID NO: 129419 - DNA, 600 bp, Zea mays
  Clone ID: MRT4577_49504C.1
ccggccggagcaaacagaccagatacaaaccaagccacgtattaatacacgcttgcaatcataagaccggttcattttctccgttggacatattcatcgtcatatttttcagctttctcttacatcagagaagttcaagtttgcacctaaactccatcatggccagcaacgaccccaagcccgacaccgctaataacaagccggaaaatgcctcagacgatgctcgcgctgatgttacagcggccgttgaagagctcctaaactctctctccaacaagtttgcgggtgtttcctcagagatctttgctaagatggatgagatgtctcgaagattggataaccttgaggcagcccttcaagagagcaacaagccaaaagacggaagcgcaaacaaaccttaataggtttcatacatatatcaagagtacagggcgtttaggttatctcacgagctttgcttcattatacgcaaatagaagggccagcatgtctgcttgttacggtattttcattatatcgttacttcaagtaacccaagaatcaactacatacgagatctgtggttctgtactcaaaaaaaaaaaaaaaaaacccgcggcc

SEQ ID NO: 129420 - DNA, 230 bp, Zea mays
  Clone ID: MRT4577_49505C.1
ttttacttttttttttatttacgtatgcatgtttgtgttgggtagggttagtttacatagggaagaaaaattgattcaaggaaaatcgaaacaccatatcagggcccgcaaattgctgacacccaaccatgggcgggcgactaaacaattgtgcatttaatatatgaatgcgcaaatacaaaaaaaattccctcaaccccaaaacaaaaatgggaaaaaaaccgaataaa

SEQ ID NO: 129421 - DNA, 169 bp, Zea mays
  Clone ID: MRT4577_49506C.1
agccaggatcctcaacactcgacccaagagaacgcgcgaacccaaaaaaaacacgccgcgcggaacacccagcggggggccgacgacccggaaactacagacccgaggggcagaagccacacgggcaaaaagaggaccaccgctcggcgcaaccgagcgccccaaaagg

SEQ ID NO: 129422 - DNA, 608 bp, Zea mays
  Clone ID: MRT4577_49507C.1
cagtacagaaagaacccattgttgttggaaaaccttcaggttttttgatggacttcctcttgaaaagcttcaatctggagacgtcaaggatgtgcatggttggtgatagactggacacggacatactatttggccagaacaccggctgcaagaccctccttgttttgtctggttgcactgccttaccagaagtgcaggatgctcgtaacaatatccatccagatctctacacaaacagcgtgtatgatctagttgggttactgcagaagtaattctccttggccgcgttgcagcgcaatctcagcacgctttggatagcgcctatcagcaatttattacgtggattacttgcatgaagccatgtgttcttgaaacaacaattttgaactttctttggggtaacctgtttgacagtaacaaaatctttcaattggatcctacaaattagaccaatttgacaaccttgtaagcgtggctgtaaagctttaaatctggcaacttgattcccttgctggaaaatatattggttggagtatggaattgtacagaatcgaattgtaataaagcaacgtgttatactttgttgctaaacaacccccgtgtttccg

SEQ ID NO: 129423 - DNA, 508 bp, Zea mays
  Clone ID: MRT4577_49508C.1
gaaaagcttcaatctggagacgtcaaggatgtgcatggttggtgatagactggacacggacatactatttggccagaacaccggctgcaagaccctccttgttttgtctggttgcactgccttaccagaagtgcaggatgctcgtaacaatatccatccagatctctacacgaacagcgtgtatgatctagttgggttactgcagaagtaattctccttggtcgcattgcagcgcaatctcagcgcgctttggataacctgtgcttacatgaagcccttgtgcttgaaacaacaattttcaactttctttggggtaacctgtttgacagtaacaaaatctttcaagtggattcctacaaattagaccaatttgacaaccttgtaagcgtgattgtaaagctttaaatctggcaacttgattccgttgccggaaaatatattggttggagtatggaattgtacagaatcgaattgtaataaagcaacgtgttatactttgttgctaacc

SEQ ID NO: 129424 - DNA, 374 bp, Zea mays
  Clone ID: MRT4577_49509C.1
cagacaaagctggtccggggtgcggattgtggaaggtggctcggtggcacccacccatcaaacatggctggggtgcatagatcggcgaccacgtttagacagtacagctcgtcgggcctggtctgggacaagcgtttactgaccgaggccgacgcacaggcgaatgccgtcgccgcggaggatgcccagcagccggtgctccggctctcgaggagcgtcagaatgctgctccatgcggtcggtggtggagacagccgcatcacgaagggcaaggagagtaggcagatgcaggcggtgtaggtgctgctcaacaaccatcaagtgttgcggcacaaggacgtgggcacagacatggatccttcctcgcccagggt

SEQ ID NO: 129425 - DNA, 352 bp, Zea mays
  Clone ID: MRT4577_4950C.1
agtttttgtccgataactgctgataaaactcgcaaaatttcaacttttccgatcgccgaaaaagtcgggggaaaaggggtccggtgaaaatcccggcggccggaccatccgtcattacttgtgtcgatatccgataccatacctcgatcgctacccaagcccgtaccgataaagggggaccccaccgactggccagactccctcaacacccaccccctctatatagctcaatagccacttttccctcttggcaccaacagacattgaaatgtgtgacgagacaccggtgccgaaaaaaaataaatactctggatttgacaattcttttttgccttgcattataagcatacta

SEQ ID NO: 129426 - DNA, 354 bp, Zea mays
  Clone ID: MRT4577_49510C.1
atatttcatcccaacaaatagtctttgccatcaaacaaccattgttttgtttggcaagatgttttttgattggtgggtgaggtgatggaggggatagcgatcctaccttgatagatgtgcttttcaccgctatatatgggttggaattggacacctaattttagaaagaacaggtcaacaaaaaggggcaattggtttacctggctggagagcgcatcaattgcatagggggttttgcttacccaaagagggccctaatgtgaggttggtgtaaactaaaaaaaaaacttcccccgcccctggagttttttttctttggcacctttttggggctcaacaaaagggggatttttt

SEQ ID NO: 129427 - DNA, 318 bp, Zea mays
  Clone ID: MRT4577_49511C.1
attgttttttttattttctcgtcgtgcgagcagagtgtgttcatgttgatttacgtgctcaccatccttaaaacaggtgagctcgacgcaccactacgacacttggtgaacattacacacaattcctcgcctcacagacagaatcatttatcgggggcagtctgcggcggatcgtcatggcctgagaaacgttcagcgcaatatacatgtacgagagaaccttgtgtgctaaagcagtcttctgtggagggctgtctttccccttaggcccaatttgggacttgttggctcgcgtttttttttacggcggcttgaacg

SEQ ID NO: 129428 - DNA, 3813 bp, Zea mays
  Clone ID: MRT4577_49512C.1
atggagaccggcgaaaagcccactacaagccacgggagcacttcatcggaagagtcccgcaccaagaggaaggtgaagaaggactcctccaaagggaaggagaagaaatcttcttcacacaaagagaagaaggaaaaatcctcttctcacaagcctcgtcggagtggggacaagaaagaagatgaggaaagtggcaaaccaccaacttttgatggtgaagattatgctaggtggagtgatttaatgcgatttcatctaacctcactccacaaaagtatatgggatgttgttgagtttggtgcacaggtaccatccgtaggggatgaagactatgatgaggatgaggtggcccaaatcgagcacttcaactctcaagcaacaacaatactcctcgcctctctaagtagagaggagtataacaaagtgcaagggttgaagagcgccaaggaggtttgggatgtgctcaaaaccgcacacgaaggagatgagctcacaaagatcaccaagcgggagacgatcgagggggagctcgtgcgcaacctcgggagcaaaaagtgggatgaccacgaggtggttaaggttattctaagatctcttattttccttaaccctactcaagttcaattaatctgtggcaacccaagatatacactaatgacccccgaggaagtaatcgggaattttgtaagttttgagtgcatgatcgaaggctcgaggaagatcaacgagcttgatgatccctccacatccgaagctcaacccgtcgcattcaaggcgacggaggaaaagaaggaggagtctacaccaaatcgacaaccaatcgatgcctccaagctcgacaatgaggaaatggcgctcgtcatcaaaagcttccgccaaatcctcaaacaaagggggggggaaagactacaagtcccgctccaagaaggtttgctacaagtgtggggcgacgacaagaaggggagaagaagggagaagaagaggtactacaagaagaagggcgacaatgcccatgtttatcgggagtgggactccgatgaaagctctagcgactcctccgacgacgaggacgccgccaacatcgccgtcaccaaaggacttctcttccccaacgtcggccacaagtgcctcatggcaaaggatggcaaaaagaagaaggttaaatctaaatcctccactagatatgaatcctctagtgatgaaaatgttagtgatgaggaagataacttgcactctctttttgccaaccttaacatggaacaaaaagaaaaattaaatgaattgattagtgctattcatgaaaaggatgaccttttagattctcaagaggacttccttattaaagaaaataagaaacatgttaaggttaaaaatgcttatgctctagaaattgagaaatgtgaaaaattatctagtgagctaagcacttgccatgagacaatagacaaccttagaaatgaaaatgctaatttgttagctaaggttgattctcatgtttgtaatgtttcaattaccaattctagaaataatgatgatgattcacttgctagaattgaagaattgaacatttctcttgctagccttaggattgaaaatgaaaaattgcttgctaaggctaaagattttgatgtttgcaatgctactatttccgaccttagaactaagaatgacatgttacaagctaaggttgtagaattaaaatcttgcaaaccctctacatctattgttgagcatgtatctatttgtactagatgtagagatgttgatatcaatgctattcatgatcacatggctttaattaaacaacaaaatgatcatatagcaaaactagatgctaaaattgccgagcataatttagaaaatgaaaaatttaaatttgctagaagtatgctctatagtgggagacgccctggcatcaaggatggcattggcttccaaaggggagacaatgtttatgcatccgggggctcaagttggatactcgacagtgggtgcacaaaccacatgacaggggagaagaaaatgttctcctcctatgagaaaaaccaagatccccaacgagctatcacattcggggatggaaatcaaggtttggtcaaagattctttagattacaatttgctttccgtatctcaattatgcaaaatgggctacaactgtctctttactgatgaaaaatctcaaacccaagaaaccttaaagggattcttgagacgagctcaaaacgagttcggattaaggatcaagaaaattagaagcgacaacgggacggagttcaagaactcacaaattgaaggcttccttgaggaggagggcatcaagcatgagttctcttctccctacacgccacaacaaaatggtgtagtggagaggaaaaatagaactctattggacatggcaagaaccatgcttgatgagtacaagacttcggatcggttttgggccgaggcggtcaacaccgcctgctacgccatcaaccagttatatctacaccaaatcctcaagaagacatcttatgaacttctaaccggtaaaaagcccaacatttcatattttagagtctttggtagcaaatgctttattcttgttaaaagaggtagaaaatctaaatttgctcctaagactgtagaaggctttttactaggatatgattcgaacacaagggcatatagaatctttaacaagtccactggacaagttgaagtttcttgtgacgttgtgtttgatgagactaacggctctcaagtagagcaagttgatcttgatgagataggtgatgaagaggccccgtgcatcgcgctaaggaacatgtccattggggatgtgtgtcctaaggaatccgaagagcctccaaatgcacaagatcaaccatcctcctccatgcaagcatctccaccgactcaaaatgaggatgaagctcaagttgatgaagtagaagatcaagcaaatgagccacctcaagatgatggcaacaatcaagggggagatgcaaatgaggaagacaaggaggatgaagagcaaaggccgccacacccaagagtccaccaagcaatccaacgagatcaccccgtcgacaccatcctcggcgacattcataagggggtaactactagatctcgtgttgcacatttttgtgagcattactcttttgtttcctctattgaaccacacagggtagaggaagcactccaagattcggattgggtggtggcgatgcaagaggagctcaacaacttcactaggaatgaggtatggcatttagttccacgtcctaatcaaaatgttgtagggaccaaatgggtcttccgcaacaagcaagatgagcatggtgtggtgacaaggaacaaagctcgacttgtggccaagggatactcccaagtcgaaggtttggatttcggtgaaacctatgcacccgtagctaggcttgagtcaattcgcatattattagcctatgctacttaccatggctttaagctttatcaaatggacgtgaaaagtgccttcctcagtggaccaatcaaggaagaggtctatgttgagcaacctctcggctttgaagacagtgagtaccctaaccatgtctataagctctctaaggcgctttatgggctcaagcaagccccaagagcatggtatgaatgccttagagatttccttatcgctaatggcttcaaagtcggaaaggccgatcctacactctttaccaaaacacttgaaaatgatttgtttgtatgccaaatttatgttgatgatattatatttgggtctactaacgaatctacatgtgaagagtttagtaggatcatgacatag

SEQ ID NO: 129429 - DNA, 1815 bp, Zea mays
  Clone ID: MRT4577_49513C.1
atgtcgggaggatccgccaagagggagatggaaacagacacaagccgcgggaaggctccatcaagggagtccggcgccaaaggaagggaggactcacctccccacgtcaagtcgcaccggagtggcgataagaagaagaaaatgaagaaagtggtctactacaagaccgattcttcgtcgccctccacctccggctccaacgcaccgtctgtcacttctaagcgccatgagcacaagaagtttagggatgaggtgaccaagatcaccaagcaggagacgatcgagggggagcttggtcgattcgtcctcaaccaaggagaggagccacaagccatgtacaatcggctcaagaccttggtcaaccaagtgcgcaacctcgggagcacaaaatgggatgaccatgaaatggtcaaggaggttatagggaagtttgtgagctttgagttgatgatcaaaggctccaaacaaatcatcgagcaaggcggcacctccacaactgaggtgcaacccgtcgcattcaaagcgacggaagaaaagaaagaagagtctacatcaagtaggctccccatcgacgcctctaagctcgacaacgaggaaatggcgcccatcatcaagagcttccgccaaatcctcaagcaaaggagggggaaggattacataccccgctccaagaaagtgtgctacaaatgtggtaagcccggtcattttatcgctaaatgccctatgtcgagtgatagtgacagggacaacgacaagagggggaataagaagagatattacaagaaaaagggcggcgatgcccacatatgtcgagaatgggacttcgacgagagcaccaccggctcctcctccaacgaggacgccgccaacatcgccgtcaacaagggcctcctcttccccaacgacggccacaagtgcctcatggcaaaggacgacaaaaagaagaaggtaaaaactagagcctccactaaatatacaacatctagtgatgagggtagttctagtgaagatgaggatgatttgcttagtctttttgccaaccttaacatgcaacaaaaggaaaaactaaatgaattgataggtgccattcatgagaaggatgaactcttggatagccaagaggaattccttattaaggaaaataaaaaatatgttaagataaaggatgcttgtgctcaggaagtagaaaaaaatgaaaatttgactaaggagcttagcatttgccatgacaccatttccaaccttagaaatgagaacgctaaactagatgctaaaattgccgagcatgaactagagaatgaaaattttaaatttgctcgtagcatgctttataatgggagacgccctagcattaaggatggcattggtttccaacagggaagcaatgtcaagcttaatgcccctaagaaattgtcaaactttgtaaagggcaaggctcccatggctcgggataacgagggttacattttatatcctgctggttatcctgagcataagattaggagaattcattctaggaagtctcattctggttctcatcatgcttttatgtataagaatgagacatctagttctaaacattctacccatgttaaaatgcctaaaaagaaaactcatgctgcatcaaatgagccaattatttcatttcagacttttgatgcatcttatgtgctgactaacaaatcaggcaaagtagttgccaaatatgttggggccaaacacaagggatcaaagacttgtgtttgggtgcccaaggtgcttgtctctaacatcaaaggacccaagactatttgggtacctaagaacaaggtctaa

SEQ ID NO: 129430 - DNA, 3045 bp, Zea mays
  Clone ID: MRT4577_49514C.1
atggtgaccggcgagaagcccgccacacgccacaagaagagggaggaatcacctccccgcgtcaagtcacaccggagtggcgacaagaagaaaatgaagaaagtggtatattacgagactgattcttcgtcgccttccacctccggctccgacgcgccgtccatcacttctaagcgccatgagcgcaagaagtttagggatgaaggatatgactcggacaaggtagcccaaatccggcacttcaactcccaagccaccaatatactcctcgcctctctaagtcgagaggagtataataaggtgcaagggttgaagagtgccaaagagatttgggacgtgctcaagaccccgcacgaaggagatgaggtgaccaagatcaccaagagggaaacgatcgagggggagctcggtcggttcatgcttcaccaaggggaggagccacaagcaatgtacaaccggctcaagacattggtgaaccaagtgcgcaacctcgggagcacaaaatgggatgaccatgaaatggtcaaggttattcgaagatcacccatttttcttaatcctactgaagttcaattaattcgtggtgatcctagatacaagctaatgtctcccgaggaggttataggaaaatttgtgagctttgaattgatgatcaaaggctccaagaaaatcatcgagcaaggtgttactgtctttagaagaagtgatgattcagtagcatttaagggagtgttagagggtcagctatacttagttgattttaatagagctgaactcaacacttgcttaattattaagactaacatgggttggctctggcatcgccgactagcccacgttgggatgaagaatcttcacaagcttctaaagggagagcacattttgggactaaccaatgttcattttgagaaagacaggatttgtagcgcatgtcaagcagggaagcaagttggtgttcaccatccacacaagaacatcatgacgactgataggccactcgagctactccacatggacctattcgacccgatagcttacataagcatcggcaggagtaagtgctgtcttgttattgtggatgattattcttgcttcacttgggtgttctttttgcaggaaaaatcacaaacccaagaaaccttaaagggattcctgagacgggctcaaaatgagttcggcttaaggatcaaaaagattagaagcgacaacgggacggagttcaagaactcacaaatagaaggctttcttgaggaagagggcatcaagcatgagttctcttctccctacatgccacaacaaaatggtgtagtggagaggaagaatagaactatacttgacatggcgaggaccatgcttgatgagtacaagacttcagaccggttttgggcggaagcaatcaacacggcttgctacaccatcaaccgtctctaccttcaccgaatcctcaagaagacatcgtatgaactcctcaccggtaaaaagcccaatgtttcatattttagagtctttggtagcaaatgtttcattcttgttaaaagaggtagaaaatctaaatttgctcctaaggctgtacaaggatttttacttggttatgattcaaacacaagggcatatagagtctttaacaagtccattggactagttgaagtttcttgtgacattgtgtttgatgagactaacggctctcaagtagagcaagttgatcttgatgaactagatgatgaagaggctccgtgcatcgcgctaaggaacatgtccattggggacgtgtgccctaaggaatccgatgagcctccacatgcacaagatcaaccatcttcctcaatgcaagcatctccaccaactcaagataaggatcaagctcaaaatgatgagaatgaagaccaagaggagccacctcaagaggaggacaatgatcaagggggagatgctaatgatcaagacaaggaagatgatgacggtccaaggccgcctcacccaagagtccaccaagcaatacaacgagatcaccccgtgaacgccatcctcggcgatattcaaaagggggtaaccactcgatctcgtgttgctcatttttgtgaacattactcctttgtgtcttctattaagtcatacagggtggaagacgcattaagggattcggattgggtgttggcaatgcaagaggaactcaacaacttcacgaggaatgaggcgctttatgggctcaagcaagccccaagagcatggtatcaatgcctaagagattttcttatcgctaatggcttcaaactcagaaaagtcgaccctactctctttactaagacaattgcaaatgatttgtttgtatgccaaatttatgttgatgatatcatatttgggtctactaacaaatctacttgtgaagagtttagtaggatcatggtacaaaaattcgagatgtctatgatgggggagttgaagtattttctaggatttcaagtcaagcaactccaagagggcaccttcatcagccaaacgaagtacattcaagacatactcaccaagtttgcgatgaagaatgccaagcccatcaagacacccatgggaaccaatgggcatctcgacctcgacacgggagggtgtaaaattgatagaaagagcacatcagggacttgtcaattcttgggaagatccctggtgtcttgggcttctaagaaacaaaattcagtagctctttctactgccgaagccgagtacattatcgcaggccattgttgcgtgcaattgctttggatgaggcaaacccttagggattatggttacaaattaaccaaagtccctctcctatgtgataatgagagtgcaatccgcatggcggataatcccgttgaacacagttgcactaagcacatagccattcggtatcactttttgagggatcaccaacaacggggggatatcgatattgcatatgttagcaccaaagaacaattagccgatatctttaccaaaccattagatgagaaaacttttaccaaacttaggcatgatctaaacattcttgattctaggaattttgattga

SEQ ID NO: 129431 - DNA, 134 bp, Zea mays
  Clone ID: MRT4577_49515C.1
cttcgatttacttttctatgctcagtgctcacctgtgtttttttcggttttatagcaaactcctcacatgcacattgaacccacagctttgagatattaagaaacattttgctcacacgtgcagtaaaacaaaa

SEQ ID NO: 129432 - DNA, 3894 bp, Zea mays
  Clone ID: MRT4577_49516C.1
atggccacaagccacgggaaggctccatcaaaggagtccgacgccaaaggaagggaggaatcaccttcctgcgtcaagtcgcaccggagtggcgacaagaagaagaaaataaagaaagtggtctactacaagaccgattcttcgtcgccctccacctccggctccaatgcaccgtccgtcacttctaagcgccatgagcgcaagaagtttagggatgaaggatatgattcggacgaggtcgcccaaattcgtcactttgactcccaagaaactactatactcctcgcctccttgtgtcgagaggaatataacaaggtgcaagggctaaaaagtgccaaagagatttgggatgtactaaagaccgcgcacgaaggggatgaggtgaccaagatcaccaagagggagactatcgagggggagttcggtcgattcatcctcaaccaaggagaagagccacaagcgatgtacaaccggctcaagaccttggtcaaccaagtgcgcaacctcgggagcacaaaatgggatgaccatgaaatggtcaaagttattctaagatcactcgtttttcgtaatcctacgcaagttcaattaatatgtggtgatcctagatataagctaatgtctcccgaggagctcgacaacgagcaaatggcgctcatcatcaagagttttcgccaaatcctcaagcaaaggaaggggaaagactacaaaccctgttccaaaaaggtgtgctacaagtgtggtaagcccggtcattttattgcaaaatgtcctatttctagtgacagtgataggggcgacgacaagagagggaagaagaaggagaagaagagatattacaagaagaaggcggcgatgcccacggtctcctcttcccccaacgtcggccacaagtgtatcatggcaaaggacgacaagaaaaagaaggtacaagctagaaccacccccaagtatactacatctaatgatgagggtagttctagtgataatgaagataacttgcttagtctttttgccaaccttaacatgcaacaaaaggaaaaactaaatgaattgataagtgctattcatgagaaggatgaactcttggatagccaagaggaatttcttattaaggaaaataagaagcatgttaaggagcttagcatttgccatgacaccatttccaaccttagagatgagaacaatagtttaattgctaaggttgagaaatcaaaagtttgccatgattcaattgacaatcttagaaatgaaaatgctagtttatttgctaagattgataaattgaatgaatcaattgctagccttaaaactgagaatgataagttaatttctaaggctaaagatttgaatgtttgcaatatttatatttccaatcttagaaatgagaatgctattttacatactaagattgatgaattaaatgcttgcaaaccctctacatctactgttggtcatgttactatttgtactagatgtggagacattaatgttgatgctattcatgatcacctagctttaattaaacaacaaaatgatcacatagctcaactaactgccaaaatcaatgagcatgagatagaaaatgaaaaatttaaatttgctagaagcatgctctataatgggagacgccctggcatcaaggatggaattggtttccaacaaggaagcaatggcaaggctcccatggctcaagataatgagggttacattttatatcctgctggttatcctgagcacaaaattaggagaattcatgctaagaagtctcattctatttcccatcatgcttttatgtacaagaatgaggcatctagctctaggcattctacccatgttaaaatgcctaaaaagaaaactcctactgcatcaaatgagcctaatgcttcatctaagacttttgatgcaccttatgtgcttactaacaaatcaggcaaagtagttgccaaatatgttgggggaaacacaagggctccaagacttgtgtttggatacccaaggaataatagaactctattggacatggcgaggaccatgcttgatgagtacaagacatcggaccagttttgggtggaagcaatcaacactgcttgctactccatcaaccggctctaccttcaccgaatcctcaagaagacatcatatgaactcctcaccagtaaaaagcccaatgtttcatattttagagtctttggtagcaaatgctttattctttttaaaagaggtagaaaatccaaatttgctcctaaagttgtagaaggttttttacttggttatgactcaaacacaagggcatatagagtcttcaacaaatccactggattagttgaggtttcttgttacattatgtttgatgagactaacggctcccaagtggagcaagttgatcttgatgagctagatgatgaagaggctccgtgtgtcgcgctaaggaacatgtctattggggatgtgtgtcctaaggaatccaaagacctacacaagcgcaagatcaaccatcatcttccaatcaagcatctccacaaacccaagataaggatcaggctcaagacaatgaagatgaagatcaataggatgagccacctcaagaggaggacaatgatcaagggggagatgacaatgatcaagacaaggaagatgatcaaaattcagggaaccaagtgggttttccgcaacaagcaagatgagcatggtgtggtgacaaggaacaaagcccgacttgtggccaagggatattcacaagtcgaaggtttggattttggtgaaacctatgcacccgtagctaggcttgagtcaatttgtatattacttgcctatgctactcatcatggctttaagctttatcaaatggacgtgaaaagtgccttcctcaatggaccaatcaaggaagaggtctatgttgagcaacctcctggctttgaagatagtgagtaccctaaccatgtttataaactctcaaaggcgctttatgggctcaagcaagccccaagagcatggtatgaatgcctaagagattttctcatcactaatggattcaaattgaagtatttcctaggatttcaagtcaagcaactccaagaaggcaccttcatcagccaaacaaagtacattgaagatatacttaccaagtttagaatgaaggatgctaagcccatcaagacacccatgggaactaatgggcatctcgacctcgacatgggaggtaaatccgtagatcaaaaggtataccggtcgatgataggatctttactctatttatgtgcatatcgaccggacattatgctttccgtatgcatgtgtgcaaggttccaagccgatcctaaggaagttcaccttagatccatgaaaagaatcatgagatatttagtttacactcctaagtttggactttggtaccccaagggatccacttttgatttaaaaggatattcagatgttgattgggtagggtgtaaaattgatagaaaaagcacatcagagacttgtcagtttttggggagatcactggtgtcttgggcttcaaagaaacaaaactcagtagctctttctaccgccgaagccgagtacattgccgcaggccattgttgtgcgcaattactttgggtgagacaaactctcagggactatggctacaaattgagcaaagtccctctcctatgtgataatgagagtgcaatctgcatagcggataatcccgttgaacacagccgcattaagcacatagacattcggtatcactttttgagggatcaccaacaaaggggggatattgagatagcttatgttagcacaaaagaacaattagccgatatctttaccaaaccattagatgagaaaacctttaccaaacttaggaatgagctaaacattcttgattctcgaaattttgattga

SEQ ID NO: 129433 - DNA, 1941 bp, Zea mays
  Clone ID: MRT4577_49517C.1
atgtcgggaggatccgccaagagggagatggaaaccgacgagaaggccacaagccacgggaaggctccatcaagggagtctgccaccaaagccaaggagggatcccctccccgcgtcaagtcgcattggagtggtgacaacaagaagaagatgaagaaagtggtctactacgagactgactcttcgttgccctccacttccggctccgacgcggcgtccgtcacttctaagcgccatgagcgcaagaatgataaaatgaggcatcgcctaacctcactccacgcaagcatttgggacattgttgaatttggagtgcaggagtataataaggtgcaagggttaaaaagtgtcaaggagatttgggacgtcctaaagaccgcacacgaaggggatgaggtgaccaagatcaccaagcgggagacaatcaagggggagctcagtcgattcgtcctcaaccaaggagaggagccacaagcaatgtacaaccggctcaagaccttggtcaaccaagtgcgcaacctcgtgagcaccaagtgggatgaccatgaaatggtcaaggtgcaacccgtcgcattcaaagcgacagaagagaagaaagaagagtctacatcaagtaggctccccattgacgcctccaagctcgacaatgaggagatggcgctcatcatcaagagcttccgtcaaatcctcaagcaaaggagggggaaggattacaaaccccgctccaagagggtgtgctacaagtatggtaagcccgatcattttattgctaaatgtccaatgtctagtgatagtgacaggggcgacgacaagagggggaagaagaagtactacaagaggaagggcggcgatgcccacgtttgtcgggaatgggaatccgacgagagctccaccgactcctcctctaacgaggatggcgccaacatcgccgtcaacaaaggcctcctcttccccaacatcggccacaagtgcttcatggcaaaggacgtcaaaaagaagaaggtacaatctagaaccacctccaagtatactacatctagtgatgagggtagttctagtgaagatgaagatgacttgctcactctttttaccaaccttaacatgcaacaaaaagaaaaattaaatgaactaataggagctattcatgagaaggatgaactcttcgatagccaagaggaattcctcattaaagaaaacaaaaagcatgttaaaataaaaaatgcctatgctgaggaagtttatgcatccggaggctcaagttggataattgatagtggatgcacaaaccacatgacaggggagaaaataatgttctcctcctatgagaaaaacgaatatccccaacgagctatcacattcagggatggaaatcaagatataggtgttactgtctttagaagaagtgatgattcagtagcatttaagggagtattagagggtcagctatacttagttgattttaacaaagctgaactcgatacttgcttaattgctaagactaatatgggttcgctctggcatcgccgactagcccttgttggcatgaagaatcttcacaagcttctaaagggagagcacattttgggactaacaaatgttcattttgagaaagatagggaaaaatcacaaacccaagagactttaaagggattcttgagatgggctcaaaatgagttcggattgagaatcaaaaagataaaaagtgacaacgggacggagttcaagaactcacaaattgaaggctttcttgaggatgagagcatcaagcatgagttctcttctccctacacacctcaacaaaatggtgtagttgagaggaagaatagaactctattggacatggcgaggaccatgcttgatgagtacaagactccggaccagttttgggctgaggcgattaacaccgcctgctactccctcaaccggctctaccttcactga

SEQ ID NO: 129434 - DNA, 1539 bp, Zea mays
  Clone ID: MRT4577_49518C.1
atgtcgggagatcacgccaagaaggagatggagaccggcgaaaagcccactacaagccaagggagcacttcatcggaagagtcccgcaccaaaaggagggagaagaagaagagctcttccatcaaagggaaggagaagaaatcttcttctcaccacaaagagaagaaggaaaaatcttattcccacaagccgcatcggaaaggcgacaagcacaagagaatgaggaaggtggtctactacgagaccgacacttcatcaacttctacctccgactccgatgcgccctccgtcacttctaagcgccaagagcgcaagaagtatattcaattgattcgtggtaatcctagatacactaaaatgacccccgaggaagttatcgggcattttgtaagttttgagtgcatgatagaaggctcgaggaaaatcaacgagcttggcgagcgatccgaagctcaacccgttgcattcaaggcgacggaagaaaagaaggaggagtctacaccaagtagacaaccaatagatgcctccaagctcgacaatgaggaaatggcgctcgtcatcaagagcttccgccaaatcctaaagcaaaggagggggaaggactacaagtcccgctccaagaaggtttgctacaagtgtggtaagcccggtcattttattgctaaatgtcctatatctagtgacagtgaccgaggcgacgacaagaaggggagaagaaaggagaagaaaaggtactacaagaagaagggcggcgatgcccatgtttgtcgggaatgggattccgacgaaagctcaagcgactcctccgacgacgaggacgccgccaacatcgccgtcaccaagggactcctcttccccaacgtcggccacaagtgcctcatggcaaaggacggcaaaaagaagaaggaaaaatctcaaacccaagagaccttaaaaggattcttgagacgggcccaaaatgagttcgccttaaggatcaagaaaataagaagcgacaacgggacggagttcaagaactctcaaattgaaagcttccttgaggaggagggcatcaagcatgagttctcctctccctacactccacaacaaaatggtgtagttgagaggaagaatcgaactctattggacatggcaagaaccatgcttgatgagtacaagacaccggaccggttttgggccgaagcggtcaacaccgcctgctacgccatcaaccggttatatctgcaccgaatcctcaagaagacatcatatgaactcctaaccgggaatccgaagagcctccaaatgcacaagatcaaccgtcctcctccatgcaagcatctccaccaactcaaaatgaggatgaggctcaagttgatgaagggcaaaatcaagaagatgagccacctcaagatgatgacaatgatcaagggggagatgcaaatgatcaagagaaggaggatgaggaagaaccaagaccgccacacccaagagtccaccaagcaatccaacgagatcaccccgtcgacaccatcctcggcgacattcataagggggtaa

SEQ ID NO: 129435 - DNA, 8307 bp, Zea mays
  Clone ID: MRT4577_49519C.1
atgtcgggagatcacgccaagaaggagatggagaccggcgaaaagcccactacaagccacgggagcacttcatcggaagagtcccgcaccaagaggaaggagaagaaaaagagctcctccaacaaagggaaggagaagaaatcttcttcgcaccacaaggagaagaaggagagatcttcctcccacaagccacatcggagaggggacaagcacaaaaggatgaggaaagtggtctactatgagaccgacacttcatcaacatcgacctccggctccgatgcgccctccgtaacttctaaacgccaagagcgtaagaagtttagtaagatccccctacattaccctcgcatttctaaaaatgcacctttactttccgtcccattaggcaaaccaccaacttttgatggtgaagattatgctaggtggagtgatttaatgcgatttcatctaacctcactccacaaaagtatatgggatgttgttgagtttggtgcacaggtaccatccgtaggggataaagactatgatgaggatgaggtggcccaaatcgagcacttcaactctcaagcgacaacaatactcctcgcatctttaagtagagaggagtataacaaagttcaagggttgaagagcgcaaaggaggtttgggatgtgctcaaaaccgcgcacgagggagatgagctcacaaagatcaccaagcgggaaacgatcgagggggagctcggtcggttccgacttcgcaaaggggaggagccacaacacatgtacaaccggctcaagactttggtgaaccaagtgcgcaacctcgggagcacgaagtgggacgaccacgaaatggttaaggttattctaagatctctcattttccttaaccccactcaagttcaattaattcgtggtaatcctagatatactaaaatgacccccgaggaagttatcgggaattttgtaagttttgagtgcatgatcgaaggctcgaggaagatcaacgagcttgatgatccatccacatccgaagctcaacccgtcgcattcaaggcgacggaggaaaagaaggaggaggctacaccaagtcgacaacctatagacgcctccaagctcgacaatgaggaaatggcgctcgtcatcaagagcttccgccaaatcctcaagcaaaggagagggaaagactacaagtcccgctccaagaaggtttgctacaaatgtggtaagcccggtcattttattgctaaatgtcctatatcaagtgacagtgaccgaggcgacgacaagaaggggagaagaaaggagaaaaagaagtactacaagaagaagggcggcgatgcccatgtttgtcgggagtgggattccgacgaaagctcaagcgactcctccgacgacgaggacgccgccaacatcgccgtcaccaagggacttctcttccccaacgtcggccacaagtgcctcatggcaaaggacggcaaacggaagaaggttaaatctaactcctccactaaatatgagtcttctagtgatgataatgatagtgatgaggaggataatttgcgtgttctctttgccaatcttaacatggagcaaaaagaaaaattaaatgaattgattagtgctattcatgaaaaggatgaccttttggactcccaagaggattgtctaattaaagaaaacaagaaacatgttaaggttaaaaaggcttatgctctagaagtagaaaaatgtgaaaaattatctagtgagctaagcacttgccgtgagatgattgacaaccttaggaatgaaaatgctagtttaaatgctaaggttgattctcatgtttgcattgtttcaacttccaatcctaaagataataatgatgatttgcttgctaggattgaagaattgaatatttctcttgctagccttagagtagaaaataaaattttaattgctaaggctaaagattatgatgtttgcaaagttacaatttccgatcttagagataaaaatgatattcttcatgctaagattgttgaacttaattcttgcaaaccctctacatctattgttgagcatgtatctatttgtactagatgtagagatgttgatgttaatgctattcatgatcatatggctttaattaaacaacaaaatgatcatatagcaaaactagatgctaaaattgccgagcacaacttagaaaatgagaaatttaaatttgctcgtagcatgctttataatgggagacgccctggcattaaggatggcattggcttccaaaggggagacaatgtcaaaattaatgcccctcctaagaacttgtctaactttgttaagggcaaggctcccatgcctcaggataacgagggctacattttgtaccctgccggctatcctgagagcaaaattaggaaaattcattctaggaagtctcactctggccctaatcatgcttttatgtataagggtgagacatctagctctaggcaaccaacccgtgccaagttgcctagaaagaaaactcctaatgcatcaaatgatcatgccatttcatttaaaacttttgatgcttcttatatgcttactaacaaatccggcaaggtttatgcatccgggggctcaagttggatactcgacagcgggtgcacaaaccacatgacaggggagaaaaagatgttctcctcatatgagaaaaaccaagatccccaacgagctatcacattcggggatggaaatcaaggtgtcactgtctttagaagaagtgatgattcaatagcatttaagggagtgttagagggtcagctatacttagtagattttgatagagctgaactcgacacttgcttaactgctaagactaacatgggttggctctggcaccgccgactagcccatgttggaatgaagaatcttcataagcttctaaagggagaacacattttaggattaacaaatgttcattttgagaaagacaggatttgtagcgcatgccaggcagggaagcaagttggagctcatcatccacacaagaacatcatgacgaccgacaggccactggagctcctacacatggatctattcggcccgattgcttacataagcatcggcgggagtaagtactgtctagttattgtggatgattattctcgcttcacttgggtattctttttgcaggacaaatctcatacccaagagaccttaaagggattcttgagacgggctcaaaatgagttcggcttaaggatcaagaaaattagaagcgacaatgggacggagttcaagaactcacaaatagaagtggagaggaagaatcgaactctcttggacatggctagaaccatgcttgatgagtacaagacaccggatcggttttgggccgaggcggtcaacaccgcttgctacgccatcaaccggttatatctacaccgaatcctcaagaagacatcctatgaactcctaaccggtaaaaagcccaacatttcctattttagagtttttggtagcaaatgctttattcttgttaaaagaggtagaaaatctaaatttgctcctaagactgtagaaggccttttacttggctatgactcaaacacaagggcatatagagtctttaacaagtccactggactagttgaagtctcatgtgacgttgtgtttgatgagactaacggctctcaagtagagcaagttgatcttgatgagataggtgaagaacaggctccgtgcatcgcgctaagaaacatgtccattggggatgtgtgccctaaggaattcgaagagcctccaaatacacaagatcaaccatcctcctccacgcaagcatctccaccaacccatgatgaggacgaggctcaagttgatgaaggagaggatcaaaaggatgagccacctcaagatgacggcaacgatcaagggggagatgcaaatgatgaagacaaggaggacgaacaaccaaggccgccacacccaagagtccaccaagcaatccaacgagatcaccccgtcgacaccattctcggtgacattcataagggggtaaccactcgatctcgtgttgcacatttttgtgagcattactcttttgtttcctctattgagccacacagggtagaggaagcactacaagattcggattgggtggtggcgatgcaagaggagctcaacaatttcacaaggaacgaggtatggcacttagttccacgtcctaaccaaaatgttgtaggaaccaaatgggtcttccgcaacaagcaagatgagcatggtgtggtgacaaggaacaaagctcgacttgtggccaaaggatactcccaagtcgaaggtttggatttcggtgaaacctatgcacccgtagctaggcttgagtcaattcgcatattattagcctatgctacttaccatggctttaagctttatcaaatggacgtgaaaagtgctttcctcaatggaccaatcaaggaagaggtctatgttgagcaacctcccggctttgaagatagtaagtaccctaaccatgtctataagctctctaaggcgctttatgggctcaagcaagccccaagagcatggtatgaatgccttagagatttccttatcgctaatggcttcaaagtcggcaaggccgatcctactctattcactaagactcttgacaatgatttgtttgaatttagtaggatcatgacacagaaattcgagatgtctatgatgggggagttgaagtatttcttaggatttcaagtgaagcaactccaagagggcaccttcatttgtcaaacaaagtacactcaagacattctaaccaagtttggaatgaaggatgccaagcccatcaagactcccatgggaacaaatgggcatctcgacctcaacacgggaggtaagtccgtggatcaaaaggcgactttcaacagtgacaggggcgacgacaagaagggaaagaggagagaaaagaagaagtactacaagaagaagggcggcgatgcccatgtttgccgggaatgggactccgacgagagctccaccgagtcctcttccgacgaggacgccgccaacatcgccgtcaccaagggacttctcttccccaacgtcggccacaagtgcctcatggcaaaggacggcaaaaggaagaaggttaaatctaagtcctccacgaaatatgaatcctctagtgatgataatgctagtgatgaggagaataatttgcgtaccctttttgccaaccttaacatggaacaaaaggaaaaactaaatgagctaattagtgccatccatgaaaaggatgacctcttggactcccaagaggacttcctaatcaaggaaaataaaaagcatgtagaaaaatgtgagaaattatctagtgagctaagtacttgccatgatactattaccaaccttagaaatgaaaatgctagtttaaatgctaaggttgactcacatgtttgtaatgtttcaattcccaatcttagaaatgataatgatgatttgcttgctaagattgaagaattaaacatttctcttgctagccttagagtagaaaatgaaaatttaattgctaaggctaaagaactagatgtttgcaatgttacaatttccgatcttagagataataatgatatcttgcgtgctaagatcgttgaacttaattcatgcaaaccctctacatctagtgttgagcatgtttccttttgtactagatgtagagatgttgatattaatgctattcatgatcacatgactttgattaaacaacaaaatgatcatatagcaatattagatgcaaaaattgccgagcataacttagaaaatgaaaagtttaaatttgctagaagtatgctctataatgggagacaccctggcattaaggatggcattggctaccaaaggggagacaatgtcaaacttagtgcccctcctaaaagattgtcaaattttgttaagggcaaggctcccatgcctcaggataacgagggttacattttataccctgccggttatcctgagagcaaaattaggaaaattcactctaggaagtctcactctggccctaaccatgcttttatgtataagggtgagacatctagctctaggcaaccaacccgtgctaagttgcctaagaagaaaactcctagtgcatcaaatgagcatgacatttcttttaaaacttttgatgcatcatatgttttaactaacaaatccggcaaggtttatgcatccgggggctcaagttggatactcgacagcgggtgcacaaaccacatgacaggggaaaagaagatgttctcctcttatgagaaaaaccaagattcccaacgagctatcacattcggggatggaaatcaaggtgtcactgtctttagaagaagtgatgattcaatagcatttaagggagtgttagagggtcagctatacttggaaaaatctcaaacccaagagaccttaaagggattcttgagacgggctcaaaatgagttcggcttaaggatcaagaaaataagaagcgacaacgggacggagttcaagaactcacaaatagaaggtttccttgaggaggaggggatcaagcatgagttctcttctccctacacgccacaacaaaatggtgtagtggagaggaagaatcgaactctattggacatggctagaaccatgcttgatgagtacaagacaccggatcggttttgggccgaggcgagaggtagaaaatctaaatttgctcctaaaactgtagaaggctttttactaggatatgattcaaacacaagggcatatagagtctttaacaagtcctcaggactagttgaagtttcttgtaacgttgtgtttgatgaaactaacggctctcaagtagagcaagttgatcttgatgagataggtgaagaacaggctccgtgcatcgcgctaaggaacatgtccattggggatgtgtgccctaaggaattcgaagagcctccaaatacacaagatcaaccatcctcctccacgcaagcatctccaccaactcaaaatgaggacgaggctcaagttgatgaaggagaagatcaaagagatgagccacctcaagataatggcaatgatcaagggggagatgcaagtgatcaagacaaggaggatgaacaaccaaggccgccacacccaagagtccaccaagcaatccaacgagatcaccccgtcgacaccatcctcggcgacattcataagggggtaaccactcgatctcgggttgcacatttctgtgagcattactcttttgtttcctctattgagccacacaggatagaggaagcacttcaagattcggattgggtgatggcgatgcaagaagagctcaacaacttcttgaggaacgaggtatggcatttagttccacgtcctaaccaaaatgttgtaggaaccaagtgggtcttccgcaacaaacaagacgagcatggtgtggtgactaggaacaaagctcgactcgtggccaagggatactcccaagtcgaaggtttggatttcggtgaaacctatgcacccgtagctaggcttgagtcaattcgcatattattagcctatgctacttaccatggctccaagctttaccaaatggacgttaagagtgccttcctcaatggaccaatcaaggaagaggtctatgttgagcaacctcccggctttgaagacagtgagtatcctaatcatgtctataggctctctaaggcgctttatgggctcaagcaagccccaagagcatggtatgaatgccttagagatttccttattgcaaatggcttcaaagtcggcaaggccgatcctactttattcactaaaactcttgacaatgatttgtttgtatgccaaatttatgttgatgatatcatatttgggtctactaacgaatctacatgtgaagaatttagtaggatcatgacacaaaaattcgagatgtctatgatgggggagttgaagtattttctaggattccaagtcaagcaactccaagagggcacctttatttgccaaacaaagtatacacaagacattttaaccaagtttggaatgaaggatgccaagcccatcaagacacccatgggaaccaatggacatctcgacctcaacaagggaggccaagtgcggaccgtccgggcccttgcggcggaccgtccgcaccaccaggatgaccctcggacaggaccaatgcaaaaatctaagtctgcactatggaccgtccgaaggaaaagagcggaccgtctgggacctcgcgcggaccgtccggcctcaggcgcggaccgtccggcgcggaccgtccggaccaggcaggcggaccgtccgcggtcggcagaatggagcaacggctag

SEQ ID NO: 129436 - DNA, 639 bp, Zea mays
  Clone ID: MRT4577_4951C.1
ttgggtccctcgaggccggccggggtcgcggtgcaccaccgtatatcctgaggccactgttcgctcatggaattacggtcagcccgatctggcgtgttagagcaacggatggggtttgttacgcgagagattcagagaagatatttttgataggatgggcccacatggcggtgaaaggagatcgtgagcgcgcacgggagtcaatgcttcagtgggcccacgtgtcgacgagccaaacaagagagcgcgtgtggtacaatggctgacgatgcgggctccgcctggcagtgagcacgagatctgttccggcaggttgggctgcgtggggtagaaaatcggccgacaacctagctccgtgggtctgtgcacgcgcggatgggggcctcggaaatgggctggcgcagtggtgaggttggtttgggcttggtgggagaactagggaggaaatgggtcagctgcagatgatttgacccatgtttgtgagagcacctagagagggtgaatatgtgatcctgtaaaaaacagctcaacaaaacaaacttggactaatattagattagtgaaagcaagagcaaagttcgaatgaggtatatgataggagtaaacttcttcaccaaaaaaaaaaaaaaaaaagcggcc

SEQ ID NO: 129437 - DNA, 2994 bp, Zea mays
  Clone ID: MRT4577_49520C.1
atgaccggcgaaaagcccgcgggctcgaggaggactttctcaagggagtccggcaacaagtataaggaggaatcctcttcctccaccaagtcacattggagaggtgacaagaagaagaagaagatgaagaaagtggtctactacgagacaaactcttcgtcaccctccacgtctggcactgagttgccgactacttctaagtgccatgagcgcaagaagtatagtaagatgcccctacgctatccccgtatttcaaagcgcgctccattactttctgtacccctagcgcgcaacctcgggagcacaaaatgggatgaccatgaaatggtcaaggttattcttagatccctcatatttcgtaatcctactcaagttcaattaatacgtggggatcctagatacaagcagatgtctctcgaggaagtaattggcaagtttgtgagctctaaacttatgataaaaaactccaaacacattgtcaacttggagcaaggcgccacctctacacccgaggtgcaacccgttgcatttaaggcaacagaagaaaagaaggagtctacaccaagtaggcttccaatcgacgcctccaagctcgacaacgaggaaatggtgctcatcatcaagagcttttgccaaatcctcaagcaaaggagggggaaggactacaagccctgctccaaaaggggacgaagacaagaaagggaagaagaaggaaaaaagagatactacaagaagaagggcggcgaggcgcacatggggcgcgagtgggactatgacgagagctccactgactcctcctccgacgaggatgccgccaacatcgccgtcaacaagggcctcctcttccccaacatcggccagaaatgtctcatggcaaaggacgataagaagaagagatgtagagatgttaatattgaagctatggatgatcaccttgccatgattaaacaacaaaatgatcacatagctaaattaactgctaaaattatcgagcatgagttagaaaatgaaaaatttaaatttgctagaagcatgctctataatgggagacgccccggcattaaggatgggattggtttccaacaagagagtcaatccaatgtcaagcttaatgcccccaaaagattgtctaattttgttaagggtaaggctcccatggctcatgatagtgagggttacattttatatcctgcaaactatcctgagcataaaattaggaaaattcatgctaggaaacctcatactatttctcaccatgcttttatgtataaaaatgaggcttctagttctaggcattccactcatgttaaaatgcctaaaaagaaaattcctaatgcatcaaatgagcataatgtatcatttaagacttttgatgcttcttatgtgctaacaaacaaatcaggcaaattagttgccaaatatgttgggggcaaacacaagagtccaaaaacttgtgtttgggacccaagaccgtttgggtacctaagaataaggcctaaacttgttttgtatgtttatgcatccggtggatcaagttggataatcgatagcgggtgcagaaaccacatgacaggggagaaaaggatgttctcctcgtatgagaaaaatgaagatccccaaagagctatcacattcggggatggaaatcaaggtttggtcaaaggtttgggtaaaatagctatatctcctgaccattctatttcaaatgtttttctcgtagattcattagactacaacttgctttctgtttctcaattatgcaaaatgggctacaactgtctatttactgatgtagatgttactttctttagaagaagtgatgattcaatagtatttaagggagtgctagatggtcagctatacttagttgattttaatgataatcaagctgaactagacacttgcttaattgctaagactaatatgggctggctctggcatcgccgacttgcccatgttggaatgaagaatattcacaatcttctaaagggagaacacattttaggactaacaaatgttcattttgagaaagacaggatttctagcgcatgccaagcagggaagcaaattggagtccatcatccacacaaaaacatcatgacgactgacatgccgctcgagctactccacatggatcttttcggcccgatcgcttacataagcatcggcgggaatgaggacgaggctcaagaagaagaggataaagatgaagacaatgagccacctcaagaggaggacattgatcaagggggagatgacaatgaagacaaggaagatgaccaagaaattagggatcaaagaccgccacacccaagagtccaccaagcaattcaaatagatcaccccgtcaacttcattcttggtgacattcacaaggggccatataggatagaggatgcattaagagatccgtattgggtggtggcaatgcaagaggagctcaacgacttcacaaggaatgaggtatggcatttagttccacgttctaatcaaaatgttgtaggtaccaaatgggtattccgcaacaagcaagatgagcatggtgtggtgacaaggaacaaagcccgacttgtggccaaaggttactcacaagtcgaaggtttagatttcgatgaaacttatgcacccgtagctaggcttgaatcaattcgcatattacttgcctatgctacttaccatggcttcaagctttatcaaatggacgtgaagagtgccttcctcaatggacctatcaaggaagaggtctatgttgagcaacctcccggctttgaagatagtgggtaccctaaccatgtgtataagctctcaaaggtgctttatgggctcaagcaagccccaagagcatcgtatgaatgcctacgagactttcttatcactaatggtttcaaagtcggaaaggccgatcctactctctttactaaaactgctgcaaaggacttgtttatatgccaaatttatgttgatcatattatatttgggtctactaacaagtaa

SEQ ID NO: 129438 - DNA, 484 bp, Zea mays
  Clone ID: MRT4577_49521C.1
gggtaacgtgacacattacacatgagatggtagagttgtgattcacaggctatacaagagcctccatggagagggtgtacccggggacgagagcaaaaaggccaatggccacaaacgcgaagaaggccatgctgaacgccgccgccgccgagtccgtgaacagggtatcccccgcctggcgcaagtaaaccggcaccggcgcccccgcggacaaggcccatatcaaaaagcaagccaccacctggtctccggcgaaatccaccacgggcgacgccttcctcgccgcaaagaggccccccccggagcccaggcggtggacatcacgcaagacctgcgccctggggtacagccaccccacgaacgaaatgcccaggcagtagttggattccgggtactcccggaagtcctggctgcccccaaactggttggacgccatgaccaccagggcgaagagggagaaaaccacgccagggcccgcaggaac

SEQ ID NO: 129439 - DNA, 3990 bp, Zea mays
  Clone ID: MRT4577_49522C.1
atgagggagatcgagaccggtgacaagtccgcaagcttgggaagaacacactcaagggagtctgcccacaagcacaaggaggaatcctcttcctccatcaagtcccaacggaagggcaaaccacctatgtttgatggtgaatattattctatgtggattgataaaatgaggcatcacctaacctcactccacaaaagcatatgggatattgttgagtatggagcgcaggtaccaaaggaaggggacaatgattgtgattcggaggaggtcaaacaaatccaacacttcaactcccaagccactactatactccttgcctctctaagtcgagaggagtataataaagtgcaagggttgaagagtgcaaaggagatttgggacgtgctcaagaccgcgcacgaaggatacgaggtgaccaagatcaccaagagggagacgatcgagggggagctcggtcgattcatgcttcaccaaggggaggagccacaagcgatgtacaaccggctcaagaccttggtgaaccaagtgcgcaacctcgggagcaccaaatgggatgaccatgagatggtcaaggttattcttagatcactcgtttttcttaaccctacacaagttcaattaattcgtggtgatccaaggtataaactaatgtctcccaaggaagtgataggaaaatttgtgagctttgaattgatgatcaaaggctccaagaaaatcatcgagcaaggcgccacctcaacacccgaggtacaacccgtcgcattcaaggcgacgaaagaagagaagaaggattctacaccaagtaggattcccatcgacgcctccaagctcgacaacgaggaaatgtcgctcatcatcaagagctttcgccaaatcctcaagcaaaggagggggaaggactacaagccccgctccaagaaagtttgctacaagtgtggtaagcccagtcattttatcgctaaatgtcctttgtctagtgatagtgacaggggcgacgacaagaagggaaagagaagagaaaagaagagctccaccgactcctcctccgatgaggacgccgcaaacatcaccgtcaccaaaggccttctcttccccaatgtcggccacaagtgcctcatggaaaaggacggcaagaagaagaaggtaaaatctagatcctccactaagtatgcaacttctagtgatgaggataattgtagtgacgatgaggacaacttgcttattctttttgccaatcttaacatgcaacaaaaggaaaaattaaatgaattgattagtgttattcatgagaaggatgaactcttggatagccaagaggatttccttattaaggaaaacaaaaaacatgttaagactaaaaatgcttatgctcaggaggtagagaaaaataaaaaattaactagtgagcttagcacttgccatgacactatttctagccttagaaatgaaaatgctaaattaattgctaacgttgagaagttagatgtttgtgatgattcaattgttaatcttagaaatgataatgctagtttaattgctaagattgataagttgaatgcatccctcactagccttaaatttgagaatgaaaaattaattgctaaggctaaagatttaaatgtttgcaatgtttctatttccaatcttagagatgagaatgctattttacatgctaagattgttgaattaaatatttgcaaaccctctacatctactgttgagcatgtttatgcatccgggggctcaagttggatcatcgatagcgggtgcacaaaccacatgacaggggagaaaaggatgttctcctcctatgagaaaaaccaagatccccaacgagctatcacattcggggatggaaatcaaggtgttactgtctttagaagaagtgatggttcagtagcatttaagggagtgttagagggtcagctatacttagttgattttaatagagttgaactcgacacttgcttaattgctaagactaacatgggttggctctggcatcgccgactagcccacgttgggatgaagaatcttcacaagcttctaaagggagagcacattttgggactaaccaatgttcattttgagaaagacagggaaaaatctcaaacccaagagactttaaagagattcttgagacgggctcaaaatgagttcagcttgaggatcaagacaataagaagcgacaacgggacggagttcaagaactcacaaatcgaaggctttcttgaggaggagggcatcaagcatgagttctcttctccctacacgccacaacaaaatggtgtagtgaagaggaagaatagaactccattggacatggcaaggaccatgcttgatgaatacaagacttcggatcggttttgggccgaggcggtcaacaccgcttgctacgccatcaaccggaatatgtccattggagatgtgtgtcctaaagaatccaaagagcctccacatgcacaagatcaaccatcttcctcaatgcaagcatttcaaccaactcaagatgaggatcaagctcaagatgatgaagatgaagatcaagaggagccacctcaagaggaggacaatgatcaagggggagatgctaatgatcaagacaaggaagatgatgagggtccaagaccgccacacccaagagtccaccaggcgattcaaagagataaccccatgaacaccatcctcggcgatattcataaggggccacacagggtagaggaagcacatcaagattcggattgggtgctggcgatgcaagaggagctcaacaacttcacaaggaatgaggtatggcatttagttccacgtcctaaccaaaatgttgtaggaaccaagtgggtcttcagcaacaagcaagatgagcatggtgtggtgacaaggaacaaaccccaacttgtggccaagggatattcacaagtcgaaggtttggatttcggtgaaacctatgcacccgtagctaggcttaagtcaattcgcattttacttgcctatgctacttaccatggcttcaagctttatcaaatggacgtgaagagtgccttcctcaatggaccaatcaaggaggaggtctatgttgagcaacctcccggctttgaagatagtgagtaccctaatcacatctacaaactctctaaggcgctttatgggctcaagcaagccccaagggcatggtatgaatgcctaagagattttcttatcgctaatggcttcaaagtcggaaaatccgatcctactctattcactaaaactattgcaaatgatttgtttgtatgccaaatttatgttgatgatatcatatttgagtctactaacaaatctacttgtgaagaatttagtaggatcatgattcaaaaattcgagatgtcaatgatgggggaattgaagtattttctaggctttcaagccaagcaactccaagaaggcaccttcattagccaaacaaagtacattcaagacattcttgcaaagtttgggatgaaggatgccaagcccatcaagacacccatgggaaccaatgggcatctcgacctcgacacgggagggtgtaagattgatagaaagagcacatcagggacttgccagttcttgggaagatctctggtgtcttgggcttcaaagaaacaaaattctgtagctctttctaccgccgaagtcgagtatattgtcgtaggccattgttgcgcgcaattactttggatgaggcaaacccttagggactatggttacaagttaaccaaagttcctctcctatgtgataatgagagtgcaatccgcatggcggataatcccgttgagcacagccgcactaaacacatagtcattcggtatcactttttgagggatcaccaacaacggggggatatcgagattgcttatattaacaccaaagaacaattagccgatatctttaccaagccactagatgagaaaacatttaccaaacttaggcatgagctaaatattcttgattctaggaattttgattga

SEQ ID NO: 129440 - DNA, 272 bp, Zea mays
  Clone ID: MRT4577_49523C.1
acgcaactgatgtgagcactagggttggaggaacgagtaagatacctggctgacgaatactctgtgagggggcatgtgacgaacaaatcgtatatctatagtatcggcgtcttgctactgtaaattgatgctgatatatgtaactacaacaatatattgcctgactgagacaataatgttgtcgagaagacatgggcatactacctgcagaaaaagctagataaggtcataaacgccgaaccatggtaggacctgaactgtgaggatgcatg

SEQ ID NO: 129441 - DNA, 1011 bp, Zea mays
  unsure (1)..(1011): unsure at all n locations
  Clone ID: MRT4577_49524C.1
aaccgtgggggtgccttacggcctacgggccggagcagcgctcgggagccgcggcacggaggcatcgacgccgttgagctcgaggcgaccggcggctcgcggccccgccacagcggtgctgtggcagtgtggcttcttctggtttctgcgggctcagcgcggaggatatgcccaatgcacggaagtaccaaagcaagagctttccattgcttgactcactagaactgttatttgatggtcctattcctgaaggggcacaaaaatcaccttccagcatacctcagaatgttggtggaaacgttggtgatggaggcaacaatatcagcacagccccagacttgtctgaaagacctagtggaacaattaacacaagcgttaatgaggcatggaataatatcagcctacttaagcaaacagcattgggaccccaaggtatagacaatctcgacacgctgcaaaatcgtgatgaagaggtgctggaacggctacagcatggctcggaccggaggccgcagagagctgatgaacaggcacagtcaagttcttgcgtagaactgcagagagacaggcgcaagaagcggaaggccccagacatccagcagatcatggagacctatatgaatttcagaatgaagcaacctcgcgtcaaacaacgaagagcaaaggacgctgaccagttcacgatttcaaggtattagcctctgatgttttcaaggaccctgagaacagggagacctttctttcgtatgaacccaggctgcgcaccttgtggctgaagagggaagttggcaagctactctccttatagaagtggcagcccttgcttgttttgtttgctacccgtgcctaggcttcatttaacaaactctactagtgacttaacttgttccatgcacagtacgtcactacgctgcttagtcattcatgatcaatgatgtgcttgctgcgtgtagtgcttccaaaattttgcatctgtgtcaatacactgttaaaaatgcgacnnaaaaaaaa

SEQ ID NO: 129442 - DNA, 983 bp, Zea mays
  Clone ID: MRT4577_49525C.1
atggaccaatcaaggaagaggtctatgttgagcaacctcctggctttgaagatagtgagtaccctaaccatgtgtataaactctctaaggtgctttatgggcttaagcaagccccatgagcatgtcgaaaaggccaatcctactttattcactaaaactcttgaaaatgacttgtttgtatgccaaatttatgttgatgatattatatttgggtctactaacgagtctacatgtgaagaatttagtaggatcatgacacaaaaattcgagatgtctatgatgggggagttgaagtatttcttaggatttcaagtaaagcaactccaagagggcaccttcctaagccaaacgaagtatactcaagatattctaagcaagtttgggatgaaggatgccaaacccatcaagacacccatgggaacaaatggacatctcgacctcgacacggaagctgtcaaaggttcacacttagccaataaaaagaccaagtattgggttcaacaaagagagcaagggataaccgaaggcagccctggtctggcgcaccggactgtccggtggggacttcacgctgaactcctcaccttcgggaaaatccagaggcgctccgctataattcaccggactgtccggtgtacaccggacagtgtccggtgccccagggaaaagcgcctctggaactcgccagcttcgggaattcgctccgctataattcaccggacatgtccggtgtacatcggactgtccgagctgcacaaaaagtaggaattggcaaaaaagagcatggggcctgaggacacatctttgaagaacatcaacgccttcatggaatccatgacgaagtgattgtaaatgtgtaattgttttattttcgggaatgactagccctgatgtccaaggcatgttccaacatccaacaagaccatataagatatctggagaaaatatcttcaacgatttatccaaatacatgttgcaatatc

SEQ ID NO: 129443 - DNA, 498 bp, Zea mays
  Clone ID: MRT4577_49526C.1
cccacgcgtccgccgagctcatgcggccctgccacttcacgtacctgcgcatgggcgccgagttcttctcccccgaccacttcccgcagttcatggagttcgtgcgaagcgtcgtgtgcggcgagtgggacgaggacgacggccccgccgacgaggagcgtggcatgactgtgtcaggcaataccagatccagggaggccaaggcggtttgaagcttcaactcatcgccgcccccgccatgtctcagtcagctgtctcgttttatttttgaagtgccaaaatacttgcaaatttccgctgctactagatttagctgagaagaacgagatgatccaggtattagtggatcaggagttgcaaatgtgggatcccacatgcattttttcttttgccgatgtttcgtcgtcttcattgttgttaattttttttgtttcatcttgagaccatttatattatactctctcttttctaaattagaaatcgtttaaatttcaaaat

SEQ ID NO: 129444 - DNA, 1156 bp, Zea mays
  Clone ID: MRT4577_49527C.1
ggggtggggacagatcacgggtataccgaacagccgggttccgccccaacccaaccgtgggggtgccttacggcctacgggccggagcagcgctcgggagccgcggcacggaggcatcgacgccgttgagctcgaggcgaccggcggctcgcggccccgccacagcggtgctgtggcagtgtggcttcttctgggtggtgcgggctcagcgcggaggatatgcccaatgcacggaagtaccaaagcaagagctttccattgcttgactcactagaactgttatttgatggtgagcacacgtgcacactgcctacagctggaaaagggctgagaagatctgtgctatacgctgataccttttgcttgactaaaataaatatgttactatgataggtcctattcctgaaggggcacaaaaatcaccttccagcatacctcagaatgttggtggaaacgttggtgatggaggcaacaatatcagcacagccccaggcttgtctgaaagacctagtggtgcctcatgggttaatgatgcatggaataatattagcttacttcagcagacagcattaggaccccaaggtatagacgatatcgacatgctgcaaaatcgtgatgaagaggtgctggagctactacaacatggtgcggaccgaaggccacaaagagctgatgaacaggcacagtcaagttcttgtgtagaactacagagagacaggcgcaagaagcggaaggtcccagacgtccagcagatcatggagacctacttgaatttcagaatgaagcaagctcgcgtcaaagaacaaagagcaaaggatgttgatcagttcacgatttctagctgtatcaaggctctgcaccctatgccagatgtgtcggatgaggtcaaggtattagcctctgatgttttcaaggaccctgagaacagggagatctttctttcctatgaacctaggctgcgcaccttgtggctgaagagagaagttggcaagctactctcctgatagtggtcttagcctcttaggttggtctgttggtgtggagaagtggcagcccttgcttgttcttgtttgttgtcagtcatcgattctggaggttgctattttaggcctaggcttcattataacaaactctgttagtaattttaacttgttcc

SEQ ID NO: 129445 - DNA, 1411 bp, Zea mays
  Clone ID: MRT4577_49528C.1
acggcccggagcaacccttggaaagtcgtcgacgccgttgagctcgaggcgaccggcggctcgccgccccgccacagtgccgctgcggcttctttctgatccctgtggctcagcgcggagggttaaatggcaaatagagcaagatggatgatgaagtacgaaaagggtcttgttgatatacttcatgagaacaatacttcacattatcgtacccaaaacggttggagaacagaggggtggaggaagatcgttagggatttcaatgtaaggtaccccgaagcaaagtttagtaaaatgcaaatccaggaacatgagactcaattgaagaaagactataagttgataaaatctatcctccaacgtgatggtgtctcatgggaccagagtgcatccatggttagaacaacagatgaaatctgggatgagataatcgaggatatgcccaaggcacggaagtaccaaagcaagagctttccattgctcgactcactagaactgttatttgatggtgagcacacctccatccacctcaccgggcacacatgcatagccacactacctacagctggaaaaggctgagaagagctgtgctatacgctgataccttttgttttactaaaacaaatatgttactgtgataggtcctattcctgaagggggacagaaatcgccttccagcgtacctcagaatggtggtgaaaatgttgacgatggaggcaacaataccagcacagtcccagcaaacagcattaggacctcaaggcatagatgatctcgacacgctgcaaaaacgtggtgaagaggtgctggaacggctacagcatggcgcggaccgaaggctaccgagagctgatgaccaggcgcagtcgagttcttgtgtagaactgcagagggacaggcgcaagaagcggaaggccccggacgtccagcagatgatggagacctatttgaatttcaggatgaagcaagctcacgtcaaagaacaaagagcgaaggacgctggccagttcacgatttcaggctgtatcaaggctctgcacaccatggccgatgtgtcagacgaggtcaaggtgttagcctctgatgttttcaaggacgctgagaacagggagatctttctctcctatgaacccaggctgcgcaccttgtggctgaagagggaagttggcaagctactctcctgatagtggtgttttgtttgttacctgtgtcagtgagtcagtctgacattcgattctggagggagctattgaaggtctaggcttcattcacaaactctattaaaccatctccgtcagtttgagagaacttgttccatgcacagtacgtgactacgctgcttagtcattcatgatcaatgatgtgcttgcccccccccgtgctttttataaaaaaaaacaaccaccccccc

SEQ ID NO: 129446 - DNA, 363 bp, Zea mays
  Clone ID: MRT4577_49529C.1
aattggttatatcttgcggactttgcatcattcaagccaacgtatatcccggatgacgacccatctgatttctcattctacttcgacaccggaggaagacgaagatgctatctagcacctgaaagattctacgaacacggtggtgagtcccaagttgcagcagatgcacctctgcaaccatctatggatatattttctcttgggtgcgttcttgctgaacttttccttgaaggtcagccactttttgagctttcccaacttctggcttatcggcgtggtcaatatgaccccatacataccctataaaagatacaagaaactggtatccttgacatgatacttaacatgacccagttggagccc

SEQ ID NO: 129447 - DNA, 585 bp, Zea mays
  unsure (1)..(585): unsure at all n locations
  Clone ID: MRT4577_4952C.1
cccacgcgtccgcagcactcactggatccccacacgactgtcaaggcacgtttcaacaactatggcatggccagtgcccttgtccagcatgaatggcgtcccaagtcattcatcaccatctctggtgaggtcgacaccaaggccattgaaaagagtacgaaagttggcctgtccttggtgctcaaacactgaaatgctgaatgttttgggctctaggattttattttcggttcaggtggattggaataaacatggcctggagtcatctttgcggcaccattttgatcttgaattactttttttttctcacatgatcaatttgataggcaaatattaggattgaccttatgttttaattctcagcgccctgttaataatttctggtgattgagacctattgttaagcttgtcaaatatgatggtgattattttgtgttcacttctatattcattcattcgtcagtcaaaaaaaaaaaaaaaacatctatgttcattcattggtcagtcattccttcggatgtctggataatagtgggattgtttactgtggtatacaaatattgtgtaattttttttnccagcttt

SEQ ID NO: 129448 - DNA, 139 bp, Zea mays
  Clone ID: MRT4577_49530C.1
cggaattcccggcctgacgccacacatcactaacaccatctagcacctctaaatatcttgcaataaaggcacgatcgctcctcctacggccaagggcacatggtcgcggaagcagacgacctggcagcaacactgctgc

SEQ ID NO: 129449 - DNA, 1692 bp, Zea mays
  Clone ID: MRT4577_49531C.1
cacgcctcggcggcctcgccatatgtcgtggacaactgtgccggcggctcctccaaggacccaaggcggcgccgccatggtgatctcggtgcccgcggcccggcgctccacctccgtacggagctccgtgctgggcggcggcgggcgccagctgtaccagcccctccgctgcgccttctacgacggcctggccgccgcgctgtccgagtccgaggagccctcgcggtcacccgccgccgcccgcgtccccgctggctgcaagcggcaagcggcgaggaacgtgctgatcctgatgagcgacaccggcggcggccaccgcgcctccgccgaggccctgcgcgacgccttccgcatcgagttcggagacgcctacaaggtgttcgtgacggatctggggaaggagtacggcgggtggccgctgaacgacatggagcggtcgtacaagttcatgatccggcacgcgcggctctggaaggtggcgttccacggcacctccccgagatgggtgcacggcgtgtacctcgccgcgcttgcctacttctacgccaacgaggtggtggctgggatcatgaagtacgagccggacatgatcatcagcgtgcacccgctgatgcagcacatcccgctgtgggtgctcaagtggcagcagcaccccaaggcggtggtgcccttcgtcaccgtcgtcaccgacctcaacacctgccacccgacatggttccaccacggcgtgacgaggtgctactgcccctcggccgaggtggcgagccgggccctgctccggggcctcagcccgtcccaggtccgcgtcttcgggctgcccatccggccctctttctgccgcgccgtgctcgacaaggatgaggtgaggaaagagctggggctggaccctcagctgcccgctgttctgctgatgggaggcggcgaggggatcggccccgtggaggagaccgcgagggcgctcggcgaggagctctacgaccgccggagacggcgccgggtgggacaggtcgtggtcgtgtgcggcaggaaccgggcgctgcggtccaccctgcagtccctcagatggaaggtccctgtcaagatcagagggttcgagacacagatggagaagtggatggccgcctgcgactgcatcatcacaaaagctggtcctggtacgatcgcagaggcactcatacgagggcttcctatcatcctgaacgacttcatccctggacaggaagtcgggaacgtcccatatgtcgtggacaacggtgccggcgtgttctccaaggacccaggggaggccgcgagacaggtcgcccgctggttcagcagcacagacggggacgagctcaggagatactcgcgtaacgcgctgaggctagcgcagcccgaggcggtgttccacatcgtcagggacatccacaagcagctccagcgacagcctgccgcggtcacccggatcccctcccgctcgctgacctcgtccttcccgtaccatatgtgaaatcaagaatgctactgcagttacgtattctgctgcatgttggatattatgcttgggacttgatgtatgcctaaccttttgaagaacctgtatattatattatattgtatataagaattgctctctgttctgttcatgagtgatttttgtgtatttctcgctgctgaatactatttggaaagaagttaacatacattgtgact

SEQ ID NO: 129450 - DNA, 268 bp, Zea mays
  Clone ID: MRT4577_49532C.1
ggaaaaaagcggaaaggccctgaactgacccttttttttacaaacagttccatttttggggggggcaactggttaaacctctttccgttcttttttttttggggcagcctgttttaaaaatgaactggggggcaccaaatttttggggccggggaagggggctcccctgcctgaatagacccccccgcttttaaatcccccctttcagtgtgggcccaagtattggtttatccctaattaagatccaacccgggggggggcaaaccct

SEQ ID NO: 129451 - DNA, 262 bp, Zea mays
  Clone ID: MRT4577_49533C.1
gccgggctgcatagtcgtgaacgctatatactcggaggtgatagaggcaaatggagtgcatgctgcggttgttccaggtaacggagcagcgaggagtgcttgtggccatatgagaacctatcacccacagcataaaaccttatgtctacctactgcacgaacaacagaaaagacaagacaagtatcacataccgaaagatcaatgcgttctgaaaccacgaactaaccatgacttctacaaacatgatgaaaccgatcaaaa

SEQ ID NO: 129452 - DNA, 196 bp, Zea mays
  unsure (1)..(196): unsure at all n locations
  Clone ID: MRT4577_49534C.1
tccgatccgctgcctccggggtcggtctttccacccgnctcctcctagctcctctactcgccgtcgccatgggcaagattaagatcgtaataacggctcctaaggatcgtaggctcgtggccgcgtgcgcctccaaccgaggatgtcgagctcgttggcgtctgcaccccttcgtcaccacggactacttgaccta

SEQ ID NO: 129453 - DNA, 350 bp, Zea mays
  Clone ID: MRT4577_49535C.1
gagctcggtttttttttttttttacctttcgcaccaaaccttgaaataaaatctcttaatttaaaatttccccccgttggcacacgagaaaaaaaacctccctccctgcttattttttttttttccatcaaattttaaaaccaccctttttatttccttcccgggccgctttttttttttccaaaaaaaacaaccgcccctctaacggtattacttacaaaaacaaagagatgcctacccccttaaaccgctctagaactaccataacacagtggaccccaagtgaaatctctccccaacccacggggacacttaatgtaacaaaagaaactcttgtctctccaggtcat

SEQ ID NO: 129454 - DNA, 325 bp, Zea mays
  unsure (1)..(325): unsure at all n locations
  Clone ID: MRT4577_49536C.1
cggccgcnnaggcgggagcaagtttttcgccgngcncagggaggagggggccgggggcgcccggaacaacaaccnggaggcccggnnccaggnggacgaccccgggccgcgggcccccgncaagaagnnccnggacgngaacgaggcccncgaggnggnccgcnncgacaaccagaacngcgacgggagggcgcgccaggagggggggggagcangcnncnccacagcaaggnggnggaggnccncaacccnccggcgagggagnccaagnccaacgggaccccgaggaaagagcncgccgagcnacagcaggagccggaaaaag

SEQ ID NO: 129455 - DNA, 721 bp, Zea mays
  unsure (1)..(721): unsure at all n locations
  Clone ID: MRT4577_49537C.1
agatcctgacttgtcctggtcctcagcgccgtcgcaccgtctccggactcatctcctccccgagcgtcgcaccgtcgcctcttcctccccgagcgccgcgccgtcgcctcctcctccccgagatctgttgcggtaatgtcgcttgctccccaccccttctcctcttctctgatattcccgtttgggccaccgtgggggtagcgcctcctgtactcggggcagctcaacggctcgtgccatggcaccttgcaaccaggctgcgttgtcgcctcctcctccccgagatctgctgctgctccctccgcgccgagcttggtcgcacaaccaggctgcgggcagcgcggggccagcccggcgagtagcgtcattttcatgtgcacccaagctgctctacattgcctctccgctgttcgattcctgatccggcgagtagcccccaccgttcgattcctaatccggcctcccggcctctccgctggaggtaggggacatggcggaagaggcatcgcctccgccgcccaagctgctctacattgccgtcggcgacggcggnggccgccgggcgttccggtacacgcgccccgtgctgcagagcaccctgcatctcatgggatgcaagcctcgccatgccttcaaggnggcttgggcgtgaatcacctcctgcngctgcatgtctgttgtgtgcgctgacatgggtggttttgtgatcgctgattttgac

SEQ ID NO: 129456 - DNA, 889 bp, Zea mays
  unsure (1)..(889): unsure at all n locations
  Clone ID: MRT4577_49538C.1
ggtcgacccagcgttcgcccagcgtccgcccagcgtccgtngaaaatatgattctaccaatatgcatgataagcctaaactcataatatgttctacagcttgatgatgtcattgatcttgtcattccaagaggcagcaataagctggtttcgcaaatcaaagcatcaactaagatacctgtcctcggtcatgcgggtaaatttatcttccaatagtttgtttttggtacaaacagtccactacaatactaaaatatacggactggtttgatttctgaattttttctctatagatggtatttgtcatgtatacattgacaaatcagctgacatgaatatggcaaaacgaatagtgatggatgccaaaactgattacccagcagcctgcaatgctatggtatgtctaatttcttattacaactaggcgtgtatgccaatgaacatatttggtttatgatgctgtttaataatcagcccaatcatattacaccaacatattacaaaaacataaataaacccacaagttctttttgcattgtatgaaatttcaaattgagtaggaacttttaaattgataacaaaatattgtgcaactacttttagatcgaaacaggatgactctgcacacatacttttagacgtagatacaatcacatccaaaactgttactattcctcacttcagaacatatttaaaaaacaatcccctttaatgcccattcagactgcagcagctattgttgtcacggtgtcacctcccctgctgctactagaaaacccaatgcaactaccatatctcccagagttgctctagactgctcctcttgcaagggtggctgttgcttgactttgtcattatcacacgtgcagcattctctgaaactacatgat

SEQ ID NO: 129457 - DNA, 419 bp, Zea mays
  Clone ID: MRT4577_49539C.1
cggtccgacaccccggtcgaccccgcgtccgccccggtctctctcggcaagtcggcatccgtcctcgatccacactcgcctaaggctagccatcagcgatgagccggggcagcagcaacggcggcgtgaggcggagcgccgtcaggctggaggagctgcagctggacctgtccccgtcgctcctggtcttgcttgtatgccttctcgggggggggctgctttttcttctgcctaagcagttcactcaggtcgtcttcctgaaggtggacgtggacgaagggaaggaagtgcccgcgtggcgcgaggtcgagcggatgccgagttgccactttgttcttcacgggtttcttcttccgacccgggttgttgcgtggaaggttgttcttcttccccccctgctcgtccctgagcgccttcct

SEQ ID NO: 129458 - DNA, 343 bp, Zea mays
  Clone ID: MRT4577_4953C.1
cccactctttcttaagctggagtgcgagaacagaaacattgggggtaatgctgggcaggaccgcgcgggacaacaacagggctgaaatggcaacacaattatgtcgggctgccaatgagcccaactcaacgcatgttgccaattgctgttacacgaatcccgttggcgatcagcatgaaaaaggacacgacacgggggaaccttatcttcccgtgcgagatgaaaaggatcgcgactacctatctggagacggatctttgcagagtgcgaactccaaaaagcattagtgcaataaaggggccttgacgtgaactgcttaagctggtcctatcgataagcgttg

SEQ ID NO: 129459 - DNA, 2479 bp, Zea mays
  Clone ID: MRT4577_49540C.1
ggaacacagctgatctcatccgctcaccatccctatccccagccgcccgaccgcccagccgtcctctgttttctttttaacgcacgcaggtttctcttcttctccagccgctcaccagccttggccgtcgagcgccccagctccttcctctccctctcgattctctgttgaccggtgccctgctcgaatttccgcccgccaagctcccagccgagctcttgcgctgggtttctctccctggtgtgctcgcccgtaccgcactcctgctcgaacagcgcccaacctgcttgccaaggctcttcccctcggcgtcgatctccctgcgcgtccccggcctcagcccctctgttcttcgttcctgctcagccgctccctcccctccttccctgctcaaccagctcggttccatggcagcgcgcagctcccctttgctcgcccagccgtcgagtttccccatgcgcaatctcctgcagccatggcgcccggccggaatttcccgtctagttcgcgtcctgctcggtgttcctttgctcgtcgcgccggagctcccatcgccgtgcgcagcttcttctctggtggccacgcgcccttccagctcgccacggcgctcagtcctgtccatctcgccgtgttcggatttagagcagcacactccctgcgtgtcgcgccttcctagttccctgaacacgcgagttcttttactagcgctgttcccggtgtcgcgcgccgtgcagtagcacgccctttgccaaactcgtggtcacggtctcgccttgctgccacagccacgcctactgccgcgctcggtcttcgtctctgtcgcacgcgcgaattttcttcgcttggtcttaattcccgtcgcatcttcgacctcgccaaatgcgttcatcgtttggtcctgtgtcgttaggatcgttgaccgtgtttgctaccgctagggatgaaaacggtttcggaatttttcggaattccggataccgatttcgaaatttttcgatcggattcatcggtaacggtatttttcgaaaacggaatcggttttcggaattttctatcggaatcggtatcggaatcggcgtggagttttaccgaccgtttccatcggttaccggtttttgtcggaaattaccggatttatgtctcggaaatttccggaattgtgtctcggaattttttcggaattttccagcatgtgatttttcgcatcgcctgtacatctctggaaaaggattacttatttttgtattttttggacgctttaagattttttgggggttagatggtgttggaaggcagttgagattaacgattttgtctctcgaacgaatccaccattttctatgcacatgttatgtattagtaatatataatgatagagagccgaccgtctgtcttttccacacactagattttagggtttttctgttaggctgtcaaaaacccctttatgtgagaaaaaaaatatttcatgagtaagcatgtcatgtcaactaaatcgagtggatattgtgaattgtgaactttgagtatgtgaacttgtgatctttatgaacttgttataatgtgaacttgttatattatgaacttgtgatctttgtaaactttttatattataaatttgtgatccttgtgaacttgttatatcatgaattgtgaacttgtggtatttgtgatgttttgtcaattttgctttattgtgaagtttgatatgtttaccgatcgtattttagatttcgaccgttaccggcgtattttccgcacggaactttcgtttccgatgtttccgaaataccgatatcgtttccgtttccggagttaccgttttcgattttgtttccgataaaaaatatgaaaacggtaatggttttggtgtttaccgaccgtttccgaccgttttcatccctagctaccgcgtgcgcttgttccttaggagcatcgcgcaatagatgggtctcacgcgcgtggtttgaagctatgcgcgttcgtcgtgccgcgtcgtgtgctgatattctctcccagcagactttgccgtcgaccatattcaagtaattgttcggcctcgcatcccacctattcaataaaccatccaaatccatagactgtcgacgcactgctgccttacgcggctgtctctgtcacttgcgtcagcccgccagatctacagctccatatacgtcactctcgtatcgtcgtcgagcccgtcgaacctcgttcttccatgctcgatcttgtcgaaccctgaatcccagactttagacaaaaataagcgaggtccctgtgcatcgcttatcaagtactcggtcgaagacttcaatcgaagatcatcgttgaccccgcaacttcagctcgagttaattatggtaagttgatttattattcctgtcgactaaataaatggtaggattaaatagaagaattcattgcgatgattctcttgtttattactcgatgtagagattaagttgaattttagggttat

SEQ ID NO: 129460 - DNA, 1494 bp, Zea mays
  Clone ID: MRT4577_49541C.1
atggcgtataggcgtgtcgatcccgagcccttccttccgtcgggcttcagcgcttcggtggtcctgcaccgggaggttatggccaggtcagtgactcggcgccttccgccattacatgaggattgggccatcatcaatattcaacctttgcctgatcatgaggtcactttcccggtggtgagggacgtggtcaggaaatatttggtggagcaccgtcggcttggggtgcgggatattcagcggtcgcacctggggcaggtcttggttcagtttagtagtgtgcttgaaagagacaatctagtcctgcttggcccgcagaattaccttgatgccaccttcactgctctgcgacacaatgatgcctggaaccacagagccctcttctttaattgtgaatgctggctcatgctgttgggattcccgctagattatcgttcatcagaatatctgcaggctgccattggttcctttggcagattactattatgggaagaagacaaacataatgtttacaggaccatgcttagggtccgggtcacgtctcgcgaggaggtcccacagttcattgttttttcggaagctgatggctttattggtgactcgtggacagttcagtgcgaaatcatacagcaaaccttgctggggggtcaggcccaggatgaggacccggttccggtggccccggaggatggtcagcagcttcccctcgagttctttggtctgggtcaacatgtgcctgctgcagggtgtgacctcaatttgccacctgatgacaatgcccaggccgagtcagctgataatattcagggggactgggaccaatggattaatggacagattcagaatgggcagattcctgctgacctggatgttgttgggccagtgctcccctttaatgcccctgcccttcctgttgtggatgctagggggcctaacatcaatgaccccaacattgtggagttgaattatatgtttgcccaggattggaggccagaccttgttcttctgagccatctggaaaggaaaaggaatgctcaattctacagaatctgggccaactactttgctcctgctggtaatcctgagctctctatgcagatccccaagaaatgggctccttttttcatgtctaacctgctgcataaagactccttcaattggtcgaaatctttcttggcttcagatattccctctgctttgctggagtctacggatgagaccctccctttggccatccccaagaaatgtcctgatggcaagtttcttgaggctgctctccaggaagatcctactggcaacgtctctgccaccccagacttggcctctcgcgcatccaagcctgcggtggtggagtctgaccttctgagaagcaagagacttcgtgatgctcgggctgggttcaggcagggctcctgccagaaaaagaactgtttgatgtgtcagcacaagtttgagggcccccctccctttctgccaagaacatcagacgcctag

SEQ ID NO: 129461 - DNA, 213 bp, Zea mays
  Clone ID: MRT4577_49542C.1
gacagccccaggtgctgacttttacataggctccagatcccgaccaccgacctgctctacgacggcgtcggcgaggccgcgcagatctactgcgagctcgcccgcctcggcgcggacatgctcgtcatcgacgtcggcggcggcctcggcattgactacaaccggacccacttggcgcagaccgacatgttggtggcgtacagcccggaagag

SEQ ID NO: 129462 - DNA, 995 bp, Zea mays
  unsure (1)..(995): unsure at all n locations
  Clone ID: MRT4577_49543C.1
aattcggcaccagggacggatcagcgtgtcaactgacagccctatgtccttcgccgctttctcatggccgtttcgccgccggggcggggctggcagcagtggcgcaagcaagtccgccgccacggcagaggaggacgaggagctgggcgtgaccccgcagctcctcgacttcctccggacgctctcgcccgacgccttcaaggccgccgcactccagctccaaggaggctccacggaggcggccgccggcgacctcaccagctggcaggagcggcacgccgtgctcgtgctatccaaagctaaggaactcgccaagattcggtatgatctgtgccctcggcacctgaaggataagcagttctggaggatatacttcctgctcgccaagagttacatctcaccgtatgaactacgtgccatacagaaggaaaaactcagacggatggagacagaaaactgcaagccaaaacaagtgatctctgttgaggtggagatgcaagaatcgaagcgcactagtctctcacaagcatcagaagtagatctagaatctcaggtttagttttgcagttatagcttctaacagatctagcttaggtaacgcaatcagtagcccttttatgattcctccacacaccaaatagctccacgagttcttcagatcttggatcgactctcgctagactaccagtccgctgtgtgcttttgtgtactgaaaccaagtaggtcctttcctgcattacgcagcatatgtgcttgttggctgtgctccgatccactgacatgtaaatctagggtatcttgcgcgtgaacaaaaacgactgcgtttcatgtagctatagattatgtcaacttcgatcggcgtggtcaaaaaaaaaaaaaaaaaaagcgaacgcgggggctcgcgatctaaacacgnacgcgtnnnnnnnnnnnnnnnnnnnnnnnnnnnnnnnnnnnnnnnnnnnnnnnnnnnnnnnnnnnnnnnnnnnnnnnnn

SEQ ID NO: 129463 - DNA, 355 bp, Zea mays
  Clone ID: MRT4577_49544C.1
tggagctcccctttttggcggccgttatgagctgtggatcccccggctgagttatttcgaggaggaccggctggtgctgggagcatgatcatattgttctctctcgagaaagaggcgggctgctatgggaggaggagtgcgttaggcccaccgctatggtggttgtaccttatggacacggcttattggccccgagccggcgacgtcaggcaggttgaggattctcgtgggtgtcattggataaacattgtgtcggctatgcgacggactgaacctttgaactcgagacatactgtgcatgtattggaggtgtgagacttgtggcctgtgagttggatctttgactgaccacgtg

SEQ ID NO: 129464 - DNA, 3367 bp, Zea mays
  Clone ID: MRT4577_49545C.1
atgtcgggagatcacgccaagaaggagatggagaccggcgacaagcccactacaagccacgggaaggcttcatcggaagagtcccgaaacaaggggaaggggaaggagaagaaatgctcttcccacaagtcacatcggagtggcgacaagaaaaagaagatgaggaaggtggtcaagtacgagaccgatacttcatcaccttccacctccggctccgacgcgccatccgtcagttctaagcgtcatgggcgcaagaagtttagtaagatccccttacgctatcctcgcattcctaaacatacacctttactttccgtcctattaggcaaaccaccaacgtttgatggtgaagattatgctaggtggagtgatttgatgcgatttcatctaacctcactccacaaaagtatatgggatgttgttgagtttggtgtacaggtaccatccgtaggggatgaagattatgatgaggacgaagtggcccaaatccaacacttcaactcccaagcctcaactatactcctcgcctctctaagtcgagaggagtataataaggtgcaagggttgaaaggtgccaaggagatttgggacacgctaaagaccgcacacgaaggagacgaggtgaccaaaatcaccaagcgggaaacgatcgagggggagctcggtcgcttccgacttcgccaaggggaggagccacaagacatgtacaaccggctaaaaaccttagtgaaccaagtgcgcaacctcgggagtaagaaatgggatgaccacgaaatggttaaggttattcttagatcacttgtttttcttaaccctactcaagttcaattaatttgtggcaatcctagatatacactaatgacccccgaggaagtaatcgggaattttcacaaccggtcgcattcaaaggcgacggaagagaagaaggcggaatctactccaagtcgaacacccatcgatgcctccaagctcgacaacgaggagatggtgctcatcatcaagagcttccgtcaaatcctcaatcaaaggagggggaaggattataagccccgctccaagaaagtttgctacaaatgtggtaagcctggtcattttattgcaaaatgtcctatttctagtgacagtgacaggggcgacgacaagaaggggagaagaaaggagaagaagaagtactacaagaagaagggcggcgatgcccatgtttgccgggaatgggactccaacgagagctccaccgactcctccgacgaggacgccgcaaacatcgccgtcaccaagggacttctcttccccaacgtcggccacaagtgcctcatggcaaaggacggcaaaaggaagaaggatgatctcttggacacccaagaggacttccttattaaagaaaacaaaaagcgtgttaaggttaaaaatgcttatgctctagaagtagaaaaatgtgaaaactatctagctaaagaactagatgtttgcaatgttacaatttccgatcttagagataaaaatgatatattgcgtgctaagattgttgaacttaattcttgcaaaccttctacatctaccactgagcatgtcactatttgcactagatgtagagatgttgatgttaatgcaatacatgatcacctttccatgattaaacaacaaaatgatcatatagctaaattagatgctaaaattgccgagcatgaactagaaaatgaaaaatttaagtttgctcgtagtgtcactgtctttagaagaagtgatgattcaatagcatttaaaggagtgttagagggtcagctatacttggtagattttgatagagttgaactcgacacttgcttaattgctaagactaacatgggttggctatggcaccgccgactagcccatgttggaatgaagaatcttcataagcttctaaagggagagcacattttaggattaacaaatgttcattttgagaaagacaggatttgtagcgcatgccaagcaggaaagcaagttggtgctcatcatccacacaagaacatcatgacgactgacaggccgctggagctcctacacatggacctattcggcccgatagcttacataagcatcggcgggagtaagtattgtctagttattgtggatgactattctcgcttcacttgggtattctttatgcaggaaaaatctcatacccaagatactttaaaggaattcttgagacgagctcaaaacgagttcggcttaaggataaagaaaattagaagcgacaacaggacggagttcaagaactctcaaattgaaggcttccttgaggaggagggcatcaagcatgagttctcttctccctacacgccacaacaaaatggtgtagtggagaggaagaatagaactctattggacatggcaagaaccatgcttgatgagtacaagacttcggatcggttttgggccgaggcggtcaacaccgcctgctatgccatcaaccggttgtatctacaccgaatcctcaagaagacatcatatgagctcctaaccggtaaaaagcccaatatttcatattttagagtctttggtagcaaatgctttatacttgttaaaagaggtagaaaatctaaatttgctcctaagactgtagaaggctttttactaggatatgattcaaacataaggtcatatagagtctttaacaagtcctctggacaagttgaagtttcttgtgacgttgtgtttgatgagactaacggctctcaagtagagcaagttgatcttgatgagataggtgatgaagaggctctgtgcatcgcgctaaggaatatgtcctttggggatgtgtgtcctaaggaatccgaagagcctccaaatgcacaagatcaaccatcctcctccacgcaagcatctccaccaactcaaaatgaggatgaggctcaagttgatgaaggagaagttcaagaaaatgagccacctcaagatgacggcaatgatcaagggggagaggcaaatgatcaagacaaggaggatgaagaaccaagacctccacacccaagagtccaccaagcaatccaacaagatcaccccatcgaaaccatccttggagacattcataagggggtaaccactagatcttgggttgcacatttttgtgagcattactcttttgtttcctctattgagccacatagggtagaggaagcactacaagattcggattggatggtggcgatgcaagaggagctcaacaacttcactaggaacgaggtatggcatttggttccacgtcctaatcaaaattttgtaggaaccaagtgggttttccgcaacaagcaagacgagcatggtgtggtgacaaggaacaaatcccgacttgtggccaagggatattcacaagtcgaag

SEQ ID NO: 129465 - DNA, 457 bp, Zea mays
  Clone ID: MRT4577_49546C.1
aaaaaaaaaaaaaaaaaaaaaaaaaaaaaaaaaaaaaaaaaaaaaaaaaaaaaaaaaaaattggttaaaacctaaaaacaaaaacacactaaagggcaaattataaaaaatataaataaaaataggggtttgttcttgcccccctcccccgttggggggaatttttgtaattttccttcacccggggggccgttcggccttttttttagggggcccatttcccctttttgggggtgctttaaaaattccctggccgggttttccactttggggattgggaaacccttggggtaccccaatttatttcctttttacaaaatccccttttcccagattgggtaattaacaaaaaggccccccccattttcctttccaaaagtttgcgcgttccaattgggaatgggcccccccttgtcggggccctttaacccggggggttgggttgtttccccccatt

SEQ ID NO: 129466 - DNA, 1242 bp, Zea mays
  Clone ID: MRT4577_49547C.1
atggataaatctcaaacccaagagaccttaaagggattcttgagacgggctcaaaatgatttcggcttaaggataaaaaagattagaagagacaacgggatggagttcaagaactctcaaatagaaggctttcttgaggatgagggcatcaagcatgagttctcttctccctacacaccacaacaaaatggtgtagtggagaggaagaatagaactttacttgacatggcgaggaccatgcttgatgagtacaagacttcggaccggttttgggcggaagcaatcaacatcgcttgctacgccatcaaccgtctctaccttcaccaaatcctcaagaagacatcctatgaactcctcaccgatcaagaagagccacctcaagaggaggacaatgatcaagggggagatgccaatgatcaagacaaggaagatgatcagggtcaaagaccgcctcacccaagagtccaccaagcgatacaaagagatcaccccatgaactccatcctcggcgatattcataaggggccatacagggtggaagatgcattaagagatttggattgggtgttggcgatgcaagaggaactcaacaacttcacgaggaatgagctaggctcgagtcagttcgaatattacttgcctatgctacttaccatggctttaagcttttaccaaatggacgtgaaaagtgccttcctcaatggaccaatcaaagaagaggtctatgttgagcaacctcccggttttgaagatagtgagtaccctaaccatgtttacaaactctctaagacgctttatgggctcaaacaagccccaagagcatggtatgaatgcctaagagatttccttatcgctaatggcttcaaagtcagaaaagtcgatcctacactctttactaaaaccattgcaaatgatttgtttgtatgccaaatttatgttgatgatatcatatctgggtctactaacaaatctacttgtgaagactttagtaggattatgattcaaacattcgagatgtctatgatgggggagttgaagtatttcttaggatttcaagtgaagcaactccaagagggcaccttcatcagccaaactaagtacattcaagatatactcaccaagtttggaatgaaggatgccaagcccatcaagacacccatgggaaccaatgggcatctcgacctcgacacgggaggtaaatccgtagatcaaaaggtatacctgttgggaacttgttcttaa

SEQ ID NO: 129467 - DNA, 367 bp, Zea mays
  Clone ID: MRT4577_49548C.1
gagagtccgaagcccgggcattcagaaatgggcaatgaagaggagagggcgaatattcgatcagtccatcatcatcccgagcttgaccaggctgagggcggaggtgacgacagtgtgcaggctgatgacgagacacgggatggagaagagatgtgccatgatgccaatgccatacagcatcaggttgaagagcagagcagcagtagctgggaagacattgatggcgaaggaggccgcggcgggaggagcagcacgcggcgtcagtcaactcctcctgttatggcggcaggaaaagatgctcctactcctaccgggagtagaaagaagagggaggcagtgagcagaagcagcaaacccagcaaaccca

SEQ ID NO: 129468 - DNA, 112 bp, Zea mays
  Clone ID: MRT4577_49549C.1
tgactaatctaatgttcttttgattctgaacgaacgaggtatttttaaactctagggagtaatcacataataagtgagagcagagtaatgttaggtatatacagaatggggg

SEQ ID NO: 129469 - DNA, 538 bp, Zea mays
  Clone ID: MRT4577_4954C.1
ggactcgctgacccaaaatgcggaattgctcataacagaggcgcggcttattacacaattggtacagatgacttacatgtctgggctcggataatagcagatctgaactttgaacgaggaatggaactccacgtagcatataaggggatcattttaatcactcacaaatacatcctttctggactggaagaatgtgaagacagcagcatcggctcgtttaagacctactcttgaacgggatcgccctgatgatcacctgtgggtttatggaacctagcgcaacggcgatgaatgggccggcccacaagatccagtgtgcaaccgacccatggagctggttgtaaattaccgaggagtcaagggtccatgcggagttgatgccctcgccggtgatatggatgtaggccaggtggactaagaactcggaaaacccctttggtagaggggctaggatcggcacatgggagtacgtggcgttcatcttggcgtccgtggcggagaacacggtgtagacgatgatgaaggtgcctactatctc

SEQ ID NO: 129470 - DNA, 2589 bp, Zea mays
  Clone ID: MRT4577_49550C.1
atgaggaaggtggtctactacgagaccgactcttcgtcgccatccacctccggctccgacatgtcgtccgtaacttctaagcgccatgagcgcaagaagtttagtaagattcccctacactaccctcgcattccaaaacgtactccattactttttgtctcattaggcaaaccacccatgtttgatggtgaagattataatatgtggagtgataaaatgaggcatcatctaacctcactccacactagcatttgggatgttgttgagattggagtacaggtaccatcaccgggggatgaagactatgactcggacgaggtcgcccaaatccgacacttcaactcccaagccaccaccatactcctcgcctctctaagtcgagaggagtataacaaggtgcaagggttaaaaagcgccaaggagatttgggacgtgctcaaaaccgcgcacgaaggagatgaggtgaccaaaatcaccaagcgggagacggtcgagggggagctcggtcgcttctgggttcgccaaggggtggagccacaagacatgtacaaccgcttgaagaccttggtgaaccaagtgcgcaacctcgggagcaccaaatgggatgaccatgagatggtcaagactaacatgggttggctctggcatcgccgattagcccacgttgggatgaagaatcttcataagcttctaaagggagagcacattttgggactaaccaatgttcattttgagaaagacagggtttgtagcgcatgtcaagtagggaagcaagttggtgttcatcatccacacaagaacatcatgacgaccgacaggccgcttgagttactccacatggatctattcggcccgatcgcttacataagcatcggcgggagaaaaatcacaaacccaagagacattgaagggattcttgaaacgggctcaaaattgaaagggaaatgtgcccttgggccatttctaatgctagaaacaggagaaacaatttcggagaagttggctgtgtacagccaaaaggctgctcggtctgggtgcaccggacagtgtccggatcacctattcaccccccctctaggtgctctcaaaaatgagtttggcttaaggatcaaaaagattagaagcgacaacgggacggagttcaagaactcacaaatcgaaggctttcttgaggaggagggcatcaagcatgagttctcttctccctacatgccacaacaaaatggtgtagtggagaggaagaatagaactctattggacatggcaaggaccatgcttgatgaatacaagacttcggatcagttttgggccgaggcgatcaacaccgcttgctatgccatcaaccgagtctttggtagcaaatgttttattcttgttaaaagaggtagaaaatctaaatttgctcctaaggctgtagaaggatatgattcaaacacaagggcatatagagtctttaacaagtccactggactagttgaagtttcttgtgacattgtgtttgatgagactaacggctctcaagtagagaaagttgatcttgatgaactagatgatgaagaggctctgtgcgtcgcgctaaggaacatgtccattggggttgtgtgtcctaaggaatccgaagagcctccacatgcacaagatcaaccatcttcctccatgcaagcatctccaccaactcaagatgaggatcaagctcaagaggatgaaaatgaagatcaagaagatgagccacctcaagaagagggcaatgatcaagggggagatgccaatgatcaagacaaggaagatgatgacggaaccaagtgggtcttccgcaacaaacaagatgagcatagtgtggtgacaaggaacaaagcccgccttgtggccaagggttattcacaagtcgaaggtttggatttcggggaaacctatgcacccgtagctagacttgagtcaattcgcattttacttgcctatgctacttaccatggcttcaagctttatcaaatggacgtgaaaagtgccttcctcaatggaccaatcaaggaggaagtctatgttgagcaacctcttgactttgaagatagtgagtaccctaatcacgtctacaaactctctaaggcgctttatgggctcaagcaagccccaagagcatggtatgaatgcctaagagattttcttatttctaatgacttcaaagtaggcaaagccgatcctactctattcactaaaactattgcaaatgatttgtttgtatgccaaatttatgttgatgtaatcatatttgggtctactaacaaatctacctgtgaagaatttagtaggatcatgattcaaaaattcgagatgtctatgatgggggagttgaagtatttcttaggatttcaagtgaagcaactccaagagggcaccttcattagccaaacgaagtacattcaagacattcttgcaaagtttgggatgaaggatgccaagcccatcaagacacccatgggaaccaatgggcatctcgacctcgacatgggaggtaaattcatagatcaaaagggtgtaaaattgatagaaagagcacatcagggacttgccagttcttgggaagatctctag

SEQ ID NO: 129471 - DNA, 403 bp, Zea mays
  Clone ID: MRT4577_49551C.1
accggggggcaaaaaggaagacaaaatatttttacaggatttttaatgggtcaggccccgggggggcaaacaaaaaaacactggggggacaattttggggtcccacgcaaaggtcccttaaaaaaaacgggggcaaccgggagaacggaggaaaacggggcgtttacgggacacccaggcaagcataaggccctcgttaatttgccggggacaaaattgggggggaaagcccaggcctttttgttgacggggtcggaaatgggggcgggaaggtttttgagggggcccttgggggggacaaaagcccgcccaaaaaaccccaacagggaaaacagggggggggggccgtttttgatctccttcaacttgagctcgggaaacccccccgggtcgtgggggaacc

SEQ ID NO: 129472 - DNA, 3387 bp, Zea mays
  Clone ID: MRT4577_49552C.1
atggcaaaggacggcaaaaagaagaaggtaaaatctagagcttccactaaatatgcaacatctagtgatgaggctagctctagtgatgatgaggatgacttgctcactctttttgccaacctaaacatgcaacaaaaggagaaattgaatgaattaattagtgctatccatgagaaggatgaactcttggatagccaagaggacttccttattaaggaaaacaagaagcatgttaagttgaatgaatcactttctagccttaagattgagaatgataatttaattgctaaggctaaggatttaaatgtttgcaatgattctatttccaatcttagaaatgagaatgtcatgttacatgctaagattgatgaattaaatgcttgcaaaccctctacatctactgttagccatgtttctatatgtactagatgtagagacattaatgttgatgctatccatgatcacctagctttaattaaacaacaaaatgatcacatagctcaacttagtgctaaaattaatgagcatgacttagaaaatgaaaaatttaaatttgctagaagtatgctctatagtgggagacgccctggcattaaggatggcattggcttccaacagggagacaatgtcaagcttaatgcctctaagaaattgtctaactttgttaagggcaaagctcccatggttcaggataacgagggctatattttatatcctgctggttatcccgaacataagattaggagaactcattctaggaagtctcactctggctctcatcatgcttttatgtataagagcgaggcatctagttctaggcaatccactcatgttaaattgcctaaacagaaatctcctattgcatcaaatgagccaaatgtttcatttaagacttttgatgcttcttatgttttaactaacaaatcaggcaaagtagttgtcaaatatgttgggggcaaacacaagggctccaagacttgtgtttgggtacccaaggtgcttgtttctaatgtcaaaggacccaagaccgtttgggtttatgcatccgggggctcaagttggatcattgatagcgggtgcacaaaccacatgactggggagaaaatgatgttctcctcctatgagaaaaacaatgatccccaaagagctatcacatttggggatggaaatcaagattctttatattacaatttgctttatgattctcaattatgcaaaatgggttacaactgtcgttttacggatataggtgttactgtctttagaagaagtgatgattcagtagcatttaagggagtattagagggtcagctatacttagttgattttaatagagctgaactcgatacttgcttaattgctaagactaatatgggttggctctggcagcgccgactagcccatgttgggatgaagaatcttcataagcttctaaagggagagcacattttgggactaacaaatgttcattttgagaaagacagggaaaaatcacaaacccaagagaccttaaaggggttcttgagacgggctcaaaatgagtttggcttaaggatcaaaaagattagaagcgacaatgggacggagttcaagaactctcaaattgaaggctttcttgaggacgagggcatcaagcatgagttctcttctccctacacacctcaacaaaatggtgtagtggagaggaagaatagaactctacttgacatggcgaggaccatgcttgatgagtacaaaacttcggaccggttttgggcggaagcagtcaacaccgcttgctacgccatcaaccgactctaccttcaccgaatcctcaagaaaacatcatatgaactcctaaccggtaaaaagcccaatgtttcatattttagagtctttggtagcaaatgttttattcttgttaaaagaggtataaaatctaaattttctcctaaggctgtagaaggctttttactaggatatgattcaaacacaagggcatatagagtcttcaacaaatccactggattagttgaggtttcttgtgacattgtgtttgatgagactaatggctctcaagtagagcaagttgatcttgatgagctagatgatgaagaggctccatgcgtcgcgctaaggaacatgtccattggggatgtgtgtcctaaggaatccaaagagcctccacaagcacaagatcaaccatcttcttccatgcaagcatctccaccaactcaagatgaggatcaagctcaagatgatgaaaatgaagatcaagaagagccacctcaagaggaggaaaatgatcaagggggagatgctgatgatcaagacaaggaagatgatcagggtccgagaccgcctcacccaagagtccaccaagcgatacaacgagatcaccccgtgaactccattctcggtgacattcataagggggtaaccactcgatctcgtgtcactcatttttgtgaacattactcttttgtgtcttctattgagccatacagggtggaagacacattaagagattcggattgggtgttggcaatgcaagaggaactcaacaacttcacgaggaatgaggtatggcatttagttccacgtcctaatcaaaatgttgtaggaaccaagtgggtttttcgcaacaagcaagatgagcatggtgtgatgacaaggaacaaagatcgacttgtagccaagggatattcacaagtcgaaggtttggatttcgatgaaacctatgcacccgtagctaggcttgagtcaattcgcatattacttgcctatgctacttaccatggcttcaagctttatcaaatggacgtgaaaagtgccttcctcaatcgaccaatcaaggaagaggtctatgttgagcaacctcccggctttgaagatagtgagtaccctaaccatgtctataaactctctaaggcgctttatgggctcaagcaagccccaagagcatggtatgaatgcctaagagattttcttatcactaatggcttcaaagtcggaaaagcctatcctactctctttactaaaaccattgcaaaagatttgtttgtatgccaaatttatgttgatgatatcatatttgggtctactaacaaatctacttgtgaagagtttagtaggatcatgattcagaaattcgagatgtctatgatgggggagttgaagtatttcctaggatttcaagtcaagcaactccaagaaggcaccttcatcagccaaacaaagtacatacaagacatacttaccaagtttggaatgaaggatgccaagcccatcaagacacccatgggaaccaatgggcagagtgtaaaattgataggaagagcacatcagggacttgtcagtttctgggaagatctctggtgtcttgggcttcaaagaaacaaaatttag

SEQ ID NO: 129473 - DNA, 388 bp, Zea mays
  Clone ID: MRT4577_49553C.1
agggactcgtgtacggactcttgggcggacgcttgggttctttgtgagataaatgggtggtgaagtatatcttgaaagatttctccagattctaacataatcacatgcatgcctactacaaatggaggtggtacaccgtggttgtttacaagagagaagatgattgagcatttgtgtgtacaactgtgcatttataaattcctcagactttgtgaagctttaacaaaaagaattcggtacatgcatataggtattgggaattaccaagcagcataagccacaagcacccatctagcaacgttaacgatcaagaaaaaaacagctggtagatctatttacatacaattgcgcatgctagaactattgattctctcattattaatcgggc

SEQ ID NO: 129474 - DNA, 7242 bp, Zea mays
  Clone ID: MRT4577_49554C.1
atgtcgggagaacacgccaagaaggagatggagaccggcgacaagcccgctacaagccacgggaaggcttcatcggaagagtcccgcaacaaaaagaaagggaaggagaagaaagcctcctcccacaagtcacatcggagtggcgacaagaaaaagaagatgaggaaggtggtctactacgagaccgacacctcatcgctatctacctccggctccgacgcgccctccataacttctaatcgccatgagcgcaagaagtttagtaagatccccttacactatcctcgtacttctagacatactccattactttccgttccattaggcaaaccgccaacctttgacggtgaagattatgctaggtggagtgatttaatgaaatttcatctaacctcactccacaaaagtatatggaatgttgttgagtttggagcacaggtaccatctgtaggggatgaggattatgatgatgacgaggtggcccaaatcgagcacttcaactcccaagccacaaccatactccttgcttccctaagtagggaggagtacaacaaggtgcaaggattaaagagcgccaaggaagtttgggacgtgctcaataccgcgcacgagggtgatgaactcaccaagatcaccaagcgggaaacgatcgagggggagctcggtcgcttccgtcttcgccaatgggaagagccacaagatatgtacaaccggctcaaaaccttggtgaaccaagtgcgcaatctcgggagcaagaaatgggatgaccacgaggtggttaaggttattttaagatcacttattttccttaaccctactcaagtacaattaattcgtggcaatccaagatatacactaatgactcccgaggaattaattgggaattttgtgagctttgaatttatgatcaagggctcacggaagatcaacgagcttgacggtccttctacgtccgaagctcaaccggtcgcattcaaagtgatgaaagaaaagaaggaggtgtctacaccgagtagaacacccatcgacgcctccaagctcgacaatgaggaaatgacgcttgtcatcaagagcttccgccaaatcctcaagcaatggagggggaaagattacaagccccgctccaagaaggtttgctacaaatgtggtaagcccggacattttattgcaaaatgtcctatatccagtgacagtgacaggggcgacgacaagaaggggagaagaaaggagaagaagaggtactacaagaagaagggcggcgatgcccatgtttgtcgcgagtgggactccgacgaaagctctagcgactcctccgacgacgaggacgccgccaacatcgccgtcaccaaaggacttctcttccccaacgtcggccacaagtgcctcatggcaaaggacggcaaaaagaagaaggttaaatctaaatcctccactagatatgagtcctctagtgatgataatgctagtgatgaggaagacaatttgcatactctttttgccaacttaaacatgcaacaaaaagagaaattaaatgaattaattagtgccatctatgagaaggatgatctcttggactcccaagaggacttcctaatcaaggaaaacaaaaagcatgttaaagttaaaaatgcttacgctctagaagttgaaaaatgtgaaaaattatctagtgagctaagcacttgccatgagactgtagacaaccttagaaatgagaattctaatttgttaactaaggttgattctgttgcttgtaatgtttcaattcccaatcttagaaatgataatgatgatttgcttgctaagattgaagaattaaacatgtctcttgctagccttaggattgaaaatgaaaaattgcttgctaaggctaaagaattggacgtttgcaatgctaccatttccgaccttagaagtagaaatgatatattacatgctaaggttgtacaattaaaatcttgcaaaccctctacatctaccgttgaacacactactatttgcactagatgtagagatgttgatattaatgctattcatgatcacatggctttacttaaacaacaaaatgatcatatagcaaaattagatgctaaaattgccgagcacgaacttgaaaatgaaaaatttaaatatgctcgtagtatgctttatagtgggagacgccctggcatcaaggatggcattggcttccaaaagggggacaatgtcaaacttaatgcccctcctaagaaattatctaactttgttaagggcaaggctcccatgcctcaagataacgagggttacattttgtaccctgccagttatcctaagagcaaaattaggagaattcattctaggaagtctcactctggccctaaccatgcttttatgtataagggtgagacatctagttctaggcaaccaacccgtgctaagttgcctaagaagaaaactcctagtgcatcaaatggtcataacatctcatttaaaacttttgatgcatcctatgttttaactaacaaatccggcaaggtagttgccaagtatgttgggagcaagcacaaggggtcaaagacttgtgtttgggtacccaaagttcttgtgtctaatgctaaaggacccaaaaccatttgggtttatgcatccgggggctcaagttggataatcgacagcgggtgcacaaaccacatgacaggggagaagaagatgttctcctcctacgagaaaaaccaagatccccaaagagcgatcactttcggggatggaaatcaaggtgtcactgtctttagaagaagtgatgattcaatagcatttaagggtgtgttagagggtcagctatacttggtagattttgatagagctgaactcgacacatgcttaattgctaagactaacatgggttggctctggcaccgccgactagcccatgttgggatgaagaatcttcataagcttctaaagggagagcacattttaggattaacaaatgttcattttgagaaagacaggatttgtagcgcatgccaaacagggaagcaagttggagcccaccatccacataagaacatcatgacgactgacaggccactggagctcctacacatggacctattcggcccgatagcttacataagcatcggcgggagtaagtactgtctagttattgtggatgattattctagcttcacttgggtattctttttgcaagaaaattctcatacccaagagaccttaaagggattcttgagacgagctcaaaacgagttcggcttaaggatcaagaagattagaagcgacaacgggacggagttcaagaactctcaaattgaaggcttccttgaggaggagggcatcaagcatgagttctcttctccctacacgccacaacagaatggtgtagtggagaggaagaatcgaactctattggacatggcaagaaccatgcttgatgagtacaagacttcggatcggttttgggccgaggcggtcaacacctcttgctacgccatcaaccgattatatctacaccgaatcctcaagaagacatcatacgaactcctaaccggtaaaaagccaaatatttcatattttagagtctttgatagcaaatgtttcattcttgttaaaagaggtagaaaatctaaatttgctcctaagactgtagaaggctttttactaggatatgattcaaacacaagggcatatagagtctttaacaagtccactggacaagttgaagtttcttgtgacgttgtgtttgatgagactaacggctctcaagtagagcaagttgatcttgatgagataggcgatgaagaggctccgtgcatcgcgctaaggaacatatccattggggatgtgtgtcctaaggaatccaaagagcctccaaatgcacaagatcaaccatcctcctccacgcaagcatctccaccgactcaaaataaggatgaggctcaaattgatgaaggagaagatcaagcaaatgagccacctcaagatgacgacaatgatcaagggggagatgcaaatgatcaagacaaggaggatgaagaaccatggccgccacacccaagaccacacagggtagaggaagcacttcaagattcggattgggtggtggcgatgcaagaggagctcaacaacttcactaggaatgaggtatggcatttagttccacgtcctaatcaaaatgttgtaggaaccaagtgggtcttccgcaacaagcaagacgagcatggtgtggtgacaaggaacaaagctcgacttgtggccaagggatactcccaagtcgaaggtttggattttggtgaaacctatgcacccgtagctaggcttgagtcaattcgtatattattggcctatgctacttaccatggcttcaagctttatcaaatggacgtgaagagtgccttcctcaatggaccaatcaaggaagaggtctatgttgagcaacctcccggctttgaagatagtgagtaccctaaccatgtttataaactctctaaggcgctttatgggctcaagcaagccccaagagcatggtatgaatgccttagagatttccttatcactaatggattcaaagtcagaaaagccgatcctacactctttaccaaaacacttgaaaatgatttgtttgtatgccaaatttatgttgatgatattatatttgggtctactaacgaatctacatgtgaagagtttagtaggatcatgacacaaaagttcgagatgtctatgatgggggagttgaagtatttcttaggatttcaagtaaagcaactccaagagggcaccttccttagccaaacaaagtatactcaagacattctaagcaagtttgggatgaaggatgccaaacccatcaagacacccatgggaaccaatgggcatctcgacctcgacgagggagcccatcgcgcccgcagtccgccctcccctcgccgcctccccagaccgcagtctctcctcaacctccctccccaaggagctggcggcagcgcggctgcgtcgggaggaggaggacgcagaggacgccgcgcgggggctgcggcaggagctcgactccgagcgggcctccccggagatggcagccagatccggccattgagccccctaaccgagcggatccaaggtactacacggtcttgccctcgcccttttgcttgctttgtcgtcctctcctcaccgcggggggacccgacgtacgagcaggaggtgttcctcgccacgcggtgcggcaggcgcatgctcgacctgtcccggttccgcgaccgcgaccgcgcgcggtgccgcgactggtgcttcgccgcgttcgtgctcgcctacgccacgtacctcgacgaccggctcaaagaacggatgcaggaccgcggagcaggcggggccagcccgggcaaatggcacgtcgacggcgaccctgtcgggatggcgtgccaggtggccgaggcctgggagctcgtgccgcggggaaggctggtgaaggagagcgcggcgatgtactgcgagctcacggaggtgatggtcgtgctcttggaccgcttcgccgacctgggcactcctgcctgcgtgcgcgtccactccatcttcaccagtactgcttggaatttgggtatgctgagttcacgcttcacagacagaactgcttggaatttggatagtgcactaaccacagttgagacattagcatcagcggctatttgtggcatcgtacattcaataataggtggacaaccactattgatcgtgggtgttgcagaaccgacaattatcatgtacacttatatctacaattttgccaaaaatcagccaaacctgggagaaaaaatgtttctgccatgggctacctgggtttacatctggacagctgttatgctgttcctcatggcaattttcaacgttgcagctattctaaacaaatttaccaggtttgcaggagaactttttgtaatgttaatcacagttttgtttatgcaagaggcgataaaggggatggttggtgaattcagtgcccctaacgcatggcaaaggagcttaattgcggactacggtgttccactaatggtgatactttggacatcattgtcatattcattgccaagcaggatcccttcaggggtccctaggaggctcttcaccccacttccttgggaacccaagtcgctccagcattggacagtagcaaaagatctgttttcagtccctacagtacatatattcctggctattgtgcctgccaccatggtcgcagggctctatttctttgaccacactgtagcttcccagatgagtcagcagaaggaatttaatttgaagaacccatcagcctaccattatgacattttggtcctaagcttgacattgcttcgcaagaagatggtccaaactgccaaggagggcatgatgaataatgctaccagttccgaagtttatgtcaaaatgcaagatgttttcataaaaatggaccacggaggcgacactgtttctgctcacaaagaaccgaaggacctgaaggatgcaattattccagaagggaatggatcaggaacagtgcctgaagtatttgatcctgaaaagcatgtagatgcttacttgcctgtccgggtgaatgagcagagagtaagcaatctgttgcagtccctgttgattgctggttgtattagagttacaccgctcattcagaagataccaacatcagtcctttggggttacttcgcctatatgtccatcgacagccttcctagaaaccagttctgggagaggatacaacttcttttcatcacgcctcaaagacgctacaaggttcttgaaggagcacatgcatccttcatggagtcagtgcctttcaacacaatatgcaccttcacactcttccagctaatctatctgttgatcgtctttgggatgacatggataccagtagcaggaatcctcttaccactgctcttcttcttcttcctcattatcatcaggcagcacttcatcccgaaatattttgatccgagccacctgagggaattagatgcagccgagtacgaagaactgaaaggttttacacctgatccatcagtgtgtgaggacgagtctgttcgcagcggagatgctcagcctggatatgcttccgaaatactcgaggaattcacgactcaccgtggagagctgaagcgcaggaactctaccttccatgatgggagactacttcagcttaactctgtcaagatgacgagagagctttctcgggttccttcttggcttacatga

SEQ ID NO: 129475 - DNA, 367 bp, Zea mays
  unsure (1)..(367): unsure at all n locations
  Clone ID: MRT4577_49555C.1
tntttttttttttttttttttttttttttttttttctttttttcttttaactattctttcngggtgagattaaatatatttactaaacatttacacttcttcaacttatttattccccaatttattaacaaacaatctttcaaaccatattttaattgagctccttttttaaataaatgccaccacttttttcccggaatgtttaaatttacccccatcataggattgtgaccccccaacaaattaattttatttcgcctcttactccttgagggttgcttttgtctcctgcccaattctcttcaaaatttttttaattcccttaatttttttaccccccactttttatccttctattcccattttt

SEQ ID NO: 129476 - DNA, 1647 bp, Zea mays
  Clone ID: MRT4577_49556C.1
atgtcgggagatcacgccaagaaggagatggagaccggcgaaaagcccactacaagccacgggagcacttcatcggaagagtcccgcaccaagaggaaggagaagaaggactcctcgaaacggaaggagaaaaagtcttcctcctctcaccacaaagagaagaaggaaaaatcttcttcccacaagccgcatcggaaaggcgacaagcacaagaggatgaggaaggtggtctactacgagaccgacacttcatcaacatcgacctccgactccgatgcgccctccgtcacttctaagcgccaagagcgcaagaagtatagggatgagaactatgatgaggatgaggtggcccaaatcgagcacttcaactctcaagcaacaacaatactcctagcctctttgagtagagaagagtataacaaagttcaagggttgaagaatgcaaaggagatttgggatttactcaagaccgcgcatgaaggtgatgagctcaccaagatcaccaagcgggaaacgatcgagggggagctcggtcggttccggcttcgcaaaggggaggagccacaacacatgtacaaccggctcaagacattggtgaatcaagtgcgcaacctcgggagcgtaaagtgggatgaccacgaggtggttaaggttattctaagatctcttattttccttaaccctactcaagttcaattaattcgtggtaatcctagatatactaaaatgacccccgaggaagttatcgggaattttgtaagttttgagtgcatgatcgaaggctcgaggaagatcaacgagcttgatgatgccaccacatccgaagctcaacccgttgcattcaaggcaacggaggagaagaaggaggagtctacaccaagtcgacaaccaatagacgcctccaagctcgacaatgaggaaatggcgctcgtcatcaagagcttccgccaaatcctcaagcaaaggagggggaaggattacaagtcccgctccaagaaggtttgctacaaatgtggtaagcccggtcattttattgctaaatgtcccatatctagtgacagtgaccgaggcgacgacaagaaggggagaagaaaggagaagaagagatactacaagaagaagggtggcgatgcccatatttgtcgggagtgggattccgacgaaagctcaagcgactcctccgacgacgaggacgccgccaacatcgccgtcaccaagggactcctctttcccaacgtcggccacaagtgcctcatggcaaaggacggcaaacggaagaagtgagagagctccaccgactcctcctccgacgaggacgccgccaacatcgctgtcaccaagggactcctcttccccaacgtcggccacaagtgcctcatggcaaaggacggcaaaaggaagaaggtaaaatcaagatcctccactaaatatgaaacctctagtgatgaggatgatgctagcaatgaggaggataacttgcgcgttctttttgccaaccttaacatggaacagaaggaaaaactaaatgagctaattagtgccatccatgaaaaggatgacctcttggactcccaagaggacttcctaatcaaagaaaataaaaagcatgttaaggttaaaaatgcttatgctctagagtcgacctgc

SEQ ID NO: 129477 - DNA, 1470 bp, Zea mays
  Clone ID: MRT4577_49557C.1
atgtcgggagatcacgccaagaaggagatggagaccggcgaaaagcccactacaagccacaggagcacttcatcggaagagtcccgcaccaagaggaaggagaagaaagactcctccaaagggaaggagaagaagaaggactcctccaaagggaaggagaagaaatcttcttcacacaaagagaagaaggagaagtcttcctcccacaagccgcaacggagtggggacaagaaaaagaggatgaggaaagtggtctactacgagaccgattcttcatcgacatccacctccggctccgacgcggcatccgtcacttctaaacgccaagagcgtaagaagtatagtaagattcccctatgctaccctcgcatttctaaacatacacctttactttccgtcccattaggcaaaccaccaacttttgatggtgaagattatgctaggtggagtgatttaatgcgatttcatctaacctcactccacaaaagtatatgggatgttgttgagtttggtgcacaagtaccatccgtaggggatgaagactatgatgaggatgaggtggcccaaatcgagcacttcaattctcaagcaacaacaatactcctcgcctctctaagtagagaggaatacaacaaggtgcaagggttgaagaatgcaaaggagatttgggatctactcaagaccgcgcacgagggtgatgaactcaccaagatcaccaagcgggaaacgatcgagggggagctcggtcgctttcgtcttcgccaaggggaggagccacaagatatgtacaaccggctcaaaaccttggtgaaccaaatgtgcaacctcgggagcaagaaatgggatgaccacgaggtggttaaggttattcttagatcactcatcttccttaaccccactcaagttcaattaattcgtggtaatcctagatatacactaatgactcccgaggaagttatcgagaattttgtgagctttgaatgtatgatcaagggctcaaagaagatcaacgagcttgatgatccctccacgtccgaagcacaaccggtggctttcaaggcgacggaggagaagaaggaggagtctacaccaagtagacaaccaatcgacgcttcaaagctcgacaacgaggagatggctttaatcatcaaaagctttcgccaaatcctcaagcaacggaaggggaaggattacaaatcccgttccaagaaggtttgctacaagtgtggtaagtccggtcactttattgctaaatgtccattatcaagtgacagtgacagggataacgacaagaagggcaagaggagagaaaagaagaggtaccacaagaagaggggcggcgatgcccatgtgtgccgcgagtgggactccgacgagagctccaccgactcctccgacgacgaggacgccgccaacatcgtcgtcaccaagggactcctcttccccaacgtcggccacaagtgcctctga

SEQ ID NO: 129478 - DNA, 4539 bp, Zea mays
  Clone ID: MRT4577_49558C.1
atgtcgggagcatccgccaagagggagatggagaccgacacaagccgcgggagagctccatcaaaggagtccgacaccaaaggaagggaggaatcacctccccgtgtcaagtcgcatcagagtggcgacaagaagaagaagatgaagaaagtggtctactacgagaccgactcttcgttgccatccacctctggctccgacacgtcgtccatcacttctaagcgccatgagcgcaagaagtttagcaaaccaccagttttttacggtgaagattattgtatgtggagtgataaaatgaggcatcacctaacctcactttacggtagtatttgggacgttgttgagtttggagcacaggtaccatccgtaggggatgaaggatatgattcggatgaagttgcccaaatccggcacttcaactcccaagccactactatactcctcgcctctctaagtcgagaggagtataataaggtgcaagggttgaagagtgccaaagagatttgggacgtgctcaagaccgcgcacgaaggagatgaggtgacaaaaatcaccaagcgggagacgattgagggggagctcggtcgattcatcctcaaccaaggagaggagccacatgccatgtacaaccggctcaagaccttggtgaatcaagtgcgcaacctcgggagcacaaaatgggatgaccatgaaatggtcaaggttattctaagatcacttgtttttcttaatcctacacaagttcaattaattcatggtgatcctagatacaagctaatgtctcccgaggaggttataggaaagtttgtgagctttgaattgatgatcaaaggctccaaacaaatcatcgagcgaggcgccacctccacacccgagcaaaggagggggaaggattacaagccccgctccaagaaagtttgctacaaatgtggtaagcccggttattttattgctaaatgtccattatctagtgatagtgacaggggcgacgacaagaagggaaagaggagggaaaagaagagatactacaagaagaagggcggcgatgcccatgtatgccgggagtgggactccgatgagagctccaccgactcctccgatgaggacgccgccaacatcgccgtcaacaagggtctcctcttccccaacgtcggccacaagtgcctcatggcaaaggacggcaaaaagaagaaggtaaaatctagagcttctactaaatatgcaacatctagtgatgaggctagctctagtgaagatgaggatgatttgcttagtctttttgccaacctaaacatgcaacaaaaagaaaaattaaatgaattaataggtgctattcatgagaaggatgaactcttggatagccaagaggacttccttattaaggaaaataaaaaacatgttaaggtaaaaaatgcttatgctcaagaagtagaaaaatgtgagcttagcacttgccatgacactatttctaaccttaaaattgaaaatgccaaattaattgctaaggttgagaaattaaatgtttgtgatgattctcttgtcaaccttaaaaatgataatgctagtttgattgctaagattgacaagttgaatgaatcactttctagccttaagattgagaatgataaattaatatctaaggctaaagatttaaatgtttgcaatgtttctatttccaatcttagagatgagaatgccatgttacatgctaagattgatgaattaaatgtttgcaaaccctctacatctatcgttgatcatgtttccatttgtactagatgtagagacattaatgttgacattatccatgatcacctagctttaattaaacaacaaaatgatcacatagctcaacttagtgctaaaattaatgagcatgagagagaaaatgaaaaatttaaatttgctagaagcatgctctatagtgggagacgccctggcattaaggatggcattggcttccaactggaaggcaatgttaaaattaatgcccctaagaaattgtctaactttgttaagggcaaagctcccatggttcaggataacgagggctatattttatatcctgctggttatcccgaacataagattaggagaattcattctagggagtctcactctggctctcatcatgcttttatgtataagagtgaggcatctagttctaggcaatccactcatgttaaattgcctaaaaagaaaactcctactgcatcaaatgagcctattgtttcatttaagacttttgatgcttcatatgttttaactaacaaatcaggcaaagtagttgccaaatatgttgagggcaatcacaagggctccaagacttgtgtttgggtacccaaggtgcttgtatctaatgtgaaaggacccaagaccatttgggtttatgcatccgggggctcaagttggatcattgatagcgggtgcaaaaaccacatgactggggagaaaaggatgttctcctcctatgagaaaacgatgattcccaaagagctatcacattcggggatggaaatcaaggaaaaaactcaaacccaagagactttaaagggattcttgagacgagctcaaaatgagttcggattaaggatcaagaaaataagaagcgacaacgggacggacttcaagaactctcaaattgaaggcttccttgaggatgagggcatcaagcatgagttctcttctccctacacacctcaacaaaatggtgtagtggagaggaagaatagaactctacttgacatggagaggaccatgcttgatgagtacaagactttggactggttttgggcggaagcaatcaacaccgcttgctacgccatcaaccgactctaccttcaccgaatcctcaaaaagacatcatatgaactcctaaccgataaaaagcccaatgcctcatattttagagtctttggtagcaaatgttttatttttgttaaaagaggtagaaaatctagatttgctcctaaggctgtagaaggctttttacttggttatgactcaaacacaagggcatatagagtctttaacaagtccactggactagttgaagtttcttgtgacattgtgtttgatgagactaacggctctcaagtagagcaagttgatcttgatgagctagatgatgaagaggctccatgcgtcgcgctaaggaacatgtccattagggatgtgtgtcctaaggaatccgaagagcccacacaagcacaagatcaaccatcatcttccatgcaagcatctccaccaactcaagataaggatcaagctcaagataatgaaaatgaagatcaagaagagccatctcaagaggaggacaatgatcaagggggagatgccaatgatcaagacaaggaagatgatgagggtccaagaccgcctcacccaagagtccaccaagcgatacaaagagatcaccccgtgaactctatcctcggcgatattcataagggggtaacaactcgatcttgtgtcgctcatttttgtgaacattactcttttgtgtcttctattgagccatacagggtggaagatgcattaaaagattcggattgggtgttggcaatgcaagaggaactcaacaacttcacgaggaatgagggctattcacaagtcgaaggtttggatttcggtgaaacctatgcacccgtagctaggcttgagtcaattcgcatattacttgcctatgctacttaccatggctttaagctttatcaaatggacgtgaaaagtgccttcctcaatgcaccaatcaaggaggaggtctatgttgagcaacctcccggctttgaagatagtgagtaccctaatcatgtttacaaactctctaaggcgctttatgggctcaaacaagccccaagagcatggtatgaatgcctaagagatttccttatcactaatggcttcaaagtcggcaaagccgatcctactctctttactaaaactattgcaaatgatttgtttgtatgtcaaatttatgttgatgatatcatatttgggtctactaataaatctacttgtgaagagtttagtaggattatgattcgaaaattcgagatgtctataatgggggagttgaagtatttcttaggatttcaagtgaagcaactacaagagggcaccttcatcagccaaactaagtatattcaagacatactcaccaagtttggaatgaagaatgccaagcccatcaagacacacatgggaaccaatgggcatctcgacctcgacacgggaggtaaatccatagatcaaagggtataccggtcgatgataggatctttactctatttatgtgcatctcgaccggatattatgctttccgtatgcatgtgtgcaagattccaagccgatcctaaggaagttcaccttagggccgtaaaaagaatcttgagatatttagttcatacacctaagtttggtctttggtaccccaagggatccacctttgatttaataggttatttagatgctgattgggcagggtgtaaaattgatagaaagagcacatcagggacttgtcagttcttgggaagatga

SEQ ID NO: 129479 - DNA, 856 bp, Zea mays
  Clone ID: MRT4577_49559C.1
cggatttccggggtgcattgggcccctcgcccacgcgtccgcccacgcgtccgatcgagacgatcaactgctttgtctcgcctccccaagcgagaagcgaccgactcccgccgccgttgccagccatggacggcggtgacgacctcgccgccctgcacgagcaggtcgccctcgcattctccgccgccatctcggcctccgacctcgaccttgccttccagctccaggtcgccgaggccatccaagcctccctcggcttgcccaatgccgccgccccgtcatcatcgtcgcaagccgccccagagtcatcctccgacgccacctacgccttcgccgtccaggccgccgatctcgcgcgcgcagaggaggaccgccgcgacgccgaggcctgccgagccgccaacgcccgagccgccgccaacgcccgcgtcgtcgcgcacgacgccctcttcgcccgcgacctcgctgccatccccgaggaacagtgggaccacgacggcgactacttcgagcgccccgtcgagtcctcgccctgcccgccgttccgcgtcttctccaagggcatggcgagcagggaggttgtggccccgcgggaccgggaccccagcgtcgccgtgctcgccgtcgctatctgtgggccgcagggggaggaggtccttaggatacagaagctggtggagcgcttcgtgggtggccgcatgatggtggagttgatggcgctgatggaaggcctcgacgcagctctggggctgggcatccgcagtgtcaccatggttacgggttacggccctctctacaagcatatgcttggcatatggcgcccgtctaggaagaaggtggcagatatgatgaatca

SEQ ID NO: 129480 - DNA, 1430 bp, Zea mays
  Clone ID: MRT4577_4955C.1
ctaaagcaaggctaagcatcataaaagtccttttcaaaaagggtatcaaggaagggtaatcaatttttcaaggaaagaaatgcatcaattgtttagcacacaactcctatcacctaatgcatcaaacaaagtgataaagattttaaaacagcaaggaggtggcaaatgcatcggggcaaatgcacacaactcctatcagcctttattccgatacttgcttcgtccatccatcttcaggttaatccatcaacattatcttgtggagaagctcacgctttccaacatcttgtggtcgactcagttttggtcctccgtatcacgtgattaattaacatacctttcagctcagcatttcaccgaaaataggatgagtgctgcatcgaatcgcgcttcatcttcatccacattgagaattctccgaccgcgtactgatttatttccttctgcgcctaatcttctcgaatctttggcgtagacgaggatgacgatcgatgacttgttcgagctttttgtcgagcacttggtgaacatcacgctgctagattcgtcttcacccaactcttgagatttcttgatgacgcacggaatgacgacgaccttcgattgaagtctttgaccgagcacttgataagcgatgcacatggacctcgcttatttttgtctaaagtccgggattcgtggttcgacgagatcgagcagggaagaacaaagttcgacggttcgacgacatcggcgaggtcaacgacgagccgatcaaccaaaactccacgacgccgaccgagacacaggttagagaacggcggctgacgagatccgagctggggaaaaagaacacatgactgggcgttaacggctgggtccgaacgcgagggagaaactcgaccggcgagctggagcgagctaggcacaccacgatttgaggaagctgtgtgcagaaaaacgtgcgtgcagggacgagctcgacagggatcttggcgagaccacggcgctggaagtcgagcgcaatccaagcaagaaatcacggcacggctagagaccgagtgccaccataggagctggaacaggggcgcggcaggagcagccccacggtggagtcgcggcatggggacagcgaagaacgcgacgggctggggaataaataccaccgaacggcggctgggcggcaggatttttccggcggcttggcaccgagctggagcaagctgggcagcaagaaaaatcccacaagcgcttggtcgaccgggagagataagggagaagaagaactgagaggataacgatggtaaaaattccagctgcggacatgaagagacggcagcagataaatccgagcgcggctggggagctcagggagagaaagccgagcgctcgtaagaaaaatctggcgacggatgagaaagagaagagacaagagataagaacatagaaga

SEQ ID NO: 129481 - DNA, 4329 bp, Zea mays
  Clone ID: MRT4577_49560C.1
atggcgaaggacggcaaaaagaagaaggttaaatctaaatcctccactagatatgagtcttctagtgatgataatgctagtgatgaggaagataatttgcgtactctttttgccaaccttaacatggaacaaaaggaaaaattaaatgaattaattagtgctattcatgaaaaggatgaccttttggattctcaagaggacttcctaattaaggaaaataagaaacatgttaaggttaaaaatgcttatgctctagaaattgagaaatgtgaaaaattatctagtgaactaagcacttgccatgagacaatagacaaccttagaaatgaaaatgctaatttgttagctaaggttgattctcatgtttgtaatgtttcaattaccaattctagaaataataatgatgatttacttgctaggattgaagaattgaacatttctcttgctagccttaggattgaaaatgaaaaattgcttgctaaggctaaaggttttgatgtttgcaatgctactatttccgaccttagaactaagaatgacatgttacatgctaaggttgtagaattaaaatcttgcaaaccctctacatctatcgttgagcatgtatctatttgtactagatgtagagatgttgatatcaatgctattcatgatcacatgtctttaattaaacaacaaaatgatcatatagcaaaattagatgctaaaattgctgagcataacttagaaaatgaaaattttaaatttgctagaagtatgctctatagtgggagacgccctagcatcaaggatggcattggcttccaaaggggagacaatgtcaaacttaatgcccctcctaaaagattgtctaactttgttaagggcaagactcccatgcctcaagataacgagggttacattttataccctgccggttatcccgaggataaaattaggagaattcactctaggaagtctcaccctggcccaaatcatgcttttatgtataagggtgagacatctagctataggcaaccaacccgtgctaagttgcctaagaaaagaactcctaatgcatcaaatgatcatgacatttcattcaaaacttttgatgcatcttatgttttgactaacaaatccggcaaagtagttgccaagtttgttgggggcaaacacaaggggtcaaagacttgtgtttgggtacccaaagttcttgtttctaatgtcaaaggacccaaaaccgtttgggtttatgcatccgggggctcaagttggatactcgacagcgggtgcacaaaccatatgacaggggagaagaagatgttctcctcctatgagaaaaaccaagatccccaacaagctatcacattcggggatggaaatcaaggtgtcactgtctttagaagaagtgatgattcaatagcatttaagggagtgttagagggtcagatatacttggtagattttgatagagctgaactagacacttgcttaattgctaagactaacatgggctggctctggcatcgccgactagcacatgttgggatgaagaatcttcataagcttctaaagggagaacacattttaggactaacaaatgttcattttgagaaagacaggatttgtagcgcatgccaagcaggaaagcaagttggagcccatcatccacacaagaacatcatgacgaccgacaggccgcttgagctactccacatggatctattcggcccgattgcttacataagcatcggcgggagtaagtattgtcttgtaatagtggatgattattctcgcttcacttgggtattctttttgcaggagaaatctcaaacccaagagaccttaaaaggattcttgagacgggctcaaaatgagttcggtttaaggatcaagaaaattagaagcgacaatgggacggagttcaagaactctcaaattgaaggcttccttgaggaggagggcatcaagcatgagttctcttctccctacattccacaacaaaatggtgtagtggagaggaagaatagaactctattgtacatggcaaggaccatgcttgatgagtacaagacttcggatcggttttgggccgaggcggtcaacaccgcttgctacgccatcaaccggttatatctacaccgaatcctcaagaagacatcttatgagctcctaaccggtaaaaagccaaacatttcatattttagagtctttggtagcaaatgctttattctttttaaaagaggtagaaaatctaaatttgctcctaagacagtagaaggttttttactaggatttgattcaaacacaagggcatatagagtctttaacaagtccactggacaagttgaagtctcttgtgacgttgtgtttgatgagactaatggctctcaagtagagcaagttgatcttgatgaggtaggtaacgaagaggctccatgcatcgcgctaaggaacatgtccattggggatgtgtgtcctaaggaatccgaagagccttcaaatgcacaagatcaaccgtcctcctccacgcaagcatctccaccaactcaaaatgaggatgaggctcaagtcgatgaaggagaagatcaagcaaatgagccacctcaagatgacgacaatgatcaagggggagatgcaaatgagcaagacaaggaggatgaggaacaaagaccgccacacccaagagtccaccaagcaatccaacgagatcaccccgtcgacaccatcctcggcgacattcataagggggtaactactagatctcgtattgcacatttttgtgagcattactcttttgtttcctctattgagccacacagggtagaggaagcactacaagattcggattggatggtggcgatgcaagaggagctcaacaacttcactaggaatgaggtatgtcatttagttccacgtcctaatcaaaatgttgtaggaaccaaatgggtcttccgcaacaagcaagacgagcatggtgtggtgacaagggacaaagctcgacttgtggccaaaggatactcccaagtcgaaggtttggatttcggtgaaacctatgcacccgtagctaggcttgagtcaattcacatattattggcctatgctacttaccatggctttaagctctatcaaatggacgtgaaaagtgccttcctcaatggaccaatcaaggaagaggtctatgttgagcaacctcccgactttgaagatagtgagtaccctaaccatgtctataaactctctaaagcgctttatgggctcaagcaagccccaagagcatggtatgaatgccttagggatttccttatcactaatggattcaaagttggaaaggccgatcctacactctttaccaaaacacttgagaatgatttgtttgtatgccaaatttatgttgatgatattatatttgggtctactaacgaatctacatgtgaagagtttagtaggatcatgacacaaaagttcgagatgtctatgatgggggagttgaagtacttcttgggatttcaagtgaagcaactccaagagggcaccttcattagccaaacgaagtatactcaagacattctcaacaagtttgggatgaaggatgtcaagcccatcaagacacccatgggaactaatgggcatctcgacctcgacacgggaggtaagtccgtggatcaaaaggtataccggtcgatgataggttctttactctatttatgtgcatctcgaccggacattatgctttccgtatgcatgtgtgcaagattccaagccgaccctaaggaagctcaccttacggccgtgaaacgaatcttgagatatttggcttatactcctaagtttgggctttggtatcctaggggatccacatttgatttgattggttattcggatgccgattgggcggggtgtaaaatcaataggaagagcacatcggggacttgccagttcttgggaagatccttggtgtcttgggcttcaaagaagcaaaattctgtcgctctttccaccgccgaagccgagtacattgccgcaggccattgttgcgtgcaattgctttggatgaggcaaaccctgcgggactacggttacaaattaaccaaagtccctttactatgtgataatgagagtgcaatcaagatggcggataatcccgtcgagcatagccgcactaaacacatagccattcggtatcattttcttagggatcaccaacaaaagggagatatcgagatttcttacattaacactaaagatcaattagccgatatctttaccaagcctcttgatgaacaatcttttaacaaacttaggcatgagctcaatattcttgattcacgcaatttcttttgctag

SEQ ID NO: 129482 - DNA, 1881 bp, Zea mays
  Clone ID: MRT4577_49561C.1
gggtacctcgagccggcccgggtatcacataatagcaatgaagagcacttgccacagctaaaactggtgctaattaatttcagctcatcgcacgctgatcaccaccgcttcaccacagcgaaccaccatggaaagattctactacgtcgccgtggccaccttcgtgctcgtcttcctgctccaccacctcttgacgaggaagaagcagcaacgtctgccacccggcccgcggttcgcgtaccccatcctcggccacctccccttgctcaagaagccgctccagacctcgttcgccgacctcgtgtcgcgccacggcccaattattcacctgcgcctcggccgccgccacgccgtcgtcgtcggctcggcggcggtggcgaaggagtgcttctccggagagctcgacgtcgcgatcgccaaccgcccgcacttcccgtccgcgcgcgaggtcaccttcgactactcggtgctcacggccgtcaactacggcgcgctctggcgcaccatgcggcgcgtctccaccgtgcacctcctctcggcccaccgcgtcaacgtcatgtcggacaccgtgatcgcccgcgagctgcgcgtcatggtgcgccgcctcgcccgcgcctccgcctccgcgccgggcgacgccgccagagtcgagctgaagcggaggctgtttgacctctcccacagcgtcctcatggagaccatggcgcagaccaggaacacctactccgacgacccggaggaggacatgtccagggaggcgcgcgacatgaaggacatcatcgaagagatcatcccgctcgttggtgcggccaacctgtggaactacgtgcccctgctgcggtggctcgatctctacggcgccaagaggaagctcgcggacgtggttaaccgaagggacttgatcttcgacaacatgatcggtgcagagcggcagaagctgaggcagctggaacgcaagaaaggcgaggcccatgccagcgaatcggataagatgggcatgatcggcgtcatgttatcgctgcagaaaacagagcctgatgtctacacggacacctttatcaacgctctcgtgtcaaatctgctggccgccggcacggagacgacctcgacgactctggaatgggcaatgtcgctcttgcttaaccacccagacgtgctgaaaagggcgcaagaagagatcgagtcgaacgtcggaagggaccgtcttctcgacaagaacgacctcccccgcctgccctacctccactgcatcatcagcgagactcttcgcctctaccctcccacgccgatgctgctgccgcacgaggcgtccaccgactgcaagatccacgggtacgacgtcccggcggggtcgatggtcctcgtcaatgcgtacgccatccaccgggacccggcgatgtgggaggacccggaggagttcaggccggagcggttcgagctcggcagggcagaggggaagttcatgatgccgtttgggatggggaggcgcaggtgccccggcgagaacctcgcgatgcgaaccatggggctggtcctgggggcgctgctccaatgcttcgattggaccagggttggggatagagaagttgacatggcaacagccactggcaccatcatgtctaaggctgtcccactcgaagctcagtgcaagccgcgagcgaacatgtctgctgttcttcagaaaatctagagtgagattgtgaatatttctagttgcagataaacgatacataactatgcaatgcttatatatagtgtatagtagtatagcagtttcttcattttaaagttgtacaatgacattcatagaaaataacgacataaataataaaaatatacctctatatatatttataatttgtacgaaaaaaaaaaaaaaaa

SEQ ID NO: 129483 - DNA, 5310 bp, Zea mays
  Clone ID: MRT4577_49562C.1
atgtcgggagaacacgccaagaaggagatggagaccggcgaaaagcccactacaagccacgggagcacttcatcggaagagttccgcaccaagaggagggagaagaagaagagctcctccaacaaagggaaggagaagaaatcttcttctcaccacaaagagaagaaggaaaaatcttcttcccacaagccgcatcggagtggggacaagcaaaagaggatgaggaaagtggtctactacgagaccgacacttcatcaacatcgacctccggctccgatgcgccctccgtaacttctaaacgccaagagcgtaagaagtttagtaagatccccctacactaccctcgcatttctaaacatgcacctttactttccgtcccattaggcaaaccaccaacttttgatggtgaagattatgctaggtggagtgatttaatgcgatttcatctaacctcactccacaaaagtatatgggatgttgttgagtttggtgcacaggtaccgtctgtaggggataaagattatgatgaggatgaggtggcccaaatcgagcacttcaactctcaagcgacaacaatactcctcgcctctttaagtagagaggagtataacaaagttcaagggttgaagagcgccaaggaggtttgggatgtgctcaaaaccgcgcacgaaggagatgagctcaccaaaatcaccaagcgggaaacgatcgagggggagctcggtcggttccgacttcgcaaaggggaggagccacaacacatgtacaaccggctcaagactttggtgaaccaagtgcgcaacctcgggagcacgaaatgggacgaccacgaaatggttaaggttattctaagatctctcattttccttaaccccactcaagttcaattaattcgtggtaatcctagatatactaaaatgacccccgaggaagttatcgggaattttgtaagttttgagtgcatgatcgaaggctcgaggaagatcaacgagcttgatgatccatctacatccgaagctcaacccgtcgcattcaaggcgacggaggagaagaaggaggaggctacaccaagtcgacaaccaatagacgcctccaagctcgacaatgaggaaatggcgctcgtcatcaagagcttccgccaaatcctcaagcaaaggagagggaaagaccacaagtcccgctccaagaatgtttgctacaaatgtggtaagcccggtcattttattgctaaatgtcctatatctagtgacagtgaccgaggcgacaacaagaaggaaagaagaaaggagaagaagaggtactacaagaagaagggcggcgatgcccatgtttgtcgggagtgggactccgacgaaagctcaagcgactcctccgacgacgaggacgccgccaacatcgccgtcaccaagggactcctcttcccaaacgtcggccacaagtgtctcatggccaaggacggcaaaaagaaggttaaatctaaatcctccactaaatatgaatcctctagtgatgataatactaatgatgaggaagataacttgcgctctctttttgccaacctcaacatgcaacaaaaagaaaaacttaatgaattgattagtgccatccatgaaaaggatgatctcttggacacccaagaggacttcctaatcaaggaaaataaaaagcatgttaaggttaaaaatgcctatgctctagaaattgagaaatgccaaaaattatctagtgagctaagcacttgccatgaaacaatagacaaccttagaaatgaaaatgctaatttgttagctaaggttgattctcatgtttgcaatgtttcaattcccaaccctagagataataatgatgatttgcttgctaggattgaagaattgaacatttctcttgctagccttagaattgagaatgaaaaattgcttgctaaggctaaagattttgatgtttgcaatactaccatttctgaccttagaactaagaatgatatcttgcatgctaaggttgtagaattaaaatcttgcaaaccctctacatctaccattgagcacgtttccatttgtactagatgtagagatgttaacattgatgctatacatgatcacatggctttaattaaacaacaaaatgatcatatagctaaattagatgctaaaattgctgagcataacttagagaatgaaaaatttaaatttgctagaagtatgctctataatgggagacgccctggcatcaaggatggcattggcttccaaaggggagacaatgtcaaacttagtgcccctcctaaaagattgtctaattttgtaaagggcaaggctcccatgcctcaggataacgagggttacattttgtaccctgccagttatcctgagagcaaaattaggagaattcattctaggaagtctcactctggccctaaccatgcttttatgtataagggtgagacatctagctctaggcaaccaacccgtgctaagttacctagaaagaaaactcctaatgcatcaaatgatcatgacatttcatttaaaacttttgatgcatcttatgtattgactaacaaatccggcaaagtagttgccaaatatgttgggggcaagcacaaggggtcaaagacttgtgtttgggtacccaaagttcttgtgtctaatgccaaaggacccaaaaccatttgggtttatgcatccgggggctcaagttggatactcgacagtgggtgcacaaaccacatgacaggggagaaaaagatgttctcctcatatgagaaaaaccaagatccccaacgagctatcacattcggggatggaaatcaaggcttggtcaaaggtgtcactgtctttagaagaagtgatgattcaatagcatttaagggtgtgttagagggtcagctatacttagtagattttgatagagctgaactcgacacatgcttaattgctaagactaacatgggttggctctggcatcaccgattagcccatgttgggatgaagaatcttcacaagcttctaaagggagagcacattttaggactaaccaatgttcattttgagaaagacaggatttgtagcgcatgtcaagcagggaagcaagttggctctcatcatccgcataagaacataatgacgaccgacaggccgcttgagctactacacatggatctattcggcccgattgcttacataagcatcgacgggagtaagtactgtctagttattgtggatgattattctcgcttcacttgggtattctttttacaggaaaaatctcaaacccaagaaaccttaaagggattcttgagacgggctcaaaatgagtttgacttaaggatcaagaaaataagaagcgacaacgggacggagttcaagaattctcaaattgaaggcttccttgaggaggagggcatcaagcatgagttctcttctccctacacgcctcaacaaaatggtgtagtggagaggaagaatcgaactctattggacatgggtagaaccatgcttgatgagtacaagacctcggatcggttttgggcggaggcggtcaacaccgcttgctacgccatcaaccggttgtatctacaccgaatcctcaagaagacatcatacgaactcctaaccagtaaaaagcccaatatttcatattttagagtctttggtagcaaatgctttattcttgttaaaagaggtagaaaatctaaatttgctcctaagactgtcgaaggctttttacttggctatgactcaaacacaagggcatatagggtctttaacaagtccactggactagttgaagtctcatgtgacgttgtgtttgatgaaactaacggctctcaagtagagcaagttgatcttgatgagataggtgatgaagaggctccgtgcatcgcgctaaggaacatgtccattggggatgtgggtcctaaggaatccgaagagcctccaaatgcacaagatcaaccatcctcctccatgcaagcatctccaccaactcaaaatgaggaagaggctcaagttgatgaagaagaagatcaatcaaatgagccacctcaagatgacggcatagatcaagggggagatgcaaatgatcaagacaaggaggatgaagagcaaagaccgccacacccaagagtccaccaagcaatccaacgagatcaccccgtcgacaccatcctcggcgatattcataagggggtaaccactagatctcgtgttgctcatttttgtgaacattactcttttgtttcctctattgagccacacagggtagaggaagcacttcaagattcggattgggtggtggcaatgcaagaggagctcaacaacttcactaggaatgaggtatggcatttagttccacgtcctaaccaaaatgttgtaggaaccaaatgggtcttccgcaacaagcaagatgagcatggtgtggtgacaaggaacaaagctcgacttgtggccaagggatactcccaagtcgaaggtttggatttcggtgaaacctatgcacccgtagctaggcttgagtcaattcgcatattattggcctatgctacttaccatggctttaagctttatcaaatggacgtgaaaagtgccttcctcaatggaccaatcaaggaagaggtctatgttgagcaacctcccggctttgaagacagtgagtaccctaaccatgtctataagctctctaaggcgctttatgggctcaagcaagccccaagagcatggtatgaatgccttagagatttccttattgctaatggcttcaaagtcggaaaggccgatcctacactctttactaaaactcttgaaaaggacttgtttgtatgccaaatttatgttgatgatattatatttgggtctactaacgagtctacatgtgaagagtttagtaggatcatgacacaaaagttcgagatgtctatgatgggggagttgaagtatttcttaggatttcaagtgaagcaactccaagaaggcaccttcattagccaaacgaagtacactcaagacattctaaacaagtttgggatgaaggatgccaagcccatcaaaacacccatgggaactaatgggcatctcgacctcgacacgggaggaacttcttttgttaaattgcacacattgctcttctatatacctttgatcatgtctctttcatatgctatgactaatgtgtttttcaagtctatttcaaaccaagtcataggtgtattgaaagggaattggagtcttcggcgaagacaaaggcttccactccgtaactcatccttcgccgacgctccaagtcactctccattcttgggggagaaagcatga

SEQ ID NO: 129484 - DNA, 439 bp, Zea mays
  Clone ID: MRT4577_49563C.1
tcgcttaatctccaggatccttctgggctgaggccccggcgaaggctcaggccgaccacgcttccgctgcccaggttgcgccgcttctcatctgcgacggagacaaggggggatacatcaggatccgctcgcttatcatgcagctcattaaagcaaacaaacaaggaaggtgcgtgaatgccacgcaggggggtgggcagacacaatagacgcggaaatcttcgtgagccgaagcatgagtcggttaaaaaggagcaccaacgctaggtaaagccgcgaaccggaatctgccgaaaaagacggcaacaaaccaagcaagaaacaagggagcgaaggaaagaggaggtaaatgtaaatctgctgccggcagagagcgaaagaacgccaaatcgagcaaatggtggcgctaacccacacacactgccactagtacggtgga

SEQ ID NO: 129485 - DNA, 1885 bp, Zea mays
  Clone ID: MRT4577_49564C.1
ggccgctttttttttttttttttttttttttttttttttttttatttttatttctagctttttattaaatctttaaactatgtaacttaattacttgatttaccgatttatctaaatcgatcatcacaatatacgtatgctaaattaataacatttatggcgaccaacaattctatttaatctatttatagacctaattgactggaatacgaattaacttacccttatgacatccgacttgaaaccatgaaatcgacgacgcctttcagctcagcatttcaccgaaaatagggtgagtgctgcgtcgaatcgcgcttcatcttcatccacatcgagaattctccggccgtgtactgatttatttccttctgcgcctaatcttcttggatcttggcgtagatgaggatgacgatcgacgacttgttcaagcattttgtcgagcacttggtgaatatcacactgctagcttcgtcttcaccttacgcttgggattcttgacaacacacagaacgatgacgaccttcgattgaaatctgaagcgagctggtgaggtgggggtcgagcaggggataatgggttcgacgactcgacgataaacacgaacacgccgaaacccgatgaatgaggagcgagctggcgaggtggggttgagcaggttagcgcgagctcagacgatgacgaagtcacaagcaagggaggacgggttcaatagctcgacggcaaacacgagcacgcgcgaagctcgatggacgaagagcgagcgcacggatgggctcgggctgggaccagaggacgacaaacgcgcagagcttcaaaatcacgcgcgagagatagaaagacgcgtgaccagagacctaagcatccacgctggcaatttggacgaaagcgaactagtggcgacaactcccggccaagcaacgatgcatcggcacgagtgtcgcaggatagcagcaccacaacagcaagcgagctgcgaagcgaaattaactgcgggcaagagcagccaatcggcgagacccaaatactgtacgatgggcatcagggacaagcgcgcagcaacgactatggtcgactagcctaacgatatagggccaagcgagatcgacggcaaacgacgcgacggcgagctaggcagggtccaagctaataggcacagcatgggatagcgaccagcacgacggacgaactaagttgtggcgaggtcggccgacgaggaaaaacaaggaacacgacgatgtcggcgaactgaagattgggagcgacagccggcgaggagcttatctccaaagagccacgcgagggaaactgaaaattaatctaactttggttcagcggcaaacgatggtcaggtccgaagggccagcgatgcggctagggagatgggagcaggaaaccggagcatcgccggcgagctgagggagaacggtggctgcacgcgcggggaggagctcgatgccggagctggagatcgagcgcgtgcacagggagttcaagaagagagagacgcagggagatgggagggcgccgagttgggtccgagccagggacgcactcgcgcggaaccagggagagggagagctcgacgagctgagcgcaggggagagagaaacagggcgcggtggccatggcgagcagggacgagctggaggaagagagggcgagccgcagggaggagcgcgcagggaagaagcgtgcgtagggagctggagcatcgccggccatgggagagagaggcagctgggcgcgcggcgagcaccagggagggctccacggcgaggaggagaacggaggggtggctgggcacgcgccatgggagcgtcaaggccgagcgaacgcagggagatcaacgccgtggggaagagccccggccggcaagagggtaccc

SEQ ID NO: 129486 - DNA, 101 bp, Zea mays
  Clone ID: MRT4577_49565C.1
cagatcttaaatcggatgggactaccactgcaggcaattccagacaactgagtgatggtgctggagcagtccatctcatgagaagctccgtggctctgaag

SEQ ID NO: 129487 - DNA, 758 bp, Zea mays
  Clone ID: MRT4577_49566C.1
aattcggcacgaggcacgcacgcggatccagcgcccccccggccgcgattcacctctcggcttcgtgccctcctcaacagccatgccacgaatcccgcgcacggcagcccctccgctgtgatttcaccgcccgcccgcggatccagcaccccccgcccgcacgcacgcggatccagcgcccccccggccgcgattcacctctcggcttcatgcccttcccccgctactgcggcggcgaggaggacgagaagaggcagtggtcgtcggtggctgtcagcggcgatgacgacgacgaccgcgaacgccgccgctacaggcaccaacaccgccgcctgcgcagcgacgacgatgaccgccagccgatccagcccgctcccccctccccccgcgattcaccgcccgtggatccagagctcgccgacgccgacaacaggcacttcaacagcgtgcttcgcgtccactcgttcgccaccatctgtgaggccgccagcagggcccccacgtccgacgactggctgttgtagcccctcgcccaccaccacctcctggggcacgaccactacatcgacgtgatgcgggtggtgtcgctcaagggcatccatggcgcgcggagggccaagatccacgagggttgggccatcccccaggtggtggaccacggcgtggacgccgtgacggtggtcaacatggcgcacctcgctcgtgactttctcacgctcccactcgaggacgagttcaagatgctcgaccaaatgtct

SEQ ID NO: 129488 - DNA, 1186 bp, Zea mays
  Clone ID: MRT4577_49567C.1
gaccctcgaggccggccgggaacttaactggaaactcgtaagaggaaaaaaagggacacccgccccgccgtccacctctccgcctcctccggtgccggcgctggagcggccgacccacgcaatctatgggcaacatgacccgctcaaactcgcccgtctcccgccgcatcgtcctctccttcctcgacttccttaactccgtcgaattagctcctggtgttgatcctgaagctctggaagttgctaaggattgtctggagtccatttttagtgttaactcaacagccactggtgacgcaatacaaccaggactgttgtttgagctatttgcttctctcgaagcaaatgaaagagaccagagcgacagccaggtggaggatacatttgaactagatcattcaggagatgaactatttgcaaaattttatgctgcacttgatgaaatcaatttctttaagacatcacctgctggagctgaagatcctggtctactttcaaaagcaacacaatactttgatgatgcattactggcgatgcagaagttgggaaagaaaagggcaagcttagtagacattgcagagtcctttaaatcaagagggaatgaattcatgagatcaaaccaacaccttaaagcggtagagctgtacacctgtgccattgcattgaaccaacaaaatgccatttactattgcaacagggctgctgcatatacccttcttaatatgaacaacaaagctattgaggactgcctgaagtcaattgaaattgaccctcactacagcaaagcatatagccgactcggatctgcttattttgctatggggaattatcacgatgctctgtacaagggatacttgaaagccgccgagcttgatcccagtaatgaaaatgtcaggcagaatattgaggtcacaaaaaagaaactggctgaacaacgagtcccaccagaagagcagaacacacatgcaggccaagctcaaggaccacatccaatatttacaagtggtggtgttcctttcaatctgtttccaccaggaaatgaaggaacgcaggcacgccaagcttctaatggacttgaaggggaacatggtgaaccaggcatacacagggatgatgacgtccatataaatttggctgggacccgagcagctgcggaggctttgagagctgtgatgcagatgcttgg

SEQ ID NO: 129489 - DNA, 524 bp, Zea mays
  Clone ID: MRT4577_49568C.1
gaccatcgcactcgatcgtgggcattgctttgcttcgcctccactctacgaaactcactcactcactcccgttgccacaatccattcgatagtcactagctccagcatgattggcgccgacactgaactagcgctcgggtgtgttcgctacagtcacaaactgacatagctgccacgcccctgaatccgatgatggatatggtggtgatgcggggggtggagcacgcggtggtcacggacatgcttgcatgttcgggcgcgccttgaaggcggtagaggggttaaaaaggctgcggatgctgcggaagcacgatgagttgatgggaggtcgtggatgctgctcgacgagacgcaactgtgcggtgacatcaacggggaccgcacagtcaccgggctggccgtggacgacggagagatgaggcaacacgccgccgggcactagttgctaggcaccattcgccagattctggagctgaacgtcatgcacgtctactacgacaagaagaagctgaagccgatgtagc

SEQ ID NO: 129490 - DNA, 2149 bp, Zea mays
  Clone ID: MRT4577_49569C.1
gtcattggcgacgtcggccacgaacgggaactggaaactcgtaagaggaaaaaaaaacacacccgccccgccgtccacctctccgcctcctccggtgccggcgctggagcggccgacccacgcaatctatgggcaacatgacccgctcaaactcgcccgtctcccgccgcatcgtcctctccttcctcgacttccttaactccgtcgaattagctcctggtgttgatcctgaagctctggaagttgctaaggattgtctggagtccatttttagtgttaactcaacagccactggtgacgcaatacaaccaggactgttgtttgagctatttgcttctctcgaagcaaatgaaagagaccaggcaagagctgctttgctgtcacaatctgtttcaaacaagccatctcaaactgcgggtacatcaaatgtcgaagaagactcaaacaaatgcacaacatcaaatagcgacagccaggtggaggatacatttgaactagatcattcaggagatgaactatttgcaaaattttatgctgcacttgatgaaatcaatttctttaagacatcacctgctggagctgaagatcctggtctactttcaaaagcaacacaatactttgatgatgcattactggcgatgcagaagttgggaaagaaaagggcaagcttagtagacattgcagagtcctttaaatcaagagggaatgaattcatgagatcaaaccaacaccttaaagcggtagagctgtacacctgtgccattgcattgaaccaacaaaatgccatttactattgcaacagggctgctgcatatacccttcttaatatgaacaacaaagctattgaggactgcctgaagtcaattgaaattgaccctcactacagcaaagcatatagccgactcggatctgcttattttgctatggggaattatcacgatgctctgtacaagggatacttgaaagccgccgagcttgatcccagtaatgaaaatgtcaggcagaatattgaggtcacaaaaaagaaactggctgaacaacgagtcccaccagaagagcagaacacacatgcaggccaagctcaaggaccacatccaatatttacaagtggtggtgttcctttcaatctgtttccaccaggtagttctccagttcaagaattcttcgctggctggtcgtccgatgttggtgcaccaccaccaggacattcgataagtataaatttgaatgatatttttggccaagcaaatgtcaatgctagcggtcaaggatcaagtcaaacagggaattcaaataaccatactccatctgcttctttctcaactggtgctgctgttcctcctccctttgccttctcgggctcaggaaatgaaggaacgcaggcacgccaagcttctaatggacttgaaggggaacatggtgaaccaggcatacacagggatgatgacgtccatataaatttggctggacccgagcaggctgcggaggctttgagagctgtgatgcagatgcttgggccacagatgggtcaacatgagggtgcacctagaggaccaggttaagcgtgggaggtaggaaaatgtgttacgtggcgtattgtggtctgcaggagtcttatacgggacattattttgtcttctccatcctgacgaagaatggagattctcgtgcgccttattattatagcagcttatctgtgtgctacaacaattccaccgtaatggttaccggcgttcaacttatctgccctgttcatattggcgtaggtgtgtcattagctgtgctggggcctgggtcttgttttgttgagacttgtctcgtaatggctgtcggtccatcatgtgatcttaaattaaagcctttttgcccccctcccctgcttttccgctgcttgtcggttcccagttgatacttggaaaatatttgcaaggttggtgaaaaaaaactgtcactggaatgaagttcatcatcgttattggctggctggcttgctggataaatcataaatgttggaattggtaaatcatatcctcttggactggagggaagttattattacgttactaagctgggtatatctaagatgtttggttcacatgtttataatgtgacgtttaaaatgcgatgggtaactgataacggtatatca

SEQ ID NO: 129491 - DNA, 768 bp, Zea mays
  unsure (1)..(768): unsure at all n locations
  Clone ID: MRT4577_4956C.1
tcctcccatcgcgcgtgcaacagaatggagccatgccgcttcctcgccggagaagtcgggctcccctcaactacttccgcacttcccctgcgtatcacccggtagccccagcgtcgtggataaaggccgtacgtcctgcgcccttctcctcctctcattcccagacctccaacccaccaccggcgctagcgagatccgctcgcctgggcgcaatagaatccacccgccggtcatctacacctcgccaccatctcgcccttcgtggattcgtgcggcgcgttgacggtacaccgtggcggcactgctcgggaacccgcgaccagcgcggcggaattgctcgccgtggctcatgtttcgtggcggagaggcgacatcacgtggaacgccgcccctgcgctgccatccttcgacgagcaagccactgtggaatctgaggttcagcaagtagagactgctgagcaggagctcgttgaagatagcaatgtagcatcaagtggctacggcagaggacgcggtcatcacggaggtgctcaggtcagctgggcgcgtgcttgaggggcctcccgagttggtgctgcagccgctctgctntgccattgagatcaaatcagagaaaggtgatctggatcctagtaggctacaactacagccaaaatcatgaaactgcttccctactggagttgtcttgtaccaactaaaaatagagaatcctatcaacccatatggcaaaggcanagaaagatgacagtggacattcatcctagattt

SEQ ID NO: 129492 - DNA, 845 bp, Zea mays
  unsure (1)..(845): unsure at all n locations
  Clone ID: MRT4577_49570C.1
gtaccctcgggccttccgggtcgagcggacatgttcaagggcagctgctcggcattgtcgccacgtcagcgctggagttgggcatcgacatcggcagcctggacgcggtcatcatgctcggctttccttactcaatctcgagtcttcgtcagcaagcaggacgagcaggtcgacgtcaaaaagactcgctctccgttctcatcggtgatccttggcccatggatcagcactacatgcactttcccgacgagatcttcctccaacccgacgccgcgctctcggtcgaccttggcaacgactttattctcgaatcgcacctccaatgtgccgccgaagagatgccgatcacgctcgaagacgacgagcaatacttcgggtctcacctctccacgctctgcaagacacgcctcgagaccgacggcacaggtttctactactgccgcgaagaactgcaaccgaaccccgcccacgacgttgccattcgaggcgcgcgccaggacagctactgctacatcgacgatacgccgcgtcgaccgggcggcgcccaggtgatggaagaggtcgaaattgaacgtgccatctttgaagccttcgagggggcggtgtttatgcatcagggactgtcgtatatatgtcgcgagatcaaccacgagacgcgcatcgcgaggatggtacaagcggacgtcaactaccacacccggcccagggatcataccaacacggatgctatgggagacgtaccgcattcgacggctgcgcgagtcgncctacttggcgtactacggcaaggttaccatcgcgtcgtacgtctggggatacttcaagggtcgatcgacgggcgaaca

SEQ ID NO: 129493 - DNA, 377 bp, Zea mays
  Clone ID: MRT4577_49571C.1
catttccctcagggtccctacctacccacaacatactaccactttaggctgtgaccagacgaccaccatgttgatcacacgcggcatctcactagtcaacttcacggtcgcctcgtcggctctggcattccaagtcttcgtcttatatccatggcacaataagctagacgatgaattcaaagctctgaagcaggagcatcttcgcgtcttgcaacagatcaatcagaaaaaggttgcttaaaatctatcgcgaacctctccaccgccctacgagatgactccaagggcatgtattgtgcctagccgatcttgagattatggcgacacctatgggaggcagacagaggatacatcaacgcatacatggagttagttca

SEQ ID NO: 129494 - DNA, 5091 bp, Zea mays
  Clone ID: MRT4577_49572C.1
atgtcgggagaacacgccaagaaggagatggagaccggcgaaaagcccactacaagccacgggagcacttcatcggaagagttccgcaccaagaggagggagaagaagaagagctcctccaacaaagggaaggagaagaaatcttcttctcaccacaaagagaagaaggaaaaatcttcttcccacaagccgcatcggagtggggacaagcaaaagaggatgaggaaagtggtctactacgagaccgacacttcatcaacatcgacctccggctccgatgcgccctccgtaacttctaaacgccaagagcgtaagaagtttagtaagatccccctacactaccctcgcatttctaaacatgcacctttactttccgtcccattaggcaaaccaccaacttttgatggtgaagattatgctaggtggagtgatttaatgcgatttcatctaacctcactccacaaaagtatatgggatgttgttgagtttggtgcacaggtaccgtctgtaggggataaagattatgatgaggatgaggtggcccaaatcgagcacttcaactctcaagcgacaacaatactcctcgcctctttaagtagagaggagtataacaaagttcaagggttgaagagcgccaaggaggtttgggatgtgctcaaaaccgcgcacgaaggagatgagctcaccaaaatcaccaagcgggaaacgatcgagggggagctcggtcggttccgacttcgcaaaggggaggagccacaacacatgtacaaccggctcaagactttggtgaaccaagtgcgcaacctcgggagcacgaaatgggacgaccacgaaatggttaaggttattctaagatctctcattttccttaaccccactcaagttcaattaattcgtggtaatcctagatatactaaaatgacccccgaggaagttatcgggaattttgtaagttttgagtgcatgatcgaaggctcgaggaagatcaacgagcttgatgatccatctacatccgaagctcaacccgtcgcattcaaggcgacggaggagaagaaggaggaggctacaccaagtcgacaaccaatagacgcctccaagctcgacaatgaggaaatggcgctcgtcatcaagagcttccgccaaatcctcaagcaaaggagagggaaagaccacaagtcccgctccaagaatgtttgctacaaatgtggtaagcccggtcattttattgctaaatgtcctatatctagtgacagtgaccgaggcgacaacaagaaggaaagaagaaaggagaagaagaggtactacaagaagaagggcggcgatgcccatgtttgtcgggagtgggactccgacgaaagctcaagcgactcctccgacgacgaggacgccgccaacatcgccgtcaccaagggactcctcttcccaaacgtcggccacaagtgtctcatggccaaggacggcaaaaagaaggttaaatctaaatcctccactaaatatgaatcctctagtgatgataatactaatgatgaggaagataacttgcgctctctttttgccaacctcaacatgcaacaaaaagaaaaacttaatgaattgattagtgccatccatgaaaaggatgatctcttggacacccaagaggacttcctaatcaaggaaaataaaaagcatgttaaggttaaaaatgcctatgctctagaaattgagaaatgccaaaaattatctagtgagctaagcacttgccatgaaacaatagacaaccttagaaatgaaaatgctaatttgttagctaaggttgattctcatgtttgcaatgtttcaattcccaaccctagagataataatgatgatttgcttgctaggattgaagaattgaacatttctcttgctagccttagaattgagaatgaaaaattgcttgctaaggctaaagattttgatgtttgcaatactaccatttctgaccttagaactaagaatgatatcttgcatgctaaggttgtagaattaaaatcttgcaaaccctctacatctaccattgagcacgtttccatttgtactagatgtagagatgttaacattgatgctatacatgatcacatggctttaattaaacaacaaaatgatcatatagctaaattagatgctaaaattgctgagcataacttagagaatgaaaaatttaaatttgctagaagtatgctctataatgggagacgccctggcatcaaggatggcattggcttccaaaggggagacaatgtcaaacttagtgcccctcctaaaagattgtctaattttgtaaagggcaaggctcccatgcctcaggataacgagggttacattttgtaccctgccagttatcctgagagcaaaattaggagaattcattctaggaagtctcactctggccctaaccatgcttttatgtataagggtgagacatctagctctaggcaaccaacccgtgctaagttacctagaaagaaaactcctaatgcatcaaatgatcatgacatttcatttaaaacttttgatgcatcttatgtattgactaacaaatccggcaaagtagttgccaaatatgttgggggcaagcacaaggggtcaaagacttgtgtttgggtacccaaagttcttgtgtctaatgccaaaggacccaaaaccatttgggtttatgcatccgggggctcaagttggatactcgacagtgggtgcacaaaccacatgacaggggagaaaaagatgttctcctcatatgagaaaaaccaagatccccaacgagctatcacattcggggatggaaatcaaggcttggtcaaaggtgtcactgtctttagaagaagtgatgattcaatagcatttaagggtgtgttagagggtcagctatacttagtagattttgatagagctgaactcgacacatgcttaattgctaagactaacatgggttggctctggcatcaccgattagcccatgttgggatgaagaatcttcacaagcttctaaagggagagcacattttaggactaaccaatgaaaaatctcaaacccaagaaaccttaaagggattcttgagacgggctcaaaatgagtttgacttaaggatcaagaaaataagaagcgacaacgggacggagttcaagaattctcaaattgaaggcttccttgaggaggagggcatcaagcatgagttctcttctccctacacgcctcaacaaaatggtgtagtggagaggaagaatcgaactctattggacatgggtagaaccatgcttgatgagtacaagacctcggatcggttttgggcggaggcggtcaacaccgcttgctacgccatcaaccggttgtatctacaccgaatcctcaagaagacatcatacgaactcctaaccagtaaaaagcccaatatttcatattttagagtctttggtagcaaatgctttattcttgttaaaagaggtagaaaatctaaatttgctcctaagactgtcgaaggctttttacttggctatgactcaaacacaagggcatatagggtctttaacaagtccactggactagttgaagtctcatgtgacgttgtgtttgatgaaactaacggctctcaagtagagcaagttgatcttgatgagataggtgatgaagaggctccgtgcatcgcgctaaggaacatgtccattggggatgtgggtcctaaggaatccgaagagcctccaaatgcacaagatcaaccatcctcctccatgcaagcatctccaccaactcaaaatgaggaagaggctcaagttgatgaagaagaagatcaatcaaatgagccacctcaagatgacggcatagatcaagggggagatgcaaatgatcaagacaaggaggatgaagagcaaagaccgccacacccaagagtccaccaagcaatccaacgagatcaccccgtcgacaccatcctcggcgatattcataagggggtaaccactagatctcgtgttgctcatttttgtgaacattactcttttgtttcctctattgagccacacagggtagaggaagcacttcaagattcggattgggtggtggcaatgcaagaggagctcaacaacttcactaggaatgaggtatggcatttagttccacgtcctaaccaaaatgttgtaggaaccaaatgggtcttccgcaacaagcaagatgagcatggtgtggtgacaaggaacaaagctcgacttgtggccaagggatactcccaagtcgaaggtttggatttcggtgaaacctatgcacccgtagctaggcttgagtcaattcgcatattattggcctatgctacttaccatggctttaagctttatcaaatggacgtgaaaagtgccttcctcaatggaccaatcaaggaagaggtctatgttgagcaacctcccggctttgaagacagtgagtaccctaaccatgtctataagctctctaaggcgctttatgggctcaagcaagccccaagagcatggtatgaatgccttagagatttccttattgctaatggcttcaaagtcggaaaggccgatcctacactctttactaaaactcttgaaaaggacttgtttgtatgccaaatttatgttgatgatattatatttgggtctactaacgagtctacatgtgaagagtttagtaggatcatgacacaaaagttcgagatgtctatgatgggggagttgaagtatttcttaggatttcaagtgaagcaactccaagaaggcaccttcattagccaaacgaagtacactcaagacattctaaacaagtttgggatgaaggatgccaagcccatcaaaacacccatgggaactaatgggcatctcgacctcgacacgggaggaacttcttttgttaaattgcacacattgctcttctatatacctttgatcatgtctctttcatatgctatgactaatgtgtttttcaagtctatttcaaaccaagtcataggtgtattgaaagggaattggagtcttcggcgaagacaaaggcttccactccgtaactcatccttcgccgacgctccaagtcactctccattcttgggggagaaagcatga

SEQ ID NO: 129495 - DNA, 1794 bp, Zea mays
  Clone ID: MRT4577_49573C.1
atggcgaggaccatgcttgatgagtataagactccagaccggttttgggctgaggtgattaacaccgcctgctactccatcaaccggctctaccttcaccgaatcctcaagaagacatcttatgaactcctcactgataaaaagccaaatgtttcatattttagagtctttggtagcaaatgttttattcttattaaaagaggtagaaaatctaaatttgctcctaaggttgtagaaggctttttacttggttatgattcaaacacaagggcatatagagtcttcaacaaatccactggattagttgaggtttcttgtgacattgtgtttgatgaaaataatggctcccaagtggagcaagttgatcttgatgaattagatgatgaagaggctccatgtgtcacgctaagaaacatgtccattggggatgtgtgtcctaaggaatccgaagagcccacacaagcacaagatcaaccgtcattttccatgcaagcatccccaccaacccaagatgaggatcaagctcaaaacaatgaagaagaagatcaagaatatgagccacctcaagaggacgacaatgatcaagggggagatgaagttgataaggacaaggaagatgatcaagaagtacaaggtcaaagaccgccacacccaagagtccaccaagcgattcaaagagatcaccccgtgaactcaatcctcggcgatattcataaggggagggtggaggatgcattaagagattcggattgggtgctggcaatgcaagaggagctcaacaacttcacgaggaatgaggtacgacacttagttccacgtcctaaccaaaatgttgtaggaaccaagtgggttttccgcaacaagcaagatgagcatggtgtggtgacaaggaacaaagcccgacttgttggcaagggatattcacaagtcgaaggtttgggtttcggtgaaacctatgcactcgtagataggcttgagtcaattcgtatattacttgcctatgctacttaccatggctttaagctatatcaaatggacgtgaagagttccttcctcaatggaccaatcaaggaagaggtctatgttgagcaacctcccagctttgaagataagtttagtaggatcatgattcaaaaattcgagatgtctatgatgggggagttgaagtattttctaggatttcaagtcaagcaactccaagaaggcaccttcatcaaccaaacaaagtatattcaagacatactcaacaagtttggaatgaaggatgctaagcccatcaagacacccatgggaactaatgggcatctcgacctcgacacgggaggatattcagataccgattgggaagggtgtaaaattgataggaagagcacatcagggacttgtcagtttctggggagatccctggtgtcttgggcttcaaagaaacaaacctcagtagctctttccaccgccgaagccgagtacattgccgcaggccattgctgtgcacaattactttggatgaggcaaaccctcagggactatggctacaaattgagcaaagtccctctcctatgtgacaatgagagtgcaatctgcatggcggataatcgcgttgaacacagacgcactaagtacatagacattcggtatcactttttgagggatcaccaacaaaagggggatatcgagatagcttatgttagcaccaaagaacaattagccgatatctttaccaaaccattagatgagaaaacctttaccaaacttaggaatgagctaaacattcttgattctcggaattttgattga

SEQ ID NO: 129496 - DNA, 4615 bp, Zea mays
  Clone ID: MRT4577_49574C.1
caaacaaaggagggggaaggattacaagtcccgctccaagaaggtttgctacaagtgtggtaagcccggtcattttattgctaaatgtcctatatccagtgacagtgaccgaggtgacgacaagaaggggagaagaaaggagaagaaaaggtactacaagaagaagggcggcgatgcccatgtttgtcgcgagtgggactccgacgagagctcaagcgactcctccgacgacgaggacgccgccaacatcgccgtcaccaagggactcctcttccccaacgtcggccacaagtgcctcatggcaaaggacggcaaaaagaaggttaaatctaaatcctccactaaatatgaatcctctagtgatgacaatgctagtgatgaggaagataatttgcgttccctttttgccaaccttaacatagctcaaaaagaaaaattaaatgaattggttagtgctattcatgaaaaggatgaccttttggattcccaagaggattatctaattaaagaaaacaagaaacatgttaaggttaaaaatgcttatgctctagaagtagaaaaatgtaacaaattatctagtgagctaagcatgtgccatgacactattgccaaccttagaaatgaaaatgctaaattaattgctaaggtagattctcatgtttgcattgatcctagaaatgataatgttgatttgcttgctaggattgatgagttaaatgtttccattgctagccttagaaatgagaatgagaaactaattgctaaggctaaggatattgatgtttgcaatgctactatttccgaccttagaactaaaaatgatatgttgcatgctaaggttgttgaactaaaatcttgcaaaccctctacatctaatgttgagcatatttccatttgtactagatgtagagatattaatgttgatgctatacatgatcacctagccttaattaaaaaacaaaatgatcacatagctcaactaaatgctaagattagagagcatgactcagaaaatgaaaaatttaaattggctagaagcatgctctataatgggagacgccctggcatcaaggatggcattggcttccaaaggagagacaatgtcaaacttaatgcccctccaaagaacttatctaactttgttaagggcaaggctcccatgcctcaggataacgagggttacattttgtaccctgccggctatcctgagagcaaaattagaaagattcattctaggaagtctcactctggccctaatcatgcttatatgtataaggatgagacatctagctctaggcaaccaacccatgccaagttgcctagaaagaaaatttctaatgcatcaaatgaacatagcatttcatttaagacttttgatgcttcttatgttttgactaacaaatccggcaaggtcgttgccaagtttgttgggggcaagcacaagggttccaagacttgtgtttgggtacccaaagttcttgtatctaatgccaaaggacccaaaacagtttgggtttatgcatccgggggctcaagttggatactcgacagcgggtgcacaaaccacatgacaggggagaaaaggatgttctcctcatatgagaaaaaccaagatccccaacgagctatcacattcggggatggaaatcaaggtgtcactgtctttagaagaagtgatgattcaatagcttttaagggagtgttagagggtcagctatacttggtagattttgatagagctgaactcgacacttgcttaattgctaagactaatatgggttggctctggcaccgccgactagcccatgttgggatgaagaatcttcataagcttctaaagggagagcacattttaggattaacaaatgttcattttgagaaagacaggatttgtagcgcatgccaagcagggaagcaagttggcactcatcatccacacaagaacataatgacgactgacaggccactggagctcctacacatggatctattcggcccgatcgcctacataagcatcggcgggagtaagtactgtctagttattgtggatgattactctcgcttcacttgggtattctttttacaggaaaaatctcaaacccaagagaccttaaaaggattcttgagacgggctcaaaatgagttcggcttgaggatcaagaagattagaagcgataacgggacggagttcaagaactctcaaattgaaggctttcttgaggaggagggcatcaagcatgagttctcttctccctacactccacaacaaaatggtgtagtggagaggaagaatcgaactctattggacatggcaagaaccatgcttgatgagtacaagacaccggaccggttttgggccgaagcggtcaacaccgcctgctacgccatcaaccggttatatctgcaccgaatcctcaagaagacatcatatgaactcctaaccggtaaaaagcccaacatttcatattttagagtttttggtagcaaatgcttcattcttattaaaagaggtagaaaatctaaatttgctcctaaaactgtagaaggctttttacttggttatgactcaaacacaagggcatatagggtctttaacaagtccactggactagttgaagtctcatgtgacgttgtgtttgatgaaactaacggctctcaagtagagcaagttgatcttgatgaagtaggtgaagaacaggctccatgcatagcgcttaggaacatgtccattggagatgtgtgtcctagggaatccgaggagcctccaaatgcacaagatcaaccatcatcctccatgcaagcatctccaccaactcaaaatgaggatgaggctcaagttgatgaagggcaaaatcaagaagatgagccacctcaagataatggcaatgatcaagggggagatgcaaatgatcaagaaaaggaggatgaggaagaaccaagaccgccacacccaagagtccaccaagcaatccaacgagatcaccccgtcgacaccatcctcggcgacattcataagggggtaactactcgatctcgggttgctcatttttgtgaacattactcttttgtttcctctattgagccacacagggtagaggaagctctccaagattcggattgggtggtggcgatgcaagagcagctcaacaatttcacgaggaatgaggtctggcatttagttccacgtcctaaccaaaatgttgtaggaaccaaatgggtcttccgcaacaagcaagatgagcatggtgtggtgacaaggaacaaagctcgactcgtagccaaagggtattcacaagtcgaaggtttggatttcggtgaaacctatgcacccgtagctaggcttgagtcaattcgcatattattggcctatgctacttaccatggctttaagctctatcaaatggacgtgaaaagtgccttcctcaatggaccgatcaaggaagaggtctatgttgagcaacctcccggctttgaagacagtgagtatcctaatcatgtctataggctctctaaggcgctttatgggctcaagcaagccccaagagcatggtatgaatgccttagagatttccttattgctaatggcttcaaagtcggcaaggccgatcctacactctttactaaaactcttgaaaatgacttgtttgtatgccaaatttatgttgatgatattatatttggatctactaacgagactacatgtgaagagtttagtaggatcatgacacagaaattcgagatgtcgatgatgggggagttgaagtattttctaggattccaagtcaagcaactccaagagggcaccttcattagccaaacgaagtacactcaagacattcttgctaagtttgggatgaaggatgccaaacccatcaagacacccatgggaactaatgggcatctcgacctcgacacgggaggtaagtccgtggatcaaaaggtataccggtcgatgattggttcattgctttatttatgtgcatctcgaccggacattatgctttccgtttgcatgtgtgcaagattccaatccgaccctaaggaatcccaccttacggccgtaaaacgaatcttgagatatttggcttatactcctaagtttgggctttggtaccctcggggatccacttttgatttgattggttattcggatgccgattgggcggggtgtaagatcaataggaagagcacatcggggacttgccagttcttgggaagatccttggtgtcatgggcttcaaagaagcaaaattcggtcgctctttccaccgccgaagccgagtacattgccgcaggacattgttgcgcgcaattgctttggatgaggcaaaccctgcgggactacggttacaaattaaccaaagtccctttgctatgtgataatgaaagtgcaattaaaatggccgacaatcccgtcgagcatagccgcactaagcacatagccattcggtatcattttcttagggatcaccaacaaaagggggatatcgagatttcttacattaacactaaagatcaattagccgatatctttaccaagccacttgatgaacaatcttttaccagacttaggcatgagctcaatattcttgattctagaaatttcttttgctaa

SEQ ID NO: 129497 - DNA, 523 bp, Zea mays
  Clone ID: MRT4577_49575C.1
tgagcggaacgagtataaacccatcaactttgagcggaggacaagcggcaacctgtagcagatatgtgatgcagggtcgatgccagaatggtgctctggcaagggcggcgcgaagcgtcaccaggaaggtgctgcgcgacacctccaggggatcaccaagtcgaccatgcggaggctggcgaacaggggcgtcgtgaagcacatcttctggctgatctacgaggagacccacggtgtgctcaagatctttctagagaatgtcatgcgcgacactgtgacctacacagagcacgcccgtcatacaaccctcaccgctaatggacgtaagtgttcgccctgccacgcgagggacgtactctatatggcttgcgcggctatgactaggccgtgtgttacattgcctgaaacacgtgtctgccatctgcgttactaaattcggcctgcctccctgtgataggattgtagcatatggggcacctgggtgctttgtctttctgccatcgagcctgtttgggtctgtaag

SEQ ID NO: 129498 - DNA, 2492 bp, Zea mays
  Clone ID: MRT4577_49576C.1
atggcgctcatcatcaaaagtttctgccaaatcctcaagcaaaggagggggaaggactacaagccccgctccaagaaagtttgctacaagtgtgataagcctggtcattttattgctaaatgtccattatcaagtgatagtgacaagggcgacgacaagaggaaaaaaagaaggataagaagaggtactacaagaagaagggcggcgatgcccatgtttgtcgggagtgggactccgatgagagctccaccgactcctcctccgacgaggacaccacaaacatcatcgtcaaccaaaggtctcctcttccccaacgtcggccacaagtgcctcatggcaaaggacgacaaaaagaaggtaaaatctagagcctccactaaatatgcaacatctagtgatgaggaaaactctagtgatgatgaagataatttgcttgctctttttgccaacctaaacatgcaacaaaaagaaaaattaaatgaattgataggtgctattcatgagaagtatgaactcttggataaccaagaggacttccttattaaggaaaataagaagcatgttaaggttaaaaacgcttatgctcaggaagtagagaggtgtgaaaaattgactagtgagctaagcacttgccatgatattatctcaaaccttagaaatgaaaatgcaaaattaattgctaaggttgagaagttagatgtttgtgatgattcaattgttagtcttagaaatgataatgctagtttgattactaagattgacaagtttaatgcatcactctctagccttaaaattgagaataaaaaattaattgctaaggctaaagatttaaatgtttgcaatgtttctatttccaatcttaagaatgaaaatgctatttcacatgctaagattgatgaattaaatgcttgcaaaccctctacatctactgttagtcacgtctctatttgcactagatgtagagatgttaatgttgatgctatccatgataacattgctatgattaaacaacaaaatgatcatatagaaaaattagatgctaaaattgccgagcatgacatggaaaatgaaaattttaaatttgctcgtagtatgctttatagtgggagatgccctggcattggcttccaacagggaggcaatgtcaagctcaatgcccctaaaagattgtctaattttgttaagggcaaggctcccatgcctcaggataacgagggctatatattatatcctgctggttatcctgaggataagattaagagaattcatgctaagaagactcattctgtttctcaccatgcttttatttataagaatgaggcttctagctctaggcattctacccatgttaaaatgcctaaaatgaaatctcctattgcatcaaatgatcataacatttcatttaagacttttgatgcttcatatgttttaactaacaaatcaggcaaagtagttgccaaatatgttggggccaaacacaagggctcaaagacttgtgtttgggtacccaaggtttatgcatccgggggctcaagttggatcattgatagcgggtgcacaaaccacatgactggggagaaaaggatgttctcctcctatgagaaaaaccatgatccccaaagagctatcacattcggggatggaaatcaaggtttggtcaaaggacttggtaaaattgctatatcgcctggccattcgatttccaatgtttttcttgtagattctttagactataacttgctttcagtttctcaattatgtaaaatgggctacaattgtctttttacgaatatagatgttactgtctttagaagaagtgatgattcagtagcatttaagggagtgttagagggtcagctatacttagttgattttaatagagctgaactcgacacttgcttaattgctaagactaacatgggttggctctggcatcgccgactagcccacgttgggatgaagaattttcataagcttctaaagggagaacacattttgggactaacaaatgttcattttgagaaagacaggatttgtagcgcatgtcaagcagggaagcaagttgatgttcatcatccacacaagaacatcatgacgactgacagaccgcttgagctactccacatggacctattcggcccgatagcttacataagcatcgacgggagtaagtactatctagttattgtggatgattattctcgcttcacttgggtgttctttttgcaggataaatctcaaacccaagagaccttaaagggattcttaagatgggctcaaaatgagttcgggttaaggataaaaaagattagaagcgacaatgggacggagttcaagaactcacaaatagaaggcttccttgaggatgagggcataaaacatgagttctcttctccctacacaccacaacaaaatggtgtagtagagaggaagaatagaactctacttgacatgacgaggaccaagcttgatgagtacaagacttcggaacg

SEQ ID NO: 129499 - DNA, 675 bp, Zea mays
  Clone ID: MRT4577_49577C.1
tttttttttttttttttttttttttttttttttttttcccaaaattgtagacaacatcgatctttcctgcaatttctgaatttcacaaacatttctccaaatgaagtaaactgatgggcgcacacgtaccagtgtggtacgtgcatgggacgacgagctgggctgcatgcttgttttgctatttttgaaattaactaaaagccgcatgcatgaatcctcaagtgcgtgtttatatgcacgcacaaatctacggcatactatactactagtggttgataaacaactcatgaagcgcacgcatcagcgtcggcggcgtcggcgacgacggcgcccacgccgactccgtagacggccgcgagtgccctgagaagatccaccctagcccgcagccccacgatgtagtcggccgtgcggacaagcagggcccccgcgggcgcctcctccccgccgggcacgagacggcgcagctcccgcacctttcggcgcagcgcagcaccggccgcgcgcgacgacgggcgcctccagccgctggcgctcccgcggggcctccgcctctcctccatggcgctcacgaacgaagaggcagccgcaccagctagcctgctagctagcgagctgttcctacgtggcgggcgaggagagggcgagtcccggccggtgggaataaataggccg

SEQ ID NO: 129500 - DNA, 2232 bp, Zea mays
  Clone ID: MRT4577_49578C.1
atgtcgggagatcacgccaagaaggagatggagaccggcgaaaagcccactacaagctacgggagcacttcatcggaagagtcccgcaccaaaaggagggagaagaagaagagctcctccaacaaagggaaggagaagaaatcttcttctcaccacaaagagaagaaggaaaaatcttcttcccacaagccgcatcggaaaggcgacaagcacaagaggatgaggaaggtggtctactacgagaccgacacttcatcaacatcgacctccgactccgatgcgccctccgtcacttctaagcgccaagagcgcaagaagtatagtaagatccctctacgctaccctcgcatttccaaacatacacctttactttccgtcccactaggcaaaccaccaacttttgatggtgaagattacgctaggtggagcgatttaatgcgatttcatctaatctcgctccacaaaagcatatgggatgttgttgagtttggtgcgcaggtaccatccgtaggggatgaaaactatgatgaggatgaggtggcccaaatcgagcacttcaactctcaagccacaaccatactccttgcctctctaagcaaggaagaatacaacaaagtgcaagggttgaaaaatgcaaaggagatttgggatgtgctcaaaactgcgcacgagggagatgagctcaccaagatcaccaagcgggaaacgatcgagggggagctcggtcggttccggcttcaaaaaggggaggagccacaacacatgtacaaccggctcaaaactttggtgaaccaagtgcgcaacctcgggagcaagaagtgggatgaccacaaagtggtaaatgttattttaagatctctcatttttcttaatcccactcaagttcaattgattcgtggtaatcctagatatactaaaatgacccccgaggaagttatcgggcattttgtaagttttgagtgcatgatagaaggctcgaggaaaatcaacgagcttggcgacccatctgaagcccaacccgttgcattcaaggcaacggaggagaagaaggaggagtctacaccaagtagacaaccaatagacgcctccaagctcgacaatgaggaaatggcgctcgtcatcaagagcttccgccaaatcctcaagcaaaggagggggaaggactacaagtcccgctccaagaaggtttgctacaagtgtggtaagcccggtcattttattgctaaatgtcctatatctagtgacagtgaccgaggcgacgacaagaaggggagaagaaaggagaagaaaaggtactacaagaagaagggcggcgatgcccatgtttgtcgggaatgggattccgatgaaagctcaagcgactcctccgacgacgaggacgccgccaacatcgccgtcaccaagggactcctcttccccaacgtcggccacaagtgcctcatggcaaaggacggcaaaaagaagaaggttaaatccaactcctccactaaatatgaatcttctagtgatgataatgctagtgatgaggaggataatttgcgttccctttttgccaaccttaacatagctcaaaaagaaaagttaaatgaattagttagtgctattcatgaaaaggatgaccttttggactcccaagaggattgtctaattaaagaaaacaagaaacatgttaaggttaaaaaggcttatgctctagaagtagaaaaatgtgaaaaattgtctagtgagctaagcacttgccgtgagatgattaacaaccttagaaatgaaaatgctattttaaatgctaaggttgattcacatgtttgtaatgtttcaattcccaatcttagagatgataacattgacttgcttgctaagattgatgaattgaatgcatcccttgctagccttagattagagaatgaaaatttaattgctaaggctaaagattttaatgtttgcaatgctactatttccgaccttagaactaagaatgaaatgctgcatgctaaggttgtagaacttaaatcttgcaaaccctctacatctaatcttgagcatatttctatttgcactagatgtagagatattgatgttgatgctatccatgatcacttagccttaattaaaaaacaaaatgatcacatagcacaacttaatgctaagattagtgagcatgacttagtaaatgaaaaatttaaatttgctagaagtgaaagggaattaggcttacacctggttcctaaataa

SEQ ID NO: 129501 - DNA, 3291 bp, Zea mays
  Clone ID: MRT4577_49579C.1
atgtcgggagctcatgccaagaaggagatggtgaccggcgagaagcccgccacaagccacagaaaagctccatcgagagagtccggcaacaaaagggaggaatcacctccccgcgtcaagtcacaccggagtggcgacaagaagaagaaaatgaagaaggtggtctactacgagaccgactctttgtcgccttccacctccggctccgacgcgccgtccgtcacttctaagcgccatgagcgcaagaagtttagtaagatccccttacgctatcctcgcatttctaaacgcacttatttactttccgtcttactaggcaaaccaccggtttttaacggtgaaaattattgtatgtggagtgaaaaaatgaggcaccatctaacctcactccacgctagcatttgggacattgttgaatttgcagcgcaggaaccatccgtgggggatgaaggctatgactcggacgaggtagcccaaatccggcacttcaactcccaagccactactatactcctcgcctctctaagtcgagaggagtataataaggtgcaagggttgaagagtgccaaagaaatttgggacatactcaagaccgcgcacgaaggagatgaggtgaccaagatcaccaagcgggaaacgatcgaagaggagctcggtcaattcatgcttcaccaaggggaggagccacaagccatgtacaaccggctcaagaccttggtgaaccaagtgcgcaacctcaggagcaccaaatgggatgaccatgaaatggtcaaggttattcttagatcactcgtttttcttaaccctactcaagttcaattaattcgtggtgatcctagatataaactaatgtctcccgaggaagtgataggaaagtttgtgcaacctgtcgccctcaaagtgatggaggagaagaaggaagagtctacatcaagtaggctccccatcgacgcctccaagctcgacaatgaggagatggctttaatcatcaaaatctttcgccaaatcctcaatcaaaggagggggaaggattacaagccccgctccaaaaaagtttgctacaagtgtggtaagcccggtcactttatagcaaaatgtcctatttctagtgacagtgacaggggcaccaacaagaagggaagaaggaaggagaagaagaagtattacaaaaagaagggtggcgatgcccatgtttgtcgggaatgggactccgacgagggctccaccgactcctcctccgacgaggacgccgccaacatcaccgtcaataaaggccttctcttccccaacgtcggccacaagtgcctcatggcaaaggacggcaaaaagaaggtttatgcatccgggggctcaagttggatcattgatagcgggtgcacaaaccacatgacaggggagaagaagatgttctcctcctatgagaaaaaccatgatccccaaagagctatcacattcgtggatgaaaaatcacaaacccaagagacattgaagggattcttaagacgggctcaaaatgagttcggattgaggatcaaaaagattagaagcgacaacgggacggagttcaagaactcacaaatagaaggcttccttgagaatgagggcatcaagcatgagttctcttctcactacacaccacaacaaaatggtgtagtggagaggaagaatagaactctacttgacatggcgagaaccatgcttgatgagtacaagacttcgaaccggttttgggcggaagcagccaacaccgcctgctacgccatcaaccgtctctaccttcaccgaatcctcaagaagacatcgtatgaactcctcaccggtaaaaagcccaatgtttcatattttagagtctttggtagcaaatgctttattcttgtcaaaagaggtagaaaatctaaatttgctcctaaggctgtagaaggctttttacttgattatgattcaaacacaagggcatatagagtctttaacaagtccactagactagttgaagtttcttgtgacaatgtgtttgatgagactaacggctctcaagtagagcaagttgatcttgatgagctagatgatgaagaggctccgtgcgtcgcactaaggaacatgtccattggggatgtgtgtcctaaggaatccgaagatcctccacatgcacaagatcaaccatcatcttcaaatcaagcatctccaccaacccaagatgaggatcaagctcaagatgatgaaaataaagatcaagaagagtcacctctagaggaggacaatgatcaagggcgagatgccaatgatcaagacaaggaagatgatgagggtccaagaccgccacacccaagagtccaccaagcgatacaacgagatcaccccgtgaactccatcctcggcgatattcataagggggtaaccactcgatctcgtgtcgctcatttttgtgaacattactcctttgtgtcttctattgagccatacagggtggaagacgcattaagggattcagattgggtgttggcgatgcaagtggaactcaacaacttcacgaggaatgaggtatggcatttagttccacgtcctaatcaaaatgttctaggaaccaagtgggtcttccgcaacaagcaagatgagcatggtgtggtgacaaggaacaaagcccgacttgtggctaagggatattcacaagtcgaaggtttggatttcggtgaaacctatgcacccgtagttaggcttgagtcaattcgtatattacatgcctatgctacttaccatggctttaagctttaccaaatggacatgaaaagtgccttcctcaatggaccaatcaaggaagaggtctatgttgagcaacctcccagctttgaagacaagtttagtaggattatggttcaaaaattcgagatgtctatgatgggggagttgaagtatttcttaggatttcaagtcaagcaactccaagagggcaccttcatcagtcaaacgaagtacattcaagacatactcaccaagtttgggatgaaggatgccaagcctatcaagacacccatgggaactaatgggcatctcgacctcgacacgggaggtaaatccgtagatcaaaaggtataccggtcgatgataggatctttactctatttatgtgcatctcgaccggatattatgctttctgtatgcatgtgtgcaagattccaagtcgatcctaaggaagttcaccttagggccatgaaacgaatcttgagatatttagttcatactcctaagtttggcctttggtaccccaagggatccacttttgatttaataggatag

SEQ ID NO: 129502 - DNA, 722 bp, Zea mays
  unsure (1)..(722): unsure at all n locations
  Clone ID: MRT4577_4957C.1
cgacaccgcaacacctgcgctccggcctgctctgtctttcaaacagcttcgtgtgttgctggcttgttgccgcagttccagcgccagctcggcactgaagaatctggtgaccggccgggatcgagagccaagctcgagcaggaacggagagcgcgcggatatatatagctagaatgatgatgatgatggacaggcagctcgtcaggcaatgcgacatggaggtcatgaggatggccatgctcaagcacgaagagaccttccggcagcaggtccacgagctgcaccgcctgtaccgcatacagagggagctgatgagcgacctaataacgacccgatacgacgacgagccgctgctgctgacgaccgccggccggcgcagcaagcagccgcgccgggcgctggacctgcagctcccagccgacgagtacatcgtcagcgccgacgaggagtcggacgccgccggcgcggagctggagctgacgctggccgtcggcgggcgctgcgcagacggcgccggccggcgcaagagcaacaggcgccggaggcaattagcagagcggcagcagcgcgacaacaacgccgccgccggcggcggctcctcgccgttcgggtccgactgctccggcgcgagcgccctgtcgttcgccgccgncttcgtcggncgagtactactccgacnacgggnnccgcgcggcggcggcgtgccaaaggccgntgcgttc

SEQ ID NO: 129503 - DNA, 306 bp, Zea mays
  Clone ID: MRT4577_49580C.1
ggtggcgtatcatgggtctgggattcacagtcatacaatatggttctctgcgagtgcacaggttacattgagctcaaactggataggctgtctaggaccacatgcagggggccactggatgaatgatgcacagctgtgaggagctactaagacgcaacggtagtagacaagccagtagcacagaatatagttatggcacagtagccagggacagtatcttatgtctgactgaatcatcttaaattcaactctgcccctgtccctttcctgcaggctgaaaagaccaatcttggccatcagaagtct

SEQ ID NO: 129504 - DNA, 243 bp, Zea mays
  Clone ID: MRT4577_49581C.1
aaggatatagcaacaatggtttatgactagccatgtctgtaaggatggctgacgcttagaatccatgagcgattgttgtcactagctgcgacgtgactatatatctcatgtgggcgatcagccctccaaaccatggcaagaacatggccggctgtctaaaggactccaggcgaactggcgcctacagacgagaatgctgctgctgccatcgtgaacactaaacgcaaatatacaggtcgtgga

SEQ ID NO: 129505 - DNA, 4869 bp, Zea mays
  Clone ID: MRT4577_49582C.1
atgtcgggagaacacgccaagaaggagatggagaccggcgacaagcccgctacaagccacgggaaggcttcatcggaagagtcccgcaacaaaaagaaagggaaggagaagaaagcctcctcccacaagtcgcatcggagtggcgataagaaaaagaaaatgaggaaggtggtctactacgagaccgatacttcatcaccttccacctccggctccgacgcgccctccataacttctaagcgtcatgagcgcaagaagtttagtaagattcccttacactatcctcgcacctctagacatactccattactttccgttccattaggcaaaccaccaacctttgacggtgaagattatgctagatggagtgatttaatgaaatttcatctaacctcactccacaaaagtatatggaatgttgttgagtttggagcacaggtaccatccgtaggggatgaggattatgatgaggacgaggtggcccaaatcgagcacttcaactcccaagccacaaccatactcatcgcctctctaagtagggaggagtacaacaaggtgcaaggattaaagagcgccaaggaagtttgggacgtgctcaagaccgcgcacgagggtgatgaactcaccaaaatcaccaagcgggaaatgatcgagggggagctctgtcgcttccatctacgccaaggggaggagccacaagacatgtacaaccggctcaaaaccttggtaaatcaagtgcgcaacctcgggagcaagaaatgggatgaccacgaggtggttaaggttattcttagatcactcattttccttaaccctactcaagttcaattaattcgtggcaaccctagatacacactaatgactcccgaggaagtaatcgggaattttgtgagctttgagtttatgatcaaaggctcaaggaagatcaacgaacttgacggcccctccacgtccaaagcacaaccggtcgcatttaaggcgacggaggagaagaaggaggagtctacaccgagtagaacacccatcgacgcctccaagctcgacaacgaggaaatggcgcttgtcatcaaaagctttcgccaaatcctcaagcaaaggagggggaaagactacaagccccgctccaagaaggtttgctacaagtgtggtaagcccagtcactttatagcaaaatgtcctatttctagtgacagtgacaggggcgacgacaagaaggggagaagaaaggagaagaagtggtactacaagaagaagggcggcgatgcccatgtttgtcgcgagtgggactccgacgaaagctctagcgactcctccgacgatgaggatgccgccaacatcgccgtcaccaaggggcttctcttccccaacgtcggccacaagtgcctcatggcaaaggacgacaaaaagaagaaggttaaatctaaatcctccactagatatgagtcttctagcgatgataatgctagtgacgaggaagataatttacgtactctttttgccaacttaaacatgcaacaaaaagagaaattaaatgaattgattagtgctatccatgagaaggatgatctcttggactcccaagaggacttccttataaaagaaaacaagaagcatgttaaagtaaaaaattcttatgctctagaagttgaaaagtgcgaaaaattatctagtgagctaagcacttgccatgagactatagacaaccttagaaatgagaatgctaatttgttagctaaggttgattctattgcttgtaatgtttcaattcccaatcttagaaatgataatgatgatttacttgctaagattgaagaattaaacatgtctcttgctagccttaggattgaaaatgaaaaattgcatgctaaggttgtagaattaaaatcttgcaaaccctctacatctatcgttgagcacacttctatttgtactagatgtagagatgttgatgttaatgctattcatgatcacatggctttaattaaacaacaaaatgatcgtatagcaaaattagatgctaaaattgccgagcatgaacatgaaaatgaaaaatttaaatttgctcgtagtatgatttatagtgggagacgccctggcattaaggatggcattggcttccaaaaggggaacaatgtcaaacttaatgcccctcctaagaaattgtctaattttgttaagggcaaggctcccatgcctcaagataacgagggttacattttgtaccctgccggttatcctgagagcaaaattaggagaattcattctaggaagtctcactctggccctaaccatgcttttatgtataagggtgagacatctagttctaagcaaccaacccgtgctaagttgcctaagaagaaaactcctaatgcatcaaatgatcatgacatttcatttaaaacctttgatgcatcatatgttttaactaacaaatccggcaaggtttatgcatccgggggctcaagttggataatcgacagcgggtgcacaaaccacatgacgggggagaagaagatgttctcctcctacgagaaaaaccaagatccccaacgagctatcacattcggggatggaaaccaaggtgtcactgtctttagaagaagtgatgattcaatagcatttaaaggagtgttagagggtcagctatacttggtagattttgatagagctgaactcgacacttgcttaattgctaagactaacatgggttggctctggcaccgccgactagcccatgttgggatgaagaatcttcataagcttctaaagggagagcacattttaggattaacaaatgttcattttgagaaagacaggatttgtagcgcatgccaagcagggaagcaagttggtgcccatcatccacataagaacatcatgacgactgacaggccactggagctcctacacatggatctattcggcccgattgcttacataagcatcggcgggaagaccttaaagggattcttgagacaggctcaaaatgagttcggcttgaggatcaaaaagattagaagcgacaatgggacggagttcaagaactctcaaattgaaggcttccttgaggaggagggcatcaagcatgagttctcttctccctacacgccacaacaaaatggtgtagtggagaggaagaatagaactctattggacatggcaagaaccatgcttgatgagtacaagacatcggatcggttttgggccgaggcggtcaacaccgcctgctacgccatcaaccagttatatctacaccgaatcctcaagaagacatcatacgaactcctaaccggtaaaaagcccaatatttcatattttagagtctttggtagcaaatgctttatacttgttaaaagaggtagaaaatctaaatttgctcctaagactgtagaaggctttttactaggatatgattcaaacacaagggcatatagagtctttaacaagtcctccagacaagttgaagtttcttgtgacgttgtgtttgatgagactaacggctctcaagtagagcaagttgatcttgatgagataggtgatgaagaggctccgtgcatcgcgctaaggaacatgtccattggggatgatgaagctcaagttgatgaagtacaagatcaagcaaatgagccacctcaagatgacgacaatgatcaagggggagatgcacatgatcaagacaaggaggatgaagaaccaaggcctccacacccaagagtccaccaagcaatccaacgagatcaccctgtcgacaccatccttggcgacattcataagggggtaaccactagatctcgtgttgcacatttttgtgagcactactcttttgtttcctctattgagccacacagggtggaggaagcactacaagattcgaattgggtggtggcgatgcaagaggagctcaacaacttcactaggaatgaggtatggcatttagttccacgtcctaaccaaaatgttgtaggaaccaaatgggtgttccgcaacaagcaagatgagcatggtgtggtgataaggaacaaagcccgacttgtggccaagggatattcgcaagtcgaaggtttggatttcggtgaaacctatgcacccgtagctaggcttgagtcaattcgtatattattggcctatgctacttaccatggcttcaagctttaccaaatggacgtgaagagtgctttcctcaatggacctatcaaggaagaggtctatattgagcaacctcccggctttgaagatagtgagtaccctaatcatgtctataaactctctaaggccctttatgggctcaagcaagctccaagagcatggtatgaatgccttagagatttccttatcactaatggattcaaagtcggaaaagtcgatcctacactcttcactaaaactcttgaaaatgacttgtttgtatgccaaatttatgttgatgatattatatttgggtgtactaacgagtctacatgtgaagaatttagtaggatcatgacacaaaagttcgagatgtcaatgatgggggagttgaagtacttcttaggatttcaagtgaagcaactccaagagggcaccttcctaagccaaacgaagtatactcaagatatactaagcaagtttgggatgaaggatgccaaacctatcaagacacccatgggaaccaatgggcatctcgacctcgacgaaggaggtaaattcgtcgatcaaaaggtataccggtcgatgataggttctttgctctatttatgtgcatctcgactggatattatgctttccgtatgcatgtgtgcaagattccaagctgaccctaaggaagctcaccttacggccgtaaaacgaatcttgagatttttagtttatactcctaagtttgggctttag

SEQ ID NO: 129506 - DNA, 537 bp, Zea mays
  Clone ID: MRT4577_49583C.1
gaacataaaatattagtcaatattatcatttaagtaataaaaacatatttaagccgactacaaatgataacatcacctaatattttgcaagactaatcagactatcatacatccttgcacatggggattggaaattttctactatttcaattcaacatcaacaatggccttcaggcaaaaatttctacaattaagattgatccgtaaactttgtttccgatgcctaatttaatcttaaattcaatcatttttgtgatgacttgaccacaaagagttagcaacactaaacccgtgatgtgcctctcatgtccctccagccaaaatacttgcaggaatcctgaactaagcctttagaactataatcatggatctactatgggaaatattgctgcaatgcttaggagtcactattgtacatttgaagccatgattgtgtttgctgaatgtaccatttgatgatgcctatgccaagccactactacacaatctaacaataaaacataactctcttcacattttctttcaaggctggcaatg

SEQ ID NO: 129507 - DNA, 144 bp, Zea mays
  Clone ID: MRT4577_49584C.1
gggactgccaggaggtacattggcatcgtgaagcaggcaggcctggaaaggatgatgcctggtgcctacagcacaggctacgggggctacgaggagtacagtggcctcagtgatggctacggcttcaccaccgacctgttcggg

SEQ ID NO: 129508 - DNA, 1029 bp, Zea mays
  Clone ID: MRT4577_49585C.1
atggagaccggcgacaagcccactacaagccacgggagcacttcatcggaagagtcccgcaccaagaggaaggagaagaagaagagctcctccaacaaagggaaggagaagaaatcttcttctcaccacaaagagaagaaggaaaaatcttcttcccacaagccgcatcggagtggggacaagcacaagagaatgaggaaagtggtctactacgagaccgacacttcatcaacatcgacctccggctccgatgcgccctccgtaacttctaaacgccaagagcgggatgaggattatgatacggacgaagtggcccaaatcgagcacttcaactcccaagccacaaccatactcctcgcctctttaagcaaggaggaatacaacaaagtgcaagggttgaagaatgcaaaggagatttgggaccttctcaagaccgcgcacgagggtgatgaactcaccaagatcaccaagcgggaaacgatcgagggggagctcggtcgcttccgtcttcgccaaggggaggagccacaagatatgtacaaccggctcaaaaccttggtgaaccaagagcgcaacctcgggagcaaaaagtgggacgaccatgaggtggttaaggttattctaagagctctcatttttcttaaccccactcaagttcaattaattcgtggtaatcctagatacccactaatgacccccgaggaagttatcgagaattttgtgagctttgaatgtatgattaaaggatcaaagaagatcaacgagcttgacgaaccctccacgtccgaggcgcaaccagtggccttcaaggcgacggaggaaaagaaggaggagtctacaccaagtagacaaccaattgacgcctccaagctcgacaatgaggagatggctttaatcatcaaaagctttcgccaaatcctcaagcaacggagggggaaggactacaaaccccgctccaagaaagtgtgttacaaatgtggtaagcccggtcatttcattgcaaaatgtcctatatctagtgacagttga

SEQ ID NO: 129509 - DNA, 613 bp, Zea mays
  Clone ID: MRT4577_49586C.1
cccaagtgatccacttttgatttaattggatattcagatgctgattgggcagggtgtaagattgatagaaagagcaccatcagggacttgccagttcttgggagaacctctggtgtcttgggcttctaagaaacaaaattttatagctctttctaccaccgaagctgagtatattgccgcaggccattgttgcgtgcaattactttggatgaggcaaacccttagggactatggttacaaattaaccaatgttcctctcctatgtgataatgagagtgcaatccgcatggcggataatcccgttgagcacagccgcactaagcacatagcagttcggtatcactttttgagggatcaccaacaacggggggatattgagattgcatatgttagcaccaaagaacaatcagtcgatatctttaccaaaccattagatgagaaaacttttaccaaacttaggcatgagctaaacattcttgattctaggaattttgattgatttcttgcacacatagctcattatatacctttgatcatctctctttcatatactatgactaatgtggttttcaagtatcatttcatgctaagtcatagattggaagggaaaaga

SEQ ID NO: 129510 - DNA, 4848 bp, Zea mays
  Clone ID: MRT4577_49587C.1
atgtcgggagatcacgccaagaaggagatggagaccgacgaaaagcccactacaagcaacgggagcacttcatcggaagagtcccgcaccaaaaggagggagaagaagaagagctcctccaacaaagagaaggagaagaaatcttcttctcaccacaaagagaagaaggaaaaatcttcttcccacaagccgcatcggagtggggacaagcaaaagaggatgaggaaagtggtctactacgagaccgacacttcatcaacatcgacctccggctccgatgcgccctccgtaacttctaaacgccaagagcgtaagaagtttagtaagatccccctacactaccctcgcatttctaaacatgcacctttactttccgtcccattaggcaaaccaccaacttttgatggtgaagattatgctaggtggagtgatttaatgcgatttcatctatcctcactccacaaaagtatatgggatgttgttgagtttggtgcacaggtaccgtcggtaggggataaggactatgatgaggatgaggtagcccaaatcgagcacttcaactctcaagcgacaacgatactcctcgcctctttaagtagagaggagtataacaaagtgcaagggttgaagagcgccaaggaggtttgggatgtgctcaaaaccgcgcacgagggagatgagctcaccaagatcaccaagcgggaaacgatcgagggggagctcggtcggttccggcttcgcaaaggggaagagccacaacacatgtacaaccggctcaagaccttggtgaaccaagtgcgcaacctcgggagcataaagtgggacgaccacgaggtggttaaggttattttaagatcacttattttccttaaccctactcaagttcaattaattcgtggctcaaggaagatcaacgagcttgatgatcccaccacatccaaagctcaacccgtcgcattcaaggcgacggaggaaaagaaggaggagtctacaccaagtcgacaaccaatagacgcctccaagctcgacaatgaggaaatggcgctcgtcatcaagagcttccgccaaatcctcaaacaaaggagggggaaagactacaagtcccgctccaagaaggtttgctacaagtgtggtaagcccggtcattttattgctaaatgtcctatatctagtgacagtgaccgaggcgacgacaagaaggggagaagaaaggagaagaagagatactacaagaagaagggcggcgatgcccatgtttgtcgggagtgggattccgacgaaagctcaagcgactcctccgacgacgaggacgccgccaacatcgccgtcaccaaaggacttctcttccccaacgtcggccacaagtgcctcatggcaaaggacggcaaaaggaaaaaggttaaatctaactcctccactaaatatgaatcttctagtgatgataatgctagtgatgaggaggataatttgcgttccctttttgccaaccttaacatagctcaaaaggaaaaattaaatgaattggttagtgctattcgtgaaaaggatgacattttggattcccaagaggaccttcttattaaggaaaataagaagcatgttaaggttaaaaaggcttatgctcttgagattgaaaaatgtgaaaaattatctagtgagctaagcacttgctgtgagatgattgacaaccttaaacatgaaaatgctagattaaatgctaagaacatttctcttgctagccttagggtagaaaatgaaaatttgattgctaaggctaaagattttgatgtttgcaaagttacaatttccgatcttagagataaaaacgatattcttcatgctaagattgttgaacttaactcttgcaaaccctctacatctactgttgagcacacttctatttgcactagatgtagagatgttaacattgatgctatacatgatcacataaccttaattaaacaacaaaatgatcatatagcaaaactagatgccaaaattgccgagcataacttagaaaatgaaaagtttaaatttgctagaagtatgctctatagtgggagacgccctggcatcaaggatggcattggcttccaaaggggagacaatgtcaaacttagtgcccctcctaaaagattgtctaactttgttaagggcaaggctcccatgcctcaggataacgaaggttacattttgtaccctgctggttatcctgagagcaaaattaggagaattcattctaggaagtctcactctggcccaaatcatgcttttatgtataagggtgagacatctagttctaggcaaccaacccgtgctaagttgactaagaaaactcctagtgcatcaaatgaacatagtctttcatttaaaacctttgatgcatcttatgtgttaactaacaaatccggcaaggtttatgcatccgggggctcaagttggatactcgacagcgggtgcacaaaccacatgactggggagaaaaagatgttctcctcatatgagaaaaaccaagatccccaaagagcgatcacattcggggatggaaatcaaggtttggtcaaaggtgtcactgtctttagaagaagtgatgattcaatagcatttaagggagtgttagagggtcagctatacttggtagattttgatagagctgaactcgacacttgcttaattgctaagactaacatgggctggctctggcatcgccgactagcacatgttggaatgaagaatcttcacaaacttctaaagggtgaacacattttaggactaacaaacgttcattttgagaaagacagggagaaatctcaaacccaagagaccttaaagggattcttgagacgagctcaaaatgagttcggcttaaggatcaagaaaataagaagcgacaatgggacggagttcaagaactctcaaattgaaagcttccttgaggaggagggcatcaagcatgagttctcttctccctacacgccacaacaaaatggtgtagtggaaaggaagaatagaactctgttggacatggcaaggaccatgcttgatgagtacaaaacttcggatcggttttgggccgaggcagtcaacaccgcctgctacgccatcaaccggttatatcttcaccgaatcctcaagaagacatcatatgaactcctaaccggtaaaaagcccaacatttcatattttagagtctttggtagcaaatgctttattcttgttaaaagaggtagaaaatctaaatttgctcctaagactgtagaaggctttttacttggttatgactcaaacacaagggcatatagggtctttaacaagtccactggactagttgaagtctcatgtgacgttgtgtttgatgagactaacggctctcaagtagagcaagttgatcttgatgagataggtattgaagaggctccgtgcatcgcgataaggaacatgtccattgtggatgtgtgtcctaaggaattcgaagagcctccaaatgcacaagatcaaccatcctcctccatgcaagcatctccaccaactcaaaatgaggaagaggctcaagttgatgaagaagaagatcaatcaaacgagccaactcaagatgacggcatagatcaagggggagatgcaaatgatcaagacaaggaggatgaagagcaaaggccgccacacccaagagtccaccaagcaatccaacgagatcaccccatcgacaccatccttggcgacattcataagggggtaactactagatctcgggttgcacatttttgtgaacattactcgtttgtttcctctattgagccacacagggtagaagaagcactacaagattcggattgggtggtggcgatgcaagaggagctcaacaacttcactagaaatgaggtatggcatttagttccacgtcctaatcaaaatgttgtaggaaccaaatgggtcttccgcaacaagcaagatgagcatggtgtggtgacaaggaacaaagctcgacttgtggccaaaggatactcccaagtcgaaggtttggacttcggtgaaacctatgcacccgtagctaggcttgagtcaattcgcatattattggcctatgctacttaccatggctttaagctttatcaaatggacgtgaaaagtgccttcctcaatggaccaatcaaggaagaagtctatgttgagcaacctcccggctttgaagacagtgagtaccctaaccatgtctataagctctctaaggcgctttatgggctcaagcaagccccaagagcatggtatgaatgccttagagatttccttattgctaatggcttcaaagtcggaaaagccgatcctacactctttactaaaactcttaaaaatgacttgtttgtatgccaaatttatgttgatgatattatatttgggtctactaacgagtctacttgtgaagagtttagtaggatcatgacacaaaagttcgagatgtctatgatgggggagttcaagtatttcttaggattccaagtgaagcaactccaagagggcaccttcattagccaaacaaagtacactcaagacattctaaacaagtttgggatgaaggatgccaagcccatcaagacacccatgggaactaatgggcatctcgacctcgacacgggaggtaagtccgtggatcaaaagtctatttcaaaccaagtcataggtgtattgaaagggaattggagtcttcggcgaagacaaaggcttccactacgtaactcatccttcgccgacgcttcaagtctctctccattcttgggggagaaaagcatgagcatcaaagaaaaagactttgtctttgggggacaaagtaagagcccatggcaaaagaactag

SEQ ID NO: 129511 - DNA, 287 bp, Zea mays
  Clone ID: MRT4577_49588C.1
gtggtattttgggctcctctactgcacaagggccagtccccaagtctactctgattgattgtcatgggcacccacacagatcaggacaccctttgaatttttgtttgacatgaactatttaggtgttccaaaaccttgggatctcaatgtgcaactccttggactccagacccctgtctggttggcactcccagcagtgtgtggtttcatcaggaaatccttgcagcaggggtttagatggttccttcaggaggtgggaagcctccatagcattgaaggccagcctg

SEQ ID NO: 129512 - DNA, 1357 bp, Zea mays
  Clone ID: MRT4577_49589C.1
ccttcctccccacccgctgctcatcaacattcaacaggaattcgatttgatttcgactgattgattggttgcaactctgctctgctgcgagagaggcctccgctacgttcttgccggggttgttcttcttcgatttttagggttgcggagcccttggatttcgcgtagggaagcctcctcccggccgtgtgatggacgcgagggagatgtgaagcctggctgttaactgatgctcgtggagagattcggaggagaggagcgcgcggtgaggaggcggtggaggcggaagcgacggagagttgggcaccagcgcagccacggacgacgcgcagccgccgggggacgaggcctggaacagggctgctccgcccctcacggacgccgccgacgtcgcctccatgggggagtcgctgttcagcgcgctctccatgcacaacgtctcggtccaccacccgttccatcgcccctgcgccttccggccggctcgagggcggcggggcccgtacccattcaagtcgatcaatcatcagcaacaaaaacactatagtaactactgacagcgtgagggcgctcgcaatggcgagccgtttgggagtcgtgctggctttagcggctgtcgtccttcttgccgcagcgggggccgccgccgggcaatccacgccacggccacccaacgcccagggcccgaagccgaagccgaagccgatgaaggtcaagtgcaccgagaaccgcaaggagaacccctactgtttcaaccggaacatggactgccccgccaactgcccccagtcctgctaccccgactgcaacacatgcaaacccgtctgcgtctgcaacaccccgggggcgtgcggcgacccgcggttcataggtggtgacggcaacgccttctacttccacggacgcagggacgccgacttctgcgtcgtctccgaccgcgaccttcacatcaacgcgcacttcatcggcaagagcggccacagcggcatgtcccgggacttcacctggatccaggccatcgctgtgctcttcgacggccaccgcctctacctcggcgccaggaagaccggcacctgggacgacgccgtcgagcacctggacatcaccctggacggcgagcctgtctaccttcccgctgacctcatcgaaggcgccaagtggacgtccagccgcgtgcccgagctgtcggtgacccgcaccaaggcggccaacggcgtcctcgtcaccgtcgccggaaagttcagcgtcagggccaacgccgtgcccatcaccgaggaggaatcgagggtgcaccgctacggtgtcaccgccgatgactgcctcgcgcacctcgaggctggcgttccaagttcgacgc

SEQ ID NO: 129513 - DNA, 370 bp, Zea mays
  Clone ID: MRT4577_4958C.1
gggctatagggcggtgacattccagctgtttaactccagcgggcttcaagttgtttgtactttatctaatgccgctggcatatcacattaaacgaagatgttctccctttcgaggttagtgccatactgaaagtacaaagtaaaaatatagaccatgatgtgggctaacggcatcaactacatttagcatgagatgccttgcatgctacatgacaatagctgcacacattatttttaccttctgctgatcgaccaacacaaaaaaaatactcttgtatctaactgcactgctactgcatttattgcattggctttagtgcgctcctagatacagtctaatcgtggtgacatttaatcaatgaaacatgaa

SEQ ID NO: 129514 - DNA, 421 bp, Zea mays
  Clone ID: MRT4577_49590C.1
ggacaaaaatgatgacatatgtatttttttccttgaacacgcacttaacaaaagtttagactcaaagatggaccaaatacaacacctctttatggaggccagtagcaggcatacaaaaaaaggtccatcaaaaagaaaaatagttttgtctatcattcatggtggtccttatggttttgtctatcattcatggtggtccttctggattgtaaattctttgatgcatagtggttcctttttggaggagattgaagtggagggtcaaccttcttttctttatctgtgagagtttcttgtagcttgacatccctgcactcgagaggtggctttagattgctttggataaaatttttgatacgattggctcgtttatggtgccaaaaaatggatagagactacagaatgtgctgccctcttccgc

SEQ ID NO: 129515 - DNA, 117 bp, Zea mays
  Clone ID: MRT4577_49591C.1
atgagaactggtagcttgcgtctgtacaatgttatgttttaatcaacgctgaatttacatatctgtcaagtctgaactctggcacctgcttattctggatgccttgccagtgcgagg

SEQ ID NO: 129516 - DNA, 780 bp, Zea mays
  Clone ID: MRT4577_49592C.1
gtatccattcaagtcgatcaatcatcagcaacaaaaacactatagtaactactgacagcgtgagggcgctcgcaatggcgagccgtttgggagtcgtgctggctttagcggctgtcgtccttcttgccgcagcggcggccgccgccgggcaatccaggcacccacccacccaacgcccagggcccgaagccgaagccgaagccgatgaaggtcaagtgcaccgagaaccgcaaggagaacccctactgtttcaaccggaacatggactgccccgccaactgcccccagtcctgctaccccgactgcaacacatgcaaacccgtctgcggtaaccactcgatctttttacatgtcttaacaatggagctacttacgtacgttgattttgttggtgaatggttttggttcgtgccttcgtgcagtctgcaacacccccggagcatgcggcgacccgcggttcatcggtggtgacggcaacgccttctacttccacggacgcagggacgccgacttctgcgtcgtctccgatcgcgaccttcacatcaacgcgcacttcatcggcaagagcggccacagcggcatgtcccgggacttcacctggatccaggccattgccgtgctcttcgacggccaccgcctctacctcggtgccaggaagaccggcacctgggacgacgccgtcgagcacctggacatcaccctcgacggcgagcatgtctaccttcccgctgacctcatcgacgtccagccgcgtgcccgagctgtccgtgacccgcacca

SEQ ID NO: 129517 - DNA, 321 bp, Zea mays
  Clone ID: MRT4577_49593C.1
aaccccccaaaatagctggggcctgtagctttttttattgtttcaaagcttttccaccttagccgcaaaacccgaaaccgtcctttttagccccccttttttgggcagttcaacccaaaccattagcccggtgcaattcaagaaagaacccccccctgttgaagcccttttaaagcctgttttagcccagcagacccccaaaagctttttactgaaaaaaaaggcccccttaggcaaaaggtttttcccacttgagtggcttcaccacctcccaggtgaagtcagggtcgtcccttccaaagtggccataagccccccttt

SEQ ID NO: 129518 - DNA, 210 bp, Zea mays
  Clone ID: MRT4577_49594C.1
acacacacacacacatcaactgaaaactcggaggagtttttgttcattatgggggtacaaagcaacgagggccaaatgatgtttttcttcattgccctgctgcaaaaaaagttcacggagcttgaaaggatcacggaaaaacgggaggagaggctacttcacctgcttcccccgggccctgtgggcaccaccttcccccccacccgttca

SEQ ID NO: 129519 - DNA, 262 bp, Zea mays
  unsure (1)..(262): unsure at all n locations
  Clone ID: MRT4577_49595C.1
ccccnccnnnccaaaaccccccccggcgccaggcacggggacggcccacccgagcgcggggagcacnagcagccgccgggaaaccaccagaacagcgccaacaaggcccccgcnccncggcaacaagccgcccagacggacaccgccgcgcccccgcaaccgaaagccagcgccggcgacgccacggagaagcngcngcccgccgncgcagccgagggccccaccaggggggggccagacaccaagacgaggggaaagaaga

SEQ ID NO: 129520 - DNA, 460 bp, Zea mays
  Clone ID: MRT4577_49596C.1
ccggccggggagaccatgcacccaatccaaacactaccagccatgaatcccccgataggtctatcgcgttctcctcctcctctctctcgccggtgcctacccatatactacctcatctaacattccaatgacccgatgatccttcttctctgtcccggaggagatgacaacaatctggcattgatcacgaagtcccacttcataagattcatgcctacgctcgggaagccctacaaagactgccacgaaaacacctaccaggtatccggtttctaggcctacctgtaccgagtgagttctgacaacgtgttggatccgtgggggtcacaacgaatctgtaatctctcctaactctcgacgtgaaactgccgctggagctaccttccaacatcataagtcaacgtacgaggtctctgctgagaatctctccgagtcatcggcaggaggcatcgcgcgactc

SEQ ID NO: 129521 - DNA, 288 bp, Zea mays
  Clone ID: MRT4577_49597C.1
cggagccacacctctccactccacccttggtccggctctagctctaggtatcctggggagactgtagatggcgactgctctgtggctgcaggttgccgtcatggcggtggcgctgctggcggtttgggcgactggcggtggcgcctttgaagcccgcggacgtgccggtccagaagatcttctttccgtcgtgtgcgcaggaccacatcctctacatctactgcgggcgtgtggtgctgctgtacctggactagttcaccggtactggtctttctgacgcggtgcttc

SEQ ID NO: 129522 - DNA, 140 bp, Zea mays
  Clone ID: MRT4577_49598C.1
gcacgagagtactcgtttgtgcagtttgctcggccgattcgtttgtgccagcgtttgtttgatcacttgattgtggacaccataaggaaatcgactgtggtccacaaagggagggcaaagttgagaccttccttccgttg

SEQ ID NO: 129523 - DNA, 298 bp, Zea mays
  Clone ID: MRT4577_49599C.1
cgacccacgcgaacgcccactcgttcgcccacgcgatcacggacgcatggtctttcgtatcgcaagctcacgccctgacgtcgggcacaggtgacatggcgaccatagccacaatggcgctgctgaagcccgccgccatggcacgtggcgcggtcggcgccgtacaccagaagaggtaagtctattttgctcgtccggacagggcttgcccgcaagaaggctgcgctgtccgtgtccgagttcgccacgctggtgggcgccttcctcgtggagctggagttgtcgcccaacgctgagc

SEQ ID NO: 129524 - DNA, 515 bp, Zea mays
  Clone ID: MRT4577_4959C.1
aaagggtgaacgcttttatagcatcatatacatatattgaatatttaacatgcacaggagtatcatatagttaacggggtctctaggcacccacatatccctgctacagcgtgagaccataatgtactaacaaacacacatgagcgtatgctgtctgtattcgctagaacgagggaccagcgcgcatgcaaggacttaccactctttattagcaggagtctttacgatggagcagtcggatttgttggatagcaaaatgttatagttgttagggcattacaccagcgatagtgatggccaccgtagcccaacactaggcatagatttttagctttgcggaccgcgagctgcatgtggcgcgtcacgataccacttttatggtggtgacgtgcagcattgccgagcaactgacgaacctgaagagcaagatactctagcacgttattgaggtagacaggggcgccgtggtggcatttcttgtcatacttgccggccttgatgaacctggcgatact

SEQ ID NO: 129525 - DNA, 300 bp, Zea mays
  Clone ID: MRT4577_495C.1
gtcatcatatatccagtcaaacaagccaacaacattaccatcctggcacatgtctgtttaagggatacggtttccattgatggcttcatctcttcactgtggatgagtggatttatgttctctgcaatggaacaaccgcacctgctcaaatgaaaatatcacaaggtgcagttcgcatatggtatcaagtggacttgataccagatgagtgaaactgtaatatcttcaagcaggaaaactatctgggatctataactacccagcagagattaatttatgctacttaccgagctaatttct

SEQ ID NO: 129526 - DNA, 469 bp, Zea mays
  Clone ID: MRT4577_49600C.1
aggattctttgttaggtcaggattgggaaacggcaacggatacagaggacagctttgatgaggatcggctaacccccggtgcagaattcaaacaacgggcagttgcaatttatgagctttaccaaaatcagtaccagcggcgatttaagtggattcgtcctgatttatttacgccggaactggctgataatctagaacaggatgcgaaatctttaatcaatatcctgaaaatttcaggccgttggaatgcggatgaagatggcaaactgcaatctttaattcgtttactaactgaagaacatccagacgagaaaattttgatttttacgcaatttgcggatacagcgagatatttggctcaggctttagaaacggcagggattaccaatattggtttggcaacgggaaattctcagatagacccaacgatacttgcccagcgttttagtccgaggagtaatggtaaggc

SEQ ID NO: 129527 - DNA, 804 bp, Zea mays
  Clone ID: MRT4577_49601C.1
ctgaaagcgcgaggggaaaccgagtggtggttgcagggcggtgtcgggcggatcgatgaacccggcgaggacgctggggccggcgctggcgagcaacctctacaccggcctctggatctacttcctgggccccgtcctcggcacgctctccggcgcctggacctacaccttcatccgcttcgacgaggcgcccagcaaggacgcgtcgtcgtcgcactcgcagaagctctcctccttcaagctccgccgcctgcagagccagtccgtcgccgccgacgccgacgacgacgaggacctcgaccacatccaggtgtgaagtgtgatgtcatgtccggccgctccgccgtacgtcccgtcgatcagagagtgcacacgtacgtgctactcctaacactatgtgcctagcaggatagttagttatggtcgatggtgatgtctgctggtctgtgcgtcgatcggttctcatgatccgatccatgcgcgcacgcactcgcattgtgtgtccggttggtggcgcactggcgcgctgtggatacatgggctcgctctgtcaatgtgccaatgagctctggcgcttctttttgggacggatgaacactgtgccgtgtgcgtacgtgtgtgcagtcagtcgtacgcgcgtgccaagcaagcgttcgtacgtctcctgctgtcactcttgttccgaaatcagttgatggtgcatatatacaaagatcatctgtaaggagggttttcaaatgctggaaggcaaatgtgtttcatccctaaataaacatggccatcgtcaaatatatcacatgcagc

SEQ ID NO: 129528 - DNA, 1242 bp, Zea mays
  Clone ID: MRT4577_49602C.1
gcacgaggtggaaaccccttttttcttgagggaaaaaaaaacaaagggagaagctctcctgagaagcatataccaccaacggaacacgggaacggcggaagcaaacaactagaaattccccagcccggttctttgcgtgcggttgatctcgtcggaggcccggccgcggttccccaatccgccatcgaattcgatggcggccaacgccgggaataagatccgcaacgccaagctggttcttcttggagatgtgggcgctggcaaatctagcttggttcttcggtttgttaagggacagtttgttgaattccaggaatcaacaattggagcagccttcttttcccagaccttagcggtcaatgatgagactgttaagttcgaaatctgggatactgccgggcaggagaggtatcatagcttggctcccatgtactataggggtgcagctgctgccattgttgtctatgacatcacaaatccggcctccttcacccgtgccaagaaatgggttcaagaacttcaagctcaaggaaatcagaatacaatagtggctcttgctggtaacaaggttgatatgctagatgcgaggcacgtggcagtagaggaagcaaagacgtatgcccaggagaacggtctcttcttcatggagacatctgctaaaactgcaatcaatgtgaatgacatattttatgagattgcaaagagattgcttcaagggcaagaggctccaagtccacaggctggaattgttctgaatcagagaccagatgagaggatggtcagcacttcctcgtgctgctcatgaagctgtgtttcaacctcatacatagttccgttatgaaatgtatcagaggagattaagcaaaatatcccatgtggtgtcggtgtcgtccaggctgatgttgtccccttctcctgctgctcgtttcttttcacatgtttgtgatgtaaatgcccatactagaatgtcaccaaagtgttgattatgctcttatcatttgattacgcccctctcctcaaatttgcgtaaatacaaggtgtaattttttaagtctttaactgggttactcctactgacttggtagagcatggtaaattcagctacagtatcattgctgcaggaaccaagaaaggaaaggtgccctgttaataatgtttcctttctaaatgtcgctttgccagtttccaaatttcctgacatggaacagtaattgtaattttgaggagtattgtattgtcaaa

SEQ ID NO: 129529 - DNA, 972 bp, Zea mays
  Clone ID: MRT4577_49603C.1
actacaattccccattcgcctcctcgcgtgcggtttgatccggctcaaggttccgcgagaacacagccctaatccggcgtcgaatccgatggccgccagcgccggcagcaagatccgcaacgccaaactggttcttcttggcgatgtgggtgctgggaaatccagcctggtgcttcggtttgtaaaaggacaatttgttgagttccaggaatcgacaattggagcggctttcttctctcaaaccttggctgttaatgacgagactgtgaagtttgaaatctgggatactgctgggcaggagaggtatcacagcttggcccccatgtactataggggtgctgccgcagctatagttgtctatgacatctcgaaccaggcatccttcacccgagcaaagaaatgggttcaagaacttcaagctcaaggaaaccagaatacagtagtggctcttgctggcaacaaagctgatttgctcgaggcgagggaggttcaaatagaggaagccaagacatatgcgcaggagaatggcctcttcttcatggaaacttctgctaaaactgcaaccaatgtgaatgacatattttatgagattgcaaagagattgctgcaggggcaggcggcgcagaacccacaggcagcggggatggttctctcccagagacccaatggagagagtggtcagcgcggcttcgtgctgctcctcctgaagcatcgtaaatttggtcacattcgtcgtctaacatagttccgttatgaaatgtatcagaggagattaagcaaaatatcccatgtggtgtcggtgtcgtccaggctgatgttgtccccttctcctgcggctcgtttcttttcacatgtttgtgatgtaaatgcccatactagaatgtccccaaagtgttgattatgcgcttatcctttgtttaaaaaaaaaaaaaaaacccaaaaaaaaaaaaaaaaaataaaaaaagaagaaaa

SEQ ID NO: 129530 - DNA, 1276 bp, Zea mays
  Clone ID: MRT4577_49604C.1
tcgcgatctagagagaagcgcatttcacacggcggagagccaacaaccaattccccaattcgcctcctcgcgtgcggtttgatccggctcaaggttccgccctaatccggcgtcgaatccgatggcggccagcgccggcagcaagatccgcaacgccaaactggttcttcttggcgatgtgggtgctgggaaatccagcctggtgcttcggttcgtaaaaggacaatttgtggagtgcccgggttctgatggtgtagaaaaattcttctcccagaccttagcggtaaatgatgagactgttaagtttgaaatctgggatactgctgggcaggagaggtatcatagcttggcccccatgtattataggggtgcagccgccgccattgttgtctatgacatcacaaatccggcctccttcacccgtgccaagaaatgggttcaagaacttcaagctcaaggaaatccgaatacaatagtggctcttgctggtaacaaggttgatatgctagatgcgaggcacgtggcagtagaggaagcaaagacgtatgcccaggagaacggtctcttcttcatggagacatctgctaaaactgcaatcaatgtgaatgacatattttatgagattgcaaagagattgcttcaagggcaagaggctccaagtccacaggctggaattgttctgaatcagagaccagatgagaggatggtcagcacttcctcgtgctgctcatgaagctgtgtttcaacctcatacatagttccgttatgaaatgtatcagaggagattaagcaaaatatcccatgtggtgtcggtgtcgtccaggctgatgttgtccccttctcctgctgctcgtttcttttcacatgtttgtgatgtaaatgcccatactagaatgtcaccaaagtgttgattatgctcttatcatttgattacgcccctctcaaatttgcgtaaatacaaggtgtaattttttaagtctttaactgggttactcctactgacttggtagagcatggtaaattcagctacagtatcattgctgcaggaaccaagaaaggaaaggtgccctgttaataatgtttcctttctaaatgtcgctttgccagtttccaaatttcctgacatggaacagtaattgtaattttgaggagtaaaaaaaaaaaaaaaagcggcctacttctgtattgaattgtaatcttgaggagtaatgtactgttgtgttgaacaaaccatccattaaaatgctccaaatatacacatggcattggggtaagc

SEQ ID NO: 129531 - DNA, 347 bp, Zea mays
  Clone ID: MRT4577_49605C.1
gacaacaaccaaacaacaactcattgcatcccgcgatacaagcaccagcaaatacaagcgaacaaacacataagcaaacaaacacatgaatgctgatgcagatgccacattattctatctagaggttgttggaatttgtgtgttacgttcataccatgtagaagccaaaaggtggtggttcataccatataattaccggcacgggaagctaccctactgcttggcaaaagccaaactgaacgcgacacacattcgctgtccatggtcagtgtgtatgtacctgcttatggaaagggcaagctaacattgcctttaatattggccccgagcccttggtggatgacaaa

SEQ ID NO: 129532 - DNA, 1223 bp, Zea mays
  Clone ID: MRT4577_49606C.1
gatgttggaacagcacggggcaactattcaccggtgcaaggattagagtggaaaccccttttgtcttgagggaaaaaaaataaagggagaagctctcctgagaagcatatagcaccagcggaacacgggaacggcggaagcaaacaactagaaattccccagcccggttctttgcgtgcggttgatctcgtcggaggcccggccgcggttccccaatccgccatcgaattcgatggcggccaacgccgggaataagatccgcaacgccaagctggttcttcttggagatgtgggcgctggcaaatctagcttggttcttcggtttgttaagggacagtttgttgaattccaggaatcaacaattggagcagccttcttttcccagaccttagcggtcaatgatgagactgttaagttcgaaatctgggatactgccgggcaggagaggtatcatagcttggctcccatgtactataggggtgcagctgctgccattgttgtctatgacatcacaaatccggcctccttcacccgtgccaagaaatgggttcaagaacttcaagctcaaggaaatcagaataccatagtggctcttgctggaaacaaggctgatatgctagatgcgaggcaggtgccagcagaggaagcaaaggcgtatgctcaggagaatgggctcttcttcatggagacatctgctaaaactgcaatcaatgtgaatgacatattttatgagattgcaaagaaattgcttcaagggcaacaagctccaagcccacaggctggaatggttctgaatcagagaccaaatgagaggacggtcagcagttcttcatgctgctcttgagctgtgtttcaacctcgtagtgccgttatcaaatgtatcagaggaggtttatggaaaatatcccatgtcgcttgtgtggctgcctttcaggctgacgtgctcccattctgctcctcatttcctttcacatgttcgtcatgtaaatgccaatactaaagtgtcactgcatgggcagaagtgttaccaaagtgttgattgtgctcttatcatttgattaagcccctgcttaagttctcaattttgcaaaggtgccctgttaataatgtttcctttctaaatgtcgcttagccagtttccaaatttcctgacatggaacagtaattgtaattttgaggagtattgtattgtcattgtcgtgggtacttctgtattgtattgg

SEQ ID NO: 129533 - DNA, 227 bp, Zea mays
  Clone ID: MRT4577_49607C.1
cataaccggttcttttctggattaaattccaatagtatcccccgcctcaaatccccccttaacctaagaaaaggccaaagggaaaaaagaaaaaaagaattttccttcattgaaaaaaccttcaggtggtgcggagtaccttttcaaggaggaggaggaaccgggctctggcattccggaaccgcgcaccttagggcgggggaccaatcacgcgttcttggcgtaaa

SEQ ID NO: 129534 - DNA, 176 bp, Zea mays
  Clone ID: MRT4577_49608C.1
ttctagatcttttcactccttgtagaaaacagcaggaggtggcggacagaggaatggaaaaagtatttattagtcatttatcttagctcactattttaagtttgactagcttaattacatattgaacgtgctttgtttgctttagatgtactttaacagaactagttttttttttt

SEQ ID NO: 129535 - DNA, 444 bp, Zea mays
  unsure (1)..(444): unsure at all n locations
  Clone ID: MRT4577_49609C.1
ccgggggggggggnaaaaaggcanaagagccacaggggcaaacccncaaaacnataaacagcacncanacagcaacaaaggcagggcaaccagggccnncanaaggcacnnngncnannannannacannagaanggccncgnncaacagggngggggggggggggaaacnagngcaggggcnncancaggccaaccancnnnannacaacancacanccaggcancncggcganaagancaaccnncggggcngggggacnngacgacggggacagggcagggggcanngnncacaacanagncgcggacacnncccaagagcacccncnggagcnggccaaggccccggcnnccnanaaccaagcagcncagcgggggancaggggaaacnggacagagcnncncacgcggancaccccacaggacnnncacaaccaccacg

SEQ ID NO: 129536 - DNA, 407 bp, Zea mays
  Clone ID: MRT4577_4960C.1
cggacgcgtgggtcacaacacaacatcacagtaagaaccaactatctacattataccacgtgatacacggagatagatcgatgccatttgatatggtttccaggagaaccatgccgtcctcctccctcgccttcctcgtggcactgctgctgctctcttgcagcaccaccatgagtagcgcggcacggtacctgctggaagagaccaagcctgcaccgcatcccaccaccgtgccggagatccccaacaataagcctgagctgccgccgcatcccaccgtgccggaggtgcccaaagcctgagctgccgccgcatcccaccaccgtgccagagctcctcgagcctgagctgcctccacaccccaccgtgccagagctccccaagcctgaactgccttctccacaccc

SEQ ID NO: 129537 - DNA, 319 bp, Zea mays
  Clone ID: MRT4577_49610C.1
cctttatgactcgattcgtcgaatggtaggcatggcatatgtttaaccatcagtgatgcaattcaggaaacagatcctccaagccttgtatttcgggtagagatcagtgaggacgacactggctcgaaatgtgtattggcacgcgcccgtttgagcagaggttacttgacagcaacggctgggacagcgtcattgccggcgactatgacgactaaccagcggatgactgcttggctaaagctctgtatctgcgtcaaccacaggagtagctctcgtttttcgctctaagtctgacgagtcacggcagaggtcttctgca

SEQ ID NO: 129538 - DNA, 459 bp, Zea mays
  Clone ID: MRT4577_49611C.1
cgttcacccacggagccgaggctgccagttatatcaatctaagacaagaactcctgcgcaaagacaaacttgctctgtaaggacttaatatccccagataggcttgacacaatactcatataggatcagccagcgtgacctgcggggttaactctataatgacgaactgacactcagaatcgacggcagtcatctaacccaaggattaatcaggcatgcctcgtccaatgccattactgctggtggaccagtcctgctggtttaatcctcaccaccattcaggatgataagagtatcatttcaactcgatacagctctgtacggtcacaatgccacacaacatggaatccagaaccattgggcacacaccatggttagcctaatgatcgaacttgatctccttcataccattgagctcgaagggctctttgcaatcagcaaagctgatgggccacttgc

SEQ ID NO: 129539 - DNA, 2872 bp, Zea mays
  Clone ID: MRT4577_49612C.1
atgtcgggagatcacgccaagaaggagatggagaccggcgaaaagcccactacaagccacgtgagcacttcatcggaagagtcccgcaccaagaggaaggagaagaagaagatctcctccaacaaagggaaggagaagaaatcttcttctcaccacaaagagaagaaggaaaaatcttcttcccacaagccgcgtcggagtggggacaagcaaaagaggatgaggaaggtggtctactacgagactgacacttcatcaacatcaacctccgactccgatgcaccctccgtaacttctaaacgccaagagcgtaagaagtttagtaagatccccctacactatcctcgcatttctaaacatgcacctttactttccgtcccattaggcaaaccaccaacttttgatggtgaagattatgctaggtggagtgatttaatgcgatttcatctaacctcactccacaaaagtatatgggatgttgttgagtttggtgcacaggtaccatccgtaggggacaaggattatgatgaggatgaggtggcccaaatcgagcacttcaactctcaagcgacaacaatactcctcgcctctttaagtagagaggagtataacaaagttcaagggttgaagagcgccaaggaggtttgggatgtgctcaaaaccgcgcacgaaggagatgagctcaccaagatcaccaagcgggaaacgatcgagggggagctcggtcggttccggcttcgcaaaggggaggagccacaacacatgtacaaccggctcaagactttggtgaaccaagtgcgcaacctcgggagcgtcaagtgggacgaccacgaaatggttaaggttattctaagatctctcatttttcttaaccccactcaagttcaattaattcgtggtaatcctagatatactaaaatgacccccgaggaagtaatcgggcattttgtaagttttgagtgcatgatcgaaggctcgaggaagatcaacgagcttgatgatccatctacatccgaagctcaacccgtcgcattcaaggcgacggaagaaaagaaggaggagtctacaccaagtagacaaccaatcgacgcctccaagcttgacaatgaggagatggcgctcgtcatcaagagcttccgccaaatcctcaaacaaaggagggggaaagactacaagtcctgctccaagaaggtttgctacaaatgtggtaagcccggtcattttattgctaaatgtcctatatcaagtgacagtgaccgaggcgacgacaagaaggggagaagaaaggagaaaaagaagtactacaagaagaagggcggcgatgcccatgtttgtcgggagtgggattccgacgaaagctcaagcgactcctccgacgacgaggacgccgccaacatcgccgtcaccaagggacttctcttccccaacgtcggccacaagtgcctcatggcaaaggacggcaaacggaagaaggttaaatctaactcctccactaaatatgagtcttctagtgatgataataatagtgatgaggaggataatttgcgtgttctctttgccaatcttaacatggagcaaaaagaaaaattaaatgaattgattagtgctattcatgaaaaggatgaccttttggactcccaagaggattgtctaattaaagaaaacaagaaacatgttaaggttaaaaaggcttatgctctagaagtagaaaaatgtgaaaaattatctagtgagctaagcacttgccgtgagatgattgacaaccttaggaatgaaaatgctagtttaaatactaaggttgattctcatgtttgcattgtttcaacttccaatcctagagataataatgatgatttgcttgctaggattgaaaaattaaacacttctcttgctagccttagagtagaaaatgataatttgattcctaaggctaaagattttgatgtttgcaatgtcactatttccgatcttagagataaaaatgatatattacgtgctaagattgttgaacttaattcttgcaaaccgtctacatctactattgagcatgtgtctatttgtgatagatgtagagatattgatgttaatgctattcatgatcacatgtctttaattaaacaacaaaatgatcatatagcaaaactagatgctaaaattgccgagcacaacttagaaaatgagaaatttaaatttgctcgtagcatgctttataatgggagacgccctggcattaaggatggcattggcttccaaagaggagacaatgacaaacttaatgcccctcctaagaacttgtctaactttgtcaaggacaaggctcccatgcctcaggataacgagggctacattttgtaccctgccggctatcctgagagcaaaataaggaaaattcattctaggaagtctcactctggccctaatcatgcttttatgtataagggtgagacatctagctctaggcaaccaacccgtgccaagttgcctagaaagaaaactcctaatgcatcaaatgatcataccatttcatttaaaacttttgatgcttcttatgtgcttactaacaaatccggcaagatagttgccaagtttgttgggggcaaacacaagggttccaaggcttgtgtttgggtacccaaagacattgtttctaatgccaaaggacccaaaaccgtttgggtttatgcatccgggggctcaagttggatactcgacagcgggtgcacaaaccacatgacaggggagaaaaagatgttctcctcatatgagaaaaaccaagatccccaacgagctatcacattcggggatggaaatcaaggtgtcactgtctttagaagaagtgatgattcaatagcatttaagggagtgttagagg

SEQ ID NO: 129540 - DNA, 621 bp, Zea mays
  Clone ID: MRT4577_49613C.1
atgggggagttgaagtacttcttgggatttcaagtaaagcaactacaagagagaaccttcatcagccaaacgaagtatattcaaaatattctaagcaagtttgggatgaaggatgccaagcccatcaagacacccatgggaaccaatgggcatcttgacctcgacacgggagggtgtaaaattaatagaaagagcacatcgcggacttgccagttcttaggaagatccttggtgtcttgggcttcaaagaagcaaaattccgtagctctttctaccgccgaagctgagtatattgccgcaggtcattattgcgcgcaactactttggatgaggcaaacccttagggactatggttacaaattaaccaaagttcctcttctatgtgataatgagagtgcaatccgcatggcgaataatcccgttgagcatagccgcactaaacacatagccattcggtatcatttcttaagggatcaccaacaaaagggagatatcgagattgcatatgttaacactaaggaacaattagccgatatctttaccaagccactagatgaacaaacttttaacaaacttaggcatgagctaaacccccggggttcttcgtctgcccgtccatga

SEQ ID NO: 129541 - DNA, 606 bp, Zea mays
  unsure (1)..(606): unsure at all n locations
  Clone ID: MRT4577_49614C.1
gcggccgcccgggcaggtactcactatcttcaaaccganagttgctcaacatagacctcttccttgcattgggtccattagaggaaggcactcttcacgtccatttggttaagcttgaagccatggtaagtagcataggccaataatatgcgaatggactcaagcctagctacgggtgcataggtttcacgcgaaatccaaaccttcgacttgggagtaacccttggccacaagtcgggctttgttccttgtcaccacaccatgctcgtcttgcttgttgcggaagacccacttggttcctacaacattttggttagggcgtggaactaaatgccatacctcattcctagtgaaattgttgagctcctcttgcatcgccatcacccaatccgaatcttgaagtgcttcctctaccctgtgtggctcaatagaggaaacaaaagagtaatgctcacaaaaatgtgcaacccgagatctagtggttacccccttatgtcgatggggtgatctcgttggattgcttggtggactcttgggtgtggcggccttggttcatcatcctccttgtcttgatcatttgcatctcccccttgaacattgccggca

SEQ ID NO: 129542 - DNA, 2896 bp, Zea mays
  Clone ID: MRT4577_49615C.1
atgtcgggagatcacgccaagaaggagatggagaccgacgacaagcccactacgagtcacgggagcacttcatcggaagagtcccgcaccaagaggaaggagaagaggaaggactcctccaaagggaagaagtcttcttcacactccaaagggaaggagaagaaatcctcttctcaccacaaagagaagaaggaaaaatcttcttcccacaagccgcatcggagtggggacaagaagaagaggatgaggaaggtggtctactacgagaccgattcttcatcaacatccacctccggctccgacgcggcatccgtcacttctaagcgccaagagcgcaagaagtatagtaagattcccctacgctaccctcacatttctaaacatacacttttactttccgtcccattaggcaaaccaccaacttttgatggtgaagattacgctaggtggagtgatttaatgcgatttcatctaacctcgctccacaaaagtatatgggatgttgttgagtttggtgcacaggtaccatccgtaggggatgaagattatgatgaggatgaagtggcccaaatcgagcacttcaactcccaagccacaaccatactcctcgcctctctaagtaaggaggaatacaacaaggtgcaagggttgaagaatgcaaaggagatttgggacttactcaagaccgcgcacgagggtgatgaactcaccaagatcaccaagcgggaaacaatcgaaggggagctcggtcgcttccgtcttcgccaaggagaggagccacaagatatgtacaaccggctcaaaaccttggtgaaccaagtgcgcaacctcgggagcaagaaatgggatgatcacgaggtggttaaggttattttaagatcgcttattttccttaaccctactcaagtacaattaattcgtggcaacccaagatatacactaatgactcccgaggaagttatcgggaattttgtgagctttgaatgtatgatcaagggctcaaagaagatcaatgagcttgatgatccctccacgtccgaagcacaaccggtggcatttaaggcgacagaggaaaagaaggaggagtctgcaccgagtagacaaccaattgacgcctccaagctcgacaatgagaagatggctttaatcatcaaaagctttcgccaaatccacaagcaacggaaggggaaggattacaaatcccgttccaagaaggtttgctacaagtgtggtaagcccggtcactttattgctaaatgtccattatcaagtgacagtgatagggataacgacaagaagggcaagaggagagaaaagaagaggtaccacaagaagaggggaggcgatgcccacgtatgccgcgagtgggactccgacgagagctccaccgagtcctcctccgacgaggacgccgccaacatcgccgtcaccaagggactcctcttccccaacgtcggtcacaagtgcctcatggcaaatgacggcaaaaagaagaaggttaaatctaaatcctccactagatatgagtcttctagtgatgaaaatgctagtgatgaggaggataacttgcataccctttttgccaaccttaacatggaacaaaaagaaaaattaaatgaattgattagtgctattcatgagaaggatgatctcttggactctcaagaggacttccttattaaggaaaacaaaaagcatgttaaggttaaaaatgcttatgctctacaaattgaaaaatgtgaaaaattgtctagtgagctaagcacttgccatgagaccattgacaaccttagaaatgaaaatggtaaattacttgctaaggttgattcccatgtttgtattgattcaatttccaatcctagagatgataatgttgatttgcttgctaggattgatgaattgaatatttctcttgatagccttaggattgaaaatgaaaagttaattgctaaggctaaagattttgatgtttgcaatactactatttccgaccttagaactaagaatgatatgttgcatgctaaggttgtagaactaaaatcttgcaaaccctctacatctaccgttgagcacacttctatttgtactagatgtagagatgttgatatcaatgctattcatggtcacatggctttaattaaacaacaaaatgatcatatagcaatattagatgctaaaattgtcgagcataacttagaaaatgaaaaatttaaattcgctagaagtatgctctataatgggagacgccctagcatcaaggatggcattggctaccaaaagggagacaatgtcaaacttagtgcccctcctaaaagattgtctaattttgttaagggcaaggctcccatgcctcaggataacgagggttacattttgtaccctgccggctatcccgagagcaaaattaggagaattcactctaggaagtctcactctggctctaaccatgctttcatgtataagggtgagacatctagctctaggcaaccaacccgtgccaagttgcctagaaagaaaactcctaatgcatcaaatgatcatgatatttcatttaaaacttttgatgcatcttatgttttgactaacaaatccggcaagatagttgccaagtttgttgggggcaaacacaagggttccaagacttgtgtttgggtacccaaagttcttgtttctaatgccaaaggacccaagaccgtttgggtttatgcatccgggggctcaagttggatactcaacagcgggtgcacaaaccacatgacaggggagaagaagatgttctcctcatatgagaaaaaccaagatccccaacgagctatcacattcggggatggaaatcaaggtgtcactgtctttagaagaagtgatgattcaatagcatttaagggagtgttagagg

SEQ ID NO: 129543 - DNA, 5610 bp, Zea mays
  Clone ID: MRT4577_49616C.1
atgtcgggagatcacgccaagaaggagatggagaccggcgaaaagcccactacaagccacgggagcacttcatcggaagagtcccgcaccaagaggaaggagaagaagaagagctcctccaacaaaggaaaggagaagaaatcttcttcgcaccacaaagagaagaaggagagatcttcctcccacaagccacatcggagaggggacaagcacaaaaggatgaggaaagtggtctactatgagaccgacacttcatcagcatcgacctctaactccgatgcgccctccgtaacttctaaacgccaagagcgtaagaagtttagtaagatccccctacattaccctcgcatttctaaaaatgcacatttactttccgtcccattaggcaaaccaccaactttcgatggtgaagattatgctaggtggagtgatttaatgcgatttcatctaacctcactccacaaaagtatatgggatgttgttgagtttggtgcacaggtaccatccgtaggggataaagactatgatgaggatgaggtggcccaaatcgagcacttcaactctcaagcgacaacaatactcctcgcctctttaagtagagaggagtataacaaagttcaagggttgaagagcgccaaggaggtttgggatgtgctcaaaaccgcacacgaaggagatgagctcaccaagatcaccaagcgggaaacgatcgagggggagctcggtcggttccggcttcgcaaaggggaagagccacaacacatgtacaaccggctcaagactttggtgaaccaagtgcgcaacctcgggagcgtcaagtgggacgaccacgaaatggttaagatatatactaaaatgacccccgaggaagttatcgggaattttgtaagttttgagtgcatgatcgaaggctcgaggaagatcaacgagcttgatgattccaccacatccgaagctcaacccgtcgcattcaaggcgacggaggaaaagaaggaggaggctacaccaagtcgacaaccaatcgacgcctccaagcttgacaatgaggagatggcgctcgtcatcaagagcttccgccaaatcctcaaacaaaggagggggaaagactacaagccccgctccaagaaggtttgctacaaatgtggtaagcccggtcattttattgctaaatgtcctatatcaagtgacagtgaccgaggcgacgacaagaaggggagaagaaaggagaaaaagaagtactacaagaagaagggcggcgatgcccatgtttgtcgggagtgggattccgacgaaagctcaagcgactcctccgacgacgaggacgccgccaatatcgccgtcaccaagggacttcttttccccaacgtcggccacaagtgcctcatggcaaaggacggcaaacggaagaaggttaaatctaactcctccactaaatatgagtcttctagtgatgataatgatagtgatgaggaggataatttgcgtgttctctttgccaatcttaacatggagcaaaaagaaaaattaaatgacttgattagtgctattcatgaaaaggatgaccttttggactcccaagaggattgtctaattaaagaaaacaagaaacatgttaaggttaaaaaggcttatgctctagaagtagaaaaatgtgaaaaattatctagtgagctaagcacttgccgtgagatgattgacaaccttaggaatgaaaatgctagtttaaatgctaagattgattctcatgtttgcattgtttcaactttcaatcctaagaataataatgatgatttgcttgctaagattgaagaattgaatatttctcttgctagccttagagtagaaaatgataatttgattactaaggctaaagattatgatgtttgcaaagttacaatttccgatcttagagataaaaatgatattcttcatgctaagattgttgaacttaattcttgcaaaccctctacatctattgttgagcatgtatctatttgtactagatgtagagatgttgatgttaatgctattcatgatcatatggctttaattaaacaacaaaatgatcatatagcaaaactagatgctaaaattgccgagcacaacttagaaaatgagaaatttaaatttgctcgtagcatgctttataatgggagacgccctggcattaaggatggcattggcttccaaaagggagacaatgacaaacttaatgcccctcctaagaacttgtctaactttgttaagggcaaggctcccatgcctcaggataacgagggctacattttgtaccctgccggctatcctgagagcaaaattaggaaaattcattctaggaagtctcactctggccctaatcatgcttttatgtataagggtgagacatctagctctaggcaaccaacccgtgctaagttgcctagaaagaaaactcctaatgcatcaaatgatcatgacatttcatttaaaacttttgatgcttcttatgtgcttactaacaaatccggcaaggtttatgcatccgggggctcaagttggatactcgatagcgggtgcacaaaccacatgactggggagaagaagatgttctcctcatatgagaaaaaccaagatccccaacgagctatcacattcggggatggaaatcaaggtgtcactgtctttagaagaagtgatgattcaatagcatttaagggagtgttagaggatcagctatacttagtagattttgatagagctgaactcgacacttgcttaattgctaagactaacatgggttggctctggcaccgccgactagcccatgttggaatgaagaatcttcataagcttctaaagggagaacacattttaggattaacaaatgttcattttgagaaagacaggatttgtagcgcatgtcaagccgggaagcaagttggaacccaacatccacacaagaacatcatgacgaccgacaggccgcttgagctactccacatggatctattcggcccgattgtgtacataagcatcggcgggagtaagtattgtcttgtaatagtggatgattattctcgcttcacctgggtattctttttacaggaaaaatctcaaacccaagagaccttaaagggattcttgagacgggctcaaaatgagttcggcttaaggatcaagaaaataagaagcgacaacgggacggagttcaagaactctcaaattgaaggcttccttgaggaagagggcatcaagcatgagttctcttctccctacactccacaacaaaatggtgtagtggagaggaagaatcgaactctattggatatggcaagaaccatgcttgatgagtacaagacttcggatcggttttgggcggaggcagtcaacaccgcttgctacgccatcaaccggttatatctacaccgaatcctcaagaagacatcatatgaactcctaaccggtaaaaagcccaacatttcatattttagagtctttggtagcaaatgctttattcttgttaagagaggcagaaaatctaaatttgctcctaagactgtagaaggctttttacttggttatgactcaaacacaagggcatatagggtctttaacaagtccactggactagttgaagtctcatgtgacgttgtgtttgatgaaactaacggctctcaagtagagcaagttgatcttgatgagataggtgaagaacaggctccatgcatagcgctaaggaacatgtccattggggatgtatgtcctaaggaatccgaagagcctccacatgcacaagatcaaccatcctcctccacgctagcatctccaccaactcaaaatgaggatgaagctcaagttgatgaagtagaagatcaagcaaatgagccacctcaagatgacgacaataatcaagggggagatgcaaatgatcaagacaaggaggatgaagagcaaaaaccgccacacccaagagtccaccaagcaatacaacgagatcaccccgtcgacactatcctcggcgacattcataagggggtaactactagatctcgtgttgcacatttttgtgagcattactcgtttgtttcctctattgagccacacagggtagaggaagcactacaagattcggattgggtggtggcgatgcaagaggagctcaacaatttcacaaggaacgaggtatggcacttagttccacgtcctaaccaaaatgttgtaggaaccaaatgggtcttccgcaacaagcaagatgagcatggtgtggtgacaaggaacaaagctcgacttgtggccaaaggatactcccaagtcgaaggtttggatttcggtgaaacctatgcacccgtagctaggcttgagtcaatccgcatattattagcctatgctacttaccatggctttaagctttatcaaatggacgtgaaaagtgccttcctcaatggaccaatcaaggaagaggtctatgttgagcaacctcccggctttgaaaacagtgagtatcctaaccatgtctataagctctctaaggcgctttatgggctcaagcaagccccaagagcatggtatgaatgccttagagattttcttattgctaatggcttcaaagtcggaaaggccgatcctacactctttacaaaaactctcaaaaatgacttgtttgtatgccaaatttatgttgatgatattatatttgggtctactaacgagtctacatgtgaagagtttagtaggattatgacacagaaattcgagatgtctatgatgggggagttgaagtatttcttaggattccaagtgaagcaactccaagagggcaccttcattagccaaaccaaatacactcaagacattctaaacaagtttgggatgaaggatgccaagcccatcaagacacccatgggaaccaatgggcatctcgacctcgacacaggaggtaagtccgtggatcaaaaggtataccggtcgatgataggttccttactctatttatgtgcttctcgaccggacattatgctttccgtttgcatgtgtgcaagattccaatctgaccctaaggaatcccaccttacggccgtaaaacgaatcttgagatatttggcttattctcctaagtttgggctttggtaccctcggggatccacatttgatttaattggttattcggatgccgattgggcggggtgtaagattaataggaagagcacatcggggacttgccagttcttggggagatccttggtgtcttgggcttcaaagaagcaaaattcagtcgctctttcaaccgccgaagccgagtatattgccgcaggtcattgttgcgcgcaattattatggatgaggcaaaccctgcgggactacggttacaaattaaccaaagtccctttgctatgtgatattgagagtgcaattaaaatggccgacaatcccgtcgagcatagccgcactaaacacatagccatacggtatcattttcttagggatcgccaacaaaagggggatatcgagatttcatacattaacactaaagatcaattagccgatatctttaccaagccacttgatgaacaaacttttaccaaacttaggcatgagctcaatattcttgattctagaaatttcttttgctag

SEQ ID NO: 129544 - DNA, 2673 bp, Zea mays
  Clone ID: MRT4577_49617C.1
atggagaccggcgacaagcccactacaagccaagggagcacttcatcggaagagtcccgcaccaagaggaaggagaagaagaagagctcctccaacaaagggaaggagaagaaaccttcttctcatcacaaagagaagaaagagaaatcttcctctcacaaatcgcatcggagtggggaccagcacaagaggatgaggaaagtggtctactatgagaccgacacttcatcaacatcgacctccggctccgatgcgccctccgtaacttctaaacgccaagagcgtaagaagtttagtaagatccccttacactatcctcgtacatctagacatactccattactttccgttccattaggcaaactgccaacctttgacggtgaagattatgctaggtggagtgatttaatgaaatttcatctaacctcactccacaaaagtatatggaatgttgttgagtttggagcacaggtaccatccgtaggggatgaggattatgatgaggacgaagtggcccaaatcgagcacttcaactctcaagctacaaccatactcctcgcctctctaagcaaggaggagtacaacaaggtgcaagggttgaagaatgcaaaagaaatttgggacctactcaagaccgcgcacgaaggtgatgaactcaccaagattaccaagcgggaaacgatcgagggggagctcggtcgcttccgtcttcgccaaggggaggagccacaagacatgtacaaccggctcaagactttggtgaaccaagtgcgcaacctcgggagcaagaagtgggatgatcacgaggtggttaaggttattcttagatcgctcatttttcttaaccccacacaagttcaattaattcatggtaatcctagatatactcaaatgacccccgaggaagttatcgggaattttgtgagctttgaatgcatgatcaaaggctccaagaagatcaacgagcttgatgaaccctccacgtccgaagcacaaccggtggcatttaaggcgacggaggagaagaaggaggagtctacaccgagtagacaaccaattgacgcctccaagctcgacaatgaggagatggctttaatcatcaaaagctttcgccaaatcctcaagcaacggaaggggaaggattacaaatcccgttccaggaaggtttgctacaagtgtggtaagcccgatcactttatcgctaaatgtccattatcaagtgacagtgacagggataacgacaagaagggaaagaggaaagaaaagaagaggtaccacaagaggaggggcggcgatgcccatgtatgccgcgagtggaactccgacgagagctccaccgactcctcctccgacaaggacgccgccaacatcgctgtcaccaagggactcctcttccccaacgtcggtcacaagtgcctcatggcaaaggacagcaaaaggaagaaggtaaaatcaagatcctccactaaatatgaaacctctagtgatgaggatgatgctagcaatgaggaggataacttgcatgttctttttgccaaccttaacatggaacaaaaggaaaaactaaatgagctaattagtgccatccatgaaaaggatgacctcttggactcccaagaggacttcctaatcaaggaaaataaaaagcatgttaaggttaaaaatgcttatgctctagaggtagaaaattgtgagaaattatctagtgagctaagtacttgccatgacactattaccaaccttagaaatgaaaatgctagtttaaatactaaggttgattcacatgtttgtaatgtttcaattcccaatcttagaaatgataatgatgatttgcttgctaagattgaagaattgaacatttctcttgctagccttagagtagaaaatgaaaatttaattgctaaggctaaagaactagatgtttgcaatgttacaatttccgatcttagagataataatgatatcttgcgtgctaagatcgttgaacttaattcatgcaaaccctctacatctagtgttgagcatgtttccgtttgtactagatgtagagatgttgatattgatgctattcatgatcacatgaccttaattaaacaacaaaatgatcatatagcaatattagatgcaaaaattgccgaacataacttagaaaatgaaaaattcaaatttgctagaagtatgctctataatgggagacgccctggcatcaaggatggcattggcttccaaaggggagacactgtcaaacttaatgcccctcctaaaagattgtctaactttgttaagggcaagactcccatgcctcaggataacgagggttacattttataccctgccggttatcccgaggacaaaattaggagaattcattctaggaagtctcactctggccctaaccatgcttttatgtataagggtgagacatctagctctaggcaaccaacccgtgctaagttgcctaagaagaaaacccctagtgcatcaaatgaacatagtctttcatttaaaacttttgatgcatcttatgtgttgactaacaaatccggcaaagtagttgccaaatatgttgggggcaaacacaaggggtcaaagacttgtgtttgggtacccaaagttcttgtgtctaatgccaaaggacccaaaaccatttgggtacctaaagtcaagaactaa

SEQ ID NO: 129545 - DNA, 4158 bp, Zea mays
  Clone ID: MRT4577_49618C.1
atgaccggcggtgacaaatccgcaagcttgggaagaacccattcaagggagtctggccacaagcataaggaggaatcctcttcctccatcaagtcacaacggagaggtgacaagaagaagaagatgaagaaagtggtatactacgagaccgactcttcgtcaccctccacctccggctccgaatcggcgtccatcacttctaagcgccatgagcgcaagcagtatagtaagatgcccctccgctatccttgcatttctaaacgcactccattactttccgttccccaaggcaaaccaccattttttgatggtgaggactattgtatgtggagtgataaaatgaggcatcatctaacctcactccacaaagcatatgggacattgttgagtatggagcgcagatataagctaatgtctcacgaggaggttataagaaagtttgtgagctttgagttgatgatcaaaggctccaaacaaatcgtcgagcaaggcggcacctccacacccgaggtgcaacccgtcgcattcaaagcaacggaagaaaagaaagaagagtctacatcaagtaggctccccatcgacgcctccaagctcgacaacgaggaaatggcgctcatcatcaagagcttccgccaaatcctcaaacaaaggagggggaaggattacaagccccgctctaagaaagtatgctacaaatgtggtaagtccggtcattttattgctaaatgtccattatctagtgatagtgacaggggcgacgacaagaagggagagaggaaggagaagaagagctccaccgactcctccttcgacgaggatgtcgccaacatcgccgttaacaagggtcttctcttccccaacgttggccacaagtgcctcatggcaaaggacggcaaaaggaagaatgtaaaatctagagcctctatcaaatatacaacatctagtgatgagggtagctctagtgaagatgaggatgatttacttactctttttgccaaccttaacatgcaacaaaaggaaaaactaaatgaattgataggtgtcattcatgagaaggatgaactcttggatagccaagaggaattccttattaaggaaaataaaaaacatgttaaggtaaaaaatgcttatgctcaggaagtagaaaaatgtgaaaatttgactaatgagcttagcatttgtcatgacactgtttccaaccttagaaatgaaaatgctagtttaattgctaaggtggaaaaatcaaatgtttgcaatgattcaattatcaatcttagaaatgaaaatgctaatttaattgtaaagattgataaattgaatgaatctctttctagccttaagaatgaaaatgatagcttaattttaaaggctaaagatttgattgtttgcaatgattccatttcctgtcttagagataaaaatgtcatgctaaaatctaagatagatgaattaaaatcttgcaaaccctctacatccactgttgatcatgtttctatttgcatgagatgtagagatattaatgttgatgctattcatgatcatctagccttaattaaagaacaaaatgatcacatagctcaactaactgctaaaattaatgagcataagatagagaatgaaaattttaaatttgctagaagcatgctctataatgggagacgccctggcatcaatgatggcattggtttccaacagggaagcaatgtcaaacttaatgtccctaaaagattgtctaattttgttaagggcaaggctcccatggctcaggataacaagggttacattttatatcctgctggttatcctgagcacaagattaggagaattcatgctaggaagtctcattctgtttcccatcatgcttttatgtacaagaatgaggcatcaatctctaggcattctacccatgttaaaatgcctaaaaagaaaactcctactgcatcaaatgaacctaatgtttcattcaaaactcttgatgctttatatgtgcttactaacaaatcaggcaaagtagttgccaaatatgttgggggcaaacacaagggctccaagacttgtgtttgggtacccaaggtttatgcatccgggggctcaagttggattattgatagcggatgcacaaaccacatgactggggagaaaaggatgttctcctgctacgagaaaaacgatgatccccaaatagctatcacattcggggatggaaatcaaggtttggaaaaatctcaaacccaagagaccttaaaaggattcttcagacgagctcaaaatgagttcggattaaggataaaaaagataagaagcgacaacgagacggagttcaagaactcacaaatagaaggctttcttgaggaggagggcatcaagcatgagttctcttctccctacacaccccaacaaaatggtgtagtggagaggaagaatagaactctactagacatggcaaggaccatgcttgatgagtacaagtctccagaccggttttgggctgaggcgattaacaccgcctgctactccatcaaccggctctacctttaccgaatcctcaagaagacatcttatgaactcctcaccggtaaaaagcctaatgtttcatattttagagtctttgatagcaaatgttttattcttattaaaagaggtagaaaatctaaatttgctcctaaggttgtagaaggctttttactaggatatgattcaaacacaagggcatatagagtcttcaacaaatccactagattagttgaggtttcttgtgacattgtgtttgatgagactaatggctcccaagtggagcaagttgatcttgatgaattagatgatgaagaggctctgtgcgttgcgctaaggaacatgtccattgggggaatgtgtgtcctaaggaatccgaagagcctccacaagcgcaagatcaaccgtcatcttccatgcaagcatctccaccaacccaagatgaggatcaagctcaagacaatgaagaagaagatcaagaagatgagtcacctcaagaggagggcaatgatcaaggggggagatgacaatgatcaagacaaggaagatgatcaagaagtacagggtccaagaccgccacacccaagagtccaccaagtgattcaaagagatcaccccgtgaactccatcctcggcgatattcataaggggccatacatggtggaggatgcactaagagattcagattgggtgttggcaatgcaagaagagctcaacaacttcataaggaatgagtgggtattccgcaacaagcaagatgagcatggtgtggtgataaggaacaaagcccaacttgtggccaagggatattcacaagtcgaaggtttggatttcggtgaaacctatgcactcgtagctaggcttgagtcaattcatatattacttgcctatgctacttaccatggctttaagctctatcaaatggacgtgaaaagtgccttcctcaatggaccaatcaaggaagaggtctatgttgagcaacctcccggctttgaagatagtgagtaccctaaccatgtctataaactctcaaaggcattttatgggctcaagcaagccccaagagcatgccaaaccaagtacattcaagacttacttaccaagtttggaatgaaggatgccaagcccatcaagacacccatgggaacaaatgggcatctcgacctcgacacgggaggttattcagatgctgattgggcagggtgtaaaattgatagaaagagcacatcagggacttgtcagttcttgggaagatccctggtgtcttgggcttcaaagaaacaaaattcagtagctctttctaccgctgaagccgagtatattgtcgcatgtcattgttgcgcgcaattgctttggatgaggcaaacccttagggactatggctacaaatttagcaaagtccctctcctatgtgataatgagagtgcaatccgcatggcggataatcccattgaacacaaccgcactaagcacatagccattcggtatcactttttgagggatcaccaacaaaggggggatatcgagattgcttatgttagcaccaaagaacaattagccgatatctttaccaaaccattagatgagaaaatctttaccaaacttaggaatgagctaaacaatcttgattctcggaactttgattga

SEQ ID NO: 129546 - DNA, 900 bp, Zea mays
  unsure (1)..(900): unsure at all n locations
  Clone ID: MRT4577_49619C.1
gcacgagttttccccctttctcgcttctcctcgtggttcctcaagtcccgctgctgccgccctctccttctcgtcgcgctccgtgaccgcctcctctccttccactacagatgcctcctcatcggctcaccacccaggtttacccaccttgcagatccagtggcgattccattcctctccgtgtggacgcaaggactcagtgaaccacttccagatactcgctgcttctcccgtgcccatggctacaccacttatagcaggacttgcagttgcagcagctgcccttgccggtagatatagcatccaagcttggaatgcttataaggcccggcccgtagttccaaggatgcgcaaattctatgaaggtggtttccaacctacgatgacacgaagggaagctgctttaatccttggtgtcagggaaactgccagtgcagagaaggtcaaagaagcacacaagagagtgatggtggccaatcatccagatgcgggtggaagtcattaccttgcttcaaagattaacgaggcaaaggatgtaatgacagggaaaacaaaagggggtgggtctgccttttgatcggtacacggacaacgtgttcttccactgaaagagcaattttgtgtctccagactcgcattagaagatatgccgaaatctttgtgtgttttatgaaaatttgtggacaaaaaaaaaagtagtggacctttatggagcaggcaattcgttgcttagtaaagctcggctcagttgtgcttgtgcccgaatcaattggacattgtttgctaattgagtccccttggtcctttgtttttccttttttttcattgatatcctgaaattcacaacacaaagtatcatgaactgcnctttattgataaatnctgtatctggtttgacct

SEQ ID NO: 129547 - DNA, 316 bp, Zea mays
  unsure (1)..(316): unsure at all n locations
  Clone ID: MRT4577_4961C.1
cgagcacaatttactaggggaagcaaaaaccgacgaaaaatggtgactatgtttttacnnaacacaaaaagttgaggagacaattttcttatatttctgaacccaatgtaacaactgaccatatctaatgaattaaaaccaaacaaaacagtaaaaaaaactggggaagaaacacaatgtctgttatcgatcaagtgtgaagcattttaaatgaatcaaagcctagaactgtacactctatataccttcatcatttagccccgaacgcatatacttctgggaaataattcaattttgcccacatattagtaataag

SEQ ID NO: 129548 - DNA, 4338 bp, Zea mays
  Clone ID: MRT4577_49620C.1
atgtacaaccggctcaagactttggtgaaccaagtgcgcaacctcgggagtaagaaatgggatgaccatgagatggttaaggttattctaatatccctcgtttttcttaaccctacgcaagttcaattaattcgaggaaatcctagatatacactaatgtctcccaaggaggtaattgggaattttgtgagctttgaattgatgatcaaaggctcaaggaagatcaacgagcttgacggcccctccatgttcgaagcacaaccggtcatattcaaagcaacagaggagaagaaggaggagtctacatcaagtagacaaccaatcgacgcctcaaagctcgacaatgaggagatggcgctcatcatcaagagcttccgccaaatcctcaagcaaaggagggggaaggactacaaatcccgctccaagaaagtgtgctacaaatgtggtaagtccggtcattttattgcaaaatgtccattatctagtgatagtgacaggggcgacgacaagaaggggagaagaaaggagaagaagagatactacaagaagaagggcggcgatgcccatatttgccgggaatgggactccgacgagagctccaccgactcctcctccgacgaggatgccgcaaacatcgccgtcaccaagggtattctctttcccaatgtcggccacaagtgcctcatggcaaaggacggcaaaaggaagaaggtaaaatcaagatcctccactaaatatgaaacctctagtgatgaggataatgctagtgatgaggaggataatttgcgtactctttttgccaacctaaacatgcaacaaaaagaaaaactaaataaattaattagtgatattcatgagaaggatgatctcttggactctcaagaggacttcctaattaaagaaaataagaaacatgttaaggttaaaaatgcttatgctctagaagtagaaaaatgtgaaaaactatctagtgagctaagcacttgccatgatgttattaccaaccttagaaatgagaatgcaaatttgattgctaaggttgattcaaatgtttgtgatgcttcaattcccaatcttacaaatgataatgttgatttgcttgctaagattgaagaattgaatatctctcttgctagccttaggattaaaaatgaaaaattgcttgctaaggctaaagaattagatgtttgcaatgcttccacttctaaccttagaagtgaaaatgatattttacatgctaagattgttgaactaaaaacttgcaaaccctctacatctaccgttgagcatgtttctatttgcactagatgtagagatgttgatattgatgctattcgtgatcacatggtcttaattaagcaacaaaatgatcatatagcaaaattagatgctaaaattgccgagcatgaacttgaaaatgaaaaatttaaatttgctcgtagtatgctttatagtgggagacgccctggcatcaaggatggcattggcttccaaaagggggacaatgtcaaaattaatgcccctcctaaaagattgtccaattttgttaagggcaaggctcccatgcctcaggataacgagggttacattttgtaccctgccggttatcctgaaagcaaaattaggagaattcactctaggaagtctcactctagccctaatcatgcttttatgtataagggtgagacatctagctctaggcaatcaacccgtgctaaattgcttagaaataaaaatcctattgcatcaaatgatcataatatttcttttaaagtttttgatgcatcctatgttttaactaacaaatctggcaaggtttatgcatccgggggctcaagttggatcattgatagcgggtgcacaaaccacatgacaggggagaagaagatgttctcctcctacgagaaaaaccatgatccccaaagagctatcacattcggggatggaaatcaagattctttagattacaacttgctttcagtttcgcaattatgtaaaatgggctacaactgtctttttacggacataggtgtcactgtctttagaagaagtgatgattcaatagcatttaagagagtgttagagggtcagctatacttagtagattttgatagagctgaactcgacacttgcttaattgctaagactaacatgggttggctctggcatcgccgactagcacatgttggaatgaagaatcttcacaaacttctaaagggagaacacattttgggactaacaaatgttcattttgagaaagacaggatttgtagcgcatgtcaggcagggaagcaagttggagttcatcatccacacaagaacatcatgacaactgacaggccgcttgagctcctacacatggacctattcggcccgattgcttacataagcatcggcgggagtaagtactgtctagttattgtggatgattattctcgcttcacttgggtgttatttttgcaggaaaaatcccatacccaagaaaccttaaaaggattcttaagacgggctcaaaatgagttcggcttaaggatcaagaaaattagaagcgacaacgggacggagttcaagaactcacaaatcgaaggcttccttgaggaggagggcatcaagcatgagttctcttctccctacacgccacaacaaaatggtgtagtggagaggaagaatagaactctattggacatggcaagaaccgtgcttaacgagtacaagacttcggatcggttttgggccgaggcggtcaacaccgcttgctacgccatcaaccggttgtatctacaccgaatcctcaagaagacatcatacgaactcctaaccagtaaaaagcccaatatttcatattttagagtctttggtagcaaatgctttattcttgttaaaagaggtagaaaatctaaatttgctcctaagactgtagaaggctttttactaggatatgattcaaacacaagggcatatagagtctttaacaagtcttctggacaagttgaagtttcttgtgacgttgtgtttgatgagactaacggctctcaagtagagcaagttgatcttgatgagataggtgatcaagaggctccgtgcatcgcactaaggaacatgtccaatggggatgtgtgtcctaaggaatccaaagagcctccaaatgcacaagatcaaccatcctcctccacgcaagcatctccaccaactcaagatgaggataaggctcaaaatgatgacggagaagatcaagagattgagccacctcaagatgacgagaatgatcaagggggagatgcaaatgatcaagacaaggaggatgaagttccaaggccgccacacccaagagtccaccaagcaattcaacgagatcaccccgtcgacaccattatcggcgacattcacaagggggtaaccactagatctcgtgttgcacatttttgtgagcattactcttttgtttcctctattgagccacacagggtagaggaagcactacaagattcggattgggtggtggcgatgcaagaggagctcaacaacttcactaggaatgaggtatggcatttggttccacgtcctaatcaaaatgttgtaggaaccaagtgggttttccgcaacaagcaagatgagcatggtgtggtgacaaggaacaaagcccgacttgtggccaagggatattcacaagtcgaaggtttggatttcggtgaaacctatgcacccgtagctaggcttgagtcaattcgtatattacttgcctatgctacttaccatggctttaagctttatcaaatggacgtgaaaagtgccttcctcaatggaccaatcaaggaagaggtctatgttgagcaacctcccagctttgaagatagtgagtatcctaaccatgtgtataaactctctaaggcgctttatgggctcaagcaagctccaagagcatggtctactaacgaatctacatgtgaagaatttagtaggatcatgacacagaaattcgagatgtcaatgatgggggagttgaagtacttcttgggatttcaagtgaagcaactccaagaggccaccttcattcgccaaacaaagtatattcaagacattctaaacaagtttgggatgaaggatgccaagcccatcaagacacccatgggaaccaatgggcatctcgacctcgacacgggaggtaaatccgtcgatcaaaagaaagagcacatcggggacttgccagttcttgggaagatccttggtgtcttgggcttcaaagaagcaaaattctgtagctctttctaccgccgaagccgagtatattgccgcatgccattgttgcgtgcaactactttggatgaggcaaacccttag

SEQ ID NO: 129549 - DNA, 2079 bp, Zea mays
  Clone ID: MRT4577_49621C.1
atggcatattcttgcgccttgtggactgctgcttccgtggtcgctttccttgtcatccgcgtagcagaggcgaggtacggcggccctgggcagtggaggggcaggtgcccctggcgacctcagcacccgcaaacgcgaggtcacggcggccctcgcgcaaatctctcacgagaccacaggcgggtgggcgacggcgccggatggccagataaatctcaaacccaagagaccttaaagggattcttgaaacgggctcaaaatgagttcgtcttaaggataaaaaagattagaagcgacaatgggatggagttcaagaactctcaaattgaaggctttcttgaggacgagggcatcaagcatgagttctcttctccctactcaccacaacaaaatggtgtagtggagaggaaaaatagaactttacttgacatggcgaggaccatgcttgatgagtacaagacttcggaccggttttgggcagaagcaatcaacaccacttgctacgccatcaaccgactctaccttcaccgaatcctcaagaagacatcttatgaactcctcaccggtaaaaaacccaatgtttcatattttagagtctttggtagcaaatgttttattcttgttaaaagaggtagaaaatctaaatttgctcctaaggctgtagaaggctttttacttggttacgattcaaacacaagggcatatagagtctttaacaagtccacgatcaagggggagatgccaatgatcaagacaaggaagaaaattaggccatacagggtggaagacgcattaagggattcggattgggtgttggcaatgcaagaggaactcaacaacttcacgaggaatgatgtatggcatcttgttccatgtcctaaccaaaatgttgtaggaaccaagtgggtcttttgcaacaagcaagatgagaatggtgtggtgacaaggaacaaagcccgacttgtggccaagggatactcacaagtcgaaggtttggatttcgatgaaacctatgcacccatagctaggcttgagtcaattcgcatattacttgcctatgctacttaccatggctttaatctttaccaaatggacgtgaaaagtgccttcctcaatggaccaatcaaggaagaggtctatgttgagcaacctcctggctttgaagatagtgagtaccctaaccatgtgtataaactctctaaggcgctttatgggcttaagcaaaccccaagagcatggtatgaatgcctaagagattttcttatcactaatggcttcaaagtcggcaaatacgatcctactctctttactaaaactattgcaaatgatttgcttgtatgccaaatttatgttgatgatatcatatttgggtctactaacaaatctacttgtgaagagtttagtaggattatgattcaaaaatttgagatgtctatgatgggggagttgaagtattttctaggatttcaagtgaagcaactccaagagggcaccttcatcagccaaactaagtacattcaagacatactcaccaagtttggaatgaaggatgccaagcccatcaagacacccatgggaataaatgggcatctcgacctcgacacgggaggttattcagatgctgattgggcagggtgtaaaattgatagaaagagcacatcagggatttgtcagttcttgggaagatctctggtgtcttggccttcaaagaaacaaaattcagtagctctttctaccgtcgaagccgagtacattgccgcaggacattgttgcgcgcaattgctttggatgaggcaaacccttagggactatggctacaagttaaccaaagtccctctcctatgtgataatgagagtgcaatccgcatggcggataatcctgttgagcacaaccgcactaagcacatagccattcagtatcactttttgagggatcaccaacaaaggggggatatcgagcatgcttatgttagtaccaaagaacaattagccgatatctttaccaaaccactagatgagaaaacctttaccaaacttaggaatgagctaaacattcttgattctaggaattttgattga

SEQ ID NO: 129550 - DNA, 659 bp, Zea mays
  Clone ID: MRT4577_49622C.1
cattgggtacctcgaggccggccgggacgcccgtctctcccttccccgccagttttgatcaacccgcacacctcccgctctctagggttccacggtcccacctgtgtcatcacctctcctatccaatataccacctcatcgttgtctcacacgttccttcccaactccacagtgtagcctcttcgcgacatgatctagatccaatttgttcatcgtgggtctggtgaaggaaggcatcaacatggaggaggaatacttggagatcggcatatcagtaatatttgagacatttcggctaattcgggtagttcatgtaatgggtaacattacctgaactacccaaaccaaatctgggtttctagaattgctatccaaaattatgatcgggtaattcgggttcaggtagtttggatctgggttggggtagtttgggtttgagatttggataccgggtattttgcctacccctctttgaattttataaatgtatggtattagtatatatcactatagattctcctagcaataaatcaactcactatcacatgtagattatcctaacaatacatcaactcactgttacaaggcttttgttgaaccatactacattaatgcaacagtatgcatttatttacaaaaaaaaaaaaaaaaaagcggcc

SEQ ID NO: 129551 - DNA, 1100 bp, Zea mays
  Clone ID: MRT4577_49623C.1
ttggaccagaggatgtgcacctgagagccgtcaccaaggccgccgccgctttcggcggccctcgaacgcaccctgttcctatcatcacacgaaccaccatttataaatgcaagaacttctcggtacggggatacgatacgacgacgatccagctgtgaaacgcatgcgttaagttgctagcgtgtgatgtacgtacgatctggctgcaggtcgtggtgttcctgctgcccccaggcgcgaccatccctctgcacaaccacccggggatgacggtgttcagcaagcttctcctcggctcgctccgcgtcacgtcatacgactgggccgaggccgaccaacgtcccgtcgccgtcggcggcgatcgcccactgctgaggctggcgaagctggtgctggacgccgacctgagcgcgccgtgcgacgccctggtgctgttcccggagtccggcggcaacatgcacaggttcgccgccgccacggcgtgcgcggtcctcgacgtcctcggcccgccctactccggcgaccgggactgcacctactaccaggacttgccataccgccgtcatatcgacgatacagatgaggccgccggggatgaggagcagaagccgcgtctggggtggctgctggagacgcgcaagcccaaggaactgcacatgtacgaggtgccgtacaggggccctccgatcctgtggaagagacggcctgcatttgactcttggcggcggcagcagcagcagcacaagggacagtgagacatatagcgagtgtatgcagcatgtgcctccgtatgtacgctagctgttggtgggaggacgacgtgtgcaaattgttgagaactacgttaccctggatcaccagattcgtttcattcctcccgtcagccgtagaggcgcgagaagttgtagaagacccgtctcccttcccagaagcacgacaaaggaacacacgagacacatgatatagggttgggggcttggggctctggcctctttctcctctctgtcatatgaaggcgtgtacaagttccttatatagagatgtgggacccctcaggggcaaagtcggtatttggccacataaccctaactagggttact

SEQ ID NO: 129552 - DNA, 5688 bp, Zea mays
  Clone ID: MRT4577_49624C.1
atgtcgggagatcacgccaagaaggagatggagaccggcgaaaagcccactacaagccacgggagcacttcatcggaagagtcccgcaccaaaaggagggagaagaagaagagctcctccaacaaagggaaggagaagaaatcttcttctcaccacaaagagaagaaggaaagatcttcctcccacaagccgcaccggagtggggacaagcaaaagaggatgaggaaagtagtctactacgagaccgacacttcatcaacatctacctccgactccgatgcgccctccataacttctaaacgccaagagcgtaagaagtttagtaagatccccctacactatcctcgcatttctaaacatgcacctttactttccgtcccattaggcaaaccaccaacttttgatggtgaagattatgctatgtggagtgatttaatgcgatttcatctaacctcattccacaaaagtatatgggatgttgttgagtttggtgcacaggtaccgtccgtaggggataaggattatgatgaggatgaggtggcccaaatcgagcacttcaactctcaagcaacaacgatactccttgcctctttaagtagagaggagtataacaaagtacaagggttgaagagtgccaaggaggtttgggatgtgctcaaaaccgcacacgagggagacgagctcaccaagatcaccaagcgggaaacgatcgagggggagctcggtcggttccggcttcgcaaaggggaagagccacaacacatgtacaaccggctcaagactttggtgaaccaagtgcgcaacctcgggagcgtaaagtgggatgaccatgaaatggttaaggttattctaagatctcttattttccttaaccctactcaagttcaattaattcgtggaaatcctagatatactaaaatgacccccgaggaagtaatcgggcattttgtaagttttgagtgcatgatcgagggctcgaggaagatcaacgagcttgatgatccctccacatccgaagctcaacccgtcgcattcaaggcgacggaggacaagaaggaggagtctacaccaagtcgacaaccaatagacgcctccaagctcgacaatgaggaaatggcgctcgtcatcaagagcttccgccaaatcctcaagcaaaggagagggaaagactacaaatcccgctccaagaaggtttgctacaagtgtggtaagcccggtcattttattgctaaatgtcccatatctagtgacagtgaccgaggcgacgacaagaagggaagaagaaaggagaagaagaggtactacaagaagaagggcggcgatgcccatgtttgtcgcgagtgggactccgacgaaagctcaagcgactcctccgacgacgaggacgccgccaacatcgccgtcaccaagggacttctcttccccaacgtcggccacaagtgcctcatggcaaaggacggcaaaaggaagaaggtaaaatcaagatcctccactaaatatgaaacctctagtgatgaaaacgctagtgatgaggaggataacttgcgtactctttttgccaaccttaacatagctcaaaaggaaaaattgaatgaattagttagtgctattcatgaaaaggatgaccttttggattcccaagaggacctccttattaaggaaaataagaagcatgttaaggttaaaaatgcttatgctctagaaattgagaaatgtgaaaaattatctagtgagctaagcacttgccgtgagatgattgacaaccttaggaatgaaaatgctagtttaaatactaaggttaattctcatgtttgcaatgtttcaacttcaaatcctaaagataataatgatgatttgcttgctaggattgaagaattgaacatatctcttgctagccttagaatagaaaatgaaaatttaattgctaaggctaaagattttgatgtttgcaaagttgcaatttccgatcttagagataaaaatgatattcttcatgctaagattgttgaacttaattcttgcaaaccctctacatctattgttgagcatgtatctatttgtactagatgtagagatgttgatattaatgctattcatgatcatatggctttaattaaacaacaaaacgatcatatagcaaaactagatgctaaaattgccgagcacaacttagaaaatgagaaatttaaatttgctcgtagcatgctttataatgggagacgcccgggcatcaaggatggcattggcttccaaaagggagacaatgtcaaaaataatgcccctcctaaaagattgtccaactttgttaagggcaaggctcccatgcctcaggataacgagggttacattttgtaccctgccggttatcctgagagcaaaattaggagaattcattctaggaagtctcactctggccctaatcatgcttttatgtataagggtgagacatctagctctaggcaaccaacctatgctaagttgcctagaaagaaaattcctaatgcatcaaatgatcataacatttcattcaaaacttttgatgcatcttatgttttgactaacaaatccggcaaggtttatgcatccgggggctcaagttggatactcgacagcgggtgcacaaaccacatgacaggggagaagaagatgttctcctcatatgagaaaaaccaagatccccaaagagcgatcacattcggggatggaaatcaaggtttggtcaaaggtgtcactgtctttagaagaagtgatgattcaatagcatttaagggagtgttagagggtcagctatacttggtagtttttgatagagctgaactcgacacttgcttaattgctaagactaacatgggttggctctggcaccgccgactagcccatgttggaatgaagaatcttcataagcttctaaagggagagcacattttaggactaaccaatgttcattttgagaaagacaggatttgtagcgcatgccaagcaggaaagcaagttggctctcatcatccacataagaacataatgacgaccgacaggccactggagctcctacacatggatctattcggcccgatcgcttgcataagcatcggcgggagtaagtactatctagttattgtggatgattattctcgcttcacttgggtattctttttgcaggaaaaatctcaaacccaagagaccttaaagggattcttgagacgggctcaaaatgagttcggcttaaggatcaagaaaataagaagcgacaacgggacggagttcaagaactctcaaattgaaggcttccttgaggaggagggcatcaagcatgagttctcttctccctacactccacaacaaaatggtgtagtggagaggaagaatcgaactctattggacatggcaagaaccatgcttgatgagtacaagacaccggaccggttttgggccgaagcggtcaacaccgcctgctacgccatcaaccggttatatcttcaccgaatcctcaagaagacatcatatgaactcctaaccggtaaaaagcccaacatttcatactttagagtttttggtagcaaatgctttattcttgttaaacggggtagaaaatctaaatttgctcctaaaactgtagaaggctttttacttggttatgactcaaacacaagggcatatagagtctttaacaagtcctcaggactagttgaagtttcttgtgacgttgtgtttgatgagactaacggctctcaagtagagcaagttgatcttgatgagataggtgaaaaacaggctccatgcatagcgctaaggaacatgtccattggggatgtgtgtcctaaggaatccgaagagcctccacatacacaagatcaaccatcctcctccacgctagcatctccaccaactcaaaatgagaatgaagctcaagttgatgaagaagaagatcaatcaaatgagccacctcaagatgatggcaatgatcaagggggagatgcaaataatcaagaaaaggaggataagcaagaaccaaggccgccacacccaagagtccaccaagcaatccaacgagatcaccccgtcgacaccatcctcggcgacattcataagggggtaactacaagatctcgggttgcacatttttgtgaacattactcgtttgtttcctctattgagccacacaggatagaggaagcactccaagattcggattgggtggtggcaatgcaagaggagctcaacaacttcactagaaatgaggtatggcatttagtcccacgtcctaatcaaaatgttgtaggaaccaaatgggtcttccgcaacaagcaagacgagcatggtgtggtgacaaggaacaaagctcgacttgtggccaagggatactcccaagtcgaaggtttggatttcggtgaaacctatgcacccgtagctaggcttgagtcaattcgcatattattggcctatgctacttaccatggctttaagctttatcaaatggacgtgaaaagtgcctttctcaatggaccaatcaaggaagaggtctatgttgagcaacctcccggctttgaagacagtgagtatcctaaccatgtttataagctctctaaggcgctttatgggctcaagcaagccccaagagcatggtatgaatgccttagagatttccttattgataatggcttcaaagtcggtaaagccgatcctacactctttactaaaactcttgaaaatgacttgtttgtatgccaaatttatgttgatgatattatatttgggtctactaacgagtctacttgtgaagagtttagtaggattatgacacagaaattcgagatgtctatgatgggggagttgaagtatttcttaggattccaagtgaagcaactccaagagggcaccttcattagccaaacgaagtatactcaagacattctaaacaagtttgggatgaaggatgccaagcccatcaaaacacccatgggaaccaatgggcatctcgacctcgacacgggaggtaagtccgtagatcaaaaggtataccggtcgatgataggttctttactctacttatgtgcatctcgaccggatattatgctttccgtatgcatgtgtgcaagattccaagccgaccctaaggaagctcaccttacggccgtgaaacgaatcttgagatatttggcttatactcctaagtttgggctttggtatcctaggggatccacatttgatttgattggttattcggatgccgattgggcggggtgcaaaatcaataggaagagcacatcggggacttgccagttcttgggaagatccttggtgtcttgggcttcaaagaagcaaaattcggttgctctttccaccgccgaagccgagtacattgccgcaggccattgttgcgcgcaattgctttggatgaggcaaaccctgcgggactacggttacaaattgaccaaagttcccttgctatgtgataatgagagtgcaatcaaaatggccgacaatcccgtcgagcatagccgcactaaacacatagccatccggtatcattttcttagggatcaccagcaaaagggagatatcgagatttcttacattaacactaaagatcaattagccgatatctttaccaagcctcttgatgaacaatcttttaacaaacttaggcatgagctcaatattcttgattctagaaatttcttttgctag

SEQ ID NO: 129553 - DNA, 656 bp, Zea mays
  Clone ID: MRT4577_49625C.1
gcaagatggaggagccatgtgctcaggatgctgaactgagtaatcagagggaaccatcatctgatgcaactgctatggagattgaggcagtggctctggaacaggacagcagaatcatatgcaaaaacatggaggcaacaacagtggaaggcagccacacactggatagtggactaagttccgatctagccaaggttaatgaaactcatgctgcacgggaaattaaaaaccaggaagttttggatgtggacatgaaagtagcaatgagtgtttgtggtgaatatcaaattaactcaattggtatggaggatgtcaattctaccaaaggatcacagaaccaagaatgtttggaccagaaagaagaccatataatggaggaaagagtggagtgtgaagtaagagaaggaagtggagtatcctatgaagaggcatgtgagctcggtggtggtagagtgaaagcctctggagttgcagtggatgttagtggtccagtgctaaacaaggaggcctgcaacacagaggagttgcaggcaagggaggataagaagcgtcatggagttgggcatgtgaatgagaagagggttttggaagaaactagtatgattgatactggtgaattgaaatctgattcgactgttatggagaatagcatggct

SEQ ID NO: 129554 - DNA, 654 bp, Zea mays
  Clone ID: MRT4577_49626C.1
gtccggaattcccgcgtcgaccacgcgtccgcccaagacgcagcagccgctgggccatctctccctggcgcccaactacgccctcaagaacctcatcatgcaatggtgcgacaagaacaaggtggagatccactccggcgacccgccgccggagccacccgaggaccccaaggtggtcatccccacgctggtcaaggacctctcctcgcccaacctcgacgtgcagcgcaaggccgtcaagaagatccggacgctgtccaaggagaaccccgagaacaggctgctcgtcaccgacaacgccggcatcccggcgctcatcggcctcctcccttaccccgacaagaagatgcaggagaacaccgtcacctcgctgctcaacctctccatcgacgaggccaacaagctcctcatcgccaggggcggggccatccccttgatcatcgacgtgctcaggaacggcagcgtggaggggcaggagaactccgcggcggcgctcttcagcctgtccatggtggacgagaacaaggtcgccattgggaccctgggaggcatacctccgctggtggacctcctgcagaacggcaccgtcagaggcaagaaggacgcctccacggccattttcaacctcatgctcaacaatggcaacaagctgag

SEQ ID NO: 129555 - DNA, 1446 bp, Zea mays
  Clone ID: MRT4577_49627C.1
ttggactgactctcgctgagcacgcgggcgaagaaagggcagcatagcagctcactcccaacggaagcaagagggtccgctcactcactcgccattcggcagaggcgtgactgactgaaactgagcactagggctttgagagtgcagcagaggagggcgaaccatgggcgaggaggagaaggcgaaggaggcggcgcccccggccgacaaagtaaaggaggcggaggagaagaagggcgaggggggaggaggggaggagaagaagaacgaggccccgtctcttccaccgccgccgccggaggaggtggtcatgcgggtcttcatgcactgcgagggttgtgcgcgcaaggtcaagaagattctcaagggatttgatggtgttgaagatgttattgcagatacgaaggcacacaaggtggtcgttaaggggaaaaaggcagctgctgacccaatgaaggtggtggaacgggtgcagaagaagacaggccgcaaggtagagcttctctcaccaatgccaccaccgaaagaagagaagaaggaagaggagaaaaaggaagaacctgagccaccaaaaaccgagaagaaagaggaggcaacggtgctcgctgtggtgctcaaggtgcatatgcattgtgaggcttgcacacaagtgatcaagaagagaatcctcaagatgaaaggcgtgcaatctgtagaggcagacctcaaggcttctcaagtcactgtgaagggtgtgttcgaggaggccaagctgtctgattatgtgtataggcgcactggcaagcacgctgctatcgtcaagtctgagccggttgcagctgagaatgttgatgatggaaatgccaaggatgacaagaaggcagccgaaggtggggaggagaagaaggatgatggcaaggaggaaaagaaagatgaagacaagaaagaagcggataaacagaaggatgatggcaatgctggtgatgaagggaaagacaaagaccctggcgccgttgctaacatgtatatgcactacccgaggtccaatcatctgagcgaatacggatatgcctaccagtacccacctcagctcttcagcgacgagaacccgaatgcctgttctctgatgtgagaaagccagaaccaagtgaccttaagcgcgaaaataagaggggattgagttatcccctgattttggaggttcaggaagtttagaacttttcttttctatttctaaggttgaactttctgtctggtacaaagtgaactctgggctggtttgtggacatcatattgtgtatgctactggttagtaggattttgtgttgcacctttcacctttggcttttatttttgtacaaagatgtattatatatgctagttttgaaatagcttgctgctagtactctgtagtctgttgtccggaatagacggagctttctcagttaacattgccagtgatgtcgg

SEQ ID NO: 129556 - DNA, 190 bp, Zea mays
  Clone ID: MRT4577_49628C.1
ttctcacataacaaaaatgtaattttatggcttaagcaaatttacccgcccgggtactgctttattattataaagatatatactataacgagcctactacctacctaccgatatgcacgccggcaatgttaataattcgaactactattttttttctggctcttcctacttattccgcgatcaacaaatg

SEQ ID NO: 129557 - DNA, 563 bp, Zea mays
  Clone ID: MRT4577_49629C.1
aaaaaaaaaaaaaatttaaaattaaaaaaaaaaaaaaaaaaaaaaaaaaaaaaaaaaaaaaaaataaaaaggaaaacaaatttaaaaaaaacaaaatttaaaggggggggcttttttataggttccatttttttttgcgcggctttgcgaaattttactttttttttattgacaccaaaattaattttactggccttggttttacaaaatttaatctggtaaaaccttggcgtttttaaacttaatggctttgtacaaaataccctttttcccagttgggttaaaaacaaaaaggcatccacaatttttctttccaaacattttttaaggttaatttggaattgggacccaccttgtttagtcccattaaacccggtgtatttgggggttacttacatcgggacctttacattttccacagcccctaggcccgcacttttgagttttttcctttcttttttcttaacgggtgccggtttttccgtttaagttttaaatgtggggttccttttggggttcaaatttttggttttacggagcctttaccccaaaaaacttttttt

SEQ ID NO: 129558 - DNA, 432 bp, Zea mays
  Clone ID: MRT4577_4962C.1
gacataaaacggagaagctccactgaaattacatactatgcacgccagcttttcatgcatctggggccgagtgattacagcacttcatataccagctcgtgagtaaccactatctactaggactaacagccactatataagtggctccacgccagtggtccactttatcagaggaaactcccgttcctcaagtgttacactacccaatcacatgcatgtcctttagggaggactagcaataaccctggctgcacacggtttatatagcaacaaggaacagcgcaataacctgtgtgctgtccatgcatttcaagctacgtagctggaggtgttccagctatcactaaactgagaacgcaaactgaccctgtagtacaaatggttgtattccatgccttaaaggatggggcttacgctctcagtggccaaggg

SEQ ID NO: 129559 - DNA, 273 bp, Zea mays
  Clone ID: MRT4577_49630C.1
ccggccgggttaccatcggcatgatcaacgtcatcgccatcgccttcgccttcgcgcgcaccgtctacagcgacaacccgcgctggggcaagttcatcggcggcggcttcttcagcttctgggtgctggcgcacctctaccccttcgccaaggggctcatgggccgccgcggcaagacacccaccatcgtcttcgtttggtcgggactcatctccatcaccatctccctgctctgggtcgccatcagcccgccggaggccagcgccggcggcc

SEQ ID NO: 129560 - DNA, 3124 bp, Zea mays
  Clone ID: MRT4577_49631C.1
gggaaagcattggcgtaccaaccggaggcgacgacgatgacgatgactatgcgggtcttccaattcccatcaagagacaataaagcaggagcaggatcattgctaattctcttctgaatttcacacaggttataaaaactcttcaaatgaggctgctgccggattcaccactactgctgtgcgttgtgctcgtcttcactgcgattccatctgagcaagattcttctggtgtgctcggaacaagccaaagccaagcaggtggcagcaacgctcttcccgccgccggttgccctagaagctgtggcaacctcaccttcgactacccattcggcatcggctccaactgttctaggtctcccgccttcagcctcacctgcgacagcaccacgcaaacccccaggctctactttgaggacgacagcatcacggaggtcgttgcttatggaagcacctggttgcagatcagcctttcccaggccattcccatcatgcatggtggtgtcgtcagcacttacaacatgtcgtggaagtcttctggaagcggcttcaccctattctatgcgaacctgaacatcacaggctgcgacttcgatatataccaactgcaggataggcatgcgtcgtccgtgaagctctgcacagtcacctgtcctgatgcagggatcacggacaaggtggccaggcagaactgcaatggaacagggtgttgctccgtcaacttggatgttcttgaagccttccagctacagtttgtcctccgcagccacggcagagctcgacttggcacgcacactagccgaagctccctatgggatagcatcaatgtaacttccaccgatgcagaaatcctgtggagtattgtggatcaaccgacgtgcgccagcgccatggatgacagtgcaaactatgcctgtgtaagtaaccatagcaactgctatgatggcttgggtgggagattagatcttggatatatctgcagatgcgatggtggttataggggcaatccatatgtacccaatggctgctcacgggataaaggatataatcctaaggaacaaaaggagaactgccagcgatcatgcggtaacatcagtgtcccgttcccttttggcttagaagaaggttgcttcgcaagaaggctatttcagctcaactgcacaaatacagcgtcttccagtctccagttcgatgacgaacatcaagtgacacgcatacatatcaatgaggggcttgtggacattaaatacaccccactttacgaacaggagatgtttagggtgtatgtatctaatgaacctggcctgtacattggctctggggaatcgtcctctgtgcaatgggctgttgccaatctgacctgccacgaagcaatgcagaacaagtcgggatatgcatgtgtaagcatcagtagcacatgtttgggtgtcaactcaacagatgattacattggctatcgatgcaaatgtctgcacggatttcaggggaatccatacatacacaatggatgccaagctttaccaattaatggggaaagtacgaaaaagcaaaatcttctattaggtattgtgattgggcttagcagtggcatcgggattttacttctcggcttatgtgcaacagtgcttcttcgcaaatggaaaagggacatcaaaaagcagcaacgaaaaaaatattttcagaaaaataaaggccttctcttggaacaactgatatcatccgatgaaaatgcaagtgaaaaaacaaagattttcactttggaagacctggaaaaggcaacaaacaattttgatcctacacgaatcattggccatggaggccatggcatggtgtataagggtatcttatctgaccagcgtgtggtggcaataaaaaggtctaagaacattgaggaaggtgagatcagtcaattcattaatgaggtagcaattctctctcaaataaatcatagaaatatagtgaagctttttgggtgttgtcttgaaactgaggtcccactgttggtgtatgacttcatttcaaatggatcattgttcgaaattctacattctagttcaagcagtggtttctcattgtcatgggatgactgcttaagaatagctgcagaagctgcaggggctctctattatctacactcagcagcttcagtatcaatcttccatcgagatgtgaagtcctctaacatactactagattcaaactatactgcaaaagtttcagattttggtgcttctagattggttcctattgaccaaactcatgttgtcacaaatatccaaggtacatttgggtacttagacccagagtattaccatactggacagctaaatgataagagtgatgtatatagtttcggtgttgtgcttgtggaactactcctgagaagggagcctatcattacaagtgagacagggtcaaagcagaacttatctaattactttctttgggagatgaagacaaggccaacaaaagagatagtggctactcaggtttgtgaggaagcaaccgaggaagagattaatagcattgcctcgcttgcagagatgtgtttgagactcaacagtggggagagacctactatgaagcaagtcgagatgaatttgcagctcttgagaacaaaacggtcaaattcatgccatgttgttcaagataatgctgaagagatacaaccattgctttgtacaggagctgaatctagatacgagacgttttctattaccttgggtggtagttctaatgcagagtctcaatacagccaaagattcaatagcttggagcacgattttaaatcatctcttgggacgccacactaagggcctctttgaagtgtctgaattccactacaacataaagagcaaaagaagcttttatgaggtggatatttattttcctgcaactgcaagtcctaccaaaatactgtgttgtaaccaggcatgaacctgaacatcttaatgtgatctatctttctatccgcagaatatcatgaacagtcctttactctcttgttttttttctacattattatcatacagaagtatgttgtacttatttccctgcaaattggactcactattatgtattgtttgtaactggattcttgaagttcatacatcagatgtacacatct

SEQ ID NO: 129561 - DNA, 220 bp, Zea mays
  unsure (1)..(220): unsure at all n locations
  Clone ID: MRT4577_49632C.1
cttcggggtctgtagttcattatcacccctcgaccagtagtgtgcaggtgccgcaccangtaacttgtgctgncgctcccgtgcccgtaccccttccnagaaaaataaggatgggntttgccccccncccgtgggcggggcgctctgtttgtntgctccccttntctctctctgggggggggggtggcccccccccccccccgccgccctgntgcggggc

SEQ ID NO: 129562 - DNA, 304 bp, Zea mays
  Clone ID: MRT4577_49633C.1
tcgagcggccgcccgggcaggcttaaaaaaaacaaaagacgaagataacaaaactaaattttttctttggctttttcctttctttgggccaatcttgggggaatttctgaaagtgtccttcaaaggggctttcgtttggagacgtgcctattggggccctagttccccgttttgggattcactttacaattcttttgcccgtgttaattgcgaaaacccttgcgttacccctgttattccccatctaaatcatctccctttacatacctgtttcaatagctggggggctcgcaaagaggtccct

SEQ ID NO: 129563 - DNA, 820 bp, Zea mays
  Clone ID: MRT4577_49634C.1
ttgggaccctcgaggccggccgggaaaatggaattaggtaagcaatccgaattattgggcatcggttgtggacaagtcaaacagagggagggaagggcgacgaagccgcctcctcgtttgtcttggtcgtagtactcgcgccatcagcaccaacccacgccacggcaccctcccccgccccaaccccaacgaacaacgagtggtacatatcagcaccgcccctgcctcgaggttgcgtgttttgttctctgtgagcgtcgtgggtgttgatggcgtcaacggcgtactcgcggccatccaagccgcctgggccggcggccggagacaggagcggaccgcggctggccaaggagctcggcaggatcgagcccaagaagctgggcatcgggctggttgccggctgctgcttcgcgctgctcacctacctctcctttgcccggctgtttgccatctactcgccggttttcgacagctcgtcgtccatggtgttgaagaacatgccgccagcaacgacgacggtgccgggtacagctacaggggcgctgccggtggaggagcagaaagaggttcgtgaccctgaggcggacccgcacatgccgaacttaccggaggtcacagaaaaggatcagcaggaggaggccacggcgacgaagccagccggtggtgccattattacagaggccaagatcacctgcgacgagaacggcgtcgacgagggcttcccgtagcacgggccgccgggttgtgagctagccggcgacatccgtgtcagtcctaaaggagaaaccatgtacttcgttaaccccgtcggggccggccc

SEQ ID NO: 129564 - DNA, 2189 bp, Zea mays
  Clone ID: MRT4577_49635C.1
catctaacaacgtgtataagtaaaaaaaaaaaaaaaaaaaaaaaaaaaaaaaaaaaaaaaaaaaaaaaaaaaaaaaaaaatccaattcattgctcgaggcgggggggcggtaccctcggggtcttggtcgtagtactcgcgccatcagcaccaacccacgccacggcaccctcccccgccccaaccccaacgaacaacgaggtatacaattcatttcccaacagatcaatcatcctctacatgttacagcgactcggcctgccgcgatttttataatgcgccgcggtggccgtcgctagtggtacatatcagcaccgcccctgcctcgaggttgcgtgttttgttctctgtgagcgtcgtgggtgttgatggcgtcaacggcgtactcgcggccatccaagccgcctgggccggcggccggagacaggagcggaccgcggctggccaaggagctcggcaggatcgagcccaagaagctgggcatcgggctggttgccggctgctgcttcgcgctgctcacctacctctcctttgcccggctgtttgccatctactcgccggttttcgacagctcgtcgtccatggtgttgaagaacatgccgccagcaacgacgacggtgccgggtacagctacaggggcgctgccggtggaggagcagaaagaggttcgtgaccctgaggcggacccgcacatgccgaacttaccggaggtcacagaaaaggatcagcaggaggaggccacggcgacgaagccagccggtggtgccattattacagaggccaagatcacctgcgacgagaacggcgtcgacgagggcttcccgtacgcacggccgccggtttgtgagctagccggcgacatccgtgtcagtcctaaggagaaaaccatgtacttcgttaacccgtccggcgccggcccgttcgactccaacggggagaagaagatccgaccgttcgcccgcaaggacgacttcctcctccccggcgtcgtggaggtcacgatcaagtccgtgtcctcggccgcagccgcgccgcggtgcacccgccggcacgacgtcccggtggtggtcttctccgtggccgggtacacggacaacttcttccacgacaacacggacgtgctgatcccgctgttcctcaccacggcgcacccacgcgtccgggtgcagctcctcgtcaccaactacaagccgtggtgggtgcgcaagttcacgcccctgctcaggaagctctccaactacgacgtcatcgacttcggcaaggacgacgaggtgcactgcttccgggcaggccacctcgggatgtaccgcgaccgcgatctcatcatctcccctcaccccacgcgcaacccgcgcaactactccatggttgactacaaccgcttcctccgccgcgccttcaacctgccgcgcgacgcgccggcggtgctcggggaggagaccagcgccaagcctcagatgctcatcatcgagcggaagggcacgcggaagctgctcaacctacccgaggtgtccgcgctgtgcgaggcgctcggcttcgcggtgaccgtggcagaggccgacgctgacgtgcgtgtgttcgcggagaaggtgaacgcggccgacgtgctcctcgcggtgcacggcgccgggctcacgaaccagatcttcctgcccacgggcgccgtgctcgtgcagatcgtgccgtggggcaagatggactggatggccaccaacttctacggccagccggcgcgcgacatgcgcctccggtacgtcgagtactacgtctcggaggaggagacgacgctcaaggacaagtacccaagggaccactacgtgttcaaggacccaatgcacatccacgcgcaggggtggccagcgatcgccgagatcatcatgaagcaggatgtcatggtcaacatgacaaggttcaaacccttcttgctccaggcgctcaacgagttgcaggactagctgcagctggagaagggtgattccctttgtatggctcgatacggacagttcggatagggcgataggccagcacagatgcggtacaggagggcctttcgtttgtttcccttttttatttgtcattttaaatcaactaaaattgatatttttatttgggactatttattaaaaaaaagttgtgcaatttaaaacaaaaaaaaaaaaaaaaaaaaaaaaaaaaaaaaatacaaagac

SEQ ID NO: 129565 - DNA, 401 bp, Zea mays
  unsure (1)..(401): unsure at all n locations
  Clone ID: MRT4577_49636C.1
tttttttttttgaattgaattttgactggtttactgaaaaggttngagnaaagtaacaatgccaanaaagctcgaattgaactcctgaagaaagaggaggatttaactgctgcaagagatgtcctcaataagatgacgcagtggaactctgcactcgtggagaacattaacccttgaatctgtgtgatgacgattcattggcgtcaaaggacatctttgtataggggtgtgttagattggatgacatgtgaatgtgattcatggatcagcctggatgttctgttatgattaagaactgctatgtatcgtgcaatagacacatcgtctgtactttggatgttattatcaggtcccaaacttcattatatccaatatgttacaagacaacagcgtggcttgcg

SEQ ID NO: 129566 - DNA, 1081 bp, Zea mays
  Clone ID: MRT4577_49637C.1
ttgggtacctcgaggccggccggaattgggcatcggttgtggacaagtcaaacagagggagggaagggcgacgaagccgcctcctcgtttgtcttggtcgtagtactcgcgccatcagcaccaacccacgccacggcacactccccccaaccccaacgaacaacgaggtatacaagtcatttcccaacagtcaatcatcctctacatgttacagcgactcggcctgccgcgatttttataatgcgccgcggtggccgtcgctagtggtacatatcagcaccgcccctgcctcgaggttgcgtgttttgttctctgtgagcgtcgtgggtgttgatggcgtcaacggcgtactcgcggccatccaagccgcctgggccggcggccggagacaggagcggaccgcggctggccaaggagctcggcaggatcgagcccaagaagctgggcatcgggctggttgccggctgctgcttcgcgctgctcacctacctctcctttgcccggctgtttgccatctactcgccggttttcgacagctcgtcgtccatggtgttgaagaacatgccgccagcaacgacgacggtgccgggtacagctacaggggcgctgccggtggaggagcagaaagaggttcgtgaccctgaggcggacccgcacatgccgaacttaccggaggtcacagaaaaggatcagcaggaggaggccacggcgacgaagccagaggccaagatcacctgcgacgagaacggcgtcgacgagggcttcccgtacgcacggccgccggtttgtgagctagccggcgacatccgtgtcagtcctaaggagaaaaccatgtacttcgttaacccgtccggcgccggcccgttcgactccaacggggagaagaagatccgaccgttcgcccgcaaggacgacttcctcctccccggcgtcgtggaggtcacgatcaagtccgtgtcctcggccgcagccgcgccgcggtgcacccgccggcacgacgtcccggtggtggtcttctccgtggccgggtacacggacaacttcttccacgacaacacggacgtgctgatccccttgttac

SEQ ID NO: 129567 - DNA, 427 bp, Zea mays
  Clone ID: MRT4577_49638C.1
tccagggccggccggccccgggcttttcctcctcccgaccgccgccgtcgtccatctccctctccccagcacttggcagctcgaccgcaacgccgcctcaccatgcaccatccctaagtaacaaccgcaatgcgcatctgctagcacctccttcaccgagggcgcgcctgtatgcccccgaacgactacaccctcgcccacacacccgcagactcgatgtgcccaaccctccaggccgaccacgctcatgcagacgcctctaagtccaaggagtatgttaggcagaccttctcctggcagtactactcaccggcatctcaccaacgatgtcattgagcacctacgcaactccctgaacctcccgtctgccgatcctgcctgccccgctccacaagtctggccaagccacccgcgctccccatttggc

SEQ ID NO: 129568 - DNA, 147 bp, Zea mays
  Clone ID: MRT4577_49639C.1
ctcagacgcgcgatgagcacagacgacggttacgaatttcagccactacatgaccgcaggaacaggtacgggttcaaacaggggacctagacactcagaagacgaggagccagtacgactggctcaactggcgaacagaacaccctg

SEQ ID NO: 129569 - DNA, 1196 bp, Zea mays
  Clone ID: MRT4577_4963C.1
aagaggctgacaacattgtcgcggcaaggaagcagtgaagctggtaccgataccgtggatctggatttgctatgttttgtactgtggtcgagtgtaaggtcagttcgtaatacaatcaatctgcgtggaacaatttgatatgcttgaatatgctagtgagatcatttcgacaatgaaagttgagaacagaagttacaatgtcaaaaaaaaaaaaaaaaaaaaaaaaaaaatccgctcaggccaatcaacagaagtgacgcgagcacgagcacacatcccctcccttcttcggttattcctcgttgcgtgccctcgccgcagacctctgccatggcggaccagctcaccgacgagcagatcgcggagttcaaggaggccttcagcctcttcgataaggatggcgacggctgcatcactaccaaggagcttggaacggtgatgcgctcccttggccagaaccctaccgaggcagagctgcaggacatgatcaacgaggtcgatgcggatggcaatgggaccatcgacttcccggagttcctgaacctgatggcgaggaagatgaaggacacggactcagaggaggagctcaaggaggccttccgcgtcttcgacaaggaccagaacggtttcatctcggctgccgagctccgccatgtcatgaccaaccttggcgagaagctgaccgacgaggaggtcgacgagatgatccgtgaggccgacgtcgatggcgacggccagatcaactacgaggagtttgtcaaggttatgatggccaagtgaggagcggtccccgtgaaataagtatctatggattgaagcggattatcaggcacacaagctgtactttgtcatgtccctttgagtacgcatcagtgtcatgcaggtggtaatgtcttgtagtggtccgtttaggcggtgtagtcatgggaacgcgacctcagatacctggtttcttttgattgtgatgttatcttgcattattgcacctgtaggatttgttgaagctcatattttccagggttttggatcttttgtgctagtcttgtgtctttgtgtatgcagaggctgagctaggattatggtatgtaagggagccaactaattcatcaatactatatgatgttatcaagcttaagtacttaacaatgttatcaagcttaagtacttaacatggaataaaaattctagttctttat

SEQ ID NO: 129570 - DNA, 986 bp, Zea mays
  Clone ID: MRT4577_49640C.1
gccgggacggacaccccaccccaacgaacacgaggggcctcgttcatttccgggcagatcaaccagcctctacatgttacagcgactcggcctgccgcgatttttataatgcgccgcggtggccgtcgctagtggtacatatcagcaccgcccctgcctcgaggttgcgtgttttgttctctgtgagcgccgtgggtgttgatggcgtcaacggcgtactcgcggccatccaagccgccagggccggcggccggagacaggagcggaccgcggctggccaaggagctcggcaggatcgagcccaagaagctgggcatcgggctggttgccggctgctgcttcgcgctgctcacctacctctcctttgcccggctgtttgccatctactcgccggttttcgacagctcgtcgtccatggtgttgaagaacatgccgccagcaacgacgacggtgccgggtacagctacaggggcgctgccggtggagcaaaaggcccaagtggaggagcagaaagaggttcgtgaccctgaggcggacccgcacatgccaaacttaccggaggtcacagaaaaggatcagcaggaggaggccacggcgacgaagccagccggtggtgccattattacagaggccaagatcacctgcgacgagaacggcgtcgacgagggcttcccgtacgcacggccgccggtttgtgagctagccggcgacatccgtgtcagtcctaaggagaaaaccatgtacttcgttaacccgtccggcgccggcccgttcgactccaacggggagaagaagatccgaccgttcgcccgcaaggacgacttcctcctccccggcgtcgtggaggtcacgatcaagtccgtgtcctcggccgcagccgcgccgcggtgcacccgccggcacgacgtccccggtgggtggtcttctccgtggccgggtacacggacaacttcttccacgacacacggacgtgctgatcccgctgc

SEQ ID NO: 129571 - DNA, 1077 bp, Zea mays
  unsure (1)..(1077): unsure at all n locations
  Clone ID: MRT4577_49641C.1
ctcgcgccatcagcaccaatccacgccacggcaccctcccccgccccaaccccaacgaacaacgaggtatacaattcatttcccaacagatcaatcatcctctacatgttacagcgactcggcctgccgcgatttttataatgcgccgcggtggccgtcgctagccggacatatcagcaccgcccctgcctcgaggttgcgtgttttgttctctgtgagcgtcgtgggtgttgatggcgtcaacggcgtactcgcggccatccaagccgcctgggccggcggccggagacaggagcggaccgcggctggccaaggagctcggcaggatcgagcccaagaagctgggcatcgggctggttgccggctgctgcttcgcgctgctcacctacctctcctttgcccggctgtttgccatctactcgccggttttcggtaaggcctttgaatccgattccctaccaagaattaaaattcgtctcttgcgtgtgcggtgagagttccttcaatgaaccgggccgcagacagctcgtcgtccatggtgttgaagaacatgccgccagcaacgacgacggtgccgggtacagctacaggggcgctgccggtggagcaaaaggcccaagtggaggagcagaaagaggttcgtgaccctgaggcggacccgcacatgccaaacttaccggaggtcacagaaaaggatcagcaggaggaggccacggcgacgaagccagccggtggtgccattattacagaggccaagatcacctgcgacgagaacggcgtccgacgagggcttcccgtacgcacgggcccgccggtttgtgagctagccggcgacatccgtgtcagtcctaaggagaaaaccatgtacttcgttaacccgtccggcgccggcccgttcgactccaacggggagaagaagatccgaccgttcgcccgcaaggacgacttcctcctcccncggcgtcgtggaggtcacgatcaagtccgtgtcctcggcgcancccgcgccgcggtgcgccgccggcacgacgtccccggtggtggtcttctcccgtggcgggtacacggacacttctt

SEQ ID NO: 129572 - DNA, 358 bp, Zea mays
  Clone ID: MRT4577_49642C.1
ggaaggaaactttcttttttttggatcatcgaaaaaataaaaaattatactcttaacttgggagcccgggccctctatttttattcgaacgggcttctcgcaagcatgctcggaagaaagagaaaaccaccggggaggctggacccattgacccgaacaccggttaggcagggaccgctctatcgggtatgagggtttggctttcgatgctccccggacccgggagggcccaccgattaattaccccatcttatgattttgccgctacctaaaccccggattgaaattactacggagaaccgggcctaaacgggcccggtgaaaccataaggcaagcctacgctaaggtaggttgcca

SEQ ID NO: 129573 - DNA, 442 bp, Zea mays
  Clone ID: MRT4577_49643C.1
cgggcagaaaaatacggggggggtcaatagcggggggccaatacaagccaacagatgtatagtcattacaaacctcggggaaggaagtagtccaaggcaaggcaaaatatttagaacaaaacaaccctaacactttggggtcttaagccttaactggggaaaacattaaaaaaaaaaaattttctgaaggaaaaaattaccccggcaggggaacgatgggggccagttttacctcaccgccccttggggttcatgatctgcaaaaaaacggccctgggcgtcaccccatccgagtttatactccaaacgcttggggcgcccatgcttataaaagggggggttggggggggggggcttgactcgaacgaggggtggttcggatcctttttcccgaccataaagggggcgccctggtgtgacatcccggagccaagggttccgc

SEQ ID NO: 129574 - DNA, 366 bp, Zea mays
  Clone ID: MRT4577_49644C.1
atggctctcatcatcaagagctttcgccaaatcctcaagcaaaggaggggggaagactacaagtcccactccaagatggtttgctacaagtgtggtaagcccggtcatttcattgctaaatgtccattatctagtgatagtgacaggggcgacgacaagaagggaaagagaagagaaaagaagagatactacaagaagaagggcggcgatgcccatgtttgccgggagtgggactccaacgagagctccaccgactcctcctccgacaaggacgccgccaacatcgtcgtcaacaaaggcctcctcttccccaacgtcggccacaagtgcctcatggcaaaggatggcaagaagaagaagaaatga

SEQ ID NO: 129575 - DNA, 284 bp, Zea mays
  Clone ID: MRT4577_49645C.1
ctcgatctagacaggtcgcgcgtagcttgccatggctctacggctgctttgggtgagcagacaaatatacgagaagttcctcgcctaatatataagctctctaagagatctcttcttgccgtacgaggtggaaagcgattctgcgaatatccacgtgcatatcaacgcatacaaggataagctcctgcgcatgaggggcgacggcagtcgaatgcgacaatatgacgagcgcgtacgtccatattgcggagatgacagatttacgcataggactacgcctgctt

SEQ ID NO: 129576 - DNA, 648 bp, Zea mays
  Clone ID: MRT4577_49646C.1
atgactcagaaattcgagatgtctatgatgggggagttgaagtacttcttaggttttcaagtgaagcaactccaagagggcaccttccttagccaaacgaagtacactcaagacattctcaccaagtttgggatgaaggatgccaagcccatcaagacacccatgggaaccaatgggcatctcgacctcgacgcgggagggtgtaaaattaatagaaagaccacatcggggacttgccagttcttgggaagatctctggtgtcttgggcttcaaagaagcaaaattccgtcgctctttctaccgccgaagccgagtacattgccgcaggccattgttgcgcgcaactgctttggatgaggcaaacccttagggactacggttacaaattaaccaaagttcctcttctatgtgataatgagagtgcaatccgcatggcggataatcccgttgagcatagccgcaccaaacacgtagccattcggtatcactttctgagggatcaccaacaaaagggggatatcgagatttcttacattaacaccaaagatcaattagccgatatctttaccaagcctcttgatgagcaaacttttaccaaacttaggcatgagctaaatattcttgattctaggaactttgtttgttaa

SEQ ID NO: 129577 - DNA, 373 bp, Zea mays
  Clone ID: MRT4577_49647C.1
ctaacaggttaggtcaaccataccataaatgctgttgcgcgttctttctcaagacggtacatcgtggggattctcgattttgactgcgctacaaaaggaaacccaaagaatgcagggtctgattacgtgcttatacctgaacatggaagagttttttctctggtcatatagggttttcgtgtcatttctaattatgatgctgagtctggcagctttatcttcggactggaatgtgccatttggccttgctccaagcgacttaaaggacatgccgtctctcttcttgtttgcaataatgagaatggtgattggttaacgacacttactaatatgatctagctgtgcactgaagcaattatgcttgaatagaact

SEQ ID NO: 129578 - DNA, 166 bp, Zea mays
  Clone ID: MRT4577_49648C.1
cactaaacccgtcctctgttcccagcacgtttctcatatagccctcagtcactgagcaggattggagaggcacattcccttgggacagaggctacaggttggagctttttttcccctgtcccccaaccccatccccagctctatttcagaacatggcacccaacca

SEQ ID NO: 129579 - DNA, 1677 bp, Zea mays
  Clone ID: MRT4577_49649C.1
gaaaaatcacaaacccaagagactttgaaaggattcttgagacgagctcaaaatgagttcggaagaatcaagaaaattagaagccataatgggacggagttcaagaactcacaaattgaaggatttcttgaggaggagggcatcaagcatgagttctcttctccctacacacctcaacaaaatggtgtagtggaaaggaagaatagaactctagaggatatggctaggaccatgcttgatgaatacaagacattggaccagttttgggccgtggcgattaacaccgcctgctactccatcaatctgttatatcttcaccgaatcctcaagaagacatcatatgaactcctcactggaacatgtccattggggatgtgtgtcctaaggaatccgaagagcctccacaagcacaagatcaaccatcatctttcaatcaagcatctccaccaactcaagatgaggatcaggctcaagaagatgaagatgaagatcaagacgatgagccacctcaagaggaggacaataatcaagggggagatgaagatgatcaagataaagaagatgatcaataaattcgagatcaaagactgccacacccaagagtccaccaagcaattcaacgagatcaccccgtcaactccattcttggtgaaattcataaggggggtagaggatgcattgagagatctggattgggtggtggcaatgcaaggggagctcaacaacttcacaaggaataaggtatggcatttggttccacgtcctaatcaaaatgttgtaggtaccaagtgggtattccgcaacaaggaagacgagcatggtgtggtgacaaggaacaaagcccgacttgtagccaaaggttattcacaagtcgaaggtttcgactttgatgaaacttatgcatccgtagctaggcttgagtcaatttgtatattacttgcctatgctacttaccatggcttcaagcttcatcaaatggacgtgaagagtgccttcctcaatggacctatcaaggaagaggtctatgttgagcaacctcccggctttgaagatagtgagtaccctaacaatgtgtatcaactctcaaaggcgctttatgggctcaagcaagccccaagagcatgccaaactaagtacattcaacacatacttaacaagtttggaatgaaggatgacaaacccatcaagacacccatggaaactaatgggcatctcgacctcgacacgggagggtgtaaaattgatacaaagtgcacatcagggacttgtcagtttctggggagatccctggtgtcatgggcttcaaaggaacaaaactcagtagctctttccaccgccgaagctgagtacattgccgcaggccattgctgtgcgcaattactttggatgaggcaaacccttagtgactatggctacaaattgagcaaagtcactctcctatgtgataatgatagtgcaatctgcatggtggataatcccgttgaacacagccgcactaagcacatatatattcggtatcactttctgagagatcaccagcaaaagggggatatcgaaattgcttatgttaatagccacatccaattagtcgatatcttcaccaagccagtagatgagaaaacctttagcaaacttaggaatgagctaaatatacttgattcttggaattttgattga

SEQ ID NO: 129580 - DNA, 3450 bp, Zea mays
  unsure (1)..(3450): unsure at all n locations
  Clone ID: MRT4577_4964C.1
ccggccgggggaatgtacccgggctcaagcctggacccgtgagtcagtgaccaccacgcgctcgtggctaccggcttcgctcccagatcccgccgcgcgcgcgagccccgaggactgaccatggaggagcccacggagtccaggccagctggcgcggaggatctcgcgaacggcgcgaaagacccggaggggcctccgccggaggttgaggaggaggaagtggaggagccgccacgatcggcgacggcgaagcaggaggaggcgaaggaggtactagggtcggaggggtctcgcccgttcaccatgcgggagctgctcggcgaactcagggaggacggcgagacggcggtcggcggcagcagcgcgagatctgcgttcggcgacgggaacggggtcggatccgctgatgccgagggctcgtcctacagccaagatagcacacagttttcatcacaccatgatgtagcgatggacttgataaatagtgtaactggagttgacgaggaaggacgttctcgccaaaggattctttcttttgctgctaaaagatacgtaaatgcaattgaaagtaatcctgacgaccctgatgcatattataattgggctctagtcctccaggagagcgcagacaatgtggatcccaattcgagttcctctaaagatgcattgctggaggaggcttgcaaaaagtatgctgaagctacccgactttgtccaactctttatgatgcatattataactgggctattgctattgctgatcgggctaaaatgcgaggtcggacaaaagaagccgaagaactctggaagcaggcaatactgaattatgagaaggcagtccagcttaattggaatagcccacaggctctcaataactggggtcttgggctacaggagctgagtgcaattgttcctgcacgggataaacagaccatcataaaaaccgctatcagtaagttccgtgctgcaattcagctgcaatttgatttccatcgggcaatatacaaccttggaactgttttgtatggtttagctgaggataccatgagatctgggaagccagatgtctctcctaatgagctttatagtcagtctgctatctatgttgctgctgctcatgctctaaagccaaattactcggtctatcggagtgctttgcgattagtccgctcaatggtataattaatttattctgtttctgataaactgtgttagtttattctgtttgatattattacttaatagttcatgtagctgggatatgatagctgcttttcagttcagttatccatgtgtgttgaactctatagcaacccatattcttgaggaaaataactgacaaccctcatggtattcaaactttttttctctgaacggtactgtgtgctggtcttttagcacatttttctgttctttagatgttctcttgtctaattcttgattatgacagtgttcctctgttcttattgcatcttataccatgcagttacctctgccatatctcaaagttgggtatttgacggctcctccagctaacaattccattgcaccacacaaagattgggagagatcacagttcattttgaatcatgagggactccagcaggttgatgcttctgaccagcctccatcacaatccccagggcatttggacaggggcagaaagcctgtcagaataaacattgcagatattgtttcagtgtcagcatgtgctgatttaaccttaccaagtggcgctggcctctgtatagaaactatttctggtcctacattcttggttgccgatagttgggaggctctcgaaagttggctagacgccatacgccttgtctacactatttttgcaagagggaagagcgacgtacttgccggtattattactggttaaatgtctttctgcaaatgcaaaactgccaccgaagagccgcaaagttttggagattcagcggcagccttatccgttgaatgccctctttggtttgtgttattatttttcccgtctgtgatgtcagtcttcctagatttagccatttagggtatatcatatatattcatttgtaactactttccactgattggcgataggtccgttttccttttgtaaaagtggccgtgtgactgtattgtgcattcacagcagatgtatcggacattcttaagtttgtgattttgtttctctgtaacaatgtatcaaggcacgatggtctatgcttaaatttactgcttgggacggcgctgctgtgctgggctgcagggccttcaacatgtatcaagccaaggatccggagaggttacaagatatactctccattccaaaatatggtagtccctccgtgactttttttacaccaaattggaccaggtcgtcttattaaataaatattattagtttccctgtgncnnaaaaaaaaaaaaaaaaaaaaaaaaaaaaaaaaaaacctggttctccatccggtcagaccaatcaacaaagtgacgcgagcacgagcatccatcgtttccccttcttccccatcgcgtgccctcgccgcagccatcttccatggcggaccagctcacggacgagcagatcgcggagttcaaggaggccttcagcctcttcgataaggatggcgacggctgcatcactaccaaggagcttggaactgtgatgcgctcccttggccagaaccccactgaagcagagctgcaggacatgatcaacgaggttgatgctgatggcaatgggaccattgacttcccagagttcctgaacctgatggcaaggaagatgaaggacaccgactccgaggaggagcttaaggaggcctttcgcgtcttcgacaaggaccagaatggtttcatctcggctgctgagctccgccatgtcatgaccaacctcggcgagaagctgactgacgaggaggtcgacgagatgatccgtgaggccgatgttgacggcgacggccagatcaactacgaggagttcgtcaaggtcatgatggccaagtgaggagccgtccccgttattatctatgaattgaagttaaatatcaggcacacaagctgtactttgccatgtcccttttgagtacacatcagtatcatgcaggaggtaatgtctagtagtggtcggtttaggtggtgtagtcatgggaactcgacatcagatacctggtctcttttgattgtgatgttatcttgcattattgctcctgctggagcttttaggatttgttgtaagctcatattttcaggggggtttggatcttttgtgcgagtcatatctcgtgtacgttgcattgcattgttgtgttatgcttctgctggcttgtcccnnnnaaaaaaaaaaaaaaaaaaaaaaaaaaaaaaaaaaaaaatataaaaaaaaaaaaaaaaaaaaaaaaaaaaaaaaaaaaaaaaaaaaaaaaaaaaaaaaaaaangggggggggcctttttaaagaaccaaa

SEQ ID NO: 129581 - DNA, 397 bp, Zea mays
  Clone ID: MRT4577_49650C.1
gtctcccggctgacgagccatgaagctatgctatggatgtcaatgcacattcgccgcatcccctactagcaccagtacccggtgcactatcggaggcgggctccacacgctcatgatcaagtacagccgaccgtgccaggtgcttgacatataggaggacaccaagggcgaggtggagagagccgacagcgaatgggtggagaaggacgggaagctttggtatggatccggcctgatgccgaacatgggtggctttgacgtaccaaaggcgttttagtcgactccagtgagagcggcatcatgggcgctttacgacatgaaggccatggttgccactgtacgcttctctgagaggatcggtgaatcgaaggacgcttcagcttcttttagaactaaa

SEQ ID NO: 129582 - DNA, 742 bp, Zea mays
  unsure (1)..(742): unsure at all n locations
  Clone ID: MRT4577_49651C.1
cccagcgcgcaggaaactcccacgacgtcctccaacaacttccccctacgcgcgtcagctagacgccatccgatctcctccaagcggtcgtggctgtgctctgctcctctgcgtatgcagaacggagcctcgtctcgagcggcccggagcaaggcctccatgggcgcgcgacccctcggctgtccagcaggaagtttggtgcctccctctgcctcctatacagcgcgcacccctggtcctggtgtgtttcttttttttctgtccggccatggatttcctcggcaccattcctttgattcgagtgggggggttcggcctcaagccagcatgagtcagtgacctccctgctcggccatggctgcgccatgagcatctagtgcccctccccctcgacctccctgcttggcaagtgtctagccgacgcccaactcggcctcgccgtcggccttgcccagcagcgacagtccgccccggcactcaccggtgccaagatccactgcgccctctccttccttgaagccgtggtgcttggtggccttgccttggcgctcgacaccccaatggntgagcagacccctcgctccctcaggttagcgccctccctgactcttctccatggtgtgctcagctctcccatccgtggacagtaccaccccctccctccacttcggatgaagcaaaacaaatcccctgctcctcctcgccggtacgtcattaattctgcagtagcagcctcggatcc

SEQ ID NO: 129583 - DNA, 4935 bp, Zea mays
  Clone ID: MRT4577_49652C.1
atgtcgggagatcacgccaagaaggagatggaaaccggcgaaaagcccactacaagtcacgggagcacttcatcggaagagtcccgcaccaaaaggagggagaagaagaagagctcctccaacaaagggaaggagaagaaatcttcttcccacaagccgcatcggagtgaggacaagccaaagaggatgaggaaagtggtctactacgagaccgacacttcatcaacatcgacctccggctccgatgcgccctccgtaacttctaaacgccaagggcgtaagaagtttagtaagattcccctacactactctcgcatttctaaacatgcacctctactttccgtcccattaggcaaaccaccaacttttgatggtgaagattatgctaggtggagtgatttaatgcgttttcatctaacctcactccacaaaagtatatgggatgttgttgagtttggtgcacaggtaccatccataggggataaggattatgatgaggatgaggtggcccaaatcaagcacttcaactctcaagcgacaacaatactcctcgcctctctaagtagagaggagtataacaaagtacaagggttgaagagtgccaaggaggtttgggatgtgctcaaaaccgcgcacgagggagacgagctcaccaagatcaccaagcgggaaacgatcgagggggagctcggtcggttccggcttcgtaaaggggaggagccacaacacatgtacaaccggctcaagaccttggtgaaccaagtgcgcaacctcgggagcgtaaagtgggatgaccatgaggtggttaaggttattctaagatctcttattttccttaaccctactcaagtacaattaattcgtggtaatccaagatatactaaaatgacccccgaggaagttatcgggcattttgtaagttttgagtgcatgatcgaaggctcgaggaagatcaacgagcttgatgatccatctacatccgaagctcaacccgtcgcattcaaggcgacggaagaaaagaaggaggagtctaccccaagtcgacaaccaatagacgcctccaagcttgacaatgaggaaatgacgctcgtcatcaaaagcttccgccaaatcctcaagcaaaggagagggaaagattacaagtcccgctccaagaaggtttgctacaagtgtggtaagcccggtcattttattgcaaaatgtcctatatctagtgacagtgaccgaggcgacgacaagaaggggagaagaaaggagaagaagagatactacaagaagaagggcggcgatgcccatatttgtcgcgagtgggactccgaagaaagctctagcgactcctccgacgacgaggacgccaccaacatcgccgtcaccaaagggcttctcttccccaacgtcggccacaagtgcctcatggcaaaggacggcaaaaggaagaaggtaaaatcaagatcctccactaaatatgaaacctctagtgatgaaaatgctagtgaggaggaggataacttgcgtaccctttttgccaatcttaacatggaacaaaaagaaaaattaaatgaattaactagtgctattcatgaaaaggatgaccttttggattcccaagaggactgtctaattaaagaaaacaagaaacatgttaaggttaaaaatgcttacgctctagaagtagaaaaatgtcaaaaactatctagtgagctaagcacttgccatgagatgattgacaaccttaaacatgaaaatgctagtttaaatgctaaggttgattcacatgtttgtaatgtttcaattcccaatcctagagataataatgatgatttgtttgctaggattgaagaattgaacatttctcttactagccttagagtagaaaatgaaaacttaattgctaaggctaaagaactagatgtttgcaatgctaccatttccaatcttagagataaaaatgatattctacatgctaagattgttgaacttaattcttgcaaaacgtctacatctactgttgagcatgtatctatttgtactagatgtagagatgttaacattgatgctattcatgatcatatggctttaattaaacaacaaaatgatcatatagcaaaattagatgctaaaattgccgagcataacttagaaaatgaaaaatttaaatttgctagaagtatgctctataatgggagacgccctggcatcaaggatggcattggcttccaaaaaggagacaatgtcaaacttaatgcccctcctaagaaactgtctaactttgttaagggcaaggctcccatgcctcaggataacgagggttacattttgtaccctgccggttatcctgagagcaaaattaggaaaattcattctaggaagtctcactctggccccaatcatgcttttatgtataagggtgagacatctagttctaggcaaccaacccgtgctaaggtgcctaagaaaattcctattgcatcaaatgatcatgacatttcatttaaaacttttgatgcatcatatgttttaactaacaaatccggcaagatagttgccaagtatgttgggggcaagcacaagggctccaagacttgtgtttgggtacccaaagttcttgtgtctaatgccaaaggacccaaaaccatttggggttatgcatccgggggctcaagttggatcatcgacagcgggtgcacaaatcacatgacaggggagaagaaaatgttctcctcctatgagaaaaaccaagatccccaacgagctatcacattcggggatggaaatcaaggtgtcactgtctttagaagaagtgatgattcaatagcatttaagggtgtgttagagggtcagctatacttagtagattttgatagagctgaactcgacacatgcttaattgctaagactaacatgggttggctctggcaccgccgactagcccatgttgggatgaagaatcttcacaagcttctaaagggagaacacgttttaggactaacaaatgttcattttgagaaagacaggatatgtagcgcatgccaggcaggaaagcaagttggcacccatcatccacacaagaacatcatgacgaccaataggccgcttgagctactccacatggatctattcggcccgattgcttacataagcatcggcgggagtaagtattgtcttgtaatagtggatgattattctcgcttcacttgggtattctttttgcaggaaaaatctcaaacccaagagaccttaaagggattcttgagacgggctcaaaatgagttcggcttaaggatcaagaaaattagaagcgacaacgggacggagttcaagaactctcaaatcgaaggttttcttgaggaagagggcatcaagcatgagttctcttctccctacacgccacaacaaaatggtgtggtggagaggaagaatcgaactctactggacatggcaagaaccatgcttgatgagtacaagacttcggatcggttttgggccgaggcggtcaacaccgcttgctacgccatcaaccggttatatctacaccgaatcctcaagaagacatcatatgaactcctaaccgagcaagttgatcttgatgagataggtgaagaagaggctccgtgcatcgcgctaaggaacatgtccattggggatgtgtgtcctaaggaatccgaagagcctccaaatgcacaagatcaaccttcctcctccacgcaagcatctccaccgactcaaaatgaggatgaagctcaagttgatgaagtagaagatcaagcaaatgagccacctcaagatgatggcattgatcaaggggaagatgcaaatgaggaagacaaggaggaagaggaacaaaggccgccacacccaagagtccaccaagcaatccaacgagatcaccccgtcgacaccatcctcggcgacattcataagggggtaactactagatctcgtgttgcacatttttgtgaacattactcgtttgtttcctataatgagccacacaaggtagaggaagcacttcaagattcggattgggtggtggcgatgcaagaggagctcaacaacttcactaggaatgaggtgtggcatttagttccacgtcctaaccaaaatgttgtaggaaccaaatgggtcttccgcaataagcaagatgagcatggtgtggtgacaaggaacaaagctcgacttgtggccaagggatactcccaagtcgaaggtttggatttcggtgaaacctatgcacccgtagctaggcttgagtcaattcgtatattattagcctatgctacttaccatggctttaagctttatcaaatggacgtgaaaagtgccttcctcaatggaccaatcaaggaagaggtctatgttgagcaacctcccggctttgaagacagtgagtatcctaatcatgtctataagctctctaaggcgctttacgggctcaagcaagccccaagagcatggtatgaatgccttagagatttccttattgctaatggcttcaaagtcggaaaggccgatcctacactctttactaaaactcttgaaaatgacttgtttgtttgccaaatttatgttgatgatattatatttgggtctactaacgagtctacatgtgaagagtttagtaggatcatgacacagaaatttgagatgtctatgatgggggagttgaagtatttcttaggatttcaagtgaagcaactccaagagggcaccttcattagccaaacgaagtacactcaagatattcttagcaagtttggaatgaaggatgccaaacccatcaagacacccatgggaactaatgggcatctcgacctcgacacgggaggtaagtccgtggatcaaaagtctatttcaaaccaagtcataggtatattgaaagggaatttgagtcttcggcaaagacaaaggcttccactccgtaactcatccttctga

SEQ ID NO: 129584 - DNA, 2353 bp, Zea mays
  Clone ID: MRT4577_49653C.1
atgtcgggagatcacgccaagaaggagatggagaccggcgaaaagcccactacaagccatgggagcacttcattcgaagagtcccgcaccaagagaaaggagaagaagaactcctccaaagggaaggagaagaagacttcttcacaccaaaaggagaagaaggagaaaaccttttctcacaagacgcgtcgaagtggggacaagaaaaagaggatgaggaaagtggtctactacgagaccgattcttcatcgccatccacctccggctccgacgcggcttccgtcacttctaagcgccaagagcgcaagaagtatagtaagattcccctacgctatcctcgcatttccaaacatacacctttactttccgtcccattaggcaaaccaccaacttttgatggtgaagattatgctaggtggagtgatttaatgcgatttcatctaacctcactccacaaaagtatatgggatgttgttgagtttggtgcacaggtaccatctgtaggggatgaagactatgatgaggatgaggtggcccaaatcgagcacttcaactctcaagcaacaacaatactcctcgcctctctaagtagagaagagtataacaaagtgcaagggttgaagagcgccaaggaggtttgggatgtgctcaaaaccgctcacgaaggagatgagctcacaaagatcaccaagcgggagacgatcgagggggagctcggtcggttccggcttcgcaaaggggaggagccacaaaacatgtacaaccggctcaagaccttggtgaatcaagtgcgcaacctcgggagcaaaaagtgggatgaccacgaggtggataaggttattctaagatctcttattttccttaaccctactcaagttcaattaatccgtggcaacccaaggtatacactaatgacccccgaggaagtaatcgggaattttgtaagttttgagtgcatgatcgaaggctcgaggaagatcaacgagcttgatgatccctccacatccgaagctcaacccgtcgcattcaaggcgacggaggaaaagaaagaggagtctacaccaagtagacaaccaatcgacgcctccaagctcgacaatgaggaaatggcgctcgtcatcaagagcttccgccaaatcctcaaacaaaggagagggaaagactacaagtcccgctccaggaaggtttgctacaagtgtggtaagcccggtcactttatagctaaatatccattatcaagtgatagtgacaggggcgacgacaagaaggggagaagaaaggagaagaagaggtactacaaaaagaagggcggcgatgcccatgtttgtcgggagtgggactccgacgaaagctctagcgactcctccgacgacgaggacgccgccaacatcgccgtcaccaagggacttctcttccccaacatcggccacaagtgcctcatggcaaaggacggcaaaaagaaggttaaatctaaatcccccactagatatgaatcctctagtgatgataacgctagtgatgaggaagataatttgtgcactctttttgccaacctcaacatgcaacaaaaagagaaacttaatgaattgattagtgccattcatgaaaaggatgatctcttggatacccaagaggacttccttattaaagaaaataagaagcatgttaaggttaaaaatgcttatgctctagaaattgagaaatgtgaaaaattatctagtgagctaagcacttgccatgagacaatagacaaccttagaaatgaaaatgctaatttgttagctaaggttgattctcatgtttgtaatggatcaacttccaatcctagagatgttaatgatgatttgcttgctaggattgaagaattaaacttatatcttgctagccttagaaatgaaaatgaaaaattgcttgctaaggctaaagatgttgatgtttgcaatgctactatttccgaccttagaagtaaaaatgaaatattgcatgctaaggttgtagaactaaaatcttgcaaatcctctacatctaccgttgagcacacttctatttgcactagatgtagagatgttaacattgatgctatacatgatcacatggctttaattaaacaacaaaatgatcatatagctaaattagatgctaaaattgccgagcataacttagagaatgaaaaatttaaatttgctagaagtatgctctataatgggagacgccctggcatcaaggatggcattggcttccaaaggggagacaatgtcaaacttagtgcccctcctaaaagattgtcaaattttgtaaagggcaaggctcccatgcctcaggataacgagggttacattttgtaccctgccg

SEQ ID NO: 129585 - DNA, 916 bp, Zea mays
  Clone ID: MRT4577_49654C.1
aaaatctcgccgccgccgccgaagactctgtccatccctagccgtcggggtctctccctcatcttcttccctgcaagcgcctagccccagctccttgttcctccctggccgagcgcatctccatggtggtcgagctccctcagccatggcgctggccgccgccgcgcccctactccctctcttcagtgaaccatcgccacgctctggtcgggctcgccttgccccaagctctaccaccgctcgagcgtcgcgtcccctcagttcttggccttggagattgtccatggcgccccagccccaacgctgagctcggtccaacccatctcctatggcgcccggtcgccccttctctccctgctatgctcctccccatctcccatggcgcctagctcggactgcgccctactcccttctctcggcgtcccagccatggccatgcctcccctgtccttggagctcgctggtgatggcagagctggccgtccttgcttcctcggcgccctccctgctcctctcggccagctgcttgcgtgtgctacgcgacatcgagtctgagacgggcacacgagaaggacgcaaagaagacgctgtgtgtgcttgtgtccgagctcgctccaccgtgacctcgctttgctcatcgtgtcaccgttcaccgagcccgtccccagtccaagctctctccttgctcgccgtcgatttcccagctcgttgtggccgtcgttgctccccaccacgtcgagctactcacgtccctgctcccttcgtatatcgttgtcggtcgttgttcccagcagcgtcaacccactcggaccccgcctcggtgaagccttcctgttcccgtcgttgtgggttgtcgtcgttcgtcatcgcgtcctgtgtgcagcaacgtcgctgattcctccatggtgcttgtccg

SEQ ID NO: 129586 - DNA, 3210 bp, Zea mays
  Clone ID: MRT4577_49655C.1
atggtcaaggttattcttatatcactcgtttttcttaaccctacacaagttcaattaattcgtggtgatccaaggtataaactaatgtctcccgaggaagtgataggaaaatttgtgagctttgaattgatgatcaaaggctccaagaaaatcatcgagcaaggcgccacctcaacacatgaggtgcaacccgtcgcattcaagacgatggaagaagaaaagaaggattctacaccaagtaggattcccatcgacgcctccaagctcgacaacgaggaaatggcgctcatgatcaagagcttccgtcaaatcctcaagcaaaggagggggaaggattacaaaccccgctccaagaaggtttgctacaaatgtgtgatagtgacaggggcgacgacaagaagggaaagagaagagaaaaagaagaggtactacaagaaaaagggcggcgatgctcatgtttgccgggagtgggactccgacgagagctccatcgactcctcctccgacgaggacgccgcaaacatcgccatcaccaatggccttctcttccccaacgtcggccacaagtgtctcatggcaaaggacggcaagaagaagaagaaggtaaaatctagatcctccactaaatatgcaacatctagtgatgaagctagttctagtgatgatgaggatgatttacttaccctttttgccaacttaaacatgcaacaaaaagaaaagttgaatgaattgattagtgctattcatgagaaggatgaacttttggatagccaagaagacttcctaattaaagaaaacaagaagcatgttaaggttaaaaatgcttatgctctagaggtagaaaaatgtgaaaaattgactagtgagctaagcacttgccatgatgttatttccatccttagaaatgaaaatgctaaattaaaagataaggttgagaagttagatatttgtgatgattcaattgttagtcttagaaatgataatgctagtttgattactaagattgacaatttgaatgcatcgctctctagccttaaaattgagaatgaaaaattatttgctaaggctaaagacttaaatgtttgcaatgtttccatttccaatattagagatgagaatgctattttacatgctaagattgttgaattaaatacctgcaaaccctctacatctaccgttgagcatgttactatttgcactagatgtagagatataaatgttgatgctattcatgatcacctagctttaattaaacaacaaaatgatcacatagctcaacttaataccaaaattaatgagcatgacttagaaaatgagaaatttaaatttgctagaagcatgctctatagtggcagacgctctgggattaaggatggcattggcttccaaaagggagacaatgtcaagcttaatgcccctaaaagattgtctaactttgttaagggcaaagctcccatggttcaggataacgagggttacattttatactctaccggttatcccgaatacaaaattaggagaattcattctaggaagtctcactctggctctcatcatgcttttatgtataagagtgaggcatctagttctaggcaatcaacccatgctaaattgcctaagaagaaaactcttattgcatcaaataaacctagtatttcttttaagacttttgatgcatcttatgttttaactaacaaatcaggcaaagtagttgccaaatatgttgggggcaaacacaaggggtcaaagacttgtgtttgggtacccaagattagaagcgacaatgggacgaagttcaagaactctcaaattgaaggcttccttgaggatgagggcatcaagcatgagttctcttctccctacacaccacaacaaaatggtctagtggagaggaagaatagaactctacttgacatggcgaggaccatgcttgatgaatacaagacttcagacaggttttgggcggaagcaatcaacaccgcttgctacgccattaaccgtctctaccttcaccgaatcctcaagaagacatcgtatgaactcctcaccggaaccaagtgggttttccacaacaagcaagatgagcatggtgtggtgacaaggaacaaagcccgacttgtggccaagggatattcacaagtcgaaggtttggattttggtgaaacctatgcacccgtagctaggcttgagtcaattcgtatattacttgcctatgctacttaccatggctttaagctttatcaaatggacgtgaaaagtgccttcctcaatggaccaatcaaggaggaggtctatgttgagcaacctcccggctttgaagatagtgagtaccctaaccatgtatataaactctctaaggcgctttatgggctcaagcaagccccaagagcatggtatgaatgcctaagagattttcttatcgctaatggcttcaaagtcagaaaagccgatcctactctctttactaaaacaattgcaaatgatttgtttgtatgccaaatttatgttgatgatatcatatttgggtctactaacgaatctacatgtgaacagtttagtaggatcatgactcaaaaattcgagatgtctatgatgggggagttgaagtatttcctaggatttcaagtgaagcaactccaagagggcaccttcaatagccaaatgaagtacattcaagacatactcacaaagtttgggatgaaggatgccaagcccatcaagacacccatgggaactaatggacatctcgacctcgacacgggagggtgtaaaattaatagaaagagcacatcagggacctgccagttcttgggaagatctctggtgtcttgggcttcaaagaaacaaaattctgttgctctttctaccgctgaagccgagtatattgccgcaggacattgttgcgcgcaattgctttggatgaggcaaaccctcagggactatggttacaaattaaccaaagttcctcttctatgtgataatgagagtgcaatccgcatggcggataatctcgttgagcatagccgcactaaacacatagccattcggtatcatttcttaagggatcaccaacaaaagggggatatcgagattgcatatgttaacaccaaagaacaattagccgatatctttaccaagccattagatgagcaaacttttaccaaacttaggcatgagctaaatattcttgattctaggaattttgattga

SEQ ID NO: 129587 - DNA, 123 bp, Zea mays
  Clone ID: MRT4577_49656C.1
agcaggggtaacaacgcacaggacgcgggtagtatggtctaccttagcacctggacaactatgcttccctgcaggtccagttccagtatcaagcctagacggatcatcctgaactaggagcac

SEQ ID NO: 129588 - DNA, 646 bp, Zea mays
  Clone ID: MRT4577_49657C.1
gccggccgggttcccagcagcagcagcagcacagcggcgcgggcgctggctcgtccccgtcgtcgtcttccgtgaccacgtgctccgtgaagcgccgcggcggcgtggagcagggcgacggctgcgactcgccctccggcggcgggatggtggccgcggcgtgccccaggtgcttcctgtacgtgctcatctcccggagcgacccgcggtgcccgcgctgcgagtcccacgtcccggccccgccggcgccagcgccggccgcgagcaagaagccgcggatcgacctcaacgtcggctacctgggcacatagcttgtggtttaggcatatggggcgatggcgtagcctcctagatggagcggctgccgtctcctaccgtaccgtacgtgacgccataaattttgcttaggctcgtgtaatgtgatgacccacggaccgagtcgggtacgtaggagtacgtagacaggggagggggggcgccgttttttgaactgaaacagaaatgcatgccctcccctgtcaggaaatttatggccgatcagacaccgcatacaagaacatgaatgaatggtgacactgctttctgttcctgctcctgtagaaccagacaatcctgcagtcaaaaaaaaaaaaaaaaaaggccccta

SEQ ID NO: 129589 - DNA, 731 bp, Zea mays
  unsure (1)..(731): unsure at all n locations
  Clone ID: MRT4577_49658C.1
aattcggcacgagggggagatgctaatgatcaagataaggaatatgatgaggacccaagaccgccacacccaagagtccaccaagcaatccaacgagatcaccccgtgaacaccatcctcggcgatattcaaaagggggtaaccactcgatctcgtgttgctcatttttgtgaacattactcttttgtttcctctattgagccacacatagtagaggaagcacttcaagattcggattaggtgctagcgatgcaagaggagctcaacaacttcacatggaatgaggtatggcatttagttccacgtcctaaccaaaatattgtaggaaccaagtgggtcttccgcaacaagcaagatgagcatggtgtggtgacaaggaacaaagcccgacttgtggccaagggatattcacaagtcaaaggtttggatttcggtgaaacctatgcacccgtagctaggcttgagtcaattcgcattttactttcctatgctacttaccatggctttaacctttaccaaatggacgtgaaaagtgccttcctcaatggaccaatcaaggaagaggtctatgttgagcaacctcccggctttgaagatagtgaataccctaaccatgtctataaactctctaaggcgctntatgggctcaagcaagccccaagagcatggtatgaatgcctttagagattcctttatcgctatggcttcaaaagtcgaaaagctgatcctac

SEQ ID NO: 129590 - DNA, 955 bp, Zea mays
  unsure (1)..(955): unsure at all n locations
  Clone ID: MRT4577_49659C.1
nacatggcttgtggttcctccccttggtgaagcatgaatcgaccgagatccccctcgatcgtttcccgcttggtgatcttggtcacctcatctccttcgtgcgcggtcttgagcacgtcccaaatctctttggcgctcttcaacccttgcaccttattatactcctctcgacttagagaggcgaggagtatagtagtggcttgggagttgaagtgccggatttgggctacctcgtccgagtcatagccttcatcccccatggatggttcctgcactctaaattcaacaatgtcccaaatactagcgtggagtgaggttagatggtgcctcattttatcactccacatacaataatcttcatagtaaaaaactggtggtttgtctagtgggatggaaagtaaaggagtgcgtttgcaaatgcgaggatagcttaaggggatcttactaaacttcttgtgctcatggcgcttagaagtgacggacgacgcgtcagagccggaggtggaaggcgacgaagaatcgatctcgtagtagaccactttcttcattttcttcttcttgtcgccactccggtgcgacttgacgcggggaggtgattcctccctcttgttgttgcactccccggcaccgcttcccatggcttgtaagggacttctcaccggtcccgatctccctcttggtggatgctcccgacatcacttcgagcggttaggctctaatgaagcaccgggctctgataccaattgaaagtcgcctaaaggggggtgaatagggcaataccaagtgagtttgatcgcaatgaaagaatcaagaacggagaaagcaatccaagcgcaagagctcgaaagaacacaagcaaatcactctctctagtcaccactgagatgtgtggaattcccacagcctttgatctctttggtgtgaaaagaaaagaatgctagagctcttgtagtag

SEQ ID NO: 129591 - DNA, 1814 bp, Zea mays
  Clone ID: MRT4577_4965C.1
aatgtaatattggtccgtccaaacacgccaaggaaacattccgaaactattgggatctgtgaaactattgagttgaagcgcttcctctcgcccgccgtgtttcgggggcggaggtggatggatggctgtcgtttgttgtgggaggaacactagcagctgggtcgtgtgatgagctcatgttcgggcttattgcttaatatatatctccaatgcaatgcgtatcgcagacgttcaaaaaaaaaaaagaaacctccattcgcggtttgcctctctgccttccctacctcagatcctccctcagattgccatggcggaccagctcaccgacgaccagatcgccgagttcaaggaagcattcagcctcttcgacaaggacggcgacggctgcatcaccaccaaggaacttggaactgtgatgcgctcgttggggcagaaccctactgaggctgagcttcaggacatgatcaacgaggttgatgctgatggcaatggaaccatcgacttccctgagtttctcaacctgatggcacgcaagatgaaggacaccgactctgaggaggagctcaaggaggccttccgcgtgttcgacaaggaccagaacggcttcatctctgctgctgagcttcgacatgtcatgaccaacctaggtgagaagctgacggacgaggaggtggatgagatgattcgtgaagccgacgtggacggtgatggccagatcaactacgaggagttcgtgaaggtgatgatggccaagtgagatgatgtgcctgttttgaagctagttcctctcttgatggtagtagctagtctagtgttggagactgactgcatttggtccgccttgttcctctcgctgcatcaatggacatatccgtttgttttctcccaagggattttaccatgtcggtaatttcgttcaaatttgtttatggttgtattaacatttgtgttatcttggtacaatgatcatgcctttcccttctaaatttaggtgttgaatttagaagggaaaggcatgatcattgtaccaagataacacaaatgttaatacaaccataaacaaatttgaacgaaattaccgacatggtaaaatcccttgggagaaaacaaacggatatgtccattgatgcagcgagaggaacaaggcggaccaaatgcagtcagtctccaacactagactagctactaccatcaagagaggaactagcttcaaaacaggcacatcatctcacttggccatcatcaccttcacgaactcctcgtagttgatctggccatcaccgtccacgtcggcttcacggatcatctcatccacctcctcgtccgtcagtttctcacctaggttggtcatgacatgtcgaagttcagcagcagagatgaagccgttctggtccttgtcgaacacgcggaaggcctccttgagctcctcctcagagtctgtgtccttcatcttgcgtgccatcaggttgagaaactcagggaagtcgatggttccattgccatcagcatcaacctcgttgatcatgtcctgaagctcagcctcagtagggttctgccccaacgagcgcatcacagttccaagttccttggtggtgatgcagccgtcgccgtccttgtcgaagaggctgaatgcttccttgaactcggcgatctggtcgtcggtgagctggtccgccatggcaatcttagggaggatctgagggagggaggcagagaggcaaaccgcgaatggaggaagtctcgaagtggggagagagaacaggagaagagagcagtgcggtcagaggcagtcgcagaccgacccggacgcgtgg

SEQ ID NO: 129592 - DNA, 2802 bp, Zea mays
  Clone ID: MRT4577_49660C.1
atggcggcattactccttctacctggccgcccactcttcctcaagctcatcttccccgcgcgccctttctgctcgacgccctgcaagccgcgcgtccgggtcttcttcgcccctgcgcgctccgctcatccatggcgcgcccctgatttcccctgccgcgcagctgttcgcctggccgcgcccctgctccctctgccttctccctaccgcgttccagctcggactgccctgcttcttgcgcgcccagatcctctctctccctgccgcgccggaactcccttcatggccagagctcagacggcgctcggtcctgccccctgccccaacgtcgaccatctcgtggcagcaggcagcaccgcatcggacttaccctgtaggatgttcaccaagtgcgcgacaaaaagctcgaacatcctgcgtgactcaagttcgattcgtcaaaattattcagtcgaggaaaagatcttcagcaattggttactaaagaaaagaaggcccatgggtgacgtctacctaatacccgacgaaacgtctgaagtagaatttatcgatgtgtccatggaggtggagcgacttaatcttggttatagttttgtgctgctgctgaagatgttaagtgccggtgggctcggccttcttataagtctaagtagcccttctatacttcttattgaggtttatgcatccgggggcttaagttggataatagacagcggatgcacaaaccacatgacaggggagaaaaggatgttctcctactatgagaaaaaccaagatccccaaagagctatcacattcggggatggaaatcaagatataggtgttattgtctttagaagaagtgatgattcagtagcatttaaggaagtattggagggtcagctatacttagttgattttaatagagctgaactcgatacttgcttaattgctaagactaatatgggttggctctggcatcgccgactagcccatgttgggatgaagaatcttcacaagcttctaaagggagaacacattttgggactaaccaatgttcattttgagaaagacagggaaaaatctcaaacccaagaaactttaaagggattcttgagacgggctcaaaatgagttcggattgaggatcaagaaaataagaagcgataatgggacgaagttcaagaactcacaaattgaaggcttccttgaggaggagggcatcaagcatgagttctcttctccctacacacctcaacaaaatggtgtagtggagaggaagaatagaactctacttgacatggcgaggaccatgcttgatgagtacaagactcctgaccggttttgggctgaggcgattaacaccgcctgctactccatcaaccggctttaccttcaccgaatcctcaagaagacatcatatgaacttctcaccggtaaaaagcccaatgtttcatattttagagtctttggtagcaaattctttattcttgttaaaagaggaagaaaatctaaatttgctcctaaggatgtagaaggttttttacttggttatgactcaaacacaagggcatatagagtcttcaacaaatccactagattagttgtggtttcttgtgacattgtgtttgatgagactaatggctcccaagtggagcaagttgatcttgatgagctagatgatgaagaggctccgtgcgtcgcgctaaggaacatgttcattagggatgtgtgtcctaaggaatccgaagaggccactaatgcacaagatcaaccttcatcttccacgcaagaatctccaccaacccaagatgaggatcaagctcaaggtgatgaaaataaagatcaagaggatgagccacctcaaaaggaggacaatgatcaagggggagatgacaataatcaagacaaggaagatgatcaagaagtacagggtaccaaatgggtattccgcaacaagcaagatgagcatggtgtggtgacaaggaacaaagcccaacttgtggccaagggctattcacaagtcgaaggtttggatttcggtgaaacctatgcacccatagctaggcttgagtcaattcgtatattacttgcctatgctacttaccatgactttaagctttatcaaatggacgtgaaaagtgccttcctcaatggaccaatcaaggaagaggtctacgttgagcaacctcccggctttgaagatagatttcaagtgaagcaactccaagagggcaccttccttagccaaaccaagtacattcaagatatactcaccaggtttggaatgaaggatgccaagcccatcaagacacccatggaaaccaatgggcatctctacctcgacacgggaggatattcagatgatgattgggtagggtgtaaaattgatagaaagagcacatcagggacttatcagtttctagggagatccctggtgtcttgggcttcaaagaaacaaaattcagtagctctttctaccaccgaagccgagtatattgccgcaggtcattgttacgcgcaattgctatggatgaggcaaacccttagggactatggctacaaattgagcaaagtccctctcctatgtgacaatgagagtgcaatccgcatggcggataatcccgttgaacacagccgcactaagcacatagccattcagtatcattttttgagggatcaccaacaaaagggggatatcgagattgcttatgttagcaccaaagaaaaattagccgatatctttaccaaaccattagatgagaaaacctttaccaaacttaggaatgagctaaacattcttgattctcggaaccttgattga

SEQ ID NO: 129593 - DNA, 348 bp, Zea mays
  Clone ID: MRT4577_49661C.1
aggggggaaaacatgggcggtgcccccgccctgaaagacagtccttgaaccggggcccctccaggggagcaaacaaaactgggggggccctggggccccctccaaaaagcctggtttgccccgcttttatgggctcgccggggaaccgcccctttacataccctggggaacccctactaaaacaaccccctcaattggaccccctggccggcggtccattacaggggtttggaaatccccctaagaatttggagaggtaaaaaaaattggcccctttttggagcccaacattttacatatattccgctaaagggtccgccctcaactagcatatcaagggccgccgcc

SEQ ID NO: 129594 - DNA, 723 bp, Zea mays
  Clone ID: MRT4577_49662C.1
tcaccaaggttttgagccgggtgtacatggcttgggctcctctccttggttgagcataaatcgaccgagctccccctcgatcgtttcccgcttggtgatcttggtcacctcatctccttcgtgcgcggtcttgagcacgtcccaaatctctttggcactcttcaacccttgcaccttattatactcatctcgacttagagaggcgaggagtatagtagtggcttgggagttgaagtgccagatttgtgctacctcgtccgagtcatagcctacatcccccatggatggttcctgcgctccaaactcaacaatgtcccaaatactagcgtgaagtgaggttagatggttcctcattttatcactccacatacaataatcttcaccgtcaaaaaccggtggtttgcctagtgggacggaaagtaaaggagtatgtttggaaatacgaggctagcgtgggggggtcttactaaacttcttgcgctcatggcgcttagaagtgaccgacggcgtgtcagagccggaggtggaaggcgacgaagaatcggtctcgtagtagaccactttcttcattttcttcttcttatcgccactccggtgcgacttgacgaggggaggtgattcctccctcttcttgttgtcggactcccccgatggagctttcccgtggcttgttgcgggtttctcactggtcaccatctccttcttggcgtgagctcccgacat

SEQ ID NO: 129595 - DNA, 515 bp, Zea mays
  Clone ID: MRT4577_49663C.1
ggccaaccacccgggcgcggtctctgcctctctgctagtttccccaaaaacgatttcctttttccgccgccccggtggccgtgggggcctggagtagaaaaatagagcaggcgtcggtggccgtggacctgtggaggagagcaggcgccgccgcgccagtgtgctgcgtcgccggcgagtgagccaaccactgtccactggtctgctcttgtttattcaatggccacgaaaggatctcatccagccgagctttctccccactatgtacctcatcggtgcacttgaagaagcgtcattgagcaccgttcggagattccccttcccagcatcatcgcctgaccaagatttgacacaggtcatctgtcgctcgagccataacgggcgtgatgtgatgaagaaactgaattttgtagtggaaatgaggtactcacatcgtgaatctttctaaaattgtggttatcaatgtgcactaggatcctgcaacaaacagatagacataaacctgctcataacct

SEQ ID NO: 129596 - DNA, 377 bp, Zea mays
  Clone ID: MRT4577_49664C.1
tgatgtttttttgtctaaagttaatgagtttgcaatggttctgagtctaaaaaaaaaaaaaaaaaaaaaaaaaaaaaaaaaaaaaaaaaaaaaaaaaaaaaaaaaaagaaaaaaaaaaaaaaaaaaaaaaaaaaaaaaaagtccctgcccgggcggccgcccgggcaggaacttgaagaagggaaaattgaaaaggttgttggcctccttgggaagctgcaccttggaattgccgttgccaaactgtttaaccaaaaaggagttgtttttcctcacaatctgccaaataaaatcccctgaaacgggcgccatttcccttccccgaaaataaggggcctcggggtcccctccctttgttccggggttgaagtccccgc

SEQ ID NO: 129597 - DNA, 248 bp, Zea mays
  unsure (1)..(248): unsure at all n locations
  Clone ID: MRT4577_49665C.1
aactagggacatgttggnacaagaccagcggtttgaattacacccgaaaattttttttttcatttccgaagggcnnatatcactttttttgtgggggagggggntggtcccagnaaaacactncgacacatgcctcggcaggggacacaccattccccagagatgtattctctccgaagatcggcggcgggggagatnacttanggagcttgcttttggtgaggtcccctagctggaacatgatgggg

SEQ ID NO: 129598 - DNA, 321 bp, Zea mays
  Clone ID: MRT4577_49666C.1
ggcacaaaaacaataaccccagaagaaaacaaaatgtctgcttgaatttcaacaaaaacaacaacagcgtgacctcttaactacacacaaaaatgtttctcaagactcaggattcccatgcactggacggggggttgaatcttcaattttcggggggccccttttaaataattgcggccgaaggggtatcaccgcatataggccatcggtttggacacgggtggcccaaataaatttaggtaacaagggaatccataaacgttggccccccccaaatttgggattaatggccacgatccaaaattcccccgtttaacccta

SEQ ID NO: 129599 - DNA, 359 bp, Zea mays
  Clone ID: MRT4577_49667C.1
aaagcatgctaatttcccaaacagctcgaaaaaaaaaagggaccaaacccttgacagatggcttatgcataaaaaaaaacctctactatgggggcttgctgtggaaaaaaccagcaaaacatgggtgggtgggggctaaaggataaaagcattccgtgggggaggggataaaacaattcgcataacatggaacaaagtcccgtattggcaggggcccttgacaagatagataggtgatcgcataatcctcggggagagcctggggatagctgtttaagccccaatccgctcatccgcatggccgggggcccgcacagcggcaaaacccccccttcctgcattagtcgcaagggggatga

SEQ ID NO: 129600 - DNA, 577 bp, Zea mays
  Clone ID: MRT4577_49668C.1
tttatctttttttttttctttttttatattaaacgtaagggttgcttttttttttttatatttccctatctctttcctattaattatatttgcaacaccacaccacgattgtttacccgaaaccggggcaaaatcagagggccccccccctaaaaaaaagccccacccaaaaatggcttgtaacttcgcccacgcaaaaggggaaacccccaaaaagggtaaaaagaaggatccccccccccaaaaaaaaaaaaaaagggccacaatccaaacaaaaaataacctttgtgggtccacaagaagggggggcccccataaataccccccacattttgggggagaaaaaaccccccggtgtcccccccaaaaataaaaaaaaaagggggtttttttggggaggggatacccccccttctccccagaaaaaacccctaataaaaaaaaaagccccaaaaaaaaaaaccggggaccccccgaaatccaaaagggccgcctggcctttaaagaacccccccagagggaaagagcgaaccccccgggaaaccttaattcccggccacctcagccccaatttttt

SEQ ID NO: 129601 - DNA, 357 bp, Zea mays
  Clone ID: MRT4577_49669C.1
ggtatggttaaataaaacctgtctttgtattaccccggaaatcccaacctccaaccacaagattccaacattttacagctgccctggaccaccctaaactgagctcaagggtcggttttcacacaccacctaagggccaaaaccctaggctggcacagtgtaaaccgggaatacaaagcctggattttgcacactgccgatgcgaaaagaaggcaagatgctggcaggcattccaccgattgccctagcatagcgattacggtgcaaagcttggtaaggaaaacttattttatcgggaaaatggatgtactcaaactgggcggggttaaaaaaatccggactggaaaaccccgcccg

SEQ ID NO: 129602 - DNA, 359 bp, Zea mays
  Clone ID: MRT4577_4966C.1
agacgaatgagtgcactgtgcaggcagtgcctgacctatcacatacagcctgaagaatggccttcgacccttgctgcttcagcggcaccgcaccagctgtgggcttgggggggtcaccgccaagcggtgccggcgcgagacaggctggaggggcaggtggagcttgagactggcgctttcttcggcatgcgacgctacttctggctcaacctgccgcgcgccggctgccgcgtttgcgccaacgtccgccgcgccgatcgcgtccagtcgctctgcgactagaacaactcttgcgatgcctgcagagccccccgcgcggtggatatgacggtcgacatcgccatccgtgggttgtgcct

SEQ ID NO: 129603 - DNA, 343 bp, Zea mays
  Clone ID: MRT4577_49670C.1
ttttatttttttatttatctttagaaagaaaaggtgtgggataggtgataaattcatgacagacagatatccctataatttacagaggcgatacaggagacgtgtaaagaaacaaatagtgtggcagtgcgcgtgcaaagactaattaacagctttgactagggggtggaagtactaaatttatacatgaatttcttttaaaagcgatggctctactaaaaacctaggtaggtcgaccatagaccgaccatatatatgtaccacgtacgctttattatacatagtttatggagcaagctgaaccagggggggatctagaattcatttatgacccggactaaat

SEQ ID NO: 129604 - DNA, 720 bp, Zea mays
  Clone ID: MRT4577_49671C.1
ggctcgccttcccgcagcgcccggggaagcccaacccggccgcgcccgtcttcccgggcgtcggcgggcggctccgcctcgccttgcacaccgcggtggggttcgtcgtcggcgccgcgctcccggcgctctacatcctcgacggcctccgggccggggacacggccggcgtcgccgccgcggccccgcacgcgttcctcctctccgcgcaggtgttcaccgagggcatcgcggcggcgtggcccggcaccttctcgctccccgtcagggctgccgtgcccgtgatgtacagcgcgcgcaggatgttcgcggcgtccgagtggctgcgccaggagctgcaggagcgggacgacctcgggcgcggcccgcccgtgccgccgcggcgggtggtggccggcagggcgctcgcggcagccaacctcgccttctgggggctcaacctcttcgccttcctgctgcccttctacctgcccagggcactcaggagatactatctcggcaacgaccatgaggatgacggcggcgcacgcgcgcactcgaagcagcagcagcagcagcagcagcaacagggtgaagcgaagaaggattcgtagatcagggtaaaatagacgtggaacaagctgtactagtgcctctgtgcctgcattatgtatgccagtagcttatcttgtttgatgcatacagaactttccatgttattaccagcagagaaacgcttac

SEQ ID NO: 129605 - DNA, 358 bp, Zea mays
  Clone ID: MRT4577_49672C.1
tcgtacggccgacgcgtgcgaactcgacgacgacaatcttcccgaatgcacgccaacacgctatatctatcagcacaacgcgggctgcatgcgaggctgcgggccaactaaactgatccactacactatcctatactagtctacttaactacacttgcaggctgcatcatgatgactccatgtctcactctatccatcccttggtctatacactctaccactgcctggcctatacaagtggcagctattccacacttacacacgcagtcattaatgtatacctacttccctgcatttgcgctgtcagctctatatattaaagatcctactctctactcacacgcgctactcagctaca

SEQ ID NO: 129606 - DNA, 369 bp, Zea mays
  Clone ID: MRT4577_49673C.1
gacccaccttcccattttctcaaagtgccgagcataggccgccgaatacaacgcttatccatccccgcctccggagcccaaggccagtccaacagttatgaggtgaaaaaggtgaaccaggttaacccacccactgtccttaataagctaggtgaccagatccacctgagctccagtttcccggaaagcgtacgggaccgtaacatctgcccttctatctcaccttatgaaaggagatttgccacgaggaactacttggcccagagcctttggggcccttcaatgccacgttagcgcaggcatcaatgttccagagatgccgactccgctttttgccaaagctccaaacgagaaaggtcgcaaaaactt

SEQ ID NO: 129607 - DNA, 4578 bp, Zea mays
  Clone ID: MRT4577_49674C.1
atgaggaaggtggtctactacgagaccgacacttcatcaacatccatctccgactccgatgcgccgtccgtaacttctaagcgccaagagcgcaagaagtttagtaagatccccttacactattctcgtacacctagacatactccattactttccgttccattaggcaaaccgccaacttttgatggcgaagattatgctaggtggagtgatttaatgaaatttcatctaacctcactccacaaaagtatatggaatgttgttgagtttggagcacaggtaccatccataggggatgaggattatgacacggacgaagtggcccaaatcgagcacttcaactcccaagccacaaccatactcctcgcctctttaagcaaggaggaatacaacaaagtgcaagggttgaagaatgcaaaggagatttgggacctactcaagactgcgcacgagggtgatgaactcaccaagatcaccaagcgggaaacgatcgagggggagctcggtcgcttccgtcttcgccaaggggaggagccacaagatatgtacaaccggctcaaaaccttggtgaaccaagtgcgcaacctcgagagcaaaaagtgggacgaccacgaggtggttaaggttattctaagagctctcattttccttaaccccactcaagttcaattaattcgtggtaatcctagatacccactaatgacccccgaggaagttatcgggaattttgtgagctttgaatgtatgattaaaggatcaaagaagatcaacgagcttgacgaaccctccacgtccgaggcgcaaccggtggccttcaaggcgacggaggagaagaaggaggagtctacaccaagtagacaaccaattgacgcctccaagctcgacaatgaggagatggctttaatcatcaaaagctttcgccaaatcctcaagcaacggagggggaaggactacaaaccccgctccaagaaagtgtgctacaaatgtggtaagcccggtcattttattgcaaaatgtcctatgtctagtgacagtgacaggggcgacgacaagaagggaaagaggaaagaaaagaagaagtactacaagaagaagggcggcgatgcccatgtttgccgggagtgggactccgacgagagctccaccgactcctcctccgacgacgaggacgccgccaacatcgccatcaccaagggactcctcttccccaatgtcggccacaagtgcctcatggcaaaggacggcaaaaagaagaaggttaaatctaactcctccactaaatatgaatcttctagtgatgataatgctagtggtgaggaagataatttgcgtaccctttttgccgaacttaacatggaacaaaaggaaaaattaaatgagctaattagtgccatccatgaaaaggatgatctcttggactcccaagaggacttcctaatcaaggaaaataagaaacatgttaaggttaaaaatgcttatgctcttgaggtagaaaaatgtgaaaaattgtctagtgagctaagcacttgccatgagaccattaacaaccttaggaatgaaaatgctaaattaattgctaagattgattctcatgtttgtattgattctcatcctagaaatgataatgttgaattacttgctaggattgatgaattaaatgattctcttactagccttagaatagaaaatgaaaatttgattgctaaggctaaagattttgatatttgcaatactactatttccgaccttagaactaagaatgatatgttgcatgctaaggttgtagaactaaaatcttgcaaaccctctacatctaatgttgagcatgtttctatttgtactagatgtagagatattgatgttaatgctattcatgatcacatgtccttaattaaacaacaaaatgatcatatagcaaaactagatgctaaaattgccgagcataacttgaaaaatgaaaagtttaaatttgctagaagtatgctctataatgggagacgcccgggcatcaaggatggcattggcttccaaaggagagacaatgtcaaacttaatgccccttcaaagaatttatccaactttgttaagggcaaggctcccatgcctcaggataacgagggttacattttgtaccctgccagctatcctgagaacaaaattaggaggactcattctaggaagtctcactctggccctaaccatgcttttatgtataagggtgagacatctagctctaggcaaccaacccgtgccaagttgcctagaaagaaaactcctaatgcatcaaatgatcatgctatttcattcaaaacttttgatgcatcatatgtgcttactaacaaatccggtaaggtttatgcatccgggggctcaagttggatactcgacagcgggtgcacaaaccacatgacaggggagaaaaagatgttctcctcatatgagaaaaaccaagatccccaacgagctatcacattcggggatggaaatcaaggtgttactgtctttagaagaagtgacgattcaatagcatttaggggagtgttagagggtcagctatacttggacaaatctcatacccaagagaccttaaagggattcttgagacgggctcaaaatgagtttggcttaaggatcaagaaaattagaagcgacaatgggacggagttcaagaactctcaaattgaaggcttccttgaggaggagggcatcaagcatgagttctcttctccctacactccccaacaaaatggtgtagtggagaggaagaatcgaactctattggacatggcaagaaccatgcttgatgagtacaagacaccggatcagttttgggccgaggcggtcaacaccgcctgctacgccatcaaccagttatatcttcaccgaatcctcaagaagacatcctatgaactcctaaccggtaaaaagcccaatatttcatattttagagtttttggtagcaaatgctttattcttgttaagagaggtagaaaatcaaaatttgctcctaaatctgtagaaggctttttactaggatatgactcaaacacaagggcatatagagtctttaacaagtcctcaggactagttgaagtttcttgtgacgttgtgtttgatgaaactaatggctctcaagtagagcaagttgatcttgatgagataggtgaagaacaggctccgtgcatcgcgctaaggaacatgtccattagggatgtgtgtcctaaggaactcgaagagcctccacatacacaagatcaaccatcctcctccatgcaagcgtctccgccaacccaaaatgaggacgaggctcaagttgatgaaggagaagaccaaagagatgagccccctcaagatgacggcaacgatcaagggggagatgcaaatgatcaagacaaggaggatgaacaaccaaggccgccacacccaagagtccaccaagcaatccaacgagatcaccccatcgacaccatcctcggcgacattcataaggggggtagaggaagcactacaagattcggattgggtgatggcgatgcaagaggagctcaacaatttcacaaggaacgaggaaccaagtgggtcttccgcaacaaacaagacgagcatggtgtggtgacaaggaacaaagctcgactcgtggccatggggtattcacaagtcgaaggtttggattttggtgaaacctatgcacccgtagctaggcttgagtctattcgcatattattagcctatgctacttaccatggcttcaagctttatcaaatggacgtgaagagtgccttcctcaatggaccaatcaaggaggaggtctatgttgagcaacctcccggctttgaagatagtgagtaccctaaccatgtctataggctctctaaggcgctttatgggctcaagcaagccccaagagcatggtatgaatgccttagagattttcttattgctaatggcttcaaagtcggcaaagccgatcctactttattcactaagactcttgacaatgatttgtttgtatgccaaatttatgttgatgatatcatatttgggtctactaacgaatctacatgtgaagaatttagtaggatcatgacacaaaaattcgagatgtcgatgatgggggagttgaagtatttcctaggatttcaagtcaagcaactccaagagggcaccttcatttgtcaaacgaagtacactcaagacattctaaccaagtttggaatgaagaatgccaagcccatcatgacacccatgggaaccaatgggcatctcgacctcgacacgggaggtgcaaaaggttcacacttagccaataaaagaccgagtattgagttcaacaaaagggcaaaggagcaaccaaaggctcctctggtctggcgcaccggactgtccggtgtgccaccggacagtgtccggtgcaccagaggacttcagctcaaactcttcgccctcgggaatatccagagtcagcgcgccagtgtacaccggacagtgtccggtgctccgaagaaagacgcggctcaggaactcgccagtctcgggttttcactccagccgctccgctataattcaccgaactatccg

SEQ ID NO: 129608 - DNA, 638 bp, Zea mays
  Clone ID: MRT4577_49675C.1
aattcggcacgagggcaggcgcacagactactctgatcttgggctgggggacgccggtggcgagcgagcgaactgtgagctgctggcacgcttgctgtcgctgcggaccgccgggcctggaccgagacaggacagctcaggtggcacaggcgctggacgcgctggtgcccaccagcgacggagcccgtggatgcgccagggctggggccaagggcgccaactggctgggcgggctgagccgtgcgaccttccccaaagagttgctgttcggcacggggacgtgcgcgcaccatgtctagggctccgcgtccaccaaagggcggggcccatccatctggtgattattcgcgcacgtcccacaaaagattgccgggaataaaaatggagacgctgcagtggatcaataccataggtacaaggaagacgtcaatctcatgagaagtctgaactttgatgcctaccggagatcaatactgatggtccaagatcttcccggatggcgaacggaaaaggaagccacaatgtgcacggtattacaatagtctgagtaactatactgctcatgaaggcatgactccttacataaaccttgaccactatgatcatcctgttgcgctggacattaatatggagggcgg

SEQ ID NO: 129609 - DNA, 6150 bp, Zea mays
  Clone ID: MRT4577_49676C.1
atgggcgcattggtaaggagtgcctttaagtttccgagggcttcctcggcctcgggggtccaagtgaagcgctcggccttcctcaagaggcggtacaagggcaatcctctctcgccaaggcgcgagatgaagcggctcagagccgcaaggcatccgatgaccctttgtactccctttaaatctttgatgggtcccatgttggtgatggctgcgattttctccgggttggcctcgatgcctcgttcggagacgatgaaccccaggagcatgcctcaggggacttcgaagacgcacttctcgagattgagtttcaatccttttgcacgcaggcacccgaaagttacttcgaggtcggagaggaggtgctgcttcacgggtcgggcaccggctcggatatccagcgagtgctcggcgacatccctcggtatgccgggcatgtccgagggactccacgcaaaaaatttaggcgtttgcgcggaggaagtcgacgagcactacttcctatttggggtcgagcttggagccgaccctgacgtgcttgcaggtgtcgttgctggggtcgagggcgacggtcttaaccgcctcggccggttcgaagttgccggtgtggcgcttcgcatcaggcgcctccttggagaggcaatccaggtcggcgatgagggcctcggactcggcgatgtcctcagcgtactccacgcattccacgtcgcactcgtaagcgtggcgtttgctctagattatgagttctacaggtgccaaagtgagaagaccgctacaagccacgggaaggctccatcgagtgagtccgccaacaagaagaaggatggatccccttcacgcattcgatcgcacaagagtggcgagaagaagaagaaaatgaagaaagtggtctactacgagaccgactcttcctcgccctctacatccggatctgacgccacgtccgtcacttctaagcgccaagagcgcaagaagtatagtaagatccccttacgctatcctcgcattcctaagcatattccattactttccgtcccattaggcaaaccaccgacgtttgacagtgaagattattctaggtggagtgatatgatgagatatcacctaacctcactccacaaaagcatatgggatgttgttgagtttggtgtacaggtaccatccgtaggggatgaagattacgatgaggacgaggtggcccaaatcgagcacttcaactctcaagccaccactatactcctcacctctctaagtcgagaggagtataacaaggtgcaagggttgaagagcgccaaagagatttgggacatgctcaaaaccgcgcacgaaggagacgaggtgaccaaaatcaccaagcgggagacgatcgagggggagctcagtcgcttcaggcttcgccaaggggaggagccacaagagatgtacaaccggctcaagaccttggtgaaccaagtgcgcaacctcaggagcaccaaatgggatgaccatgaaatggtcaaggaagtaataggaaaatttgtgagctttgagttgatgatcaaaggctcaaataaaatcatcgagcaagatgcctcctccacacccgaagcacaaccggtcgcattcaatgcaacagaggagaagaaggaagagtctacatcaagtagactccccattgacgcctccaagctcgacaatgaggagatggcgctcatcatcaagagcttctaccaaatcctcaagcaaaggagggggaaggactacaaatcccgctccaagaaagtgtgctacaagtgtggtaagcccggtcactttattgcaaaatgtccattatcaagtgacagtgacagggataacgacaagaagggcaagagaagagaaaataataggtatcacaagaagaagggcggcgatgcccatgtgtgccgcgagtggaactccgacgagagctccaccgactcctcctccgacgaggacgccgctaacatcaccgtcaccaaaggactcctcttccccaacgtcggccacaagtgcctcatggcaaaggacgacaaaaggaagaaggtaaaatcaagatcctccactaaatatgcatcctctagtgatgaggataactctagtgacaaggaggataatttgtgcaccctttttgccaacctaaacatgcaacaaaaagaaaagttaaatgaattaattattgttattcatgagaaggatgaactcttggacacccaagaggacttcctaattaaggaaaataagaagcatgttaaggttaagaatgctaatgctctagaggtagaaaaatgtgaaaaattatctagtgagctaagcacgtgccatgatattattaccaaccttagaaataagaatgctagattaattgctaagattgattcaaatgtttgtgatgattcaatttccaatcttagagatgataatgttagtttacttgctaagattgaagaattgaatgtatctcttgctagccttagaaatgagaacgaaaaattaattgctaagactaaagacttagatgtttgcaatgctaacatttccaatcttagaagtgaaaatgacattttacatgctaagattgttgaactaaaatcttgcaaaccctctacatctaccgttgagcatgtttctatttgcactagatgtagagacattaatgttgatgctattcatgatcacctagctttaattaagaaacaaaatgatcacatagctcaacttaatgccaaaattaatgagcatgacttagaaaatgaaaattttaaatttgctagaagcatgctctatagtgggagacgccctggcatcaaggatggcattggcttccaaaagggagacaatgtcaaacttaatgcccctcctaaaaaattgtctaactttgttaagggcaaggctcccatggctcaggataacgagggttacattttgtaccctgccgattatcccgagcacaagattaggagaattcactatatgaagtttcactctggctctaaccatgcttttatgtataagagtgagacatctagttctaggcaatcaacccgtgctaaattgcctaagaagaaaactcctattgcatcaaatgaaactagtatttcatttaaaacatttgatgcatcttatgttttaactaacaaatccggcaagatagttgccaaatatattgggggcaaacacaagggatcaaagacttgtgtttgggtacccaaagttcttgtatctaatgtcaaaggacccaaaaccatttgggtttatgcatccgggggctcaagttggatcatcgacagcgggtgcacaaaccatatgacaggggagaagaagatgttctcctcctacgagaaaaaccaagatccccaacgagctatcacattcggggatggaaatcaagatttggtcaaaggattgggtaaaattgttatatctcctgaccattccatttccaatgtttttcttgtagattttttagactacaacttcctttcagtttcgcaattatgtaaaatgggttacaactgtctttttacggatataggtgttaatgtctttagaagaagtgatgattcagttgcatttaagggagtgttagagggtcagctatacttagtagattttgatagagctgaactcgacacttgcttaattgctacgactaacatgggctggctctggcatcgccgactagcacatgttggaatgaagaatcttcacaagcttctaaagggagaacacattttgggactaacaaatgttcattttgagaaagacatgatttgtagcgcatgtcaggcagggaagcaagttggtgttcatcatccgcacaaaaacatcatgacgactgacaggccactcgagctcctacacatggacctattcggcccgatagcttacataagcatcgacgagagtaagtactgtctagttattgtggatgattattctcgcttcacttgggtattctttttgcaggaaaaatctcacacccaagaaactttgaaaggattcttgagacgggctcaaaatgagttcggcttgaggatcaagaagataagaagcgacaacgggacagagttcaagaactctcaaatcgaaggcttccttgaggaggagggcatcaagcatgagttctcttctccctacaccccacaacaaaatggtgtagtggagaggaagaatagaactctattggacatggcaaggaccatgcttgatgagtacaagacttcagatcggttttgggccgaggcggtcaacaccgcttgctacgccatcaaccggttgtatctacaccgaatcctcaagaagacatcgtatgaactcctaaccggtaaaaagccaaatatttcatattttagagtctttggtagcaaatgctttattctggttaaaagaggtagaaaatccaaatttgctcctaaggctgtaaaaggctttttactaggttatgattcaaacacaagggcatatagagtctttaacaagtcctctggactagttgaagtttcttgtgacattgtgtttgatgagactaacggctctcaagtagagcaagttgatcttgatgagctagataatgaagaggctccgtgcgtcgcgctaaggaacatgtccattggggatgtgtgtcctaaggaatctgaagagcctccaaatacaaaagatcaacaatcttcctccatgcaagcatctccaccaactcaagatgaggatgaggttcaagatgatgaaggagaagatcaagaagatgagccacctcaagaggagagcaatgatcaagggggagatgcccatgatcaagatgaggaagatgaacaagttccaaaaccgccacacccaagagtccaccaagcaattcaacgagatcaccccgtgaacaccatcctcggcgatattcaaaagggggtaactactcgatctcgtgttgctcatttttgtgaacattactcttttgtttcctctattgagccacacaaggtagaggaagcacttcaaggaaccaagtggttcttccgcaacaagcaagatgagcatggtgtggtgacaaggaacaaagcccgacttgtggccaagggatattcacaagtcgaaggtttggatttcggtgaaacctatgcacccgtagctaggctagaatcaattcgcattttacttgcctatgctacttaccatggcttcaagctttaccaaatggacgtgaagagtgccttcctcaatggaccaatcaaggaggaggtctatgttgagcaacctcccggctttgaagatagtgagtatcctaaccatgtatataaactctctaaggcgctttatgggctcaagcaagccccaagagcatggtatgaatgcctaagagactttcttatcactaatggcttcaaagtcggaaagaccgatcctactctatttactaaaacacttgcaaatgatttgtttgtatgccaaatttatgttgatgatattatatttgggtctactaacgaatctacatgtgaggaatttagtaggatcatgacacagaaattcgagatgtctatgatgggggagttgaagtacttcttaggatttcaagtgaagcaactccaaaagggcacctttattagccaaacaaagtatattcaagacattctaaacaagtttgggatgaaggatgccaagcccatcaagacacccatgggaaccaataggcatctcgacctcgacacgggagggtgtaaaattaatagaaagagcacatcggggacttgccaattcttgggaaggtctctggtgtcttgggcttcaaagaagcaaaattccgtagctctttctaccgccgaagccgagtatattgccgtaggccattgttgcgtgcaattgctttggatgaggcaaacccttagggactatggttacaaattaaccaaagttcctcttctatgtgataatgagagtgcaatccgcatggcggataatcccgttgaacatagccgcactaaacacatagccattcggtatcattttctaagggatcaccaacaaaagggggatatcgagattgcatatattaacaccaaagaacaattagccgatatctttaccaagccactagatgaacaaacatttaacaaacttaggcatgagctaaatattcttgattctcggaatttcttttga

SEQ ID NO: 129610 - DNA, 392 bp, Zea mays
  Clone ID: MRT4577_49677C.1
tcgtttttctcgagcactagacagtgcacagtgcagggtccggtgtacactggattgtgccgtgaggcaccattgtgcccagatagagatgattttgaaaatccttttccggattgcacactaaacctaatcccaacttataagcacacaaaagaacacctgttgggacaggtatatgcaccctcacatattctctcatacttttcaaaatattttgccataggctatgtagtttttaggaaaatagtcaaattgtgagaattttcatttgagagttacactaggggtttcatgaatgaattgagtggttcatcacctacataatcaagatttttaagttgctcctttggagccgtttgtcttataaaaccccacatcatttttttcttcta

SEQ ID NO: 129611 - DNA, 627 bp, Zea mays
  Clone ID: MRT4577_49678C.1
atgaagaaagtggtctactacgagactgattcttcgtcgccatccacctccagctccaacacgccatccgtcacttctaagcgccatgagcgcaagaagtttagtaagatccttttacgctaccctcgcatttccaaacgcactcctttactttccgtccccctaggcaaatcactggtttttgacgatgaagattattatatgtggagtgataaaatgaggcaccatctaacctcactccacgctagcatttgggacattgttgagtttggagcacaggaaccatccgtgggggatgaaggctatgattcggacgaggtagcccaaatccggcacttcaactcccaagccactactatactccttgcctctctaagtcgagaggagtataataaggtgcaagggttgaagagtgccaaggagatttgggatgtgctcaaaaccacgcacgaaggagacgaggtcactgttggggcgaaggcaaagacgccacccttcgctcgtcgccttcgctgcagtcgctggtctgacagagacaaaacgggcagggacacccttcgctcgattcagcaccagacgaaggcctgcggtgacgtctccccgcagcacggcctcgtcctgctctga

SEQ ID NO: 129612 - DNA, 5784 bp, Zea mays
  Clone ID: MRT4577_49679C.1
atgtcgggagatcacgccaagaaggagatggagaccggcgaaaagcccactacaagccaagggagcacttcatcggaagagtcccgcaccaagaggagggagaagaagaatatctcctccaacaaagggaaggaaaagaaatcttcttctcaccacaaagagaagaaggaaaaatcttcttcccacaagccgcatcggagtaaggacaagcaaaagaggatgaggaaagtggtctactatgagaccgacacttcatcaacatcgacctccggctccgacacgccctctgtaacttctaaacgccaagagcgtaagaagtttagtaagatccccctacactaccctcgcatttctaaacatgcacctttactttccgtcccattaggcaaaccaccaacttttgatggtgaagattatgctaggtggagtgactttatgcgatttcatctaacctcactccacaaaagtatatgggatattgttgagtttggtgcacaggtaccatccgtaggggacaaagattatgatgaggatgaggtggcccaaatcgagcacttcaactctcaagcgacaacaatactcctcgcctctttaagtagagaggagtataacaaagttcaagggttgaagagcgccaaagaagtttgggatgtgctcaaaaccgcgcacgagggagacgagctcaccaagatcaccaagcgggaaacgatcgagggggagctcggtcggttccggcttcgcaaaggggaggagccacaacacatgtacaaccggctcaagaccttggtgaaccaagtgcgcaacctcgggagcataaaatgggatgaccatgaaatggttaaggttattctaagatctcttattttccttaatcctactcaagttcaattaattcgtggtaatcctagatatactaaaatgacccccgaggaagttatcgggcattttgtaagttttgagtgcatgatcgaaggctcgaggaagatcaacgagcttgatgatccatctacatccgaggctcaacccgtcgcattcaaggcgacggaggacaagaaggaggaggctacaccaagtcgacaaccaatagacgcctccaagctcgacaatgaggaaatggcgctcgtcatcaagagcttccgccaaatcctcaagcaaaggagggggaaagactacaagtcccgctccaaaaaggtttgctacaagtgtggtaagcccggtcattttattgctaaatgtcctatctctagtgacagtgaccgaggcgacgacaagaagggaagaagaaaggaaaagaagaggtactacaagaagaagggcggcgatgcccatgtttgtcgggagtgggattccgacgaaagctcaagcaactcctcctccgacgaggacgccgccaacatcgccgtcaccaagggacttctcttccccaacgtcggccacaagtgcctcatggcaaaggacggcaagcggaagaaggttaaatctaactcctccactaaatatgagtcttctagtgatgataatgctagtgatgaggaggataatttgcgtaccctttttgccaatcttaacatggaacaaaaggaaaaattaaatgaattaattagtgctattcatgaaaaggatgaccttttggattcccaagaggattgtcttattaaggaaaacaagaaacatgttaaggttaaaaaggcttatgctcttgaaattgagaaatgtgaaaagttatctagtgagctaagcacttgccgtgagatgattgacaaccttagacatgaaaatgctagtttaaatgctaaggttgattcacatgtttgtaatgtttcaattcccaatcctagagataataataatgatttgcttgctaggattgaagaattaaacatttctcttgctagccttagaaatgaaaatgaaaacttgcttgctaaggctaaagattttgatgtttgcaaagttacaatttccgatcttagagataaaaataatattcttcatgctaagattgttgaacttaattcttgcaaaccctctacatctattgttgaacatatatctatttgtactagatgtagagatattgatgttaatgctattcatgatcacatgtccttaattaaacaacaaaatgatcatatagcaaaactagatgctaaaattgccgagcacaacttagaagatgagaaatttaaatttgctcgtagcatgctttataatgggagacgcccgagcatcaaggatggcattggattccaaaggggagacaatgtcaaacttaatgcccctcctaaaagattgtctaattttgtaaagggcaaggctcccatgcctcaggataacgagggttatattttgtaccctgccggatatcctgagagtaaaattaggagaattcattctaggaagtctcactctggccctaatcatgcatttatgtataagggtgagacatctagctctaggcaaccaacccgtgccaagttgcctaagaaaactcctaatacatcaaatgatcataacatttcatttaaaacttttgatgcatcttatgttttgactaacaaatccggcaaaatagttgccaaatatgttgggggcaagcacaagggctccaagacttgtgtttgggtacccaaagttcttgtttctaatgctaaaggacccaaaaccatttgggtctatgcatccgggggctcaagttggatactcgacagcgggtgcacaaaccacatgactggggagaaaaagatgttctcctcatatgagaaaaaccaagatccccaaagagcaattacattcggggatggaaatcaaggtttggtcaaaggtgtcactgtctttagaagaagcgatgattcaatagcatttaagggagtgttagagggtcagctatacttggtagattttgatagagctgaactcgacacttgcttaattgctaagactaacatgggttggctctggcaccgccgactagcccatgttgggatgaagaatcttcacaagcttctaaagggagaacacattttaggattaacaaatgttcattttgagaaagacaggatctgtagcgcatgccaggcaggaaagcaagttggagctcatcatccacacaagaacataatgacgaccgacaggccactggagctcctacacatggatctattcggcccgatcgcttacataagcattggcgggagtaagtattgtctagttgttgtggatgattattctcgcttcacttgggtattctttttacaggaaaaatctcaaacccaagagaccttaaagggattcttgagacgggctcaaaatgagttcggcttaaggatcaagaaaataagaagcgacaacgggacggagttcaagaactctcaaattgaaggcttccttgaggaggagggcatcaagcatgagttctcttctccctacacgccacaacaaaatggtgtagtggagaggaagaatagaactctattggacatggcaaggaccatgcttgatgagtacaagacttcggatcggttttgggccgaggcggtcaacaccgcttgctacgccatgaaccggttgtatctacaccgaatcctcaagaagacatcatacgaactcctaatcggtaaaaagcccaacatttcatattttagagtctttggtagcaaatgctttattcttgttaagagaggtagaaaatctaaatttgctcctaagactgtagaaggctttttacttggttatgactcaaacacaagggcatatagggtctttaacaagtccactggactagttgaagtctcatgtgacgttgtgtttgatgagactaacggctctcaagtagagcaagttgatcttgatgagataggtgaagaagaggctccatgcatcgcgctaaggaacatgtccattggggatgtgtgtcctaaggaatccgaagagcctccaaatgcacaagatcaaccttcctcctccacgcaagcatctccaccaactcaagatgaggatgaagctcaagttgatgaagtagaagatcaagcaaatgagccacctcaagataatggcaataatcaagggggagatgcaaatgaggaagacaaggcggaagaggaacaaaggccgccacacccaagagtccaccaagcaatccaacgagatcaccccgtcgacaccatcctcggcgacattcataagggggtaactactcgatctcgtgttgcacatttttgtgaacattactcgtttgtttcctctattgaaccacacagggtagaggaagcactacaagattcggattgggtggtggcaatgcaagaggagctcaacaacttcacgaggaatgaggtatggcatttagttccacgtcctaaccaaaatgttgtaggaaccaaatgggtcttccgcaacaagcaagacgagcatggtgtggtgacgaggaacaaagctcgacttgtggccaagggatactcccaagtcgaaggtttggatttcggtgaaacctatgcacccgtagctaggcttgagtcaattcgcatattattagcctatgctacttaccatggctttaagctttatcaaatggacgtgaaaagtgccttcctcaatgggccgatcaaagaagaggtctatgttgagcaacctcccggctttgaagacagtgagtaccctaaccatgtctataagctctctaaggcgctttatgggctcaagcaagccccaagagcatggtatgaatgccttagagatttccttattgctaatggcttcaaagtcggtaaagccgatcctacactctttactaaaactcttgaaaatgacttgtttgtatgccaaatttatgttgatgatattatatttgggtctactaacgagtctacatgtgaagagtttagtaggatcatgacacagaaattcgagatgtctatgatgggggagttgaagtatttcttaggatttcaagtaaagcaactccaagagggcaccttcatcagccaaacgaagtacactcaagatattctaaccaagtttgggatgaaggatgctaaacccatcaagacacccatgggaactaatgggcatctcgacctcgacacgggaggtaagtccgtggatcaaaaggtataccggtcgatgataggttctttactctatttatgtgcatctcgaccggacattatgctttccgtatgcatgtgtgcaagattccaagccgaccctaaggaagctcaccttacggccgtaaaacgaatcttgagatatttggcttatactcctaagtttgggctttggtatcctaggggatccacttttgatttaattggttattcggatgccgattgggcggggtgcaaaatcaataggaagagcacatcggggacttgccagttcttgggaagatccttggtgtcttgggcttcaaagaagcaaaattcggttgctctttccaccgccgaagccgagtacattgccgcaggccattgttgcgtgcaattgctttggatgaggcaaaccctgcgggactacggttacaaattaaccaaagttcctttactatgtgataatgagagtgcaatcaaaatggccgacaatccagtcgagcatagccgcactaagcacatagccattcggtatcattttcttagggatcaccaacaaaagggagatatcgagatttcttacattaatactaaagatcaattagccgatatatttaccaagcctcttgatgaacaatcttttaacaaacttaggcatgagctcaatattcttgattctaggaacttcttttgttaa

SEQ ID NO: 129613 - DNA, 596 bp, Zea mays
  Clone ID: MRT4577_4967C.1
ccggccgggatctctacacgttccaggacgtcactcctaccccgacgcacaatgactcacctgccgaatcagacacgtctggcctgagcgcctagtcaactcgaggccagcacaatatgtggctcgactccaactgaagacggcgatttcccacgccaagtcgcgccagaccatactacagttcatctccaatgtgcttatgatcaaaaagcacgtgacacagcgctggcgaacgagccgcctgcagctgacgatcgtccgaatagaaaggctactgcgggggtacgtccagaggagggcgaccgccaatgccagtatgcccagacagaacctctgaaagcaccgcctccgaggactacaacgcattgtgagccagcaccgcgcaagagaaaagatccaccggcacctataccacgacctgtaccacagcaaaaaagaaagacgcttcgaacaccagcgaggacaagcaggagcaattcacctggccgactgtgcagaaatgccgcgagaccctactataataatagattgatgacacctgaggaacaaagagtgatgcgacgagagagacaacactagagtgctctacagaagcg

SEQ ID NO: 129614 - DNA, 1074 bp, Zea mays
  Clone ID: MRT4577_49680C.1
ttagcggaagcttttgatgatgagcgccatctcctcattgtcgagcttagaggcgtcgatgggttgtctacttgatgtagactcctcctttttctccttcgttgccttgaacgtgaccggttgtgcttcggacatggaggggccatctagctcgatgattttctttgagcctttgatcatcaactcaaagctcacaaagtttcctattacttcctcgggagacattagtgtatatctaggattaccacgaattaattgaacttgcgtaggattaagaaaaacgagggatcttagaataaccttgaccatctcatggtcatcccatttggtgctcccgaggttgcacacttggtttaccaaggtcttcaagcggttgtacatgtcttgtggctcctccccttggcgaagccggaagcgaccgagctccccctcgatcgtctcccgcttggtgattttggtcacctcatctccttcgtgcgcggtcttgagcacgtcccaaatctccttggcgctttttaacccttgcaccttgttatactcctctcgacttagagaggcgaggagtatagtggtggcttgggagttgaagtgccggatttgggcgacctcgtccgaatcatagtcttcatcccccggtgatggtacctgtactccaatctcaacaacatcccaaatgctagtgtggagtgaggttagatgatgcctcattttatcactccacatattataatcttcaccattaaacataggtggtttgcctaatgggacggaaagtaatggagtacgtttggaaatgcgagggtagcgtaggggaagcttactaaacttcttgcgctcatgacacttagaagttacggacgacgtgtcggagccggaggtggatggcgatgaagagtcggtctcgtagtagaccaccttcctcatcttcttcttcttgtcaccgctccgacgcgacttgttgtgtgaaggggatccgttcaccttgttggcggactccccggatggagctttcccatggcttgtggcggacttctcgccggtcccgatctccctcttggcggatgctcccgacat

SEQ ID NO: 129615 - DNA, 201 bp, Zea mays
  Clone ID: MRT4577_49681C.1
gccgcattccaaacagcccgactaggtagcagggcggcaggcacctgcctcgtcaaggaacatggcccgcatgcagaagttggcagtggcgacggcggccgtggtggccttggtgctgctggcggcggcggcgacctctgtggcggccatcagctgcgggcaggtggcgtcggccatctcgccctgcattttcaacgcgcg

SEQ ID NO: 129616 - DNA, 5772 bp, Zea mays
  Clone ID: MRT4577_49682C.1
atgtcgggagatcacgccaagaaggagatggagaccggcgaaaagcccactacaagccacgggagcacttcatcggaagagtcccgcaccaaaaggagggagaagaagaagagctcctccaacaaagggaaggagaagaaatcttcttctcatcacaaagagaagaaggaaaaatcttcttcccacaagccgcatcggaaaggcgacaagcacaagaggatgaggaaggtggtctactacgagaccgacacttcatcaacatcgacctccgactccgatgcgccctccgtcacttctaagcgccaagagcgcaagaagtatagtaagatccccctacgttaccctcgcatttccaaacatacacctttactttccgtcccattaggcaaaccaccaacatttgatggtgaagattacgctaggtggagcgatttaatgcgatttcatctaacctcgctccacaaaagcatatgggatgttgttgagtttggcgcgcaggtaccatccgtaggggatgaggactatgatgaggatgaagtggcccaaatcgagcacttcaactctcaagcaacaacaatactcctcgcctctctaagtagagaggagtataacaaagtacaagggttaaagagcgccaaggagatttgggatgtactcaaaaccgcgcacgagggagacgagctcaccaagatcaccaagcgggaaacgatcgagggggagctcgatcggttccggcttaacaaaggggaggagccacaacacatgtacaaccggctcaagactttggtaaaccaagtgcgcaacctcgggagcaagaagtgggacgaccacgaagtggtaaatgttattttaagatctctcatttttctaaatcccactcaagttcaattgattcgtggtaatcctagatatactaaaatgacccccgaggaagttatcgggcattttgtaagttttgagtgcatgatagaaggctcgaggaaaatcaacgagcttggcgagccatccgaagctcaacccgttgcattcaaggcgacggaagaaaagaaggaggagtctacaccaagccgacaaccaatagacgcctccaagcttgacaatgaggagatggcgctcgtcatcaagagcttccgccaaatcctcaaacaaaggagggggaaagactacaagtcccgctccaagaaggtttgctacaaatgtggtaagcccggtcattttattgctaaatgtcccatgtctagtgacagtgaccgaggcgacgacaagaaggggagaagaaaggagaagaaaaggtactacaagaggaagggcggcgatgcccatgtttgtcgggaatgggattccgacgaaagctcaagcgactcctccgacgacgaggacgccgccaacatcgccgtcaccaagggactcctcttccccaacgtcggccacaagtgcctcatggcaaaggacggcaaacggaaaaaggttaaatctaactcctccactaaatatgaatcttctagtgatgaaaatgctagtgatgaggaggataatttgcgtattctctttgccaatcttaacatggagcaaaaagaaaaactaaatgaattgattagtgctattcatgaaaaggatgaccttttggactcccaagaggattgtctaattaaagaaaacaagaaacatgttaaggttaaaaaggcttatgctctagaagtagaaaaatgtgaaaaattatctagtgagctaagcacttgccgtgaaataattgacaaccttaggaatgaaaatgctattttaaatgctaaggttgattctcatgtttgtgatgtttcaatttccactcctagagataataatgatgatttgcttgctaggattgaagaattgaacatttctcttgctagccttagagtagaaaatgaaaagttgattactaaggctaaagaactagatgtttgcaatgttacaatttctgaccttagaactaaaaatgatatgttgcatactaaggttgtagaattaaaatcttgcaaaccctctacatctattgttgagcatgtatctatttgtactagatgtagaaatgttgatattgatgctattcatgatcacatgattttaattaagcaacaaaatgatcatatagctaaactagatgctaaaattgccgagcacaacttagaaaatgagaaatttaaatttgctcgtagcatgctttataatgggagacgccctggcatcaaggatggcattggcttccaaaggggagacaatgtcaaacttaatgcccctcctaagaacttgtctaactttgttaagggcaaggctcccatgcctcaggataacgagggttacattttgtaccctgccggttatcccgagagtaaaattaggagaattcactctaggaagtctcactctggccctaaccatgcttttatgtataagggtgagacatctagctctaggcaaccaacccatgccaagttgcctagaaagaaaactcctagtgcatcaaatgatcatactatttcatttaaaacttttgatgcttcttatgttttgacaaacaaatccggcaaggtcgttgccaagtttgttgggggcaagcacaagggatcaaagacttgtgtttgggtacccaaagttcttgtttctaatgccaaaggacccaaaacagtttgggtttatgcatccgggggctcaagttggatactcgacagcgggtgcacaaaccacatgaccggggagaaaaggatgttctcctcatatgagaaaaaccaagatccccaacgagctatcacattcggggatggaaatcaaggtgtcactgtctttagaagaagtgatgattcaatagcatttaagggtgtgttagagggtcagctatacttagtggattttgatagagctgaactcgacacatgcttaattgctaagactaacatgggttggctctggcaccgccgactagcccatgttggaatgaagaatcttcacaagcttctaaagggagagcacattttaggattaacaaatgttcattttgagaaagacaggatttgtagcgcatgccaggcggggaagcaagttggagtccatcacccacacaagaacatcatgacgaccgacaggccgcttgagctactccacatggatctattcggcccgattgcttacataagcatcggcgggagtaagtattgtcttgttattgtggatgattattctcgcttcacttgggtattctttttacaggaaaaatctcaaacccaagagaccttaaagggattcttgagacgagctcaaaatgagttcggcttaaggatcaagaaaataagaagcgacaacgggacggagttcaagaactctcaaattgaaggcttccttgaggaggagggcatcaagcatgagttctcctctccctacacgccacaacaaaatggtgtagtggagaggaagaatcgaactctattggacatggcaagaaccatgcttgatgagtacaagacaccggaccggttttgggccgaagcggtcaacaccgcctgctacgccatcaaccggttatatcttcaccgaatcctcaagaagacatcctatgaactcctaaccggtaaaaagcccaacatttcatattttagagtttttggtagcaaatgttttattcttgttaaaagaggaagaaaatctaaatttgctcctaaaactgtagaaggctttttacttggttataactcaaacacaagggcatatagggtctttaacaagtccactggactagttgaggtctcatgtgacgttgtgtttgatgaaactaacggctctcaagtagagcaagttgatcttaatgagataggtgaagaacaggctccatgcatcgcgctaaggaacatgtccatcggggatgtgtgtcctaaggaatccgaagagcctccaagtacacaagatcaaccatcctcctccatgcaagcatctccaccaactcaaaatgaggatgaggctcaaaatgatgaagagcaaaatcaagaagacgagccacctcaagatgatagcaatgatcaagggggagatacaaatgatcaagaaaaggaggatgaggaagaaccaagaccgccacacccaagagtccaccaagcaatccaacgagatcaccccgtcgacaccatcctcggcgacattcataagggggtaactactcgatctcgggttgctcatttttgtgaacattactcttttgtttcctctattgagccacacagggtagaggaagctctccaagattcggattgggtggtggcgatgcaagaggagctcaacaatttcacgaggaatgaggtctggcatttagttccacgtcctaaccaaaatgttgtaggaaccaaatgggtcttccgcaacaagcaagatgagcatggtgtggtgacaaggaacaaagctcgactcgtggccaaagggtattcacaagtcgaaggtttggattttggtgaaacctatgcacccgtagctaggcttgagtcaattcgcatattactggcctatgctacttaccatggctttaagctctatcaaatggacgtgaaaagtgccttcctcaacggaccaatcaaggaagaggtctatgttgagcaacctcccggctttgaagacagtgagtaccctaaccatgtctataggctctctaaggcgctttatgggctcaagcaagccccaagagcatggtatgaatgcctaagagatttccttattgctaatggcttcaaagttggcaaggtcgatcctacactctttactaaaactcttgagaatgacttgtttgtatgccaaatttatgttgatgatattatatttgggtctactaacgagtctacatgtgaagagtttagtaggatcatgacacagaaattcgagatgtcgatgatgggggagttgaagtattttctaggattccaagtcaagcaactccaagagggcaccttcatttgccaaacgaagtacactcaagacattctaaccaagtttgggatgaaggatgccaaacccatcaagacacccatgggaactaatgggcatctcgacctcgacacgggaggtaagtccgtggatcaaaaggtataccggtcgatgattggttcattgctttatttatgtgcatctcgaccggacattatgctttccgtttgcatgtgtgcaagattccaatccgaccctaaggaatcacaccttacggccgtaaaacgaattttgagatatttggcttatacacctaagtttgggctttggtaccctcggggatccacatttgatttgattggttattcggatgccgattgggcggggtgcaaaattaataggaagagcacatcagggacttgccagttcttgggaagatccttggtgtcttgggcttcaaagaagcaaaattcggtcgctctttccaccgccgaagccgagtacattgccgcaggacattgttgcgcgcaattgctttggatgaggcaaaccctgcgggactacggttacaaattaaccaaagtccctttgctatgtgataatgagagtgcaatcaaaatggccgacaatcccgtcgagcatagccgcactaagcacatagccattcggtatcattttcttagggatcaccaacaaaagggggatatcgagatttcttacattaatactaaagatcaattagccgatatctttaccaagccacttgatgaacaatcttttaccagacttaggcatgagctcaatattcttgattctagaaatttcttttgctag

SEQ ID NO: 129617 - DNA, 3591 bp, Zea mays
  Clone ID: MRT4577_49683C.1
tttcgccctattcaccccccctctaggcgactatcaagaagcatgctcaataatgggagacgcccgggcattaaggacggcattggcttccaaaggggagacaatgtcaaaattaatgcccctcctaaaaacttgtctaactttgttaagggcaaggctcccatgtctcaggataacgaaggatacattttgtaccctgccggctatcctgagagcaagattaggaaaattcattctaggaagtctcactctggccctaatcatgctttcatgtataagggtgagacatctagatctaggcaaccaacccatgccaagttgcctagaaagaaaacccctaatgcatcaaatgatcatgccatttcatttaaaacttttgatgcatcttatgtgcttactagcaaatccggcaaggtttatgcatccgggggctcaagttggatactcgatagcgggtgcacaaaccacatgacaggggagaaaaggatgttctcctcatatgagaaaaaccaagatccccaacgagctatcacattcggggatggaaatcaagattccttagattacaacttgctttccgtttctcaattatgtcaaatgggttacaactgtctattcactgatgttggtgtcactgtctttagaagaagtgatgattcaatagcatttaagggagtgttagagggtcagctatacttggtagattttgatagagctgaactcgacacttgcttaattgctaagactaacatgggttggctctggcatcgtcgactagcccatgttgggatgaagaatcttcataagcttctaaagggagagcacattttaggattaacaaatgttcattttgagaaagacaggatttgtagcgcatgccaggcagggaagcaagttggagtccatcacccacacaagaacatcatgacgaccgacaggccgcttgaactactccacatggatctattcggcccgatcgcttacataagcatcggcgggagtaagtattgtcttgtaatagtggatgattattctcgcttcacttgggtattctttttacaggaaaaatctcaaacccaagagaccttaaagggattcttaagacgagctcaaaatgagttcggcttaagggtcaagaaaataagaagcgacaacgggacggagttcaagaactctcaaattgaaggcttccttgaggaggagggcatcaagcatgagttctcctctccctacacgccacaacaaaatggtgtagtggagaggaagaatcgaactctattggacatggcaagaaccatgcttgatgagtacaagacaccggaccggttttgggccgaagcggtcaacaccgcctgctacgccatcaaccggttatatcttcaccgaatcctcaagaagacatcatatgaactcctaaccggtaaaaagcccaacatttcatattttagagtttttggtagcaaatgcttcattcttattaaaagaggtagaaaatctaaatttgctcctaaaactgtagaaggctttttacttggttatgactcaaacacaagggcatatagggtctttaacaagtccactggactagttgaagtctcttgtgacgttgtgtttgatgaaactaacggctctcaagtagagcaagttgatcttgatgagataggtgaagaacaggctccatgcatcgcgctaaggaacatgtccatcggggatgtgtgtcctaaggaatccgaagagcctccaagtacacaagatcaaccatcctcctccatgcaagcatctccaccaactcaaaatgaggatgaggctcaaaatgatgaagagcaaaatcaagaagacgagccacctcaagatgatagcaatgatcaagggggagatacaaatgatcaagaaaaggaggatgaggaagaaccaagaccgccacacccaagagtccaccaagcaatccaacgagatcaccccgtcgacaccatcctcggcgacattcataagggggtaactactcgatctcgggttgctcatttttgtgaacattactcttttgtttcctctattgagccacacagggtagaggaagctctcaaagattcggattgggtggtggcgatgcaagaggagctcaacaatttcacgaggaatgaggtctggcatttagttccacgtcctaaccaaaatgttgtaggaaccaaatgggtcttccgcaacaagcaagatgagcatggtgtggtgacaaggaacaaagctcgactcgtggccaaagggtattcacaagtcgaaggtttggattttggtgaaacctatgcacccgtagctaggcttgagtcaattcgcatattattggcctatgctacttaccatggctttaagctctatcaaatggacgtgaaaagtgccttcctcaacggaccaatcaaggaagaggtctatgttgagcaacctcccggctttgaagacagtgagtaccctaaccatgtctataggctctctaaggcgctttatgggctcaagcaagccccaagagcatggtatgaatgcctaagagatttccttattgctaatggcttcaaagttggcaaggccgatcctacactctttactaaaactcttgagaatgacttgtttgtatgccaaatttatgttgatgatattatatttgggtctactaacgagtctacatgtgaagagtttagtaggatcatgacacagaaattcgagatgtcgatgatgggggagttgaagtattttctaggattccaagtcaagcaactccaagagggcaccttcatttgccaaacgaagtacactcaagacattctaaccaagtttgggatgaaggatgccaaacccatcaagacacccatgggaactaatgggcatctcgacctcgacacgggaggtaagtccgtggatcaaaaggtataccggtcgatgattggttcattactttatttatgtgcatctcgaccggacattatgctttccgtttgcatgtgtgcaagattccaatccgaccctaaggaatcccaccttacggccgtaaaacgaatcttgagatatttggcttatacccctaagtttgggctttggtaccctcggggatccacatttgatttacttggttattcggatgccgattgggcggggtgcaaaatcaataggaagagcacatcggggacttgccagttcttgggaagatccttggtgtcttgggcttcaaagaagcaaaattcggtcgctctttccaccgccgaagccgagtacattgccgcaggacattgttgcgcgcaattgctttggatgaggcaaaccctgcgggactacggttacaaattaaccaaagtccctttgctatgtgataatgagagtgcaattaaaatggccgacaatcccgtcgagcatagccgcactaagcacatagccattcggtatcattttcttagggatcaccaacaaaagggggatatcgagatttcttacattaacactaaagatcaattagcagatatctttaccaagccacttgatgaacaatcttttaccagacttaggcatgagctcaatattcttgattctagaaatttcttttgctag

SEQ ID NO: 129618 - DNA, 1914 bp, Zea mays
  Clone ID: MRT4577_49684C.1
atggcaagaaccatgcttgatgagtacaagacttcggataggttttgggccgaggcggtcaacaccgcttgctacaccatcaaccggttatatcttcaccgaatcatcaagaagacatcatatgaactcctaaccggtagaaaatctaaatttgctcctaaggcggtagaaggctttttacttggttatgattcaaacacaagggcatatagagcctttaacaagtccactggactagttgaagtttcttatgacattgtgtttgatgagactaacggctctcaagtagatcaagttgatcttgatgagctagatgatgaagaggctccgtgcgtcgcgctaaggaacatgtccattggggatgtgtgtcctaaggaattcgaagagcctccacaagcacaagatcaaccatcatcttcaatacaagcatctccaccaacccaagatgaggatcaagctcaagatgatgaaaatgaggatcaagaagatgaaccacctcaagaggagggcaatgatcaagggagagattcccatgatcaagacaagggagatgatgaggatccaaaaccgccacacccaagagtccaccaaggaatacaacgagatcaccccgtgaacaccaacctcggcgacattcataagggggtaaccactcgatctcgtattgctcatttttgtgaacattactcctttgtgtcttctattgagccatacagggtagaagatgcattaagggattcggattgggtgttggcaatgcaagaggaactcaacaacttcacgaggaatgagtggatcttccggaacaagcaagatgagcatggtgtggtgacaaggaacaaagcccgacttgtggccaagggatattcacaagtcgaaggtttggatttcggtgaaacctatgcacccatagctaggcttgagtcaattcgtatattacttgcctatgctacttaccatggcttcaagctttatcaaatggacgtaaaaagtgccttcctcaatggaccaatcaaggaggaggtctatgttgagcaacctcctggctttgaagatagtgagtaccctaatcacgtctataaactctctaaggcgctttatgggctcaagcaagccccaagagcatggtatgaatgcctaagagattttcttatcgctaatggcttcaaagtcggaaaagccgatcctactctctttactaaaacacttgcaaatgatttgtttgtatgccaaatttatgttgatgatatcatatttgggtctactaacgaatctacatgtgaagagtttagtaggatcatgactcaaaaattcgagatgtcaatgatgggggagttgaagtattttctaggctttcaatatattcaagacattcttgcaaagtttgggatgaaggatgtcaagcccatcaagacacctatgggaacaaatgggcatctcgacctcgacacgggaggtaaatccgtagatcaaaagatcgatagaaagagcacatcagggacttgccagttcttgggaagatccctggtgtcttgggcttcaaagaagcaaaattctgtagctctttctaccgctgaagccaagtatattgctgcaggccattgttgcgcgcaattgctttggatgaggcaaacccttagggactatggttacaaattaaccaaagttcctcttctatgtgataatgagagtgcaatccgcatggcggataatcccgttgagcatagtcgcactaaacacatagccattcggtatcactttttgagggatcaccaacaaaggggggatatcgagattgcatacattaacaccaaagaacaattagctgatatcttcaccaagccactagatgagaaaatatttaccaaacttaggcatgagctaaatattcttgattctaggaattttgattga

SEQ ID NO: 129619 - DNA, 2223 bp, Zea mays
  Clone ID: MRT4577_49685C.1
atgcttgatgagtacaagacttcggactggttttgggcggaaggaatcaacaccgcttgctacgccatcaaccgactctaccttcaccgaatcctcaagaagacatcatatgaactcctcaccggtaaaaagcccaatgtttcatattttagagtctttggtagcaaatgttttattcttgttaaaagagatagaaaatttaaattttctcctaaggctgtagaaggctttttacttggttatgactcaaacacaaaggtatatagagtctttaacaagtccactagactagttgaagtctcttgtgacattgtgtttgatgagactaatggctctcaagtagagcaagttgatcttgatgagctagatgatgaagaggcctcgcgcgtcgcgctaaggaacatgtccattgggaatgtgtgccccaaggaacccgaggagcctccacatgcacaagatcaaccatcatcttcaaatcaagcatctccaccaactgaagatgaggatcaagctcaagatgatgaaaatgaagatcaagaagaggcacctcaagaggaggacaatgatcataggggagatgccaatgatcaagacaaggaagatgatcaggttccaagaccgccacacccaagagtccaccaagcgatacaacaagatcacctcgtgaactccatcctcggtgatattaataagggggtaaccactcgatctcgtgtcgcacatttttgtgagcattactcttttgtgtcttctattgagccatacagggtggaagacacattaagagatttagattgggtgttggcaatgcaagaggaactcaacaacttcacgaggaatgaacaatatgagcatggtgtggtgacaaggaacaaagcccgacttgtagccaagggatattcacaagtcgaaggtttggatttcggtgaaacctatgcacccgtagctaggcttgagtcaattcgtatattacttgcctatgctacttaccatggcttcaagctttatcaaatggacgtgaaaagtgccttcctcaatggaccgatcaaggaagaggtctatgttgagcaacctcccgactttgaagatactgagtaccctaaccatgtgtataaactctctaaggcgctttatggactcaagcaagccccaagagcatggtatgaatgcctaagagatttccttatcactaatggcttcaaagtcgataaagtcgatcctacactctttactaaaaccattgcaaatgatttgtttgtatgccaaatttatgttgatgatatcatatttgggtcaactaacaaatctacatgtgaagagtttagtaggatcatgattcaaaaattcgagatgtcaatgatgggggagttgaagtatttcttaggatttcaagtgaagcaactccaagaagacaccttcctcagccaaaccaagtatattcaagacatactcaccaagtttggaatgaaggatgccaagcccatcaagacacccatgggaaccaatgtgcatctcgacctcgacacgagaggtaaatccgtagatcaaaaggtataccggccgatgataggatctttactctatttatgtgcatctcgaccgaatattatgctttccgtatgcatgtgtgcaagattccaagccgatcctaaagaagtccaccttagggccgtgaaaagaatcttgagatatttagttcatacacctaagtttggtctttggtaccccaagggatccacttttgatttaataggttattcaaatgctgattgggctaggtgtaaaattgatagaaagagcacatcagggacttgtcagttcttaggaagacccctggtgtcttgggcttcaaagaaacaaaattcagtagctctttctaccgccgaagctgagtacattgccgcaggccattgttgcgcgcaattgctttggatgaggcaaacccttagggattatggttacaaattaaccaaagtccctctcctatgtgataatgagagtgcaatccgcatgacggataatcccgttgagcacagccgcactaagcacatagccattcagtatcactttttgagggatcaccaacaaaggggggatatcgagattgcttatgttagcaccaaagaacaattagccgatatctttaccaaaccactagatgaggaaacctttaccaaacttacgaatgaactaaacattcttgattctcggaattttgattga

SEQ ID NO: 129620 - DNA, 2343 bp, Zea mays
  Clone ID: MRT4577_49686C.1
atgtcgggagcatccgccaagagggagatcgggaccggcgagaagttcgccacaagccatgggaaggctccatccagggagtccgccaacaaagtgaagggatccccttcacacgataagccgcgtcggagcagtgacaagaagaagatgatgaagatggtggtctactacgagaccggctcttcgtcgccatccacctctggctccgacacgtcgtccataacttctaagcgccatgagcgcaagaagtttagtaagattcccctacgctaccctcgcatttccaaacgtactcctttactttccgtcccattaggcaaaccacctatgtttgatggtgaagattataatatgtggagtgataaaatgaggcatcatctaacctcactccacactagcatttgggatgttgttgagattggagtacaggtaccatcaccgggggatgaagactatgattcggacgaggtcgcccaaatccgacacttcaactctcaagccaccattatactcctcgcctctctaagtcgagaggagtataacaaggtgcaaggattaaagagcaccaaggagatttgggacgtgcttaaaaccgcgcacgaaggagataagatgaccaaaatcaccaagcgggagacgatcgaggggaaactcggtcggtttcgacttaaccaaggcgaggaccctcaagccatgtacaaccgcttgaagaccttggtgaaccaagtgcgcaacctcgggagcacaaaatgggatgaccatgaaatggtcaagttgatgatcaaaggctcaaagaaaatcatcgagctagatggcccctccacgcccgaagcacaaccggtcgcattcaaggcaaccgaggagaagaaggaggagtctacatcaagtagacaacccatcgacgcctctaagctcgacaatgaggagatggcgctcatcatcaagagcttccgccaaatcctcaagcaaaggagagggaaagattacaagccccactccaagaaagtttactacaagtgtggtaagcccggtcattttattgcaaaatgtccactatctagtgacagtgacaagggcgatgacaagaagggcaagaggagagaaaagaagaggtaccacaagaagaggggcggcgatgcccatgtgtgccgcgagtgggactccgacgagagctccaccgactcctcctccgacgaggacgccgccaacatcgccgtcaccaagggcctcctcttccccaacatcggccacaagtgccttatggcaaaggacgacaaaaggaagaaggtaaaatcaaaatcctccactaaatatgcaacctctagtgatgagggtaattctagtgatgaggaggataacttgcacatcctttttgccaacctaaacatgcaacaaaaagaaaagttaaatgaattagttagtgctattcatgagaaggatgaactcttggacacccaagaggacgtcctaattaaggagaacaagaagcatgttaaggtcaaaaatgcttacgctctagaagtagaaaaatgtgaaaaattatctagtgagctaagcacttgtcatgacattattgccaaccttagaaatgagaatgctaaaataattgctaaggttgattcaaatgcttgtgatgtttcaattcccaatcttagagatgataatgttagtttacttgctaagattgaagaattgaatatctctcttgctagccttagaaatgataatgaaaaattaattgctaaggctaaagatttagatgtttgcaatgcttctatttccgatcttagagataagaatgatattttacgtgctaagattgttgaacttaattcttgcaaaccctctacatctaccgttgagcatgtttccatttgtactagatgtagagatattaatgttgatgctattcatgatcacctagcattaattaagaaacaaaatgatcacatagctcaacttaatgctaagattaatgagcatgacttagaaaatgaaaaatttaaatttgctagaagcatgctctatagtgggagacgccctggcatcaaggatggcattggcttccaaaagggggacaatgtcaaacttaacgcccctcctaaaagattgtctaactttgttaagggcaaggctcccatgcctcaggataacgagggttacattttgtaccctgccgattatcccgagcacaaaattaggagaattcactctaggaagtctcactctggccctaatcatgcttttatgtataagggtgagacatctagctctaggcaatcaacccgtgcaaaattgcctaagaaaaaaactcctattgcatcaaatgattctaacatgtaa

SEQ ID NO: 129621 - DNA, 640 bp, Zea mays
  Clone ID: MRT4577_49687C.1
cataaatgcatgattcttactaaacaatgaaaagtaacatcgcaaagtttgaaagttgtcggaaaacaaaccaagagtcatcaagagagaaggcaaagtaacatccaggattgtcacgcaacgaaaagaaaagtatcacgcaaaaagaaagggaaaggaaacaacatccttcagtacagaatgctacatagagcttttaacctgtgaaccatcaaggggactcactgcctttaggggaaggacggctaagctcagcctcatcatcaatcgggctcctgtcttgaccattaagtccaacaggactttcaccacctccaacaatgggactcgcagagttcctgccattaccattctcttttgggctaccatcatagtctgatccacgctttgggcttgcatctatcacttttcggtctggactcaggctttggtccctacctttgggagatacagatcgctccattgccttaggactgcgtgatctgtcctccacgcttttctctcttctcactggggatcgcgatcgactgtagctgcaacctcgactgtaactacggttacggtttgggctccttcggcgacgaggggagcgggatttgactggggacctggaatagcttccaccctgcctggccttttt

SEQ ID NO: 129622 - DNA, 428 bp, Zea mays
  unsure (1)..(428): unsure at all n locations
  Clone ID: MRT4577_49688C.1
caaagangccangggncnggaacggggccagnngcagcaaggaacnncncaaggccagacaanncagccagcaaacgngggaaanggggangggcccagaaaccgngacagncagnanncccgagacnncacngaagacaggcgcgnnaagagccaccagnngcncgagggcgaggacangcagcagcngcngagggncnncagcangggnggagcnncnggcagnnngccagacgacaccnncaacnnccagnccaacangcccncnccgnngccgaaccncgggnncgaaacngagcgnagccanncgncnggcaaagcngnngnnggcnggcncaagaacaaggcggcgangagggggggaaacnncgncaggaagaaagcngccgagagaagggcgcagcnggncgagcnggaggaaagacacc

SEQ ID NO: 129623 - DNA, 475 bp, Zea mays
  Clone ID: MRT4577_49689C.1
agctggcccggctgcaccgccgcggactgactggggggtcacccggcctctatttacgcgaggaccctctcaagggcagggggcaattttgaatacactcttgtgtgaaatcggatgaagagacacgaggtccttgggcctgatgcatgtgaacgacctacagggaggaaacagacgtagcatataagcgtggaatgggaaaatagaggggtagtcagagcaggacttgaagccaatgggcaaagcgatggaaatgttgcaccggaagatatgaggatcacgagctgctctaggtggaggagtaagtggttcaagcatagtcctaaaagaagtggctagtggcgctacttttccaggctaacatgctgtggggtaagcacacacaagggatgagggtgactggagccaattcggcaaccatgaatgtttcgagcttgtcgctcgtcaatttggaatgtgcggacaatgtaaagga

SEQ ID NO: 129624 - DNA, 3440 bp, Zea mays
  Clone ID: MRT4577_4968C.1
cggcccggggctgctccccgtcgtcacatagctcgtctcgtcgcctaccctcccaacccgcattcgcggcgcgggcgccttggaaccctagtcacccgcgccccccctccactgtccactcaacccccgtcccctccctcggcggcggcggcatcggcgtcaaccaagatgtcgggcggcttcttccgggggacgtccgctgaccaggacacgcgcttctcgaataagcaagccaagctgctcaagacgcaaaagttcgcgcccgagcttgaccatctggtggatacgtcaaaggtaaagatggacgtgatgaagccctggattgccaagcgggtcactgagctccttgggttcgaggacgaagttctcatcaacttcatttatggcctcctcgaggagaaggaagccgatggaaagaagattcagatccagctgacagggttcatggagaagaacacagtgaagttcatgagggagctctgggaccatccttctcagtgcacagcagaatgccagtggggtgcctcaacagtttctggatgaaaaagaggctgagatacagcagaaaaaggcagaggatgataggattgcacaggagattcaaaagaagcgagagatggaggaaaatgattcagaactggtaaagaacaaagtgatggatggggatgctggtaactcaagatcctatggcgatccagttggctctgctttaaatagtacaaatttcaataccgaggaagaaaagaacaatgatttcaagcgtagcttaagagcaaagaacaggggaagtcgcagatccaggagcatatctttgtcgccacgtgctaggcaaagatccatctctcctagaaataattctcgttctcctccgaggcgttcccactctattgatagacaccatagatcatcatggcgttcaacttcacctagacgttctatttctccccgaaggcattctccaagaagtaccccttcaatttctagaaggagatcaccttactcaaggagagggtcgccttccttgtcaagatatccatccccatttacacgccggagatctcctcttcgcagaaaatcaccatcatctgggccactaaggtcactttctcctcgccatcgccgctcaccagctcgtgtaccaaggaggtcaccatctcctgcaagtcgaaggtctcctgttcgacgcagattctcaccaggtagacgtacatctccatctccagtaaggcgcaggccaaggtctccatcacctgggaggcgtaggccaaggtctccatcacctgggaggcgtaggccaaggtccccatccccaagaaggcgtaggccaaggtccccatccccaggaaggcgcaggccacggtccccatccccaggaaggcgcaggctacggtccccatctccaggaaggcgcaggccacggtccccatccccaggaaggcgcaggccacggtccccatccccaggaaggcgcaggccacggtccccatccccaggaagacgcagaccacgatccccatcgcctggaaggcgcaggccatggtctcggtctccaataagacgtcagtccccatctccaaaacgccagaggacatcaccaagttcaccgaagactcgttctgcaaatcgacctttatcgccagagggaaggaggagtaccagtccgtacaatagcaggagtcctaatcgctctcgccagagtttaagtaaagatactgagaaagaaacaaatggcaccccttccgttaaggacagagttgtgcactcaagggggcaagaacaaaaatcagatgataataatagggatggtgcaaggattgttggcaataattccccagattctgagcatagattgtcaaagtccttgaggcctcctaactatgaagaaaggaattccacacgtgacagttcttacaagaactcaggcaaacctatatctagtcagggcagcacagatacaagtggagatgaggaacacagtcgtgctagagaaaatgcccggaaagcaaattcatgtcgtaggaaaacaaaggatctctcggcaggtctgcaacctaagaaaatgggtgctggtgactcaagccccagagacaaatctccattcattttacaacagagtggcaaggtcgtccaaaagaaacaccccgatcaattgtcagaatcatcagaagatgagcttgctggtagaagaacaaagcatcaaactgattcacctgatgattctcgtcgaaaacagcattccccgactagaattgaaaatgatgagtcttattcaaagggtggtagaaacagtgagcatgtcatgagaggtttgcgtgatgattctgatgatgctattgatacaaagaaatatttgtctaaagtcaatgaggactcccaatcggacgatggaagtcctttgaaaaaaactaagaaaaaaacagatggtaataggcacattgattctggtagttcagggtctgaagagcctgacaaacatagaacccactcggagaagcgaaggcacaagaaaactcataagcataagaaacagtatgatgatagttccgagtctgattctgagccagatggcaaagacgcaaagaggaggaggaggaaggaagagaagaggctaagaaaagaggaaagacgtcgaagacgtgaagaacgacaccgcagaagggcagaacgccatgccagcaaacgaaaattaaagaacaccgatactgttactatgccttcagactctgagaaggatcgggattctgattcagatggtgatgttaggaaaagagtttcaaacgctggaagagaagagtctgatcagaagaaactagaaattgaactccgtgagaaggcccttgaatctcttagagcaaagaaagccatcaacaactagactgagaaattttttgtgacacatttgagtttctattttcaagtggaagtgtccttatatgatactatttaatgttctgtgtgtttatgtggcagttgatctgatgattcctgagctgtttacttgatgcagctgaattcaggcttagcagccagttatctgattagctccatgtgcacaagctttttatgttcctcaggatgatatgatcaacgcctcaacaaaaacaagttggtaacatattgattggaaaatctgctaaagcattccttcttagtttcagaaatcatcttccacctaggatgaaatgcacacagtttgtaacatcaaaggactttaatggactccaggcgctggaaatttctggtgtgatgtcacgttaactcgctgggtggtgttctaaccagaatttggaactgagtctgaatgacaaagttgtgctgaatccagctgtttttttgtacaagttccatgttatctgtttaacaagtttctatgtatttacattttacatcactctatggacgccaactgtttctctttaacttatatattggcattcgct

SEQ ID NO: 129625 - DNA, 167 bp, Zea mays
  Clone ID: MRT4577_49690C.1
gcgggacgcataaagattctttaggtccactccctgagcaaaggctttacataaagagatcgttttcaaaaaattgcgagaaggacccctggcgtcgctgatgctggcctccaaaacctcgtgaatgaggctgccctccttactgatccgcggaccttaacgaaatt

SEQ ID NO: 129626 - DNA, 978 bp, Zea mays
  unsure (1)..(978): unsure at all n locations
  Clone ID: MRT4577_49691C.1
aactaaattccttaggtttagttgatggcttttatggggttacaaagtgtcgaaaaaaaatgtgttttcaacaatggacacatcatattcctctcgtttacgacctgttccaggtggactagacggttcaaggtgtggttcaggactagacggttcaaggtgtggttcattggagaatccatggttgtgctttgagatgtacatgacaaacaatgtgttgggatcattgttgttcggctgcaaaatctttgttgcgctgcatcctgtcgactttctccaaatgcatgtgcagtaagaccttgggaatatgtagccaaatatattcttttctccaaactttttccactacgacctgttccaggtggactagacgattcaaggtgtggttcattggagaatgcatggttgtgcgtatagatgtacatgacaaacaatgtgttgggatcattgctgttcggctgcaaaatctttgttgcgctgcatcctgtcgactttctccaaatgcatgtgcagtaagacctataaaggtggcgatcaactttaagagttggtccacaactcgggacatatcatcagagtggggctgaagcagcccgatatacgcagtgaagcaattcagcggtccaacagccacaggcaaggttgggaacagtcgtaactcttacccgatctcctttttcttgggaatatgtagccaaatatattcttttctcncaaacttttcccacttgctgccatnncatccaagagatttgggtatgggtcaacagtttcttagcaccatnnntgcttnnccttgtcaggataaattcccttcccattaaccanntttgtgnnngctgataaatggttcttncccatntgaacttcnncnaaccaannatncaagctttaaagggcacctgacnnanactttaaannatttgaannacagacaagnngnaataggcatttatnntgatcaacagctntttgcag

SEQ ID NO: 129627 - DNA, 597 bp, Zea mays
  Clone ID: MRT4577_49692C.1
aatccgactcctccttacctcttccgccttccaatcaactgacagacgagcgcgccatgcgatgcatctccgttaccgaacgctttcctcctcccaaactcgtggttcactaacacctccactgacctttacctctgatgacataacctgtagcgaggtatccatgacaccagctattacctcctcattcgatgcgacgaaccttctgccggtctgtcatttcacttactgaactgcttcaacagaattatgaacactcagcgtatatatgacaattctacaataccatctctattgtgccatgcgcttcttttgtcaacttattgcgatcatcgccatagctttcatgaccaggagcgtgaaaaacatatcttaatgaactgctcctaatccctatgatactttgctattgcgagatgattttcacatgcctccttgccaacttctcctactgaagaccgataatacttctatgggttggcatactcgtctatacatgaatgtcatctattcacccgtcttgacactagcaaggacacaatgtgcaactttcctgtacctgtatagcggtgactttcccgtatgacattgtcttta

SEQ ID NO: 129628 - DNA, 197 bp, Zea mays
  Clone ID: MRT4577_49693C.1
caggaacacaaattgaagaaccgaccatttatagcgggtccagggtacaaccgaacaaggatttttcctaaagccgagcacaagcgcccgaggatttctcaccatcacagacgtacttcaatatgaaaacacgaaacatggaatactagcagtgccgcccaacttcaagaatcctgcaaaaaaacatactgtaatga

SEQ ID NO: 129629 - DNA, 275 bp, Zea mays
  Clone ID: MRT4577_49694C.1
tcgttgactgctaataatattgagccaggttgctgtaccaagccgtgcttacttattaacacagtatcaggtgctgcctttctaccagccggttgaggataacccaccatccctgttacaactacaacaattgttgccatatgtgcaacttgctttgacatacccaggaggcttgtaccaacaacacatgaataggagcgccgctgtttagattgcttattggtgcgaattgaataatatattgttttggctgatgtatgtgggcagctcagaaa

SEQ ID NO: 129630 - DNA, 220 bp, Zea mays
  Clone ID: MRT4577_49695C.1
tggctggaggatgtcatggggcacgaacctggtcactcgacggagctgagtgggcggagcgcagcctcctgtctggtgcattccataccgggattggatcccgcgcatgcctaaggatgcatcatcagcttcatcggccagaaggaagacggacgaggctatgagcaccgaggaacattgatgcaaggactcctcggagcacgattgaaacttagctaga

SEQ ID NO: 129631 - DNA, 1055 bp, Zea mays
  Clone ID: MRT4577_49696C.1
aagcattttgcagtccagcagcagcagcccctctcgtactcctccgcctcccgcaatgccgcccggttccgcctccgccgccgccatcgccacccgcttcgcgacccactggatagctgacgccctcgccggcgacgagtacatagacttctccgtgctcaaggttctggtgggggcctcgtcgaagcccctcgcgggcgccccggagtttacgcgtgagcgggtcgcgctccggtgcattcaggaggtgtcgtccgtgatagccgccgggggtgacgccgcggacaccgcgggggtgcttagggttgatggcgcccaatcatgccagaatgtgctgtttcagcttatgagagaggttggtagccccggagatttggagaaggatttgcttccacatttcagtcaagacatccaggaatatttatgtaccgagaaatttatgctaccagaaacttccttccagatgttccaatcctgttgcgagagctcgaagacgcagaaaactctggtggacagcagaagaagaagcaatgttgaaggatgggatggcaaaattctctccacataatgatggtcaaatttcatggacccagatactgcaatatggccgtggtgtgtttaacatcgcgcgcctgccatgtgatttgagggtcaagtggaggaacatgcagatgaaggagaggcgggcagtctcttacacacacatataactgttgtgtgtcatactaaattactaaccatgccttcatttgtttgtgtccatctgcagatataattgatgtggcagatataaccttgcctttatttgtttgtggcaatcttacacacacatataacactgatgtggtactagaacatagcgaatatgcaagtaggaatggaagtgggtttctccgaaataggatgacagaggtatagtttttcccttcttttggtaagtacggcgttgattggttgtgtgatttggtgaacctagacctactatacccgtagatgatgtaaagagattggtagacactcactatgtactctgaaaagaggtatcagagtcgact

SEQ ID NO: 129632 - DNA, 161 bp, Zea mays
  Clone ID: MRT4577_49697C.1
cccacgcgtccgcccactcgtccgcccactcgtaccgccaagcgtcctcccaagccttcgcgcaaaccttctccgacgccttggccaatcccattcttcccgtcccaaattcagaccatcattacccgcgccttccgcgatctgtgccttaaagccctgcc

SEQ ID NO: 129633 - DNA, 226 bp, Zea mays
  Clone ID: MRT4577_49698C.1
gagctcactagttctttgccgccctttttttttttttttatatgggggatatattaaaattataaggggggtacataaatacctctcaatatcctgtacacaaactcctaatacctttttacactcacaacaatcactctgcgactgaaccaaactacagacctactgagcccttcacctaacttacacacactgtgccagctttgacgtctacttccgccactaa

SEQ ID NO: 129634 - DNA, 109 bp, Zea mays
  unsure (1)..(109): unsure at all n locations
  Clone ID: MRT4577_49699C.1
gcggttcgctctctacaaggaggcggcttgnncggggngnatcgtgcaatggcgcggcggtgcncgtncaggctgctgctaagccgttggcggctgcgggccngtaact

SEQ ID NO: 129635 - DNA, 975 bp, Zea mays
  Clone ID: MRT4577_4969C.1
aaaaacctcgttccccatccgctcaggccaatcaacagaagtgacgcgagcacgagcacacatcccctcccttcttcggttattcctcgccgcgtgccctcgccgcagacctctgccatggcggaccagctcaccgacgagcagatcgcggagttcaaggaggccttcagcctcttcgataaggatggcgacggctgcatcactaccaaggagcttggaacggtgatgcgctcccttggccagaaccctaccgaggcagagctgcaggacatgatcaacgaggtcgatgcggatggcaatgggaccatcgacttcccggagttcctgaacctgatggcgaggaagatgaaggacacggactcagaggaggagctcaaggaggccttccgcgtcttcgacaaggaccagaacggtttcatctcggctgccgagctccgccatgtcatgaccaaccttggcgagaagctgaccgacgaggaggtcgacgagatgatccgtgaggccgacgtcgacggcgacggccagatcaactacgaggagttcgtcaaggttatgatggccaagtgaggagcggtccccgtgaaataagtatctatggattgaagcgaattatcaggcacacaagctgtactttgtcatgtccctttgagtacgcatcagtgtcatgcaggtggtaatgtcttgtagtggtccgtttaggcggtgtagtcatgggaacgcgacatcagatacctggtttcttttgattgtgatgttatcttgcattattgcacctgtaggatttgttgaagctcatattttccagggttttggatcttttgtgctagtcttaagtctttgtgtatgcaggcgtggagctaggattatgatataaggggtcaactaattcatcaatactatatgatgttatcaagcttaagtacttataatatgtaataagaattctagttctttataaaaaaaaaaaaaaaaact

SEQ ID NO: 129636 - DNA, 417 bp, Zea mays
  Clone ID: MRT4577_496C.1
acgtgtgcatacacgcggaaccctagtaccggagcaatagatatggaggcatactcttacactcgttattgatacgcacgcttgagagactgtgatgcgacatggtgttatgatcatattggtcgcaggtaagatctgtaccttgaactgagattgatcctcctttaagcatgatttgctcaacttacttcccttgcattatctattctgatctgtaatattcaataattccgcgaaatcatattatatttgaagactcctattatacatatacataatcaccttcttttctctatgcaaaacatagaagaatacgaattaatcctataaatctacgcagttgctcaacaagatactatgcttcttaatcctcgattacttatctttagagaacggccctcacacattgcgatgact

SEQ ID NO: 129637 - DNA, 263 bp, Zea mays
  Clone ID: MRT4577_49700C.1
attcggctcgagccaccccagcattgccttaccttgccttgccttcccctccatcccacctgcacctcgccggtcgaatccctcccaacccaacaatcccccatggggtcgcaggccatccaggcgcaccgcgcgggcgcggaggtgtaccgcggcgcggggctgtgcgcggagaagaccacggagctgatggcagaggcacacctgccgctgggcctgctgtcgttggccgacatggaggaggtcggatacaaccgtgccac

SEQ ID NO: 129638 - DNA, 313 bp, Zea mays
  Clone ID: MRT4577_49701C.1
cccacgcgtccggactctcctacgcttcttcacattcttgacgagcagggttgcatcgtgatgggttcctcaacgcgcttgtggatgagctggcggccatggacgagcatctcaaacttactgtgccctacatcaacgtggatgaacgcgttaacagctctgcttaacatggagccccagctcttgcacctcctggccgcactggagcatctcagacgctggaagatcccagaaaatcataaccaacgtccacccctaccccaccgattgttacgcccgacaatcccttgtccatactacaccatgcgctgag

SEQ ID NO: 129639 - DNA, 289 bp, Zea mays
  Clone ID: MRT4577_49702C.1
ggtggaaaaaccccaactggggccgggcttatttaaactcggccttttatttttagcaaagtgaacaaaaccaatgggggggcatttgtcatttaataatcttaaaaatcttgtaaacagatttaaaggtcccctaaaaaccagttgtcccttcaagatccaagaacaatttaacctcttgaaaagactaacccttttataataactgtccacaaaaatgttttccttttcttcaaaagagtggttcacttttttttaaaaattacttttttgaggaaattttgttttt

SEQ ID NO: 129640 - DNA, 290 bp, Zea mays
  Clone ID: MRT4577_49703C.1
cttgtcagcagggcctggttcttttccgctgtcttggcccccttccactggcgctgctctgcactcgtggttcctctttatcttctttcgcttcttctcatttctcccaagttggcctgttttttttttgcttccgtgctgccctccgcgattgccttttctccaatcttggttgctcccctcttttttttggctttctccgccccttccatgtttgggggcttctaggtccgtttggtccccttcccttcgccacgcagtctccggcctggttcattcctttctccatg

SEQ ID NO: 129641 - DNA, 173 bp, Zea mays
  Clone ID: MRT4577_49704C.1
cgtccgtatgctacaaagcagattagcgggtttgcataaaattgttctcgggtgagtctcgttatgtgccttcgggtgggaatgcggaacctaaacataagggtgtaaggctacgacccggaaattgagtgcaaggccagctaccagaaaaaaacacaaaaagggtctggccg

SEQ ID NO: 129642 - DNA, 4704 bp, Zea mays
  Clone ID: MRT4577_49705C.1
atgtcgggagatcacgccaagagggagatcgtaaccagcggtgacaagtccgcaagctcgggaagaactcattcgagggagtccggccacaagcacaaggaggaatcctcttcctccaccaagtcacaacggagaggtgacaagaagaagatgaagaaagtggtctactacgagaccgactctttgtcaccctccacctccggcttcgaatcggcgtccgtcacttctaagcgccttgagcgcaagaacatatgggatattgttgagtatggagcacaggtaccgaaggtaggagacaaggactacgattcggacaaggccgaccaaattcggcactttaactcccaagccacaactatactcctcacctccttgtgtcgagaggagtataataaggtgcaagggttaaagatgggcaaagaaatttgggacgtcctcaagacagcgcacgaaggggacgaggtgaccaagatcaccaaacaagagacgatcgagggggagctcggtcgattcatcctcaaccaaggagaggagccacaagcaatgtacagccggctcaaaaccttagtcaaccaagtgcgcaacctcaagagcaccaaatgggatgaccatgaaatggtcaaggttattcttagatcactcatatttcgtaatcctactcaagttcaattaatacgtggtgatcctagatacaagctaatgtctcccgaggaagtgataggaaagtttgtgagctttgagttgatgatcaaaggctccaaacatatcgtcaacttggagcaaggcggcacctttacacccaaggtgcaacccgtcgcattcaaggcaatagaagaagaaaagaaggaacctatgccaagtaggattcccatcgacgcctccaagcttgacaacgaggagatggcgctcatcatcaagagcttccgccaaatcctcaagcaaaggagggggaaggactacaaaccccactccaaaagggtgtgctacaagtgtggtaagctcggtcatttcattgctaaatgtcctatgtcaagtgatagtgacaggggcgacgacaagaagggaaatagaaaggaaaagaaaaggtactacaagaataagggcggtgatgcccacgtgtgtcgggaatgggactccgacatgagctccaccgacacctcctccgacgaggatgccgcaaacatcaccgtcaacaagggacttctcttccccaacgtcggccacaagtgtttcatggcaaaggacggcaagaaaaagaaggttgaactcttggatagccaagaggaattccttattaaggaaaacaaaaagcatgttaaggtgaagaatgcttatgctcaggagatagaaaaatgtgaaaacttgactaaagagcttagcatttgccatgacactatctccaaccttagaactgagaatgttagtttaattgctaaggttgaaaaatcgaatgtttgtcatgattcaattgtcaatcttaaaaatgataatgctagattaattgctaagattgataaattgaatgaatcaattgctatccttaaaactgagaatgaaaagttaatttctaaggctaaagatttaaatgtttgcaatgtttatatttccaatcttagaaatgagaatgttattttacatgctaagattgatgaattaaatgcttgcaaaccctctacatctactgttgatcatgtcactatttgtactagatgtagagacattaatgttgatgctattcatgatcacctagcttcaattaaagaacaaaatgatcacatagctcaactaacggctaaaattaatgagcatgaaattgaaaatgaaaaatttaaatttgctagaagcatgctctatagtgggagacgccctggcattaaggatggcattggtttccaacagggaggcaatatcaaacttaatgctcccaaaagattgtctaattttgttaagggcaaagctcccatggctcaggataacgagggttacattttatatcctgctggttatcctgagcataagattaggagaattcatgctaggaaacctcataatgtttcacatcatgcttttatgtataaaaatgaggcttctagctctaggcaatcaacccatgttaaattgcctaaaaagaaaactcctactgcatcaaatgaacctaatgtttcatttaagacttttgatgcttcttatgtgcttactaacaaatcaggcaaagtagttgccaaatatattgggggcaaacaaaagggctccaagacttgtgtttgggtacccaaggattatgcatccgggggctcaagttggatcattgatagtggatgcacaaaccacatgacaggggagaaaaggatgttctcctcctacgagaaaaacgaagatccccaacgagctatcacattcggggatggaaatcaagatttaggtgttactgtctttagaagaagtgatgattcagtagcatttaagggagaaaaatcacaaacccaagagaccttaaaaggattcttgagacgggctcaaaatgagttcggtttaaggatcaagaaaataagaagcaataatgggatggagttcaagaactctcaaattgaaggctttcttgaggaggagggcatcaagcatgagttctcttctccctacacaccgcaacaaaatggtgtagtggagaggaagaatagaactctattggacatggcaaggaccatgcttgatgagtacaagactctggactggttttgggctgaggcaattaacaccgcctgctactccatcaaccggctctaccttcaccgaatcctcaagaaaacatcatacgaactccttaccggtaaaaagcccaatgtttcatattttagagtctttggtagcaaatgttttattcttgttaaaagaggtagaaaatctaaatttgctcctaaggttgtagaaggctttttactaggatatgattcaaacacaagggcatatagagtcttcaacaaatccactggattagttgaggtttcttgtgacattgtgtttgatgagactaatggctcccaagtggagaacatgtccatcggggatatgtatcctaaggaatccgaagagcctccacaagcacaagatcaaccatcatcttacatgcaagcatctccaccaactcaagatgaggatcaggctcaagataatgaagatgaagatcaagaggatgagccacctcaagaggaggacaatgatcaagggggagatgaccatgacaaagacaaggaagatgatcaagaaattcagggtcaacaaccgccacacccaagagtccaccaagcaattcaaagagatcaccccgtgaactccatcctcggcaatattcataagggggtaaccactcgatctcgagtcgctcatttttgtgaacattactcttttgtgtcctctattgagccatacagggtggaggatgtagtaagagactcgaattgggtgttggcaatgcaagaggagctcaacaacttcacgaggaatgaggtatggcatttagttccacgtcctaaccaaaatgttgtaggaaccaagtgggtattccgcaacaagcaagatgagcatggtgtggtgacaaggaacaaagcccgacttgtggccaaaggatattcacaagtcgaaggtttggatttcggtgaaacctatgcacccatagctaggcttgagtcaattcacatattacttgcctatgctacttaccatggctttaagctttatcaaatggacgtgaaaagtgccttcctcaatggaccaatcaaggaagaggtctatgttgagcaacctccaggctttgaagatagtgagtaccctaaccatgtttacaaactctcaaaggcgctttatgggctcaagcaagccccaagagcatggtacaaatgccttagagatttccttatcactaatggcttcaaagtcggaaaagccaatcctactctctttactaaaactattgcaaaagatttgtttgtatgccaaatttatgttgatgatatcatatttgggtctactaacaaatcaacttgtgaagagtttagtaggatcatgattcaaaaatttgagatgtctatgatgggggagttgaagtgttttctaggatttcaagtcaagcaactccaagaagacaccttcaccagccaaacacagtacattcaagacattcttaccaagtttggaatgaaggatgccaaacccatcaagacacccatgggaacaaatgggcatctcgacctcgacacgggagggtgtaaaattgataggaagagcacatcagggacttgtcagtttctggggagatccctggtgtcttgggcttcaaagaaacaaaactcagtagctctttctaacgccgaagccgagtatattgtcgtaggtcattgttgtgcacaattactttggatgaggcaaaccctcagggactatggctacaaattgagcaaattccctctcctgtgtgacaatgagagtgcaatccgcatggcggacaatcccgttgaacacagtcacactaagcacatagccattcggtatcactttttgagggaatcaccaacaaagggtggatatcgaggtgccaaaggttcaacacaaaccaataaaaagatcaaagttggggttcaaaagaaaggagcaaaagaatttgaagagaaccctggtctggtgcaccagattgtccggtgtgccacctaa

SEQ ID NO: 129643 - DNA, 239 bp, Zea mays
  Clone ID: MRT4577_49706C.1
cgtggtgatgtggttcccaaggacgtgaacgctgctgtggccacaatcaaggccaagcgcaccatccagctcgaggactggtgcccgactggcttaaagtgcggaatcatctaccatactcccagcgtcgtcccatgcggtgatctggcacaaggtgcaatgggccgatgtgtatgatcttcaactacaccagtgttgaggaggtcttcttccgcattgacacaaggtcgagctcatgt

SEQ ID NO: 129644 - DNA, 775 bp, Zea mays
  Clone ID: MRT4577_49707C.1
gctcagccactctctcccgtgggcatttcttcttccccacgtaggtccctgctcgacctcggcgtggggctctggccgccggctgtggcgctcgccgtgctcgtcttctccagcctgccagccgcccagctcgctcggagcttccctgcgcgccgagctcctgcgtgtcgcggctcccaaccgagctctcatccccatgtccgagtccgttccccaacctctgcttcatctgcccaccgcgcccactctctgctcgaccgtatctccctgtgctcgagctcgccgtgccctctgcttctgcggcgtcgcgagctccggctcagttttctgctctcccgccgcgccgtggtcgccgtcgaaattcctgacgcgcgtgcccagcgtcgtcgctctgctcgagttggtcctggtggccgttgtttggaaacagactcgaccgcacccagcgccgagcttcttcctgctcatgcccagtcgctctctctctgtttgccgcttgtccgtctccctggtgctcgccgcgcgcgctattccttttgcgcgcctggctagttctagctcgaaccaaaccgtctgcgcctgttcgcccctgctgcgcgcagtcgcgcagctcgcggagctctcttgccgtggccgtcgcgtccctggtcctagcctttagctcagtctctatgcgcgcgagctcgccggtgtgctgctagtctaacttggatctcgcccatggcgtcgatctgtccgtcctaccgtcgctcagctcgtgcgtgccctgtgtatt

SEQ ID NO: 129645 - DNA, 1464 bp, Zea mays
  Clone ID: MRT4577_49708C.1
gtttatgcatccgggggctcaagttggataattgatagcggatgcacgaaccacatgacagggagaaaagaatgttctcctacgagaaaaacgaagatccccaaaaagttatcacatccggggatggaaatcaaggaaaaatcacaaacccaagagatcttaaagggattcttaagacggactcaaaatgagttcggattaaggatcaagaaaataagaagcgataatgggacggagttcaagaattctcaaatagaaggatttcatgaggatgagggcatcaagcatgagttctcttctccctatacacctcaacaaaatggtgtagtggagaggaagaatagaactctactggacatggcaagaaccatgcttgatgagtacaagacaccggaccggttttgggtggaagcaatcaatactgcttgctactccatcaaccggctctaccttcaccgaatcctcaagaagacatcatatgaactccttaccggtaaaaagcccaatgtttcatattttagagtcttcggtagtaaatgctttattcttgttaaaagaggtagaaaatctaaatttgctcctaaggctgtagaaggctttttagtaggatatgactcaaacacaagggcatatagagtcttcaacaaatcaaccggattagttgaggtttcttgtgacattgtgtttgatgagactaatggctcacaagtggagcaagttaatcttgatgaactagatgatgaagaggctctatgtgtcgcgctaaggaacatgtccattggggatatgaggatcaggctcaagatgaaaatgaagatcaagaggatgagccacctcaagaggacaatgattaagggggagatgaagagaatgaagacaaggaagatgatcaagaaatacaaggtcaaagaccgccacacccaagagtccaccaagcaattcaacgagatcaccccgtcaactccatcctcggtgacattcataaggggggtggaggatgcactaagagattcggattgggtgctggctatgcaagaggagctcaacaacttcacgaggaatgaggtatggcatttagttccacatcctaataaacatgttgtaggtaccaagtgggtattccgcaacaagcaagatgagcatggtgtggtgacaaggaacaaagcccgacttgtggccaagggttattcacaagtcgaaggtttggattttggagaaacctatgcacccgtagctaggcttgagtcaattcgcatattacttgcctatgctacttaccacgactttaagctttatcaaatggacgtgaaaagtgccttcctcaatggaccaatcaaggaagaggtctatgttgagcaacctcccggctttgaagatattgagtaccctaaccatgtgttcaaactctcaaaggctctttatgggctcaagcaagccccaagagcatggtatgaatgcctgtga

SEQ ID NO: 129646 - DNA, 2673 bp, Zea mays
  Clone ID: MRT4577_49709C.1
atgtcgggagatcacgccaagaaggagatggagaccggcgaaaagcccactacaagccacgggagcacttcatcggaagagtcccgcaccaagaggaaggagaagaagaagagctcctccaacaaagggaaggagaagaaatcttcttctcaccacaaagagatgaaggagagatcttcctctcacaagccgcatcggagtggggacaagaagaaaaggatgaggaaggtggtctactacgagaccgattcttcatcggcatccacctccggctccgacgcggcatccatcacttctaagcgccaagagcgcaagaagtatagtaagatccccctacactaccctcgcatttccaaacatacacctttgctttccgtcccattaggcaaaccaccaacttttgatggtgaagattatgctaggtggagtgatttaatgcgatttcatctaacctcacttcacaaaagtatatgggatgttgttgagtttggtgcacaggtaccatccataggggataaagattatgatgaggatgaggtggcccaaatcgagcacttcaactctcaagcgacaacaatactcctcgcctctttaagtagagaggagtataacaaagttcaaggattgaagagcgccaaggaggtttgggatgtgctcaaaaccgcgcacgagggagatgagctcacaaagatcaccaagcgggaaacgatcgagggggagctcggtaggttccggcttcgcaaaggggaagagccacaacacatgtacagccggctcaagaccttggtgaaccaagtgcgcaacctcgggagcaagaagtgggacgaccatgaaatggttaaggttattctaagatctctcattttccttaaccccactcaagttcaattaattcgtggtaatcctagatatactaaaatgacccccgaggaagttatcgggaattttgtaagttttgagtgcatgatcgaaggctcaaggaagatcaacgaacttgatgatccctccacatccgaagctcaacccgtcgcattcaaggcgacggaagaaaagaaggaggagtctacaccaagtaggcaaccaatcgacgcctccaagctcgacaatgaggaaatggcgctcgtcatcaagagcttccgccaaatcctcaagcaaaggagagggaaagactacaagtcccgctccaagaaagtttgctacaagtgtggtaagcccggtcactttattgcaaaatgtccattatcaagtgacagtgacagggataacgacaagaagggcaagaggagagaaaagaagaggtactacaagaagaagggcggcgatgcccatgtttgtcgggagtgggactccgacgaaagctctagcgactcctcctccgacgaggacgccgccaacatcgtcgtcaccaagggacttctcttccccaacgtcggccacaagtgcctcatggcaaaggacggcaaaaggaagaaggatggccttttggattctcaagaggatctcctaattaaggaaaacaagaaacatgttaaggttaaaaatgcttatgctctagaaattgagaaatgtgaaaaattatcgagtgagctaagcacttgtcgtgagatgattgacaaccttaggaatgaaaatgctagtttaaatgctaaggttgattcacatgtttgtaatgtttcaattccccatcctagagataataatgatgatttgcttgctaggattgaagaattaaacatttctcttgctagccttaggagtgaaaatgagaaattaattactaaggcaaaagattttgatgtttgcaaagttacaatttccgatcttagagataagaatgatatactacatgctaagattgttgaacttaattcttgcaaaccctctacatctaccattgagcatgtcactatttgtactagatgtagagatattgatgttgatgctattcatgatcacatgattttaattaagcaacaaaatgatcatatagctaaactagatgctaaaattgccgagcacaacttagagaatgagaaatttaaatttgctcgtagcatgctttataatgggagacgccctggcattaaggatggcattggcttccaaaggggagacaatgtcaaaattagtgcccctcctaaaagattgtcaaattttgttaagggcaaggctcccatgcctcaggataacgagggttacattttataccctgccggttatcccgaggacaaaattaggaaaattcattctaggaagtctcactctggttctaaccatgcttttatgtataagagtgagacatctagttctaggcaaccaacccgtgctaagttgcctaagaagaaaattcctattgcatcaaatgatcataatatttcttttaaaacttttgatgcatcttatgttttgactaacaaatccggcaaggtttatgcatccgggggctcaagttggatactcgacagcgggtgcacaaaccacatgacaggggagaagaagatgttctcctcatatgagaaaaaccaagatccccaacgagcgatcacattcggggatggaaatcaagattctttagattacaacttgctttccgtttcacaattatgtcaaatgggctacaactgtctattcactgatgtaggtgtcactgatagtcgcctagagggggggtga

SEQ ID NO: 129647 - DNA, 491 bp, Zea mays
  Clone ID: MRT4577_4970C.1
ggctaggtgaaggacggacacaggatcagaggcgcgacgtacgaccaccacaagccaggctccatacatggcattccaatatgcgccgccggccccgggtgcacggctaaggggctacgtagggccaacccacgagcggcagcattgcagtgcctgaggggggtcaagaggtaggcatgactcacatggcatgcgatgcgactacatcagctaccacaccaacactgaaatgaagacgacaaccactctccagctgtgaaacgggcggtttgggctggggccggctgggaacctaagggagaacgccgggctgaatctggacgctcacgactgcgggctgcaaacaggtgaccccaccagggacaccatcgccgtcccacagctctggcgcgaccaagaacacagcctcacagagggtgttctgctaaatcaaaagaacaccggcaccatggaacagcacatggggtagaacaatacgaagaaatatgcta

SEQ ID NO: 129648 - DNA, 5634 bp, Zea mays
  Clone ID: MRT4577_49710C.1
atgtcgggagatcacaccaagaaggagatggagaccggcgaaaagcccactacaagctacgggagcacttcatcggaagagtcccgcaccaaaaggagggagaagaagaagagctcctccaacaaagggaaggagaagaaatcttcttctcaccacaaagagaagaaggaaaaatcttcttcccacaagccgcatcggaaaggtgacaagcacaagaggatgaggaaggtggtctactacgagaccgacacttcatcaacatcgacctccgactccgatgcgccctccgtcacttctaagcgccaagagcgcaagaagtatagtaagatccccctacgctaccctcgcatttccaaacatacacctttactttccgtcccgttaggcaaaccaccaacttttgatggtgaagattacgctaggtggagcgatttaatgcaatttcatctaatctcgctccacaaaggtatatgggatgttgttgagtttggtgtacaggtaccgtcgataggggatgagaactatgatgaggatgaggtagcccaaatcgagcacttcaactcacaagccacaacaattctcctcgcctcactaagcaaagaggaatataacaaagtacaagggttgaagaacgccaaggagatttgggatgtactcaaaaccgcgcacgagggagatgagctcaccaagatcaccaagcgggaaacgatcgagggggagctcggtcggttccggcttcacaaaggggaggagccacaacatatgtacaaccggctcaagactttggtgaaccaagtgcgcaacctcgggagcaagaagtgggatgaccacgaagtggtaaatgttattttaagatctctcatttttcttaatcccactcaagttcaattgattcgtggtaatcctagatatactaaaatgacccccgaggaagttatcgggcattttgtaagttttgagtgcatgatagaaggctcgaggaaaatcaacgagcttggcgacccatccgaagcccaacccgttgcattcaaggcaacggaggagaggaaggaggagtctacaccaagtagacaaccaatagacgcctccaagctcgacaatgaggaaatggcgctcgtcatcaagagcttccgccaaatcctcaagcaaaggagggggaaggactacaagtcccgctccaagaaggtttgctacaagtgtggtaagcccggtcattttattgctaaatgtccgatatctagtgacagtgaccgaggcgacgacaagaagggaagaagaaaggagaagaaaaggtattacaagaagaagggcggcgatgcccatgtttgtcgggaatgggattccgacgaaagctcaagcgactcctccgacgacgaggacgccgccaacatcgccgtcaccaagagactcctcttccccaacgtcggccacaagtgcctcatggcaaaggacggcaaaaagaagaaggttaaatccaactcctccactaaatatgaatcgtctagtgatgataatgctagtgatgaggaggataatttgcgtattctctttgccaatcttaacatggagcaaaaagaaaaactaaatgaattgattagtgctattcatgaaaaggatgaccttttggactcccaagaggattgtctaattaaagaaaacaagaaacatgttaaggttaaaaaggcttatgcactagaagtagaaaaatgtgaaaaattgtctagtgagctaagcacttgccgtgagatgattgacaaccttagaaatgaaaatgctattttaaatgctaaggttgattcacatgtttgtaatgtttcaattcccaatcttagagatgataacattgacttgcttgctaagattgatgaattgaatgcatctcttgctagccttagattagagaatgaaaatttaattgctaaggctaaaaattttgatgtttgcaatgctactatttccgaccttagaactaagaatgaaatcaaaatagatgctaaaattgccgagcacaacctagaaaatgagaaatttaaatttgctcgtagcatgctttataatgggagacgccctggcatcaaggatggcattggcttccaaaggggagacaatgtcaagcttaatacccctcctaagaacttgtctaactttgttaagggcaaagctcccatgcctcaagataacgagggttacattttataccctgccggctatcctgagagcaaaattaggaagactcattctaggaagtctcactctggccctaatcatgcttttatgtataagggtgagacatctagctctaggcaaccaacccgtgccaagttgcctagaaagaaaatttctaatgcatcaaatgaacatagcatttcatttaagacttttgatgcttcttatgttttgactaacaaatccggcaaggtcgttgccaagtttgttgggggcaagcacaagggttccaagacttgtgtttgggtacccaaagttcttgtttctaatgccaaaggacccaaaaccgtttgggtttatgcatccgggggctcaagttggatactcgacagcgggtgcacaaaccacatgacaggggagaaaaggatgttctcctcatatgagaaaaaccaagatccccaaagagcaatcacattcggggatggaaatcaaggtttggtcaaaggtgtcactgtctttagaagaagtgatgattcaatagcatttaagggtgtgttagagggtcagctatacttagtagattttgatagagctgagctcgacacatgtttaattgctaagactaacatgggttggctctggcaccgccgactagcccatgttgggatgaagaatcttcataagcttctaaagggagagcacattttaggactaaccaatgttcattttgagaaagacaggatttgtagcgcatgccaagcagggaagcaagttggcactcatcatccacacaagaacataatgacgactgacaggccactggagctcctacacatggatctattcggcccgatcgcttacataagcatcggcgggagtaagtactgtctagttattgtggatgattactctcgcttcacttgggtattctttttacaggaaaaatctcaaacccaagagaccttaaagggattcttgagacgagctcaaaatgagttcgccttaaggatcaagaaaataagaagcgacaacgggacggagttcaagaactctcaaattgaaggcttccttgaggaggagggcatcaagcatgagttctcctctccctacacgccacaacaaaatggtgtagtggagaggaagaatcgaactctattggacatggcaagaaccatgcttgatgagtacaagacaccggaccggttttgggccgaagcggtcaacaccgcctgctacgccatcaaccggttatatcttcaccgaatcctcaagaagacatcatatgaactcctaaccggtaaaaagcccaacatttcatattttagagtttttggtagcaaatgcttcattcttattaaaagaggtagaaaatctaaatttgctcctaaaactgtagaaggctttttacttggttatgactcaaacacaagggcatatagggtctttaacaagtccactggactagttgaagtctcatgtgacgttgtgtttgatgaaactaacggctctcaagtagagcaagttgatcttgatgagataggtgaagaacaggctccatgcatcgcgctaaggaacatgtccatcggggatgtgtgtcctaaggaatccgaagagcctccaagtacacaagatcaaccatcctcctccatgcaagcatctccaccaactcaaaatgaggatgaggctcaaaatgatgaagagcaaaatcaagaagacgagccacctcaagatgatagcaatgatcaagggggatatacaaatgatcaagaaaaggaggatgaggaagaaccaagaccgccacacccaagagtccaccaagcaatccaacgagatcaccccgtcgacaccatcctcggcgacattcataagggggtaactactcgatctcgggttgctcatttttgtgaacattactcttttgtttcctctattgagccacacagggtagaggaagctctccaagattcggattgggtggtggcgatgcaagaggagctcaacaatttcacgaggaatgaggtctggcatttagttccacgtcctaaccaaaatgttgtaggaaccaaatgggtcttccgcaacaagcaagatgagcatggtgtggtgacaaggaacaaagctcgactcgtagccaaagggtattcacaagtcgaaggtttggatttcggtgaaacctatgcacccgtagctaggcttgagtcaattcgcatattattggcctatgctacttaccatggctttaagctctatcaaatggacgtgaaaagtgccttcctcaatggaccgatcaaggaagaggtctatgttgagcaacctcccggctttgaagacagtgagtaccctaaccatgtctataggctctctaaggcgctttatgggctcaagcaagccccaagagcatggtatgaatgcctaagagatttccttattgcaaatggcttcaaagtcggcaaggccgatcctactttattcactaaaactcttgaaaaagacttgtttgtatgccaaatttatgttgatgatattatatttgggtctactaacgagtctacatgtgaagagtttagtaggatcatgacacagaaattcgagatgtcgatgatgggggagttgaagtattttctaggattccaagtcaagcaactccaagagggcaccttcatttgccaaacgaagtacactcaagacattctaaccaagtttgggatgaaggatgccaaacccatcaagacacccatgggaactaatgggcatctcgacctcgacacgggaggtaagtccgtggatcaaaaggtataccggtcgatgattggttcattgctttatttatgtgcatctcgaccggacattatgctttccgtttgcatgtgtgcaagattccaatccgaccctaaggaatcacaccttacggccgtaaaacgaatcttgagatatttggcttatacacctaagtttgggctttggtaccctcggggatccacttttgatttgattggttattctgatgccgattgggcggggtgtaagatcaataggaagagcacatcggggacttgccagttcttgggaagatccttggtgtcatgggcttcaaagaagcaaaattcggtcgctctttccaccgccgaagctgagtatattgccgcaggtcactgttgcgcgcaattgctttggatgaggcaaaccctgcgggactacggttacaaattaaccaaagtccctttgctatgtgataatgagagtgcaatcaaaatggccgacaatcccgtcgagcatagccgcactaagcacatagccattcggtatcattttcttagggatcaccaacaaaagggggatatcgagatttcttacattaatactaaagatcaattagccgatatctttaccaagccacttgatgaacaatcttttaccagacttaggcatgagctcaatattcttgattctagaaatttcttttgctag

SEQ ID NO: 129649 - DNA, 466 bp, Zea mays
  Clone ID: MRT4577_49711C.1
ctgggtgttttttttttttttttttttttttttttaggacggtcggccccaaaaacttaaattttattcaaaacccgggccccaatttttttccaaggctggttaacggacttggatggaggggtaacaactggtacccccggctgaatttttggcagaattttcttttttttttccccttccaaattccaaaaaaaacctttggaagaagaatcaaaatttttggccaaggacctttttttttttccttcccaattgggaaacccaaccgggggggaagaattaacttttttggccaaggcccaaccccctttattaagcctaatggcagaattccagtttaacttccatccttgaaaggggaatcaaaaccctggtcttcaaacggtggttcctagtgggagaaaaaagcgataacttcagggggggaagcaacaaaggcgtttgggacttccttgtgaatggt

SEQ ID NO: 129650 - DNA, 1338 bp, Zea mays
  Clone ID: MRT4577_49712C.1
atgttgggagatcacgccaagaaggagttggagaccagcgacaagcccactacaagccacgggaaagcttcatcggaagagtcccgaaacaaggggaaggggaaggagaagaaatcctcttcccacaagtcgcatcagagtggcgacaagaaaaagaagatgaggaaggtaccattcgtaggggatgaggattatgatgaggacgaggtggcccaaattgagcacttcaactcccaagccacaactatactcctcgcctctctaagtcgagaggagtataacaaggtgcaaggattaaagagcgccaaggaagtttgggacgtgctcaagaccgcgcacgaaggagatgagctaaccaagatcaccaaacgggagacgatcgagggggagctcggtcgcttccgtcttcgccaaggggaggagccacaagacatgtacaaccggctcaaaaccttggtgaatcaagtgcgcaacctcgggagcaaaaaatgggatgaccacgaaatggttaaggttattctaagatcacttattttccttaaccctactcaagttcaattgattcgtggcaatcctagatatacactaatgactcccgaggaagtgatcgggaattttgtgagctttgagttcatgatcaaaggctcaagaaagatcaacgagcttgatggtccctccacgtccgaagcacaactggtcacatttaaggcgacggaggagaagaaggaggagtctacatcgagtagaacacccatcgacgcctccaagctcaacaacgaggaaatggcactcgtcatcaagagcttccgccaaatcatcaagcaaaggagggggaaagattacaagccccgctccaagaaagtttgctacaaatgtggtaagcccggtcattttattgcaaaatgtccactatctagtgacagtgacaggggcgacgacaagaaggggagaagaaaggagaagaagaggtactacaaaaagaagggcggtgatgcccatgtttgtcgcgagtgggactccgacaaaagctctagcgactcctcctccgacgaggacgccgccaacatcgccgtcaccaagggacttctcttccccaacgtcggccacaagtgcctcatggcaaaggacggcaaaaagaagaaggtttatgcatccgggggctcaagttggatcatcgatagcgggtgcacaaaccacatgacaggggagaataagatgttctcctcctacgagaaaaaccaagatccccaacgagctatcacattcggggatggaaatcaaggaaaaatctcatacccaagagaccttaaagggatacttaagacgagctcaaaatga

SEQ ID NO: 129651 - DNA, 4803 bp, Zea mays
  Clone ID: MRT4577_49713C.1
atggagaccggcgacaagtccactacaagccacgagaaggcttcatcggaagagtcccgcaacaaagggaaagggaaggagaagaaatcctcttcccacaagtcgcatcggagtggtgacaagaaaaagaagatgaggaaggtggtctactacgagaccgatacttcatcaccttccacctccggctccgacgcgccatccattacttctaagcgccatgagcgcaagaagtttagtaagatccccctacgctaccctcgcatttctaaacatacacctttactttccgttccattaggcaaaccaccaacatttgatggtgaagattatgctaggtggagtgatttgatgcgatttcatctaacctcactccacaaaagtatatgggatgttgttgagtttggtgtacaggtaccatccgtaggggacaaagattatgatgaggatgaagtggcccaaatccaacacttcaacccccaagcctcaactatactcctcgcctctctaagtcgagaggagtataacaaggtgcaagggttgaaaggtgccaaggaaatttgggacacgctaaagaccgcgcacgaaggagatgaggtgaccaaaatcaccaagcgggaaacgatcgagggggagctcggtcgcttccgacttcgccaaggggaagagccacaagacatgtacaaccggctcaaaaccttggtgaaccaagtgcgcaacctcgggagcaagaaatgggatgaccacgaaatggttaaggttattttaagatcactcgttttccttaaccctactcaagttcaattaattcgtggcaatcctagatatacactaatgactcccgaggaagtaatcgggaattttgtgagctttgaattgatgatcaaaggctcaaagaagatcaacgagcttgacggcccctccacgtccgaagcacaaccggtcgcattcaaggcgacggaagaaaagaaggaggaatctactccatgtcgaacacccatcgacgcctccaagctcgacaacgaggaaatggcgctcgtcatcaagagctttcgccaaatcctcaagcaaaggagagggaaagattacaagccccgctccaagaaagtgtgctacaaatgtggtaagcccggtcactttatagcaaaatgtcctatttctagtgacagtgacaggggcgacgacaagaagggaagaataaaggagaagaagaaatactacaagaagaagggtggcgacgcccatgtatgccgcgagtgggattcggacgagagctcctccgactcctcctccgacgaggacgccgccaacatcgccatcaacaagggccttctcttcccaaacatcggccacaagtgcctcatgacaaaggacggcaaaaagaagaaggttaaatccaaatcctccactaaatatgagtcctctggtgatgataatgctagtgatgaggaggataatttacgtaccctttttgccaacctaaacatgcaacaaaaggaaaagttaaatgaattaattagtgccatccatgagaaggatgacctcctggacacccaagaggacttcctaatcaaggaaaacaaaaagcatgttaaggttaagaatgcttatgctctagaagttgaaaaatgtgagaaattaattagtgagctaagcacttgccatgatattatcaacaaccttaaaaatgaaaatgctagtttaattgctaaggttgattcaaatgcttgtaatatttcaattcccaatcttagaaatgataatgttgatttgcttgctaagattgaagaattgaacatttctcttgatagccttagaattgaaaatgaaaaattaattgctaaggctaaagaattagatgtttgcaatgcttcaatttccgaccttagaagtaaaaatgatatattacatgctaaggttgtagaattaaaatctagcaaaccatctacatctaccgttgaacatacttctatttgcactagatgtagagatgttgatattgatgctattcatgatcatatggtattaattaagcaacaaaatgatcatatagcaaaattagatgctaaaattgtcgagcatgaacttgaaaatgaaaaatttaaatttgctcgtagtatgctttatagtgggagacgccctggcattaaggatggcattggcttccaacagggaggcaatgtcaaacttaacgcccctcctaaaagattatctaattttgttaagggcaaggctcccatgcctcaagataacgagggttacattttgtaccctgctggttatcctgagagcaaaattaggagaattcactctaggaagtctcactttggccctaaccatgcttttatgtataagggtgagacatctagttctaggcaaccaacccaagctaagttgcctaagaagaaaactcctagtgcatcaaatgatcatgacatttcatttaaaacttttgatgcatcttatgttttaactaacaaatccggcaaggtttatgcatccgggggctcaagttggatcatcgacagtgggtgcacaaaccacatgacaggggagaagaaaatgttcccctcctacgagaaaaaccaagatccccaacgagctatcacattcgaggatggaaatcaaggtgtcactgtctttagaagaagtgatgattcagtagcatttaagggagtgttagagggtcagctatacttggtagattttgatagagctgaactcgacacttgcttaattgctaagactaacatgggttggctctggcaccgccgattggcccatgttgggatgaagaatcttcataagcttctaaagggagagcacattttaggattaacaaatgttcattttgagaaagacaggatttgtagcgcatgccaagcagggaagcaagttggtgttcatcatccacataagaacatgatgatgactgacagaccgctcgagctcctacacatggacctattcggcccgatagcttacataagcatcggcgggagtaagtactgtctagttattgtggatgattattctcgcttcacttgggtattttttttgtacgataaatctcatacccaagagaccttaaaaggattcttgagacgggctcaaaacgagttcggcttaaggatcaagaaaataagaagcgacaatggaacggagttcaagaactctcaaattgaaggcttccttgaggaggagggtatcaagcatgagttctcttctccctacaccccacaacaaaatggtgtagtggagaggaagaatagaactctgttggacatggcaagaaccatgcttgatgagtacaagacttcagatcggttttgggccgaggcagtcaacaccgcctgctatgccatcaaccggttgtatctacaccgaatcctcaagaagacatcatatgaactcctaaccggtaaaaagcccaatatttcatattttagagtctttggtagcaaatgctttattcttgttaaaagaggtagaaaatctaaatttgctcctaagactgtagaaggctttttactaggatatgattcaaacacaagggcatatagagtctttaacaagtccactggacaagttgaagtttcttgtgacgttgtgtttgatgagactaacggctctcaaatagagcaagttgatcttgatgatataggtgatgaagaggctccgtgcatcacgctaaggaacatgtccattggggatgtgtgtcctaagcaatacgaagagcctccaaatgcacaagatcaaccatcctcctccacgcaagcatctccatcgacccgaaatgaggatgaggctcaagttgatgaaggagaagaacaaagagatgagccacctaaagatgacggcaatgatcaagggggagatgcaaataaccaagacaaggaggatgaagaaccaaggccaccacacccaagagtccatgaagcaatccaacgagatcacctcgtcgacaccattctcggcgacatccataagggggtaaccactagatctcgtgttgcacatttttgtgagcattactcttttgtttcctctattgagccacacagggtagaggaagcacttcaagattcggattgggtggtggcgatgcaagaggagctcaacaacttcactaggaacgaggtatggcatttggttccacgtcctaatcaaaatgttgtaggaaccaagtgggttttccgcaacaagcaagatgagcatggtgtggtgacaagaaacaaagcccgacttgtggccaaggggtactcccaagtcgaaggttttgatttcggtgaaacctatgcacccgtagctaggcttgagtcaattcgtatattattagcctatgctacttaccatggcttcaagctttaccaaatggacgtgaagagtgccttcctcaatggaccaatcaaggaagaggtctatgttgagcaacctcctggctttgaagatagtgagtaccctaaccatgtttacaaactctctaaggcgctttatgggctcaagcaagctccaagagcatggtatgaatgccttagagatttccttatcactaatggattcaaagtcggaaaggccgatcctacactctttaccaaaacacttgaaaatgatttgtttgtatgccaaatttatgttgatgatattatatttgggtctactaacgaatctacatgtgaagagtttagtaggatcatgacacaaaaattcgagatgccaatgatgggagagttgaagtatttcttaggatttcaagtaaagcaactccaagagggcaccttcattagccaaacgaagtatacttaa

SEQ ID NO: 129652 - DNA, 1923 bp, Zea mays
  Clone ID: MRT4577_49714C.1
atgtcgggagatcacgccaagaaggagatagagaccggcgaaaagcccactacaagccacgagagcacttcatcggaaaagtcccgcaccaagaggaaggagaagaagaaggactcctccaaagggaaggagaagagatcttcttcacaccacaaagagaaaaaggagaaatcctcttctcacaagccgcatcggagtggggacaagaaaaagaggatgaggaaagtggtctactacgagaccgattcttcatcggcatccacctccggctccgacgcggcgtccgtcacttctaagcgccaagagcgcaagaagtatagtaagattcccctacgctaccctcgcatttctaaacatacacctttactttccgtcccattaggcaaaccaccaacttttgatggtgaagattacgctaggtggagtgatttaatgcaatttcatctaacctcgctccacaaaagtatatgggatgttgttgagtttggtgcacaggtaccattcgtaggggatgaaaactatgatgaagatgaagtagcccaaatcgagcacttcaactcccaagccacaaccatactcctcgcctctctaagtagagaggaatataacaaggtgcaagggttgaagaatgcgaaggagatttgggatctactcaagaccgcgcacgagggtgatgaactcaccaagatcaccaagcgggaaacgatcgagggggagctcggtcgcttccgtcttcgccaaggggaggagccacaagatatgtacaaccggctcaaaaccttggtgaaccaagtgcgcaacctcgggagcaagaaatgggatgaccacgaggtggttaaggttattcttagatcactcatcttccttaaccccactcaagttcaattaattcgtggtaatcctagatacactctaatgactcccgaggaagttatcgggaattttgtgagctttgaatgtatgatcaagggctcaaagaagatcaacgagcttgatgatccctccacatccgaagcacaaccggtggcattcaaggcgacggaggagaagaaggaggagtctacactaagtagacaaccaatcgacgcttcaaagctcgacaacgaggagatggctttaatcattaaaagctttcgccaaatcctcaagcaacggaaggggaaggattacaaatcccgttccaagaaggtttgctacaagtgtggtaagcccggtcactttattgctaaatgtccattatcaagtgacagtgacagggataacgacaagaagggcaagaggagagaaaagaagaggtaccacaagaagaggggcggcgatgcccacgtgtgccgcgagtgggactccgacgagagctccatcgactcctccgacgacgaggacgccgccaacatcgccgtcaccaagggactcctcttccccaacgtcggccacaagtgcctcatggcaaaggacggcaagaggaagaaggttaaatccaaatcatccactaaatatgagtcttctagtgatgataatgctagtgatgaggaggataacttgcgtaccctttttgccaaccttaacatagaacaaaaggaaaaattaaataaattaattagtgctattcatgaaaaggatgaccttttggattcccaagaggacttcctaattaaggaaaataagaaacatgttaaggttaaaaatgcttatgctctagaaatagaaaaatgtgagaaattatctagtgagctaagcacatgccatgacactattaccaaccttagaaatgaaaatgccaaattaattgctaaggttgattctcatatttgtaatgtttcaacttccaatcctagagatgataatgttgatttacttgctaggattgatgagttaaatgtttctattgctagccttagaattgagaatgaaaaattgcaatga

SEQ ID NO: 129653 - DNA, 1537 bp, Zea mays
  Clone ID: MRT4577_49715C.1
ttgggtagcacgttgctgctgctggtgctggcatcatgccctcgtggatcggcaaagcaagggccgaatagtataggcctgttccctcactccccagattccccttttcatagctctatatacctctccttctcgtcgtctctctatcccgcatctgctgttctttatttctatacatacatatatactatcaccggttatttgcttctctattctgtccgagtactttacggtgttccgcacatagatctcgtggccggcggttttgcgctttcgcttgcgtttcttggccctgctggtgtttgaccggaccgaacgggggcagatcgatgctttgggtttgaagcggagctcctatcattccaatgaagggtcgttccgaagggctggttccgctgctcgttcatggttcccactatcctatctcatcatgtgtatatatgtattccatgggggagggtttctctcgtctttgagataggcttgtggtttgcatgaccgaggagctgcaccgcccccttgctggccgctctttggattgaagggagctctgcatcctgatccacccctccatttttttttgcttgttgtgtccttcctgggacctgagatctgaggctcgtggtggctcactgtagcctcgctacacagttttcttctcctctcctctcctctcctgtgctatttgctgtttctcctaagattctttaggccgtgcttatccgtgctggagctgaacgaagcagcaggttgctgctgctgctgctgccctcgtgccctggtggtggactggtatcggtactcgtacttgcgtcgttttattacactctctatcttcgccggtgaggttccggccgttcggtacaggtagtttatttcaaacgctcgttttatttcttgttatactatattcttctgcttcctgttcgtaccggtggcttgtgcctttgcggtggcgctcctggatctggatgcagcgagcgcccgtcagcttttctccccccggcacctggcagattcgcgtcatgctggctgagcgctcgacccctcgcgctcggcgccgtcgcctgcaggccagtgcgaggacttctgctgcaacgcttcgcgatgcaaggacgtcgttccagcaggacgattcaagccgtggacttgggttcttgtttttggactccggaactgcggtttggagctctggaggcaaataggcgataataatgcggtgtaaattgtgacgaaagctgagattctttgtatgaaatacggaatgtatcgcttggacactgtatcgcgaattggtggatgagcatgttgtattccgttgcccttttggttcgaaataatgcccacgtacatcgcatgcgtacagccagatgtaaggatcgacaacaaaaagaaaaaaatctctcaaatgttcgatgttgtcgcgccggtagtcatccttttatcttcctgtgtaccaggacacgtccttagtgctgatttagtgaactagactagaaaccctcttgctatttaaaataaagttgttcaattcttt

SEQ ID NO: 129654 - DNA, 2355 bp, Zea mays
  Clone ID: MRT4577_49716C.1
atgaagaaagtggtctactacgagaccgactcttcctcgccctctacatccggatccgacgctgcgtccgtcacttctaagcgccaagagcgcaagaagtatagtaagattcccctacgctatcctcgcattcctaagcatactccattactttccgtactattaggcaaaccaccgacgtttgacggtgaagattattctaggtggagtgatatgatgagatatcacctaacctcactccacaaaaatatatgggatattgttgagtttggtgtacaggtaccatccgtaggggatgaagattatgatgaggacgaggtggcccaaatcgtgcacttcaactcccaagccaccactatactcctcacctctctaagtcgagaggagtataacaaggtgcaaggattgaagagcgccaaggagatttgggacgttctcaagaccacggacgaaggagacgaggtgaccaagatcaccaagcgggagacgatcgagggggagctcggtcgcttccggcttcgcaagaggaggagccacaagaaatgctcaaagaaaatcatcgagcaagatggcccctccacgcccgaagcacaatcggtcgcattcaaggcgacggaggagaagaaggaagagtctacatcaagtagacttcctatcgacgcctccaagctcgacaacgaggaaatgacgctcatcatcaagagcttccgccaaatcctcaagcaaaggagagggaaggactacaagtcccgctccaagaaagtgtgctacaagtgtggtaagcccggtcactttattgcaaaatgttcaatatcaagtgacagtgacaggggcgacgacaagaagggaaagaggagagaaaagaagagatactacaagaagaagggcggcgatgcccatgtgtgccgcgagcggaactccgacgagagctcctccgactcctcctccgacgaggacgccgccaacatcgccgtcaccaaaggactcctcttccccaacatcggccacaaatgcctcatggcaaaggacggcaaaaggaagaaggtaaaatcaagatcctccactaaatatgcatcctctagtgatgaagataattctagtgatgaggaggataatttgcgcaccctttttgccaacctaaacatgcaacaaaaggaaaaattaaatgaattaattagtgatattcatgagaaggatgaactcttggactctcaagaggacttcctaattaaagaaaataagaagcatgttaaggttaaaaatgcttacgctctagaagtagaaaaatgtgaaaaattatctagtgagctaagcacatgccatgatattattgccaaccttagaaatgagaatgctaaaatgattactaaggttgattcaaatttatgtgatgattcaatttccaatcatagagatgataatgttaatttacttgctaagattgaagaattgaatgtctctcttgctagccttagaaacgagaatgaaagattaattgctaaggctaaggacttagatgtttgcaatgttaccatttccaatcttagaagtgaaaatgacattttacatgctaagattgttgcattaaattcttgcaaaccctctacatctaccattgagcatgttactatttgcactagatgtagagacattaatgttgatgctattcatgatcacctagctttaattaagaaacaaaatgatcacatagctcaacttaatgctaagattaatgagcatgacttagaaaatgaaaaatttaaatttgctagaagcatgctctataatgggagacgccctggcatcaaggatggcattggcttccaaaagggagacaatgtcaaacttaatgcccctcctaaaagattgtctaattttgttaagggcaaggctcccatgcctcaggataacgagggttacattttgtaccctgtcggttaccccgagcacaaaattaggagaattcactctaggaagtctcactctggccctaatcatgcttttatgtataagggtgagacatctagttctaggcaatcaacccgtgcaaaattgcctaagaagaaaactcctattgcatcaaatgattctaacatttcatttaaaactgttgatgcatcttatgttttgactaacaaatccggcaaggtttatgcttccgggggctcaagttggatcatcgacagcgggtgcccaaaccacatgacaggggagaagaagatgttctcctcctacaagaaaaaccaagatccccaacgagctatcacattcggggatgggaatcaaggtgttactgtctttagaagaagtgatgattcagtagcatttaagggagtgttagagggtcagctataa

SEQ ID NO: 129655 - DNA, 295 bp, Zea mays
  Clone ID: MRT4577_49717C.1
gatgatccgaatggtcgacatattcgtactaatcttggtcagcatgactcgtgcaatatggattcaaatgtgcatgtcgttgactcaactttacagatccgaggaatgcatactcttatccgcgattgggtcatctccacacctgactttgtatgatattcagatctattgatccattcggcagtggctcatggtcttggacattgtgccatttacagaaaaacatgttattaccccaacaggatcctgtaatatgggagttgacttgcgtatgaagctctattgaatctctatt

SEQ ID NO: 129656 - DNA, 312 bp, Zea mays
  Clone ID: MRT4577_49718C.1
acaaatgtcattctaggacctaggaaggcgaaagtgctcagctgattcggcactaccaccaccagacaaactgaagccaattccgttcagcgtgaagtgaaacgttagcaattataggatagtcagtgtcttactgtctttaacctagttgtttctctatttccgcttctttttctagtttaccttatggtagagtggttttctagtttcccggtccatctagataggaaaaagcgcttggagggaagaatccatggccgacatctatttaaccttttcaccttggtactaagataatggagtattttcgag

SEQ ID NO: 129657 - DNA, 904 bp, Zea mays
  Clone ID: MRT4577_49719C.1
ttttcattgaagggagctctgcatcctgatccacccctccatttttttttgcttgttgtgtccttcctgggacctgagatctgaggctcgtggtggctcactgtagcctcgctacacagttttcttctcctctcctctcctctcctgtgctatttgctgtttctcctaagattctttaggccgtgcttatccgtgctggagctgaacgaagcagcaggttgctgctgctgctgctgccctcgtgccctggtggtggactggtatcggtactcgtacttgcgtcgttttattacactctctatcttcgccggtgaggttccggccgttcggtacaggtagtttatttcaaacgctcgttttatttcttgttatactatattcttctgcttcctgttcgtaccggtggcttgtgcctttgcggtggcgctcctggatctggatgcagcgagcgcccgtcagcttttctccccccggcacctggcagattcgcgtcatgctggctgagcgctcgacccctcgcgctcggcgccgtcgcctgcaggccaggtccggtttcatcgcatgtcgccgcccgctggtgcttccgtgtcatgggagcttcgtttatctttctgaccgacatgtaatgtgcagtgcgaggacttctgctgcaacgcttcgcgatgcaaggacgtcgttccagcaggacgattcaagccgtggacttgggttcttgtttttggactccggaactgcggtttggagctctggaggcaaataggcgataataatgcggtgtaaattgtgacgaaagctgagattctttgtatgaaatacggaatgtatcgcttggacactgtatcgcgaattggtggatgagcatgttgtattccgttgcccttttggttcgaaataatgcccacgt

SEQ ID NO: 129658 - DNA, 215 bp, Zea mays
  Clone ID: MRT4577_4971C.1
aaaaaaaaaaaaaaaaaaaaaaaaaaaaaaaaaaaaaaacaaaaaaaaaagaaagtagaccaaaatgaatagaaggctgaattatacgtacgggggcatatgtttcctcggtttcaatgtgtccggtcttcaattgagtgaccgtctttctattttgtcttgatcgtgttccctcttgcttttcgctgtcttcttgcctttctgcgacttccccg

SEQ ID NO: 129659 - DNA, 1326 bp, Zea mays
  Clone ID: MRT4577_49720C.1
gaaaaatcacaaacccaagagactttaaagggattcttgagacaggctcaaaacgagtttggattaaggatcaagaagataagaagcgacaacaggatggagtttaagaactctcaaattgaaggctttcttgaggagggcataaagcatgagttctcttctccctacacacctcaacaaaatggtgtagtggagagtaagaatagaactctattggacatggcaaggaccatgcttgatgagtacaagactccagaccggttttgggccgaggcgattaacaccgcctgctactccatcagccggctctaccttcatcgaatcctcaagaagacatcatatgaactcctcaccgaaggctttttacttggctacgactcaaacacaagggcatatagagtcttcaacaagtccactggattagttgaggtttcttgtgactttgtgtttgatgagactaatggctctcaagtagaacaagttgatcttgatgaactagatgatgaagaggctttgtgcgtcgcgctaaggaacatgtccattggggatgtgtgtcctaaggaatccgaagagcctccacaagcacatgatcaaccatcatcttcaaatcaagcatctccaccaactcaagatgaggatcaggctcaagacaatgaagaagatgatcaagaagatgagctacctcaagaggagggcaatgatcaagggggagatgaccatgacaaagacaaggaagatgatcaagaaccatacagggtggaggatgcactaagagattcggattgggtgttggcaatgcaagaggagctcaacaacttcacgaggaatgaggtatggcatttagttccacgtcctaaccaaaatgttgtaggaaccaagtgggtattctgcaacacgcaagatgagcatggtgtggtgacaacgaacaaagctcgacttgtggccaagggatattcacaagtcgaaggtttggatttcagtgaaacctatgcacccgtagctaggcttgagtcaattcgcatattacttgcctatgctacttaccatggcttcaagctttatcaaatggacgtgaagagtgccttcctcaatggaccaatcaaggaagaggtctatgttgagcaacctcccggctttgaagatagtgagtaccctaaccatgtttacaaactctctaaggcgctttataggctcaagcaagccccaagagcatggtatgaatgcctaagagacttccttatcactaatggcttcaaagtcggtaaagccgatcctacactctgtaagttccctttgacccgggaacaggatctggatgtcgcctag

SEQ ID NO: 129660 - DNA, 819 bp, Zea mays
  Clone ID: MRT4577_49721C.1
ttctctcgtctttgagataggcttgtggtttgcatgaccgaggagctgcaccgcccccttgctggccgctctttggattgaagggagctctgcatcctgatccacccctccatttttttttgcttgttgcgtccttcctgggacctgagatccgaggctcgtggtggctcactgtagcctcgctacactgttttcttctcctctcctgtgctatttgctgtttctcctaagattctttaggccgtgcttatccgtgctggagtttaacgaagcagcacgttgctgctgctggtgctgccctcatgccctggtggtcgactggtatcggtacccgtacttgcgtcgctttattataccctatcttcgccggtgaggtttccggccgttcggtacaggtagtctatgtcaaacactcgttttatttcttgtcatactatattcttctgcttcctgttcgtaccggcggcggtgtgcctttgcggtggcgctcctggatctgggtgcagcgagcgcccgtcagcttctccctccccatgccacctcgtcaacgccccccggcacctggcagattcgccgtcatgctggctcagcgctcgacccctcgcgctcggcggcgtcgcctgcaggccagtgctaggactgctgctgcaacgcttcgcgatgcaaggacgtcgttccagcaggacgattctgtttggactccggaactgcggtttggagttctgaaggcgaatatgaattgtgatgaaacctgagattctttgtatgaaatacggaatgtatcgcttggacactgtatcgcgaaatggtggatgagca

SEQ ID NO: 129661 - DNA, 2859 bp, Zea mays
  Clone ID: MRT4577_49722C.1
atgtcgggagatcacgccaagaaggagatggagaccggcgaaaagcccactacaaaccacgggagcacttcatcggaagagtcccgcaccaagaggaaggagaagaagaagatctcctccaacaaagggaaggagaagaaatcttcttctcaccacaaagagaagaaggaaaaatcttcttcccacaagccgcgtcggagtggggacaagcaaaagaggatgaggaaggtggtctactacgagaccgacacttcatcaacatcaacctccgactccgatgcaccctccgtaacttctaaacgccaagagcgtaagaagtttagtaagatccccctacactaccctcgcatttctaaacatgcacctttactttccgtcccattaggcaaaccaccaacttttgatggtgaagattatgctaggtggagtgatttaatgcgatttcatctaacctcactccacaaaagtatatgggatgttgttgagtttggtacacaggtaccatccgtaggggacaaggattatgatgaggatgaggtggcccaaatcgagcacttcaactctcaagcgacaacaatactcctcgcctctttaagtagagaggagtataacaaagtgcaagggttgaagagcgccaaggaggtttgggatgtgctcaaaaccgcgcacgaaggagatgagctcaccaagatcaccaagcgggaaacgatcgagggggagctcggtcggttccggcttcgcaaaggggaagagccgcaacacatgtacaaccggctcaagaccttggtgaaccaagtgcgcaacctcgggagcgtaaagtgggatgaccacgaagtggttaaggttattctaagatctcttattttccttaaccctactcaagttcaattaattcgtggtaatcgtagatatactaaaatgacccccgaggaagtaatcgggcattttgtaagttttgagtgcatgatcgaaggctcgaggaagatcaacgagcttgatgatccatctacatccgtggctcaacccgtcgcattcaaggcgatggaagaaaagaaggaggagtctaccccaagtcgacaaccaatagacgcctccaagctcgacaatgaggaaatggcgctcgtcatcaagagcttccgccaaatcctcaagcaaaggagagggaaagactacaagtcccgctccaagaaagtttgctacaagtgtggtaagcccggtcactttattgctaaatgtccattgtcaagtgacagtgacagggataacgacaagaagggcaagaggagagaaaagaagaggtactacaaaaagaagggcggcgatgcccatgtttgtcgggaatgggattccgacgaaagctcaagcgactcctccgacgacgaggacgccgccaacatcgccgtcaccaagggactcctcttccccaacgtcggccacaagtgcctcatggcaaaggacggcaaacggaaaaaggttaaatctaactcgtccactaaatatgaatcttctagtgatgataatgctagtgatgaggaggataatttgcgttccctttttgccaaccttaacatagctcaaaaggaaaaattaaatgaattagttagtgctattcatgaaaaggatgaccttttggattcccaagaggattgtctaattaaagaaaacaagaaacatgttaaggttaaaaatgcttatgctctagaaattgagaaatgtgaaaaattatctagtgagctaagcacttgccgtgagatgattgacaaccttaggaatgaaaatgctagtttaaatgctaaggttgattcacatatttgtaatgtttcaattctcaatcctaaagataataatgataatctgcttgctaggattgaagaattaaacatttctcttgctagccttagagtagaaaatgaaaatttaattgctaaggctaaagaactagatgtttgcaatgctatcatttccaatcttagagataaaaatgatattcttcatgctaagattgttgaacttaattcctgcataccctctacatctattgttgagcatgtatctatttgtactagatgtagagatgttgatgttaatgctattcatgatcatatggctttaattaaacaacaaaatgatcatatagcaaaactagatgctaaaattgccgagcacaacttggaaaatgaaaaatttaaatttgctcgtagcatgctttataatgggagacgcccgggcattaaggatggcattggcttccaaaggggagacaatgtcaaaattagtgcccctcctaagagattgtccaactttgttaagggcaaggctcccatgcctcaggataacgagggttacattttataccctgccggttatcccgagagcaagattaggagaattcactctaggaagtctcactctggccctaatcatgcttttatgtataagggtgagacatctagttctaggcaaccaacccgtgctaagttgcctaagaaaactcctactgcatcaaatgaacataatctttcatttaaaacttttgatgcatcttatgtgttaactaacaaatccggcaaggtttatgcatccgggggctcaagttggatactcgacagcgggtgcacaaaccacatgacaggggagaaaaggatgttctcctcatatgagaaaaaccaagatccccaaagagcgatcacattcggggatggaaatcaaggtttggtcaaagattacaacttgctttctgtatcccaattatgtcaaatgggctacaactgtctattcactgatgttggtgtcactgtctttagaagaagtgatgattcaatagcatttaagggaatgttagagggtcagctatacttg

SEQ ID NO: 129662 - DNA, 318 bp, Zea mays
  Clone ID: MRT4577_49723C.1
ggggaacacaaaggaccttttttttgggggaacggaaaagggccttattaaaacagccctaacgtagggccttttgaaggggggacttggttttttgcacaaaaccgggcggggggaaacccccctttacggaacggacgggggaaacccaaacaattggggggacccccggccgttcttagtttaaacaaacaaaactaaaatggggatgctgtttggaatgcccctgggggggatccccggggggtccccctttgggttagaggggttgggggaaaaaaacctttaaggaaacccgccccccccccttgggttttt

SEQ ID NO: 129663 - DNA, 912 bp, Zea mays
  Clone ID: MRT4577_49724C.1
gtggtttgcatgaccgaggagctgcaccgcccccttgctggccgctctttggattgaagggagctctgcatcctgatccacccctccattttttttgcttgttgcgtccttcctgggacctgagatctgaggcgcgtggtggctcactgtagcctcgctacacagttttcttctcctctcctctcctgtgctatttgctgtttctcctaagattctttaggccgtgcttatccgtgctggagtttaacgaagcagcaggttgctgctgctggtgctgccctcatgccctggtggtggactggtatcggtacccgtacttgcgtcgctttattataccctatcttcgccggtgaggtttccggccgttcggtacaggtagtctatgtcaaacactcgttttatttcttgtcatactatattcttctgcttcctgttcgtaccggcggcggtgtgcctttgcggtggcgctcctggatctggatgcaacgcgcgcccgtcagcttctccctccccatccacgcgtccgcccacgcgtccgcggacgcgtgggttcgccatcatgctggctgagcgatcgacccctcgcgctcggcggcgtcgcctgcaggccaggtccggtttcatcgcatgtcgccgcccgctggtgcttccgtgtcatgggagggagcttcgtttatctttctgaccgacatgtaatgtgcagtgctaggactgctgctgcaacgcttcgcgatgcaaggacgtcgttccagcaggacgattctgtttggactccggaactgcggtttggagttctgaaggcgaataaattgtgatgaaacctgagattctttgtatgaaatacggaatgtatcgcttggacactgtatcgcgaattggtggatgagcatgttgtattccgttgcccttttg

SEQ ID NO: 129664 - DNA, 212 bp, Zea mays
  Clone ID: MRT4577_49725C.1
gttcgacgcacgcgtcctaccgtacgcacctagcttctaatcataaattcgttccacacctacctacgtccctcgtccgagctttaacatcttgcgcgcaccccacaaaacttaactactagccatgatcacagatctatatgctctcatcaaatatggcttaataattcacttaaaacatcttaccctctaataaaattaccagtatattt

SEQ ID NO: 129665 - DNA, 782 bp, Zea mays
  unsure (1)..(782): unsure at all n locations
  Clone ID: MRT4577_49726C.1
ctttctgttcgtgccggcggcgtgtgcctttgcggtggcgctcctggatctgggtgcagcgagcgcccgtcagcttctccctccccatgccacctcgtcaacgnnnnnnggcacctggcagattcgccgtcatgctggctcagcgctcgacccctcgcgctcggcggcgtcgcctgcaggccagtgctaggactgctgctgcaacgcttcgcgatgcaaggacgtcgttccagcaggacgattctgtttggactccggaactgcggtttggagttctgaaggcgaataggcgataataatgcggtgtaaattgtgatgaaagctgagattctttgtatgaaatacggaatgtatcgcttggacactgtatcgcgaattggtggatgagcatgttgtattccgttgcccttttggttcgaaacaatgcccacgtacatcgcatgcgtatggtcagatgttaggatcggcatctggttgtcagaatctgatcgttaatagcttcgtttttagttcaaattaaaaaaaaaaaaaaaaaaaaaaaaaaaaaaaaaaaaaaaaaaaaaaaaaaaaaaaaaaaaaaaaaaaaaccaaaaaaaaaaaaaaaaaaaaaaaagggtccaaacctccccccctaacctaacctaggataataatgataataaaaccgggaacctaggcccaaagttttaacatggaaaatggggggatttaataaaaaaaaaaaaccgttttcctccgaaaattccgaaaaaacaaaaatgctgttttaaacccggggaaaa

SEQ ID NO: 129666 - DNA, 328 bp, Zea mays
  Clone ID: MRT4577_49727C.1
aaacaacaaatagtaaaatacattccatttttttacagacgatgaactaaactgggttgcttctacacggttccctaaagagtagagaccccaagtccaccccttgccccctaaacacaaaaaaagcaccttacttaaacaggggacaccgtcgttaacggttgaacggcctatccacacttttgagctttgccgcctattaaccctttgctttcattaggcgtggttggaaaggataactcccccggcccgttaggggtgcaccccacaggcccattccacggaggttaggctgaggcaccctttaatttttaccaagtgcccttcc

SEQ ID NO: 129667 - DNA, 428 bp, Zea mays
  Clone ID: MRT4577_49728C.1
cggacgcgtggggatggaagaacactctgttactgggcatgttgcgcggtttccacgcgtgtgagtaatgtagaagtcgctatggtaggtatttccataccgtcattagtggatcattgaatttttttgtaagaaggttattgcaatgccctttttccgggcatgaataagaaaaaggaaatatgcttaaaaaaaaaaaaaaaaaaaaaaaaaaaaaaaaaaaaaaaaaaaaaaaaaacaaaaaaaaaaaaaacaaaaaaaaaaaaaaaaaaaaaaaacataataaaataaaaaaaaaaagaaaaataaaaaaaataaaaatgaacgaagaattacaacgaaaaaaaaaaaaaaagggcccgccttttaagaaactcaatctttcttgcgggggtttccaaattcaaaagcttttttaatggccccca

SEQ ID NO: 129668 - DNA, 681 bp, Zea mays
  Clone ID: MRT4577_49729C.1
ctcggagccgaccctagccaggttgatgaagcgatgggcttgccctctttccattgcttctgtaatgcggtgcagtggtactttagtccgaatgaatggtggaccaagcagcagtttcccaagctgttgccgctcttcctcgccagtcctaagatagatgtcaaccagcaggataagaatggctggacgcccctgatgcacgcggcagcatgcggctggggagagatggccgaggcgctcctgaaggacaagcgcgtggacgtcactatcaagtccaaacgggatgaaaccgctcggtccctcgctgtgcgcagcgacgtcatgtggcttgccgccgccatcgaaaagagggagaaggaggcatccggcgcttcgccccaacccaacacagccactaatgcgggaagtgatctcagtgcacttcgagaagagctcgaggcgaccaagaagctgtgcgcctatctggccaggattgtgcaatctttggatgaagtgaaggacaaagagaatacagtaggcaatatccgggagttggcagccgcactccgcgtggatttctagtcactttgctcgatgtcccactgaatgaataagtgaaagggtccccgtactccttcattgttttctcagtgcactacaatgcgaactcagtttgtaaacggaaaaaaaaaaaaaaaaaaa

SEQ ID NO: 129669 - DNA, 871 bp, Zea mays
  Clone ID: MRT4577_4972C.1
ggagaaggcgtgcacattgctagtgtacttcgataagggctcgccgtccatggcgaacgagcaccgacaccacttcgtgcgccgccacgcgctctccgctatctcggccatctacagcctccagcagggggaccagctcatccccgacgcgccggagctcgtcgagcgcgcgcttgcctccgaacaggaccccgccgcgcgcaggaacgcgttcctcatgctcttggctgctgggcaggaccgcgccgtgggctacctcttcaacaacgccgaccgcgtcgcggagtggcccgatctgctgcagatggccgccgtcgacctcatccgcaaggtctgccgctccaagggccgtgccgacaagggcaggtatatcagggtcatcatctccctcctctcagcgtccagcgcggctgtcgtgtacgagggcgcgggggcgctcgtgtccctctcctctgcgcccacggctgtgcgggccgccgccaatacatactgccagctgctatcctcgcagagcgacaacaatgtgaagctcatcgtcctggaccgcctgcacgagctatgctcctcgtgtccgtcgacctgcccgtgccggagcaggagctatatcggtggacgctggagattatggtctaggccgtgacgctgtgcgctgacgccattctgagccggacgacattgtcatttgctatgtgcacgagagatagatgtattgtggtgttgttgtataattggtatggagagagtatgcttttgttatgtctgtatctgcataccctgcgtgctttgaatgttatataatacttgatagataataaaggatggtgttcctgaatgttatataatacttgataataaaggatggtgctctttt

SEQ ID NO: 129670 - DNA, 317 bp, Zea mays
  Clone ID: MRT4577_49730C.1
gccggccggtccgggaaaaaaagtattctattacaccatggctcacagcaacgtttggaactctcatcctaagtcctttggtaagggatctcgtcaatgtcgtgtttgcgctcaccgtgccggtttgatccgcaagtacaatttgaatatctgtcgtcaatttttccgtgaatacgctagtgacattggtttcaacaagttccgttaaattgtaaacctgtcacatctcttactcatattttcttgttttgaaaagacaacaacaaattgttaataaagaagaagagagagaaaaaaaaaaaaaaaaaaggccccta

SEQ ID NO: 129671 - DNA, 532 bp, Zea mays
  Clone ID: MRT4577_49731C.1
agagaggaaaaaaagcgcgcccaacacaggggagcaaccaaaagcaagcacaacgcaggaaagaacacctagacaagtacagaggacccaagcacgagcgaccatgagtacaggcgcaccgacgagcaaaggccaagaacagacccaagcacggggggggcgcccccccaggccaccgccaccacaaagaccaccgccgcgaaaagggagaaagaaggcacaccaccaacagcataggaccgccaccaccagcaccccgacgggggccatcatcaccacacacacagagggctagagcaggcacaccagcaagaccacagggcaccaccaatgccagcagagccatggccaccaccatgaagtaagacaaagagggcacaccaagagccccatagggcaccagaagcgccgacagtgacggaaccaccaccaccggaacaaaaggcgccgtcaccaccacatatgcctgtttgagacaacgcaccatcaacacgcaaagaggaccacaagcaccacaaggggcacctagacc

SEQ ID NO: 129672 - DNA, 498 bp, Zea mays
  Clone ID: MRT4577_49732C.1
gcggccgggccgacggacccttacaacttctttatgtctatgggacatccatgagtgcacaccagcttaccctatctatgggttttatgacgagcgcaggccctgatcgagcgtatagctgaggaacacattcaccgactgtcttaactgcttgccagtgttgcagtcgggggaaggaaaagattttttgcgtgcatggtggactactctacggagttaaacagacttgatctgatactctgcgctggatcggcccactgacgtgcctgagactgcattgttctgtgaacttgtgtgggcagatccttgcactggagcatcaacccgcgccttcattgagcgaggtggtgcatttacatcgggacctcgactaagggcctgaatcacttgacaggcatgagttgcaccttatttgccgctcacatccaggcgtggaagatggatacgagtttttcgctactcggcgactctgaacaatattttcagtccctaactact

SEQ ID NO: 129673 - DNA, 216 bp, Zea mays
  unsure (1)..(216): unsure at all n locations
  Clone ID: MRT4577_49733C.1
ttctatcgtacgnggtcgcgtgggggggggggggggggggggctatatacccggggcggggcccgactgcatgttcgacacacttatacactgtcacaatgatcgttcggtcgttctttcatcgttcctccccctgttcttattttgtttgttccttcatcctatcattcataaggggggggggggggggtcctattcttccatcnttcatccctt

SEQ ID NO: 129674 - DNA, 243 bp, Zea mays
  Clone ID: MRT4577_49734C.1
ctcggaacgatcactgtatgaaagttttctctacaacggcctgccatatatcaaaggcaggctgcaatgtgtgcatgcagtgccagacgcccagttcgaagaagtttcggataaaggtcaagctgatgatcctgccttcactagatacttggccttgcatccaaaacgattttaaataagtagcataagcatgacctctgtcggactcatgattacccgcacaaaggacaaggccctagagta

SEQ ID NO: 129675 - DNA, 346 bp, Zea mays
  Clone ID: MRT4577_49735C.1
cctcctgcgactttctaatttataccccccccctaagggcgggactacaggtttttgtgggtaccacacacactactcccatgcatgcgaccagaaaggcgctcacgaatctgctctcaaaaacgacctcaacgctttcccctctcttatcgcatccctcaccacacgtacttcgcacatcatacgaatgatcctgctttaagatgtcataagcactctacaaagatcacgaaattgttgaagatgaagaggacaatatattgctagagttggacaatcgtctttattcacacattttctctagtgctcccgtcatactctccaatttgaatacatagacacctac

SEQ ID NO: 129676 - DNA, 256 bp, Zea mays
  Clone ID: MRT4577_49737C.1
gttctagctcttcagctggcctgcctgagtcttgctgtgggacggcgtataggcgggttccatcccgtatcgcatcgtggactgttcctgatggtccgtgactgacgttctcgcgagcgctgattctgctcatagggaaagcttccagttcatgacgggtccttctgttctcgatgggggcaattaaaagcagatgcacgacgcccgcgcctattcgccttatcgacatttgttccatgcggacgttttagaggat

SEQ ID NO: 129677 - DNA, 957 bp, Zea mays
  Clone ID: MRT4577_49738C.1
cgggaaggtgccggtgctcgaggatggcgacctcacgctcttcggtaagttgagttcatcatcatccatcgtcggcccgtgcccgtctattataattcggtttttgttttacaaattatatatattctctcgattttaaaattttcccttttgattctacgggttcttcatcttctaagcgcgtgatatgtaatgtaacattttcctagaatcacgtgcgatcgcgaggcatgttctccggaagcacaagccggagctgctgggcggcggcaggctggagcagacggcgatggtggacgtgtggctggaggtggaggcccaccagctgagcccgccggcgatcgccatcgtggtggagtgcgtgttcgcgccgttcctgggccgcgagcgcaaccaggcggtggtggacgagaacgtggagaagctcaagaaggtgctggaggtgtacgaggcgcggctggccacgtgcacgtacctcgccggcgacttcctcagcctcgccgacctcagccccttcaccatcatgcactgcctcatggccaccgagtacgccgctctcgtccatgcgctcccgcacgtcagcgcctggtggcagggcctcgccgcgcgcccggcggccaacaaggtggcgcagttcatgccggtcggcgccggagcgcccaaggaacaggagtgacgatgaagcgatcgaagcgacttgtgttgttgtgcttgattagttaattggaaaccttctcactcatctagtccatcatggtgcctgcttttctttatactatttgtcttaattttgctgctttctccacggaataatagtagagatttggaaatgtaatgtattttatcaaaatatattggattttcaagcaatatagtatggttttcgctgcaaaaaaaaaaaaaaaaaaaaaaactccctcgtgccgaattgcggccctccagcatccagcatcttgt

SEQ ID NO: 129678 - DNA, 1180 bp, Zea mays
  Clone ID: MRT4577_49739C.1
ttcatgacacacccatccgagattccagctgctgatcttgatcctgcaccccgagccgtacacaagagctagtcggtagaacttgcaggagcggagcagaactaagtgcagagaacaggacatatggctacgccggcggtgaaggtttacgggtgggctatctcgccgttcgtatcgcgggctctgctggccctggaggaggccggcgtcgactacgagctcgtccccatgagccgccaggacggcgaccaccgccgcccggagcacctcgccaggaacgtgcgtacctcgctcgctcgatagatccaccgtgaattcattttggtggttctctctctcgcttccgcccgactgatctgctgttgctttgctgcagcctttcgggaaggtgccggtgctcgaggatggcgacctcacgctcttcgaatcacgtgcgatcgcgaggcatgttctccggaagcacaagccggagctgctgggcggcggcaggctggagcagacggcgatggtggacgtgtggctggaggtggaggcccaccagctgagcccgccggcgatcgccatcgtggtggagtgcgtgttcgcgccgttcctgggccgcgagcgcaaccaggcggtggtggacgagaacgtggagaagctcaagaaggtgctggaggtgtacgaggcgcggctggccacgtgcacgtacctcgccggcgacttcctcagcctcgccgacctcagccccttcaccatcatgcactgcctcatggccaccgagtacgccgctctcgtccatgcgctcccgcacgtcagcgcctggtggcagggcctcgccgcgcgcccggcggccaacaaggtggcgcagttcatgccggtcggcgccggagcgcccaaggaacaggagtgacgatgaagcgatcgaagcgacatgtgttgttgtgcttgattagttaattggaaaccttctcactcatctagtccatcatggtgcctgcttttctttatactatttgtcttaattttgctgctttttccacggaataatagtagagatttggaaatgtaatgtattttatcaaaatcttttctattttcaagcaaaaaaaaaaaaaaaaaaaagggcggccgccaccgaataatagtagagatttggaaatgtaatgtattttatcaaaatatattggattttcccgcc

SEQ ID NO: 129679 - DNA, 592 bp, Zea mays
  Clone ID: MRT4577_4973C.1
ccatggaatttacctcaatcaaaataaaagttggccgattgtagacataattcatttataagatgcttgatacatcactctaatatacatggatatacaaaactaaaaccaccgatacctagcaaacataatgctatgatatcccgaggaatttcaactatatatcattaacgaaacaacctcgagatgctcagggcgctgagcttcagctccccccgggccgccgccacgccgtcgttgtcgtcgcgcgcccagcagtagaggcacgcggataggccgacgcactacgccaggggcgccgcgcgccgcgtcatccaccagcctcactagaagcaacttgctcatggcgggccgccaccatggctgttgtgcctagtgtaacctcaagcaagtctagtctgtttctgtctgtgtatacgactaaaaaaacaacagacgagggattcggacgaggcagccagtgctctcacgtagccagcttctcctgttccagctcagttcttgttcatccagcagagcaccaaaaaacagaaaagcggagtgatgtacttactattcctcctcctcccatgtatatatatatgatggcaag

SEQ ID NO: 129680 - DNA, 224 bp, Zea mays
  unsure (1)..(224): unsure at all n locations
  Clone ID: MRT4577_49740C.1
aaaaaaaaaacaaaactnctctcttccaccccaaactccagtagggcatccannacagcaggcgagggaaagcagagacanncgcccacccacnnccgctccggcaggccanngcggctatgcanngcagcagatgggcccatgccnnngccggcgcnnccgctgccccgccgcnnggcggcngnngcgcccnnccggcggcnnncggcatcacnnntaccgag

SEQ ID NO: 129681 - DNA, 1174 bp, Zea mays
  unsure (1)..(1174): unsure at all n locations
  Clone ID: MRT4577_49741C.1
ngtccaaaaccggagtccattccagctgcttatcttgatcctgcaccccgagccgtaccaagagctagtcggtagaacttgcaggagcgtagcaaaactaagtgcggataacaggacatatggctacgccggcggggaaggtttacgggtgggctatctcgccgttcgtatcgcgggctctgctggccctggaggaggccggcgtcgactacgagctcgtccccatgagccgccaggacggagaccaccgccgcccggagcacctcgccaggaacgtgcgtacctcgctcgctcgataaatccaccgtgaattgattttggtggttctctctctcgcttccgcccgactgatctgctgttgctttgctgcagcctttcgggaaggcgccggcgctcgaggatggcgacctcacgctcttctaatcacgtgcgatcgcgaggcatgttctccggaagcacaagtcggagctgctgggcggcgccatgctggagcagacgccgatggagagcagtgcctcgaggatcgacacgtgccgtgaagcacaaagctgctgacggcaggctggagcagacggcccaccagcacgtgtggctggggatcgcggcccaccagctgagcccgccggcgatcgtcatcgtggtggagtgcgtgttcgcgccgttcctgggccgcgagcgcaaccaggcggtggtggacgagaacgtggagaagctcaagaaggtgctggaggtgtacgaggcgcggctggccacgtgcacgtacctcgccggcgacttcctcagcctcgccgacctcagccccttcaccatcatgcactgcctcatggccaccgagtacgccgctctcgtccatgcgctcccgcacgtcagcgcctggtggcagggcctcgccgcgcgcccggcggccaacaaggtggcgcagttcatgccggtcggcgccggagcgcccaaggaacaggagtgacgatgaagcgatcgaagcgacttgtgttgttgtgcttgattagttaattggaaaccttctcactcatctagtccatcatggtgcctgcttttctttatactatttgtcttaattttgctgctttctccacggaataatagtagagatttggaaatgtaatgtattttatcaaaatatattggattttcaaacaaaaaaaaaaaaaaaaaa

SEQ ID NO: 129682 - DNA, 832 bp, Zea mays
  unsure (1)..(832): unsure at all n locations
  Clone ID: MRT4577_49742C.1
accttgtctcctgggctccttgctcctgttggacgccactcgccaccccactttccaaaccagaccacagccgaaaacccccgatcatgccgccgccggtcgaaccctacatcccttcgttcaccgccggcttgtccgcgcacgaggccgccgatgccgacaaagactacctctacttcctccgccacgtccgcctcgacggagacgcctacacggtcgtgattccgtccaaggacggcgcctcctgtcctccccagatcatcaggtacgaacaaccgccctccgatcacaatgccggggcccccgtcgcgggctctgaatgcgggagacaaagggcccatcccccgtcggaggagaactcttgggctacgggtgaggccgccccacacggcgtgaagcgcaaggttccaggcgcgagccccgccggcgaggtccgaagcggtgctgtccgtatggaagaggacaccccgacattggtggcgaagtccgcgtggtatgacttgcaacccgacatcgacgatgactaccgcttcttcctccagaatgctcgcgtggtgaatgacaaattggtgttcaagacggggaactgttcaataactatcggggaccatagtgatgctgaggagcacgacgacaccgaggaggaagagaaagaggaggaaggngaaggggaagaggatgatgaagaagaagcagacgaccttcctgcgtcagggcagtcggggggaggacggtatcgngtacgnngaggaggccggtcctgtgtcagagaccagaaggacggtgnttgactcggatttgccaattccaaagtcttttgagctagtttagc

SEQ ID NO: 129683 - DNA, 155 bp, Zea mays
  Clone ID: MRT4577_49743C.1
atccgttttgagatctcactccacttggtgtttcacctcacatgcctcatagcagacccctgctactaccctgtccatacaaagtatcacctcttacgagctgcacaccgacaacagcctcaagtccctggacgctcacctggacggggaagcct

SEQ ID NO: 129684 - DNA, 525 bp, Zea mays
  unsure (1)..(525): unsure at all n locations
  Clone ID: MRT4577_49744C.1
agcgtccgtggagtcgtccttggcactagcaccgacgatcgatacttcaacgatacactcttacttcgggccgataacggggcgcatagcacatagagtagcccggggccggttcgtccttgacggtaaggtgtaccacatgcacaggaacgacggacggaacacgataccacggtccacacagaggggggagggggcacatctggactgtgaaggagtacgtagtccgcggcgaatcgccaaacatgacctattactaccgaatattccacggagagcaaggactgccggctaacgtggacccgtacctgacataccacgtgtcgggcgcctacacgctaggcgttcacatgaacgataaagggctgggacagtgcgaagcccgagggcctggtgcttgacgtgtactggaacctggaacgtgagggcagaggcgacgtgctaggtcatacgctacagattcgggagtcgngggacgccgtgctggacgatgagactactggcttcttccgggcgcgtggagcc

SEQ ID NO: 129685 - DNA, 471 bp, Zea mays
  Clone ID: MRT4577_49745C.1
tttttttttttttttttttttttttaaatcatataattaataataataggaaacattgttttgtatagacacacatgatgtacactaagtctaatctcaccttctatcctaaacttcactttataaataaatgctacagtacaaaacatcattttgcattaccgtacgatgggccgagcacggcctgacatttggaccaggaatcccagcttagcatagcgtattcggggggcatggccgatgcaaaggaagcttgccatttgcaagctgcaaagcacctacattattcatttatgttcctatttttttctgcctgcgcatggcagcaagatcacatgaacgcaccaaacacctctcattaattattcgtaggacgccagccccacctccccctccccctccatgatgctctctcctcttcctgccatgccttggcccatggaccagaggccctcacgctcacgccttcct

SEQ ID NO: 129686 - DNA, 223 bp, Zea mays
  Clone ID: MRT4577_49746C.1
cggacgcgtgggcggacgcgtgggcggacgcgtgggcggacgcgtggggttctagctctagatcatacctgtaaaatatgcagaggtcttttgcggatgatattcttatatcgtttttggtagtcgcgctgtactgtaccgtgtgatgattatggagctgctttgtaggccgtttttaacctgaaaaaaaaaataaaaaaataaaataaaataataaataagg

SEQ ID NO: 129687 - DNA, 127 bp, Zea mays
  Clone ID: MRT4577_49747C.1
tcgtttcttccgtccacaaccatgttggccccaatggcagggactgtgagcctttttcggcggtcgctccgagaaccgtgcggcttcagctcctttgtgctggcttcatctaaggaaacgggccgac

SEQ ID NO: 129688 - DNA, 384 bp, Zea mays
  Clone ID: MRT4577_49748C.1
gaaacgaaccgggcaggaaagatgccgattatattgataaagaggaaagcccaaaattggcaaacaacaacctttcgaagaggactacaacaaaaacaactgctacagacaaaaactacgctaaccctatcaacaacaacaacactctatgcaacaagagcacacagcagctctgacaacatgagcacgcatcaaaaagcctcccaacacaacaaagacaaaatctaaagaaaaggctaataaacctccgccacaaagagccaaaaggcacgaccttttaaactgaaaagcttattgaggagggctggtggcaacaactcctttagatgatctgcgcacgcttgaattgaactctcgctgggcttacccgtaatcccaacggtg

SEQ ID NO: 129689 - DNA, 236 bp, Zea mays
  Clone ID: MRT4577_49749C.1
gcagtataaaacaacatcaagacatacatacacctctgctcaaatactggtatagatgtgtagatcccattgtttggtgaggtgatcatttgcgaggaagttgactattagcatgtattaagataaaaaggaaagagatgagaaaatgtttttgaaatttagtacgatatgccttgcagtgcctgtatctgttgcattcatatttgtgatcagctggaatgaagtggcttgcattc

SEQ ID NO: 129690 - DNA, 3278 bp, Zea mays
  Clone ID: MRT4577_4974C.1
gaccctcgaggctggccggcgtcccccagatccgatccccctcaccttccctccctcgaggaggccaggccagatccacgggcctcgcagatctggcggctatggagaaggcgtgcacattgctagtgtacttcgataagggctcgccgtccatggcgaacgagatcaaggcggagctcgagtccggcgacggacccgccaaggccgacgccatgcgccgcgccatctcgctcctcctcaacggcgagtccctaccgcacctcttcatcaccgtcgtccgctacgtgcagtcctgcgacgaccacgctgtccagaagctgctcctcctctacctcgagaccgtcgacaagcgcaacgctgccacgggaaagatcctcccggagatgatcctcatctgccaaaatctccgcaacaacctgcagagccctaacgagtacatccgcggcgtcacgctgcggttcctctgccggctcaccgagcccgagctgctcgagccgctcgtcccctccatcctcgccaacctcgagcaccgacaccacttcgtgcgccgccacgcgctctccgcgatctcggccatctacagcctccagcagggggaccagctcatccccgacgcgccggagctcgtcgagcgcgcgcttgcctccgaacaggaccccgccgcgcgcaggaacgcgttcctcatgctcttggctgctgggcaggaccgcgccgtgggctacctcttcaacaacgccgaccgcgtcgcggagtggcccgatctgctgcagatggccgccgtcgacctcatccgcaaggtctgccgctccaagggccgtgccgacaagggcaggtatatcagggtcatcatctccctcctctcagcgtccagcgcggctgtcgtgttcgagggcgcgggggcgctcgtgtccctctcctctgcgcccacggctgtgcgggccgccgccaatacatactgccagctgctatcctcgcagagcgacaacaatgtgaagctcatcgtcctggaccgcctgcacgagctatgctcctctcacagggaggtgatggtggatatggtcatggatgtgctgcgcgcgctcgctagccccaatgtggatgtcaggagaaaggttctggatttagtcctggatctactcaccctgagaaatgttgaggaggtggtgctctacctcaagaaggaggtggttaagacacaggctgctgaggtgaagggtgatgaataccgccagatgctagtgcaggccatccataactgtgccaagaagtacccagaggtggctgcattggttgtacaccttctcatggacttccttggggatcctaatgttgctgcagcactcgatgttgttctatttgtgcgcgagattatagagactaatcccaagcttcgtgtgtccatgatccagaggctgatcgacatattctatcagatccgggcatctcatgtctgctcttgttctctctggatccttggagagtattccctctctctgcctgaggttgagagtgccatttctaccatcaagcaatgccttggggatcttccattctacactgtctctgaggaacgtgagacaactgattcatctaagccatctcagccagtggtgagctctgtcaccgtgtcttcgaggaggcctgctgttctagcagatggaacttatgccacacagagtgctgccactgagattgctgtttcagctcctgcttcagctcttgggtccttggcttccacccagaatctcagatctctcattctgtctggtgatttcttcttggctgctgttgttgcctgtagcctgaccaagcttgtgttaaggctggaggagattcagccagcaaaggttgaagtaaacaaggttagtactgaagccctgttgatcatggtgtccatcttgcagttgggacagtcatcttatctcccacaccctattgacaatgactcatatgatcggattgttctctgtgtgaggcttctttgcaatactggtgatgatgttaggaaggtctggttacagtcttgccgccagagctttgtcaacatgcttgctgagaagcaatttagggagactgaggagatgaaggccaaggcacagataacttatgcccaaccagacgatcttattgatttctatcacctaaagagcaggaagggaatgagtcagcttgagctggaagatgcagttcaagatgatttgaaggctgcaaccggccaatttactaaggatgcagatgatactgacaagctaaaccgtattcttcagttgacaggattcagtgatcctgtgtatgccgaagcatttgtaactgttcatcattatgatattgtacttgatgttacagtcgtaaaccgaacgaaagaaacactccaaaacttatgcttggaattagcaacaatgggtgacctaaaacttgttgaccgtcctcaaaactatacattggctcctgagtcaagcaagcaaattcgagccaatatcaaggtctcatcaacggagactggagtcatatttggtaacatagtttatgaaacttcgaacgtgatggaacgatctgtggttgtcctaaatgacattcacattgatattatggattacatctcacctgctacatgtgctgatgttgcattccggaacatgtgggcagaatttgagtgggaaaataaggtggcggtgaatactgtgatccaggatgagaaggaattcttgaatcatattattaagtccacaaacatgaagtgtctaacaccaccatctgcgctcgatggagaatgtgggttccttgctgcaaatctctatgccaagagtgtgtttggcgaggacgctctggtgaatatcagtgttgagaagcaggccgatggcaagttgactggctacatcaggataagaagcaagacccaaggaattgcgctcagcttaggagacaagatcaccctaaaacagaagggaggcaacagctagctcagctacgagtcgttgatcactgtggtctgtggcaggcacatatcacccccgttaactcacctgaacacaaaatttgctagttagccaccaattttcagggttgcctcacctgacacaatttgctggttgcccaccaatttttaggatagccaattattttggatgcgctgttgataatagaaaataaggatagggcactagtctaaggtgtaatatatttgggtcatttcatgtgccctatacctttttgacaaaatattataaaatagacccctattaaagctgttttttatgagttaagctctatatttcaag

SEQ ID NO: 129691 - DNA, 533 bp, Zea mays
  Clone ID: MRT4577_49750C.1
gcccccaaaaacaggcatgcaggggattctcaatttctcattcctctcaactatgttggcaaggggggggggcacaaatttgtccttttcaccataggacaacagctttaaactggggaaaccccccaaaatgggaagcctgttctgcaaaccgcataactggaagagggggggcccctgttttgaacacatacttatctaggggggggggtttggtttcatcaaacaggaaatacaaatccttcaatggttctccaaaaaaaaaaggttccattttatttttcggggaaggggggaggcttgggacatcatccaagggtggggaacccccaaaatcaacttttggggacttctcaaaagcctgaaaaaactgccaaccccactccctaaacttggaaacccctgggattctatacaaaacaaatagggattccacagtctttgggcgtaaaaaattgggacggccaagaggttttattaccaaatcattgatatatttggagcttttattcccaccatcagccccccctttt

SEQ ID NO: 129692 - DNA, 658 bp, Zea mays
  Clone ID: MRT4577_49751C.1
cgttgctgtcgcggcaagtacctcaacttctcggaacccgtcgtgcgggagagcttcagcgatcgcgcctgcgcctggtcctacggcgtcaacgtgttcgacctccaggcgtggcgccgggagcagtgcaccgagcagttccaccgattcatggaaatgaacgagaacggcacgctctgggatccgacgtccgtgcttccagtcgggctcatgacattctacggcaagacgaagccgctggacaagtcatggcacgtgatggggctcggctacatcccacacatcaggcccgaggacatccgtggagctgcggtgatacacttcaacgggaacatgaagccatggctggacgtcgccttcaaccagtacaagcatctctggaccaagtatgtcgacacagagatggaatttctgacgctctgcaacttcggcctctgaaagactattacgagtatagctctgcgtctgaacaacgaacgtcttcagcgctgacgtgagtgacctgcgccaagcttgcggtcagcgtgagtgacgcttaacgtagtggtcagtgcagagttgcaatcttgctgctaggcagcgttttgcccgtggatgtccaagcttgctcccttgtgtttatgtgtgatggcactttgcaaaataaaaaagttttaat

SEQ ID NO: 129693 - DNA, 265 bp, Zea mays
  Clone ID: MRT4577_49752C.1
tcgggcttcaaccttcaagggttcacccattttaaaaacctaacaaccgggccttcattgggccattcctagcccaaaatccaatccaaggtcgggccccaagcggggagggaacctccggggcgaactcgtcccgcaaatcggggggcggggcaaaattaaaattcggtccggggttcggctgggtaggctcggcggggtcccaccgcggcggtcggggagcatggtggggagggggggagggctgggaaggaaccgccggcgg

SEQ ID NO: 129694 - DNA, 836 bp, Zea mays
  unsure (1)..(836): unsure at all n locations
  Clone ID: MRT4577_49753C.1
ccggccgggaaacccgactccaccgtcgccgccagcacctcaatcgcaaccntctttccgacacacacacatattcgcaaaaatgttccgatccgccgtcctccgatccctccgcgtcgccgcccgaccggccgccgtccgctccttcgctgctccccgcgtcgcttccgtagccgtccccaagatccagagcttccaggccgtgcggttctacagcgccggaggtgcgctcaacaaggatgaggtcgagggccgaattatgagcttgttgcagggctttgataaggtcaacgatgtttctaacatcaagtcctccgctcacttcgccaacgacctcggtctcgactctcttgacaccgtcgaggtcgtcatggccatcgaggaggaattcagcattgagatccccgacaaggacgccgactccatccactccgttaaccaggctgttgagtacatcctgaaccagcccgacgccgcctaaacggtttaatctcccatataccaccaccgccgccgccatctacctacctcttttttttcctgttctgtctccccttcgattcttgtacaattatctcaaacctctccatccaatcccagtaacgccgaaccccctcggagggggaaacacaagaaaagaagaagatatggagggcgacaagtggtggggggaaatggagataaagagaaacaaaatccgccaatataacgcaatccaattcttcttttaatctcggcgcaccataagaaggagctatntatatttccnagacggagggaggctaaggggaatgagtgagtgaaagaaaaggggtacgataaaagaactttggcta

SEQ ID NO: 129695 - DNA, 482 bp, Zea mays
  Clone ID: MRT4577_49754C.1
aattcggcacgaggtttggactaaagtgtaaaaaactactatgtttgaacatatatagtcatttggttcacaaatatgtgaatttgcaagttaaaccctaagttttgggcttatttgcaagaatcacctcttaagcactatagagtctaagtctgaaatcagtgtgttttcttcaactttgagcccttgtatcttatcattttaataagaatttgtcctaggttaccacaccaaacttgcagaccaaacaaaggataacaactttgcttaaggttgtgagcatagttgttaaggaatatttggagataatcccacttaaaatcagactgtcaggctgactgatgactgaaactggtctgacagtggggtgggtcaatctttgaacccgggtttaaataagatccagtgcaagtttgggtatgattgccataggaaaggtgggggtgggacatggggctatgactttggggtaaggaggttgg

SEQ ID NO: 129696 - DNA, 152 bp, Zea mays
  unsure (1)..(152): unsure at all n locations
  Clone ID: MRT4577_49755C.1
ccagcagcaaaaccagaaacagtcctaataagcaccatttattagggcagtncancnanacccaccaaaacgatagagcgccgggttgcagtatcaagaaagaaccacaccatgtgaaagcctataaagctgattaagacagagaccccaaa

SEQ ID NO: 129697 - DNA, 499 bp, Zea mays
  Clone ID: MRT4577_49756C.1
gggaaccaccaaccccgcccggaccaagattaaccctttgggcttggggaaacattacgggggccaacagggttacttgggccccccggccccaacggttaattccttcaagtccccgcggagttgccctaaccccccccaccggtggcacccgcctaaccccccccaccaccaccctaacccccggccgcaccgtaagccgcggcacccgcgtaagccccacccgcattaaggggccccgcaaccgcgtaagccgcggcttcaagggcaccaacggacccaccggcggcggcttcaagggcggcgggggaattggccttttttaccgggaattttggggcctccaacttcttggcggttatgcccttgaagggggtccccattgccttcttccgggaaaaagggaccaaacccaaacccggggaccctttggttttcccaacgaagaagaacttggacttcaagaccctcccctaagggcctaaaggcttttggaagg

SEQ ID NO: 129698 - DNA, 716 bp, Zea mays
  Clone ID: MRT4577_49757C.1
gacgcctgcagtttccggtccggaattcccgggtcgacccacgcgtccggaaacattgtacaaatcaatgttttgaaaataatgatctcagactttctaagttaaattttaaacaatttgattgtttgccatattgggtggggttactcttagaatcgcatgctgtagaaatgctctaaagtgcatataggactcagtccttagatgttctttttattttaagaaataacctcttcaagttgtaaccgtggcggctttgtccattactgttgctattctgcacacatatcggaagcagcaagcgctttacacacttgagtagtgggataagtcactgttttctttactttacaaaacaaaacagtcctgttgggaatgattgctgttggattctggaagggaggggaaagctgctctgctgcctctttgccacttcctggaagccttcctccctggaagaacagccttttgcatctgaggcgaccatttttacaccatgcagatcttcgtggttatcatctcaaagccatgttcagcagcagcgtttggacagcagtgttctgtgggccctcccctcccccatatcctgcaccccctcatagcagtagtggcttcgccattctgttttctgcagtgtcctgtacaaaactgtgctgtgactgtgcgggaggcctggacatggcaaagagatacagcgaagccccttctcttcctac

SEQ ID NO: 129699 - DNA, 208 bp, Zea mays
  unsure (1)..(208): unsure at all n locations
  Clone ID: MRT4577_49758C.1
ccgtccgcnntccttttgacnaagnaaaatcattnntgtgtcttacaatnncaaaaaatacaaatcaagaaaatctcaactggcgtgtgtggnnngagccagaaagaaagggcggatgaaagttcaaaaaagggtngnntcgaagggtgcaacnnncaagtttctttccttaagcannagctgaaggggaacctccaatnnntttttg

SEQ ID NO: 129700 - DNA, 354 bp, Zea mays
  Clone ID: MRT4577_49759C.1
atattgatggttggtcgagcttttttgtcggcggccgacccttttctgttgttgttgttgggtgagcgagctgagtgaagtgtccactgcagtgagtgcatcgttatgcacactgcatggttgctaagtggcgcgtatggcgcgtgaacacgacgacgacaagaggctaattagaagttcttggatgcctggcacctgacacttatattgcagtcaggacggagaacgtgccatggggggggcttgcgggtgcaaggacacatgaacgcgaggcgtcgggactcagacggtgggcgctagcactgctgtcacacttgaccgcacgtgctgttgatgttgctacaattggcacgg

SEQ ID NO: 129701 - DNA, 372 bp, Zea mays
  Clone ID: MRT4577_4975C.1
gggcccggataatctggtctggtcccggcaggcgtacaagcgttccttatggggagccgtttaaaaggtggggggggggggggggatatttgtttcctgagggaaatggctttccgctcacaatcccgcacaccaaaccacccggaaacaaaaagggaaaagccgggggggccaaaggagggagcaaaaaaaaaaaaaagggggggaacaaaagggagggttccaaggcggaaaaacgggggggccacccggaaaaaggaaccgccaaaaaaaaggggaaagggggtaaggaaaaaaggcgcccgggcggtttttttttcccccactgaaatgggaaaaaggggaaggcccctaaccgccgggcccagaaaa

SEQ ID NO: 129702 - DNA, 1167 bp, Zea mays
  Clone ID: MRT4577_49760C.1
tagatgtagggatcaaatttagaggacgttgtggagacgaagaaaatatagatgatgaaatctttagagggtgatgtaaagtacagagaatattcctttagaggatgaaatttagaggacgttgctgaagacagtctaacaagtttgatccaaggtaccttcttttcaaccacttgcaggatcgtctatggacccatagatgtagctgcagctgaccagcagacgtgcgtgtggggtcagccgcgacctcccgacacacacccgtcagcagccaaacgtaacttgcaaaggaaagctcttcgttcacatgcactgcggcattcaagaccttcctacctccagcgtcttctgctacctgcagccgtgactccaaggctggctattcaccaccacctcagtgaaattcaattttatcattaaaaaactggcgaaccccattgcactatagaccatgcaacagtggcacacggaacgacaaaggccaggatatctaatcaccataagctcaatgtgacagtcacaattcaaacacagtgctaataaatgcataaaccaccaagtaattcgaccctgaagtcccagcaccaaggaaaattccctgtgaatctcctaactaataactcaatttgtaattgagtgttattggttggcgtcatcatttgcatcgtcatcagagtctgagtcacttgcattgtatcctggacgtttcatgccaaccttcaaagcggaagacctgaaccttgatgctctatccatccattgttttcccttgtactcgttcttgggggtcccataacccgagaagaacatctgcgctacaagcacctggttggcgatgtctcctttgcgcgcctccttgtacgcgtcctggaaccagcgctggacgcagtcgccgaccacctctgacagcggcttccgctcggactccgacccaccgactccattggctccctccatcgcttcgtccctgcctatgtacggttcgttgctggctgcggcagctgcggcggcaagggcttggggcttcctcccttcaggagtgccgcagccggcagccgacgacgggttggggaaaaaagaaaggatagggagaagcaacgaagcgcgagacgaaataccccggccggcctcgaggtaccaatgcgtgagcgtacgcgtgggtcgccc

SEQ ID NO: 129703 - DNA, 235 bp, Zea mays
  Clone ID: MRT4577_49761C.1
gtgaagactctacgatcctcaagtcacatggtggaatcagtggaatatctaggaaaatcaaggcatcattggatgatggcatcaaggaaactgaaatagcaaccagacagaagctgtatggcagcaacaagcacaccgagaaacctcctagaagcttctggacgtttgtctgggacgcgttgcatgacctgacgttgattattctaatcgtttgtgccgttgtttctctaatggg

SEQ ID NO: 129704 - DNA, 210 bp, Zea mays
  Clone ID: MRT4577_49762C.1
agcaataccacgtatgatgcaagcgcgcgccgggcgccgagggcttatatcacctcgacatactatagtgcatgagataattttagctttacaaccatgatagttggtcgatatgtctctgggactgagacacaacggtgggcctcatggttcagtctcagcgtaaccactatctttcttttataaggccctgaagatgttctgcaaact

SEQ ID NO: 129705 - DNA, 662 bp, Zea mays
  unsure (1)..(662): unsure at all n locations
  Clone ID: MRT4577_49763C.1
gccnggccggttgccgggaaaagagaataaggaacatccccacctgttttctgtttctcttcttcactacacctggcgtgcgcgtgcgcgatcattagggcggccgccgccgcccaggtcttcgtcgggccctttgcccgccacaagaacccagcacaccagcccgattaggttgttctttacggttacggagcaagatccatttggccatggtgctgccgcagttcgcttttcagaagttttgggtcttcaattgaacccttgagtttaagtccgagcagccacacaaccatggctgtggctgccggcgtgtcggaaccaccaattgtggagcaagtgatcactgaattctttgccaagagcctccacatcatcctggagtcgcgctcaccctacgactcatcgcggaacttcatacgaccctccccaccgtcgtcaccactggctggcagccagccgcgtgaccggtggttcaatcttgctctccgggactgccctgccgcacttgagaattttgacctatggagacagagcaaccttgagcctctggtcattgacattgtcctccttcaacgtgacaataccaaaaccaccagtgtcggggccagcaggatcattgtagagtggataataaagtatgaaactagcagatctgggaatat

SEQ ID NO: 129706 - DNA, 169 bp, Zea mays
  Clone ID: MRT4577_49764C.1
cgtcgacagcacataaagtttatccttagcaacaattagcacatggcgaccaggatatttcctcttatctcttgtcttctgcatgtgtgctaacgctacaattttcttaagctcacaagctctaagcttcttttttcccatacctttcatcaatgatagcttcagtatg

SEQ ID NO: 129707 - DNA, 442 bp, Zea mays
  unsure (1)..(442): unsure at all n locations
  Clone ID: MRT4577_49765C.1
gccggnggnnaatctctggcgatgggcgccgcctagccgcnntgcggttgccgccgtcctaccaccgcgagcccgcaccttgctcnnctccgccgcggcggcgggggtctncctcccattctccttcgggtccccgccacnngcttcctttctcctcgcggggtgggcggcctgcacgcccgcgcgcctgctgtttggggggcggcgcgggttctctctctgccccgtgcccgaagagcctgtccgncgncttctgctgccacgtncctgtacggtccctattcaccggcattgtngaggaggtcggccgtgtgcgccgtctcggtccgccggtcacgccgtctgggggcggcggtggcggtgaggctnctggccttgacttggaggtggagaccaagaacctncttggtggaacgcagttnggtgacagggtggtggtcga

SEQ ID NO: 129708 - DNA, 499 bp, Zea mays
  Clone ID: MRT4577_49766C.1
cagaaaatccagaggttgtcttggcagaatgcacaaaaaattttggcccttggctggtcacacatgctatggaacttctgacagctgataatgactatgcggatattatgttgcatgaagagcgacctaacttaggcggtataagcatagaggaacttcaccgattagtctatgctcaagttttatgttgtcatcctttaacttggcaggttagttatgtaacatagtaaccctagtacatcaccaactaattttatgtatttttattaggcattagccacacacttcttgaactagcaaatgcacaaattgcatgttgcattatttaattgggttatttccagtggcggagctggtgaatttccaagcctagggccagtagttaaggatctaaatatttgagacctgatccgcatatcaatttcttcacaaaggcgaacaataaaatacatagatctaaatatttgagacctgatccgcatatcaatttcttcacaaa

SEQ ID NO: 129709 - DNA, 172 bp, Zea mays
  Clone ID: MRT4577_49767C.1
cggagggagtattaaatttatctaataaatgtaggtgttattaaaggatgatagcttctgactctcgtaggcctcaaatgttgaatagaagcgaacaacaattactattattttttaattatgctaatgaggactagaactcgagacatctacctttgaatcaaaaagttgc

SEQ ID NO: 129710 - DNA, 336 bp, Zea mays
  Clone ID: MRT4577_49768C.1
ggtgaccctcgaaggccggccggggacacacccactcgaccacgtaccaagaagaggaagccgcgagaccgagccaccggacgccagagcccaaaaggaaacgaccgggcgcagagccccacgagcgggaaagaaaaagaccgatgactacatacgatggagcaccgaacaaacccaccgacaacaggacaccggcgagaaacatatagatcagaaaagaccggagctggacaagaaaacccaagcacaggacctgagaaggaacggtggcaagcaaaacacaccaagaatcaggccacagctagcacagccgaaccaaaaggggccaggaaccca

SEQ ID NO: 129711 - DNA, 812 bp, Zea mays
  unsure (1)..(812): unsure at all n locations
  Clone ID: MRT4577_49769C.1
tcggccgggctctcgcgccgccacttccctcccgacccactatcccaaaaccgtagcgccctcgcctgctcgccgccgccgtcgttgcgagctccccatcttcctccgtcaaccatggcgacccagatcagcaagaagggccgcaggatcagggagctcacgtctgtcgtccagaagaggttcaacttccccgagaacggcgtcgagctctacgccgagaaggtcgtcaaccgcggcctctgcgccatcgcgcaggctgagtccctccgctacaagctcctcggaggccttgccgtccggagggcctgctatggtgttcttcgctttgttatggagagtggtgccaagggttgtgaggtcattgtgagtggaaagctcagggctcaaagagccaagtccatgaagttcaaggatggctacatgatctcatctggtcagccagtgaatgagtacatcgactcagctgtgagacacgtcctcctcagacagggtgttctgggtatcaaggtgaagatcatgcttgactgggacccgaagggcaaggttggcccgatcacccctcttccggacctggtgaccatccataccccgaaggaggaggacgagctgcgccctcctgtcttggcagctgaggtctaaggtcccaacagcgtcctcgaaatggcagtttgatctggtcctagctaggtttgtatcttatgataagggcagtgctaagacagttcgttccgtgtcacttctgtttaaaattaagttttgccgagacaagctatatgtaccggatgaaagtgtggntccttattgtatgctct

SEQ ID NO: 129712 - DNA, 260 bp, Zea mays
  Clone ID: MRT4577_4976C.1
ctcctcgcattttccttgcaaccgattgcctatccccctcccaaccaaagaccgatggcgcccaaggccgagaagaagcccgcggcgaaaaccggggagagacccgcggcgaaagacaccgcggaagaaccaagcgagagcggtccgtgcagtcgcgcaggagcggagcaactgcagagagcagaacggaactcagacactttaggctacaggcccgcatgattctcagcagcaatacctataccattcaactgcgagcc

SEQ ID NO: 129713 - DNA, 246 bp, Zea mays
  Clone ID: MRT4577_49770C.1
ttgggtacctcgaggccggccggggaacttgcagactccctcctcgacggcgtcggcgtgttcctcggccgcggcgtcacctgccagcttatcagctccaccggcggcgaccctaacaacggcaaccgcggtaagttggtggcggaggccagcctggagcacggtctgctgaacccggcggcgcttctgtccagcgcagaaccaggcctcgtcaccttccactgggagcgggagaagcaggggatc

SEQ ID NO: 129714 - DNA, 841 bp, Zea mays
  unsure (1)..(841): unsure at all n locations
  Clone ID: MRT4577_49771C.1
ttgggtacctcgaggccggccgggctctcgaatcatacatgcnctccgaccactagcctaacccgtagcgccccgccgccgccgttgcgagctccccatcttcctccgtcaaccatggcgacccagatcagcaagaagaagaagttcgtcagcgacggcgtgttctacgccgagctcaatgagatgctgacgcgggagctcgcggaggacggctactccggcgtggaggtgcgtgtcacaccgatgcgcacggagatcatcatccgcgcaacgcgcacgcagaacgtgctcggcgagaagggccgcaggatcagggagctcacgtctgtcgtccagaagaggttcaacttccccgagaacagcgtcgagctctacgccgagaaggtcgtcaaccgcggcctctgcgccatcgcgcaggctgagtccctccgctacaagctcctcggaggccttgccgtccggagggcctgctatggtgttcttcgctttgttatggagagtggtgccaagggttgtgagggctcaaagagccaagtccatgaagttcaaggatggctacatgatctcatctggtcagccagtgaatgagtacatcgactcagctgtgagacacgtcctcctcagacagggtgttctgggtatcaaggtgaagatcatgcttgactgggacccgaagggcaaggttggcccgatcacccctcttccggacctggtgaccatccataccccgaaaggagaggacgagctgcgccctcctgtcttggcagctgaggtctaaggtcccaacagcgtcctcgaaatggcaggttgatctggtcctagctaggttgtatcttatgat

SEQ ID NO: 129715 - DNA, 798 bp, Zea mays
  Clone ID: MRT4577_49772C.1
attagtagttgctactgatatatataggtcagctctttgctcttttcacatctatatcaattgcttgccccacaaatgatcagccagggtcaggtaaaccatattgtgtaaccatcactataacactgcaatcattttctaaatagtacttttataaatcacaaatcgaaggtataaatacaaaagtgtagaaaattataatgagaacattacctatataaacaagaaaggaaaaccaatgatgttttccttgttgaagttatttgtggcttttacaatgtcagagaacgtgagcttgttttcatttacttttccttgtggcaccatgatcactccaaatgcaattgcaagaatggccttcttatttcttcctcctgtggataccagaggcacatcggctgaatcgcatcgacgaccgatcataaagccgcacagctttggattccctagaaagctggagttctgaaatgtaccaaattgaccaccggttggaataggcccctctaggtcattgttagaaacgttgaatgtggaaaggaagtgcagattctcgaatgcaactggaattttacccgtgagatcattgctggataaatctagcatccagcaggtttgtgagattgcagatagatgtggggatcggtccggttaagctgttggagctgatatcaagtgaaaggaggccttttaactgaccaatctctgggagaatcagaactgtgaatatgttgctgcttagatttagaattttaggaaaagcatcggtatccggtacggttttcttcaagaaattgatgc

SEQ ID NO: 129716 - DNA, 1037 bp, Zea mays
  Clone ID: MRT4577_49773C.1
cgagtgtgaagctcttaggaagatccgccaccgcaacttgatcagcgtcataacctgctgctctagcactgactcggagcagaataatttcaaagccatcgtgttcgagttcatgccgaaccagagccttgacaagtggctacatgaccttgatcctgattcagatgcgtccggacgtgtaccaggcctgacgctactgcagagattgaacattgctgtcaatgtcgccgacgctatggactatttgcataacaactgcgagcccccaatagtccactgcgacctgaagccgggcaacgttcttcttaacgcggactttgttgcctgtgttggagacttcggcattgcaaagattctttcagattcagatggtgatcctgtgaccaattcgagtaccttcaccggaataagaggaacagttggatatgtgcctccagaatacggggagtgccgccaggtctcctcgtgcggagatgtcttcagctttggagtcacgctccttgagatgttcacagggaaggcccccaccgacgccatgtttgaggacggattgaccttacagggcttcgtggagatagcgtttccagagaagctgatggacatcgttgatccagtactgctgtccactgatgagaggttcgcaagaaagccgcgacacagaagcgttggaggggaagagattgagaacgccatagcttctgtcactaagctcgcgctgtcctgcaccaagctaacaccatcagagagaaagcccatgggtgatgccgcagccgagatgcgcaagataagggactgctatctcgcagacctaacaagggcaaacaattaagtgatcatatatgtaactgataggggacaagttttgcactctatttatgtattttagacatacagtatgctgctgaactggcttggtgccctgcccccagcattgccgagactattttgttttcattagaactttggtttcattgcagctatgtatttgtgtctttattgaaatgaagaaaatgcatggaactgcggtctggaggcgt

SEQ ID NO: 129717 - DNA, 1149 bp, Zea mays
  Clone ID: MRT4577_49774C.1
ggaccctcgaggccggccgggctctcgcgccgccacttccctcccgacccactagcccaaaaccgtagcgccccgccgccgccgttgcgagctccccatcttcctccgtcaaccatggcgacccagatcagcaagaagaagaagttcgtcagcgacggcgtgttctacgccgagctcaatgagatgctgacgcgggagctcgcggaggacggctactccggcgtggaggtgcgtgtcacaccgatgcgcacggagatcatcatccgcgcaacgcgcacgcagaacgtgctcggcgagaagggccgcaggatcagggagctcacgtctgtcgtccagaagaggttcaacttccccgagaacggcgtcgagctctacgccgagaaggtcgtcaaccgcggcctctgcgccatcgcgcaggctgagtccctccgctacaagctcctcggaggccttgccgtccggagggcctgctatggtgttcttcgctttgttatggagagtggtgccaagggttgtgaggtcattgtgagtggaaagctcagggctcaaagagccaagtccatgaagttcaaggatggctacatgatctcatctggtcagccagtgaatgagtacatcgactcagctgtgagacacgtcctcctcagacagggtgttctgggtatcaaggtgaagatcatgcttgactgggacccgaagggcaaggttggcccgatcacccctcttccggacctggtgaccatccataccccgaaggaggaggacgagctgcgccctcctgtcttggcagctgaggtctaaggtcccaacagcgtcctcgaaatggcagtttgatctggtcctagctaggtttgtatcttatgataagggcagtgctaagacagttcgttccgtgtcacttctgtttaaaattaagttttgccgagacaagctatatgtaccggatgaaagtgtggttccttattgtatgctctggaattttatttttggtatgtttattttttgccttagttcaacatgcctcctgcttggacaaagtcaaattaaaaaacatgcttggacagacagcgtcatgtggattgagccgtttgtattttctgtcgatttggaccaaaatgtaaatataaataaagtacatagcgtagcctc

SEQ ID NO: 129718 - DNA, 417 bp, Zea mays
  Clone ID: MRT4577_49775C.1
ctcgcgccgccacttccctcccgacccactatcccaaaaccgtagcgccctcgcctgctcgccgccgccgtcgttgcgggctccccatcttcctccgtcaaccatggcgacccagatcagcaagaagaagaagttcgtcagcgacggcgtgttctacgccgagctcaatgagatgctgacgcgggagctcgcggaggacggctactccggcgtggaggtgcgcgtcacaccgatgcgcacggggatcatcatccgggccacgcgcacgcagaacgtgctcggcgagaagggccgcatgatcagggagctcacgtctgtcgtccagaagaggttcaacttccccgagaacggcgttgagctctacccctagaaggtcggaaaccgcggcccttgcgccatcgtgcaggctgagtccct

SEQ ID NO: 129719 - DNA, 416 bp, Zea mays
  Clone ID: MRT4577_49776C.1
aataatatccttagccaaacgcaattactccgggggtccttttccggggttgacttattacgacccatcctccaaggatgaatgcatcagccatcactcaggagacgaaaaagcgagcaaaagcggagggagcagagctacaacatgatagagccacacaccatcgtggctgctggctgcctgtgacctgaactggctcgctcacatgccactaccgcgcctaagaaccgaggctgcttaagtgctggacataccctactccgaggacgaggacacactgagccgctagaggaagccgaccagcggcttacgctactccgaggggctagccctgcagaccctgtaggaaacctccaacgtcttgtaatgcccgggcagcatctgccccacgctctcaagttggccctgaacaacgc

SEQ ID NO: 129720 - DNA, 1683 bp, Zea mays
  unsure (1)..(1683): unsure at all n locations
  Clone ID: MRT4577_49777C.1
tgggtacctcgaggccggccgggccggctctcgcgccgccacttccctcccgacccactcgcccaaaaccgtagcgccctcgcctgctcgccgccgccgtcgttgcgagctccccatcttcctccgttaaccatggcgacccagatcagcaagaagaagaaggtacgcgagctcctcctaaacttcgtcagcgacggcgtgttctacgccgagctcaatgagatgctgacgcgggagctcgcggaggacggctactccggcgtggaggtgcgtgtcacaccgatgcgcacggagatcatcatccgcgcaacgcgcacgcagaacgtgctcggcgagaagggccgcaggatcagggagctcacgtctgtggtccagaagaggttcaacttccccgagaacggcgtcgagctctacgccgagaaggtcgtcaaccgcggcctctgcgccatcgcgcaggctgagtccctccgctacaagctcctcggaggccttgccgtccggagggcctgctatggtgttcttcgctttgttatggagagtggtgccaagggttgtgaggtcattgtgagtggaaagctcagggctcaaagagccaagtccatgaagttcaaggatggctacatgatctcatctggtcagccagtgaatgagtacatcgactcagctgtgagacacgtcctcctcagacagggtgttctgggtatcaaggtgaagatcatgcttgactgggacccgaagggcaaggttggcccgatcacccctcttccggacctggtgaccatccataccccgaaggaggaggacgagctgcgccctcctgtcttggcagctgaggtctaaggtcccaacagcgtcctcgaaatggcagtttgatctggtcctagctaggtttgtatcttatgataagggcagtgctaagacagttcgttccgtgtcacttctgtttaaaattaagttttgccgagacaagctatatgtaccggatgaaagtgtggttccttattgtatgctctggaattttatttttggtatgtttatttttaaaaaaaaaaaaaaaaaaaaaaagcatcacaccacacgccagccagccatcgtcacactggtgagctctgcactctgcttagctccgagcttcagtgccttcgttgtttggtccacgcagtccacacacacacaccagtacgtccagctgcactgcaccaatggccgccgtcgaggtccaggtcccgactgccgctcccgtcgaggaggttgcccagctggccgccgcctccgccgtcgagatcccgaacgaggagaccgctgctccggcggtggagaccgaggtcgtcgtcgctaaggagccggtgccggccgaggccgagactgagtccaaggaggtcgaggtcgaggctgaggccgaggccgaggccgtagctgaggctgagccgaccgaggcagagcccgaggccgccttgccggcagcagagacggaggccaaggaagcagagccagaggccgccttgccggcagcagagacggaggctgctgctgccccggtcgaggctgctgagccggagatagccgccgagaccaaagaggtggcggctgtggaggctaacgaggagggagaggaggcancgcctgctgttgctgccactcctgaggtcgcagcgaccgaggaaggaagcggcggcccctgct

SEQ ID NO: 129721 - DNA, 327 bp, Zea mays
  unsure (1)..(327): unsure at all n locations
  Clone ID: MRT4577_49778C.1
ataaaattctattggattgggtatttttctcttttatattagagaaacaaaatacaagctcaatcgcaggaaaacaaaaactggtgtataacccaatntgntgcctgcaaaaaactactttnngttacaattactatattaaacaatatttattgcacaccatccatcacaattaacttggtttggccccctgaancttaaatgaacaacatttttttaactgagagaaaatttgttcatcagggttaactccagcttgagtttctctttgaacaaaatctttttaaatttaacttccttgtacccgcccaagaactaaaccttttt

SEQ ID NO: 129722 - DNA, 426 bp, Zea mays
  Clone ID: MRT4577_49779C.1
gggcgaccgtcgttggggtgcatcccaggtagagcgttcatagtggacctgttttacaacctgcattactggaagagaacagagaccgactgggggtccgaacgagacgcctcttccgaccgattgatggccaccccacttgagaatcataacccaaactacaagatgtacctcagctacctgaacacaggcaacaactttgcaacaccataacacaatcctgtgctgttacagacccaactgatccatatgacgactatacttgtatttattagacacgcagctatatatacaccagacttgagcttggagtgtgcactagcaagcaactgacatcaatgcatgatacagatatacatgcatccgtttgcatgatcatggcttggtttcagtcactatgttacacccaccactcatgtacaaaga

SEQ ID NO: 129723 - DNA, 429 bp, Zea mays
  Clone ID: MRT4577_4977C.1
cgggccccgggggcccccccggaaattccggcccggccccggggggggacccatttttccttaaaggggggcaaataaaagctgggggaaaaaagggcaaaaggtgttcccgggggaaaaatgttttccgttaaaaattccaaaaaaaaaaaaagccgaaaaaaaaaagggaaaacccgggggggccaaaagaggaacctaactcaaataaatggggggggcctaactgcccgttttaaagggggaaaacctgccggcccacttgcttaaaaaaatcgcccaacccccggggaaaggcggtttggtaattggcccccagggggtttttttttttaaccagggaaacggcaaaaactggattgccctcaaccccctggccctgaaaaagttaaaaaaaggggcccacgcttttttgcccaaaaaggaaaa

SEQ ID NO: 129724 - DNA, 291 bp, Zea mays
  Clone ID: MRT4577_49780C.1
aaccagggggaaggaacgcctccgggtcggaaagaaccaaacaaacttctcgttcacaattgcccacaaaccaaaaaggcagagctggtaacgacaacatttacagccagatgggcgggccctaatggacggggaccaatgagctgatctcatttaggcagacgcaaacccaaacccaggcccaggcgcgggatgcttttcgatcagggccaggagcccgtccttttgggcacccaaaatggccgcgaccgattaggcgttcttgaccaaatggaaggacccaaacccctt

SEQ ID NO: 129725 - DNA, 377 bp, Zea mays
  Clone ID: MRT4577_49781C.1
ggaattggaaactgaacacatgccttcccctttttggcgataaatcagggaggggcgttttttttcccgaacttttaatacttaaaacacaacactttgctttggacaaatccttggttacggaaaaacaccttggggggtggggcattctttgggaaggggggatgtctcgaccgaacaaaattggggttaaaaaggaaggcattttcgggctacccccggggacttgggtccgggttggaaaagaggatgcttggaaaaactttagggtataagaaaaccaatttggttatgttaacggggggccttaagcccagcaacaagggttggttacgaagttaacagcattatggggggccaaaagcatgtactgggct

SEQ ID NO: 129726 - DNA, 738 bp, Zea mays
  Clone ID: MRT4577_49782C.1
ccggccgggccgggagatctcgccgcccacccgcaccggcaggcaggctccatcggcttctccgcacccgtgagaactctttggccagtgaaggtcgcgtccgatgaactcgagaagggacttccgtagccatagagctgctttatttgatggcattgaagaaggtggggtgagagctccagcttattcttctcgtgaaattcatgagcacgagaatgatcaagctctggacagtttgcatgatagggtcagcgttctcaaaagattgactggcgatatacatgaagaagtggagaaccataaccggatgctggacagaatgggtaatgacatggatgcttcgagaggatttctttcagggacggtggacaagttcaagatggttttcgagacgaaatcgagtaacaacgcagagtacgcgggggcatccttcattgctgtcttcttgctcatatactaccttacaaagtagcagcacggctgtctggctataaggttcgcagtcgcagcccctgtggtgtcgctgcgtgtgatgatgtatattgtgtggtcctaccttcgcacttgatgaccggaacgttggttctctcataagaaacggagcattggtggatttgggagttgtcagatactcagatgatgtttttttcagatacacgcaaaagatatgtaactgtgaaccgcaaaagatatgcgatgactttattaaaaaaaaaaaaaaaaaaggcccctagggcc

SEQ ID NO: 129727 - DNA, 404 bp, Zea mays
  unsure (1)..(404): unsure at all n locations
  Clone ID: MRT4577_49783C.1
gttgtgcgcacctggtcgttctcggtttcctccccagccggtcctctcgggctccgttttccttccgggccgctcttggcgccttgctctccggcctcttccttgccggccacgcccttcctgcgcattgcttctctgatccccgccgggccgcttcgcgttcccttgattgactccactcgccgacttgtatgcgtccgtctcggcggcggcggttggtgctgtgagcgactcgcggcgggacgagggattccgtcgcgctcaggcgccctcaggagccgacggcatattgtgcatggaggggtgtgagggcgnttccggctncgtggtgcaacgcccgccgccaccgcaacatgagatacaggtggtgcgcctgcccaagggcgacaaacttttgccggagc

SEQ ID NO: 129728 - DNA, 887 bp, Zea mays
  Clone ID: MRT4577_49784C.1
ttgggtacctcgaggccggccgggacgtggatttgggcctgtgactccaccccatttgcgtggtcttgctccagaaggacggaggaggcgcatcaagctttcatcagatctcgccgcccacccgcaccggcaggcaggctccgtcggcttctccgcacccgtgagaactcttcggccagtgaaggtcgcgtccgatgaactcgagaagggacttccgtagccatagagctgctttatttgatggcattgaagaaggtggggtgagagctccagcttattcttctcgtgaaattcatgagcatgagaatgatcaagctctggacagtttgcatgatagggtcagcgttctcaaaagactgactggcgatatacatgaagaagtggagaaccataaccggatgctggacagaatgggtaatgacatggatgcttcgagaggatttctttcagggacggtggacaagttcaagatggttttcgagacgaaatcgagccggaggatggcgaccatggtggcatccttcattgctgtcttcttgctcatatactaccttacaaagtagcagcacggctgtctggctataaggttcgcagtcgcagcccctgtggtgtcgctgcgtgtgatgatgtatattgtgtggtcctaccttcgcacttgatgaccggaacgttggttctctcataagaaacggagcattggtggatttgggagttgtcagatactcagatgatgtttttttcagatacaatacgtgggtgtacatcgctggagccgcctggggggctggtaaatgatatgtaactgtgaaccgcaaaagatatgcgatgactttattaccaaaaaaaaaaaaaaaaaaggcccctatgatctaattccttttgttttg

SEQ ID NO: 129729 - DNA, 843 bp, Zea mays
  Clone ID: MRT4577_49785C.1
ccgttgaaaaggaaagctttgcatcaggaattttgaattttgccatccatgtaaaatgtcgtctttgcagcgtacatgtacgacggcacgtcggacgtgatgcaggccggcgggacggtgaaggcggcggacgcgttcgacgtgggcgcggggcacgtggacccgctgcgcgcgctggacccggggctggtgtacaacgcgggcgcgcgcgaccacgtggtgttcctctgcagcctgggctacacggaggccgcgatccggaacatggtgctcccccagccggcgctggacacgagctgcccccgcggcggcggcggcggcggcggcccggaggaggcggacctgaactacccggccatcgtgctcccggacctgggcggcagggtgacggtgaagcggacggtgacgaacgtgggcgcgaaccgggacgccgtgtaccgcgccgccgtggccagcccgcagggcgcgcgcgccgaggtgtggccgcgggagctgggcttctccgcgcgccccggcggcgagcaggcctcgtactacgtgaccgtcacccccgcgaagctgtcccgcggccgcttcgacttcggcgaggtggtctggtcggacggcttccaccgcgtccgcacgccgctcgtcgtcagggtgaccaacctgccggacgacggcgtcgaggtggtccagaccgcctacgccacgggcgacggttcccaggccgccgcgtagcctccctagctgcctccggttctgagtgagcctgtcactgtcagatttctgatattttcgcgcgtaggatagctgtgtcagactacgcctcttttggaccggccgcctcgagcgccgcacagg

SEQ ID NO: 129730 - DNA, 1381 bp, Zea mays
  Clone ID: MRT4577_49786C.1
acgcgccggccgatgcaagcctcctcctcttgtgcgcccccccatccctcaactcgcgcgcgcacggccgcatccgcggcacgccgcgccgcatcccgtgcccgcgcaaaaccggatccgccgccgccatggcggtggaccgcgtggacggcgaggaggcgttcgaggaggtggacccgacggggcggttcgggcggtacgcggacgtgctggggctcgggtccgtcaagaaggtgtaccgcgggttcgaccaggaggaggggatcgaggtggcgtggaaccgtgtccggctgcggtcgctggccgaccgcgaccccggcatggtggagcgcctccacgccgaggtgcgcctcctccgctcgctcagccacgaccacatcatcggcttccacaaggtgtggctggaccgcgacgccggcgtcctcaacttcatcaccgaggtctgcacctccgggagcctccgcgagtaccgccaccgacaccgccacgtctccgtcaaggcgctcaagaagtgggcgcgccagatcctcgaggggctcaaccacctccacacccacgacccctgcatcatccaccgcgacctcaactgcagcaacgtcttcatcaatggcaacaacggccaggtcaagatcggcgacctcgggctggcggcgatcgtggacaagacgcacgtggcgcacaccatcctgggcacgccggagttcatggcgccggagctgtacacggagacgtacacggagtcggtggacatctactcgtacggcatgtgcgtgctggagatggtcacgcgggaggtgccctacgccgagtgcggcagcgtcgtgcagatcttccacaacgtcacccggggcgtcccgcccgcggcgctcaagcggctcaaggacgccgagctgcggggcttcatcgagcgctgcatcggccagccccggaaccggccctcggccgccgatctcctgcaggaccccttcttcaacggcgtccgtggcggggacgacgacgacgacgccacggcgctcgccgacgcctccagcgttgtcgccgccacgcccgtgccgcgccccaggagctacgtcgacgacctcgccgggctccggctggactgacctgaccgtccctcccagcgttctgcctttcatcagtaccgggattccggcgcgtgttagacgtgttttagaagtggattcctggccggcgagcgactgcctgcaagtgtgtatagattattgtttatttttacgtctccccggcgattggctagttttcactgtacctgtaccaataattgttgttggctttgcgccagatgaagcgctgtatttgactttgcgtgctgattctttcaaacagaggttggttggcaaaaaaaaaaaaaaaagcggcc

SEQ ID NO: 129731 - DNA, 207 bp, Zea mays
  Clone ID: MRT4577_49787C.1
ccctttatatttaccaccctatatgaattccgaaagggggggatttaggggcaaaagggggcaaaaaccgagccggcacagaacccaagaaccagggaacaagccgccccccaaaacgagagggcgaccgaccaaacaggcacagaggggggagaaacgacccaagaccaaaggaacagcagagaaccggggcccagggcgaagggc

SEQ ID NO: 129732 - DNA, 524 bp, Zea mays
  Clone ID: MRT4577_49788C.1
tccgtccctatcgtgaccccgccgtcgactcgtccttgtgtcacccgcctcggagagcccggaacctctgaactatctctcgccttcgtccccacaccagcatgaagacgctcgttactcagatccgatcgacgaggccgatatccaatcttgatggctcgcactcgtggatgacggcgacgacgtggtcgcgttacgactcttccccgcgtgtgctactctgcgacagatgtcacatcctaggtcgccgtcgccgtgtggcatgtatgccatagctcgtcttggaagcctgcacttcccccttccttctattccgtgttctcgctatctccctcgtcttctgctgcatgaaatcagtctaccgtactgtcaacctactatgctgcatgtttattttgtgctactatcgacctacctattacgtgattgccatcgtgaccgtgaaacatgcctctagggctcgcggatcgtatctacatctaatggatccccccgtctgcactgattccatatccagcttatcg

SEQ ID NO: 129733 - DNA, 394 bp, Zea mays
  Clone ID: MRT4577_49789C.1
acgcggggaccgtatagcaccgctggggccacccattactctctcgatatggcatcgttcgggctaccagtgcaatgaatccatccggaccataggcgcgcttcagctatgcagatcacaagcgtgcttgccctatagggaaaagcgcgaatgatcccaatgaggagaggcaggggaggttactggaagcgagaggatgaggatcaactgcagtagtacaaagcgcaacaaggcactgatgacgatgagtagcacagcaaggggctgctgagagcagcatcaagggggtgctcacatcaaatgctggcccagacactctagaggaccaaacatcctttgcgaggaactatgctgatcctaacgaagtgcactgacatcattttgggtggtgctg

SEQ ID NO: 129734 - DNA, 268 bp, Zea mays
  Clone ID: MRT4577_4978C.1
tcgcggacgcgtggggctgcggcggcgttccgtaagatggggaagtacatgcgcaagcgcaggggggccgatggcgagggggtggccgcagtcgaggtctcgcaggttgatggtgtgcggacgaggtccaggtccgaggcggcaaccggtggcggtgtcgctaaagtcgctccgcctgagaggaagaaggcactgctggccgctgtgaacgaaactgcttcagaggagcctggtgccgtaggcggtggtggtggggactgctgaagct

SEQ ID NO: 129735 - DNA, 297 bp, Zea mays
  Clone ID: MRT4577_49790C.1
cggaaaaaaggccccgtccaaccacccgggtcaaccaaccacgtgcctcacgtctacaaaccccgcccggggtaccggaacgggccccaagtaggtaccttaaagcggaccccatgcgggtgacccgggggggcccccgctgggggacctttaaaaggcccccccccctggggggccccacaaccaagacccggggggggccccggcccgcccccggggtccaccccggaaattccgagcgggacccggaggggtaccaagatttcctaaaaagagggggataaaagccgggggaaa

SEQ ID NO: 129736 - DNA, 191 bp, Zea mays
  Clone ID: MRT4577_49791C.1
ctccttcacctttatcattcaaaaggtaaaggagctgccccagcatttttttttgagcatcacttaccatcagtcccatactctactctttttcacccatccttccccatctacacctcgactcttatgctgccattccttgatctgaccttccaagctttttaccttattgagatccctattactcccct

SEQ ID NO: 129737 - DNA, 289 bp, Zea mays
  Clone ID: MRT4577_49792C.1
cgcagagccccacaacgccgcccaacgccgggggggcgcacacggggagaccaacgagggcgccaacaacacaagagccgagctaatgacagccgccgacagccgggaaggccccgcatgagccgcgggcggagcagcgacacgcagcacccggagggagacacgaggcgggcaccagggaggcccagcctcgagggcgcccgcggccgaggaaccggcagcaacataaccgccggaggggataccaccgacaagaaacgccgccggtgccggggagcaacaaaaagag

SEQ ID NO: 129738 - DNA, 641 bp, Zea mays
  Clone ID: MRT4577_49793C.1
ggagacaaaacaagatcggggcccttttttttttatttaaagggattcatctttttttttttttacatcatcatagccatagggaaaacccgacgacaaaaggatctagtaataagctagccctaggaaagaaaatcccaaaaaaaaagaagagggggtctagtaataatactattatccaagctggggagatttccccaaaagttatataatctgttatattttcgagccccgagctgattcgggggggaactgaactgaggcctgaaagccaaaccccccccccaagggcggttactgtttggcctgggagtaaataaaggttccaaggatggcaatggcggccccaacccctttgatgggctggacgggcctttggaaaatgatgatggaccccacaataacggaaatgcccccccccccaccaaacaaagttgggaccgatctcggggactgttgtttgccagccccccccccacaccttgggcccctccatggcaatggcaaagggcaggaggatcaccaccgacttgatggagaggcaggcgtagtatttaatcccgctcacggacttgcccttaatcccctttttggaaaaaatggtccggacgacaaatgccaggttcaagatcattgccccc

SEQ ID NO: 129739 - DNA, 281 bp, Zea mays
  Clone ID: MRT4577_49794C.1
ggggggcaaaaaccactttccatttttaaaaagaagggaaacaaccttttcataaatcaggccgaccgggtccataccaaattcccccagaccggcctttttacacttaagaacaccggacacgtacccagggctgtcctttcgcacccccttaactgttaaaaataaacccgcccgctggctaaaccaagcacccggccgtacctgcttttgtttatagctaaacccctaaacccggccccgtgtttcttaatttcttacccaccccccgatcgggaagg

SEQ ID NO: 129740 - DNA, 677 bp, Zea mays
  Clone ID: MRT4577_49795C.1
atttctgttctctactaggcacctcaattgtttgctgctccgcgagtgagataattaaataatgtctcgctataatggtcatgatggaaacacaccattgcatgcagggagaccggaccctcctgcacgatcacgagatctaaaatatctattcgccgatatgcatagaacaactacaacgatggctgaaacgcgcatatcgtttcatcgaattcagtgaccctccggtaggtgatgatgcgcatgacaacctacgatgaccaccaaaacagaagggaccccgattattgaccaactcgatcaagtagatcttcgtggatatggcggctcacacgagcacatggcaagacgacctgcaccacgacatcgcagatgaactcactgagtgatgcacgcccactgggaaagggactgcacagctggtgactgtgagactccagttaccgctgtggtgaatcgcggcatatatagtaatattgcaagaccaggccaactcagccccggccggatagaaacaaatcgccgctgccatcatgacgtggcgaaagtcaccgatggcgcagatacagtagacgccgaagatataggccactgacataatgatctggatctcttcggctggacgccgtgatcctaagaacacgagatctaggagccttaactacagcagaagatca

SEQ ID NO: 129741 - DNA, 658 bp, Zea mays
  Clone ID: MRT4577_49796C.1
gggtacctcgaggccggccgggccggggatgagaccagtcgccctccgccccaggcaaagctgcagctgcaacagcggtgaccacgcacgctgcaccgcaccgacgggtgacacctgctgtgtccaccaaccgtgagccagaaggcgaccgacgacgccagcttagactaggaaccaacaatggcctcgcgccacctgctcctcctcctgctcgccgcgctgctcccggcggcggccacggcggacccggacgcggtgcaggactactgcgtgccggacacgggcggcgggcgcgggcgcgggcgggccgtggatctagcgctgctcccgtcctacccgtgcaggagccccgccaacctgacggcggcggacttcgccttcgcgggcgtgcgcgccgcgggcaacttctccgcggacacggggttcgcgggggtgtcggtgacccccgcgcagttcccggcgctgcacaccctcggcgtgtccttcgcgcgcgccgacctgtccgcggcgggcggggtcaacccgccgcactaccacccgcgcgccaccgagacggcgctggtcctggccggccgcgtctacgcgggattcgtcgactcgggcggccgcgtcttcgccaaggtgctcgagaaaggggaggtcatggtgttcccgcgcg

SEQ ID NO: 129742 - DNA, 663 bp, Zea mays
  unsure (1)..(663): unsure at all n locations
  Clone ID: MRT4577_49797C.1
gccgtccccgagagccgcttcttctttctccgtgactcggagctgtctacctcaccctcactgcctctgcgtgcgtgcgtcactgccggtctgccgtgccgctgcgcccgctcccgcaataaataaactcgcctctctctgttctccgttctcacctccctcctcatccatccagggacgcgccttgacttctcacgtcgtgtcgtgtgtgagcgcagcggtgctgctgatctgcgattcctccacgccacaccctacctgaccacccgacagggaatcctactccctcttgcgcgccgcggcggcggcggcggcggcggcggcatcttcggtctccgtgcgggtgtttccgttcggcgtttactggccgggcgagcgcggcattggaggagtcgggaggagggagaccggaggcgtgatcgatggggaactgcgtggcgagcgggggcgcgacgacggtcacggcggcgggggaggacgggaggcggcgggggaggaggttggaaggcgccgcgggaggagcagctcggctcggtccccggccggatcttctccaacgacgggccgnagccgcaccgncgccgtgttcacgcagcagggccggaagggggtcaatcaggacgccatgctcgtctgggatgggtttcgcggggaggaggacgt

SEQ ID NO: 129743 - DNA, 177 bp, Zea mays
  unsure (1)..(177): unsure at all n locations
  Clone ID: MRT4577_49798C.1
ggtgagacacaggatactgatgggtgggagatcanccatgcgctgcccttgatgatcaaggttgaggcttaagtggatacaggaagcaagttctgggttgcatgcctttagagagcatgatgtcaggctctgtatccctcctttgactagctgatattctaactataagcgtttgtc

SEQ ID NO: 129744 - DNA, 904 bp, Zea mays
  Clone ID: MRT4577_49799C.1
ccggccgggaaaatcttccggatcctactaaccaccaggacctcgaccaagccgccaagatgggtgccctcaagtacgtcgaagagcttcagaagaagaagcagtcggatgtcgttgccttcctcctccgagttcgctgctgggaactccgtcaattgaacgtcatccaccgtgcctctcgtccttcccgtctggacaaggctcgccgtctcggatacaaggccaagcagggctatgtcatctaccgtgtccgcgtccgccgtggtggtcgcaagcgccctgcccccaagggtgccacttacggcaagcccaccaaccagggtatcaaccagctgaagtaccagcgatccctcaaagctaccgccgaggagcgtgtcggccgccgatgcgctaacctccgagtcctcaactcttactggatcaaccaggactctacctacaagtactacgaggtcatcctcgtcgacccccagcacaaggccatccgcatcgacccccgcatcaactggatcgtcaaccccgtccacaagcaccgcgaggctcgtggtcttaccgccaccggcaagaagtcccgtggtctcaacaagggtcacagatacaacaagaccaaggctggccgcagaaagacctggaagcgccacaacaccctgtccctctggcgataccgataagcgtctcgccccctggctgggacgtttgttgttttcgcaccacggctgtctggttgtacatgcgatttcgatttgggagggtctggttttggcactgcatgcttggactctggggagtcgggaaccttgtttggtagcacaaaaaatggaatcaaaagcaattccaatttcatgatcaagattaagaatacctacggtttcccgggaaaaaaaaaaaaaaaaaacccgcggcc

SEQ ID NO: 129745 - DNA, 620 bp, Zea mays
  unsure (1)..(620): unsure at all n locations
  Clone ID: MRT4577_4979C.1
ttgggtacctcgaggccggccgggatttttctctaggagcgcacaggtaagaggagaggaaccctagaccgccgcatccgaggcatggatatcgacctcgtggccggggtgaggaacatcaagatctttggcacagcggcgaacgcagacgatgtctatcgcacgctccttgtctagctctaccgtctcttggccaggaggaccacaatccactactatggtgacattctcaagaggatcttcctgactctaaccaatcatccaccaatcatccagtgcgccgcctatgacaagtacatgaaatgaaaggataacacatgtgctgagagtgccgcaacagcctcacatgacaatatgatgccaagaagatccgaaaatgaatgccactgccctgatgatctccaaaacggataggcgcagaattgactatgctcggagtcgaatgccgcacagttgaccagattgctctccgtgctccactaggagagaacacagaccgcttgacgcttcccactaatgcccgtgaggncgagtgaggcacttctcgaaggctcctgtagtgcccacaaccacaccaaaacatatgtgcggtccaaggcaaggaagtacgagaaggctcg

SEQ ID NO: 129746 - DNA, 478 bp, Zea mays
  Clone ID: MRT4577_497C.1
gtcatgttggtaccatggagcgcggagaatcttctggcatgcatgtgaattcaaagccacggagacctcatgttgatgatgatcttgatgagcattcaaagcgttctagggtagaagatattgaccaatatagtggagaagaatattctgagtgatgaactgtaaatcataattatcttgcaccaacgaattttatcagtacatgtgaagccttaaaaggtttcaagcaataggcacaagtggtttcatggtgcatggtcatgcagtgaaagaaaatgtctgacaacaagaggacattggggcttggccaatttgttgatctctgtagtgataatagaaagcgtcacattgttctaaagaagttgtcttcaaagtcttggatgatgcgtatattgcagttgctccaaaaaaaaaaaaaaaaaaaaaaaaaaaaaaaaaaaaaaaaaaaaaaaaaaaaaaaacaaaaaaaaaacaaaaa

SEQ ID NO: 129747 - DNA, 400 bp, Zea mays
  Clone ID: MRT4577_49801C.1
gacatgtatgcttttatgctcggactgctataaagatgggagcatacggatcgattcgggtcaatatggaatgagctaccgcatgctcagtatctattagcccctgggcaggcaagaggaggagcggagcagataatcaatgcagtgcaactcctcttggtcagcgaattcaaactaagaatagcctactgctccgtatctacatgggtcctataattataggaataggatccataaccaacatgggactaaatggagctatcgtacatatatctatctcatggatttaacggggctacactttctctcttggaggtaacggctgagctatagaatagcgtcttgattatcccgaagagccggggggaatatctatcccaatgccaataattggtaccat

SEQ ID NO: 129748 - DNA, 257 bp, Zea mays
  Clone ID: MRT4577_49802C.1
gggagccccaggtctaaacccgaaatattcatggtgacacgaaaacagaaatggggggtgtccgatccaacaaatccacaggttaagcaggactcttcgggaggccgaacatctataagcggaccttggtaaaaaaccccctgttcttggcggtcttgaacctttcctaaaggggccctttggcccatttgcaggaggggaccttcttgtccagggtagagagtgcttccggcccaccggaggggacatccttgtaa

SEQ ID NO: 129749 - DNA, 335 bp, Zea mays
  Clone ID: MRT4577_49803C.1
gcatggaatatatggggtaatttgggcttttgttggcgaatatgagatccaccacttcggactatagctccggacaccattttgctaaaacagaggaagtctcacgaaacgtgactgaccctatttttatttagcattacagagccccgttaggtccacacaggtttcagatagaactgttaacaccgactctaaactctattgggcttcatttgacgcccgccacccctgatcctaggggggacccaaactaatctgatcttaaccagaaaatggcacacgactggcggaagccctggctttaaactttaccccaccaaaaacgggtctttggg

SEQ ID NO: 129750 - DNA, 628 bp, Zea mays
  Clone ID: MRT4577_49804C.1
gcaaaacaaacacccaaagggggttttttttaccctgccccaagtcaaatagcaccccggactcttttggttttgcataacaaggggtttcacacaaagggaatactcccgcgggcataacaagttcaaacaacccaattgttttttttttgggtgttttaagctacaggggatgaaaaaaaaaagggcccccccattttttattttgtattacttttactgcaagggtaagcgtcaggactcaaaccctgacgttgaaaaaaaccgggtaaaattcgcccctcaaactgtacaaggggtcaagggggaagttcctggcccccccctttgcaaaaaagctgatcgggggatactgcctcaagggggcaatttgcaaaaagctccccccctgttcaagtatccccccaatgctttcaagggaactcttgcaggggacttcaatcctcgcccctggggagaaattcgggccccccaccaaaaaacatcctggtttggtccccagctcgagggaaaccgagttagggtttccatccaccccgggcccaatgttgaaaagggaatcggagctcttttgcccaaataaagggaggttgttgggggatcacggttcctggcaagtcaaatggtt

SEQ ID NO: 129751 - DNA, 336 bp, Zea mays
  Clone ID: MRT4577_49805C.1
cgtcgaccgacctacgcgccacccacccacccactctttaggcttctcgcggcgtccaagcagggagagtgatccgctgggccggcgggctccggaccgcgactctttcgcgccccttcgcagaaggctacatccgtcaccacctactccgacctacaagatcggcgatacgtcgatgtaatgtgaacggcgccgtcacaaagggatgccgcacaagttctaccaccgacgcaccggtcgcgtctggaacgtcaccaagcgcgccatcggcgtcgaagtcaacaagcaattcaatgggcccattatcaggaaacctatccctgtccctattgaaca

SEQ ID NO: 129752 - DNA, 916 bp, Zea mays
  Clone ID: MRT4577_49806C.1
ccacgcgtccgagctgccgccctatgtagaagtttgatcgattccttcttgagcgcaacagttcagtatagtgggttctacagtgttcgcaaaaaggtaaagccaacaaagttcaatatttaaaataactcgatgtgtccagggtttgcaagacaagattaagcagctctaagattaagatagttgccatcgatcttgccacaatttttacttgagctgagcagataacaagcggcttgggccagggtctcttggcctacgcgtagacagactccaggaagatgtcgatcttctgcttctccatcaccgtcgttatcatgcagcctgctggaatgccacagcgggacaggagcatggggatgagcaggcgcaagatgactgcaagtggcgccggatcccgacgttcggcgactggaacctgcgggacgacatgcccgtcacccaatacttgcaagcagggacttcttcatcgttgtgccgccggcagagaaggacgacgacgaggatctgttcaaggtgccccagtgttcctgccaagccctacaactacaagaaggtgaaacaaaacaggacgcttagtttctctcgccaattaattacactcagggaaaaaagttttcttccaccagctctgaagatagtatcagttaacactgtttcatatttccgttccatatctccatttccatatacattatacccagtcggcactagcgagcgatgagaaagatactgaacaattctatgatccaagcatggaattataatcattgaaactccgttgctactgttacttggttcataggctgatatatacatccaagctcgcccgcaccgccacctccacagtttatcatggtgcttttgaccctgcttgacagaaccaacagtgatgtatatataggtcattttgcct

SEQ ID NO: 129753 - DNA, 1004 bp, Zea mays
  Clone ID: MRT4577_49807C.1
cccacgcgtccgaaagtgtaaagccaaccaaatttcaatatttaaaataacctcgatgtgtccagggtttgcaagacaagattaagcagctctaagattaagatagttgccatcgatcttgccaccaatttttaccttgagctgagcagataacaagcggcttggggtattgatatttatttttctggcttgtttaatctggttgttcaattaatttcaaaaccagttagtgcttcagaatctcataacagattctgaatacttcctttgtcaaagctttcacttgtctgaagccagggtctcttggcctacgcgtagacagactccaggaatatgtcgatcttctgcttctccatcaccgtcgttatcatgcagcctgctggaatgccacagcgggacaggagcatggggatgagcaggcgcaagatgactgcaagtggcgccggatcccgacattcggcgactggaacctgcgggacgacatgcccgtcacctaatacttgcaagcagggacttcttcatcgttgtgctgccggcagagaaggacgacgacgaggatctgttcaaggtgccccagtgttcctgccaagccctacaactacaagaaggttttgggtggatttgtaggttggtcatgtgaattgcatcaaacagggagtcagggacgatattgaagttgtggctgtggatgacccttttgttgatgctaagtacatggccgttcgcaggatagaggtggtgaggcttctaagcatactaaatttctgcatcatgatgaatcatatgtgatttgtttcgattcaactggatagaagaatcagttgctgatttgatggagtcgcagcttgcttggcggacatagggtctgttgcatggattatggtttatgtgccagcgcccagtggtagacagtgtgattcaatgtgcttgctgttcatctgtccaaaactgctaaagtagcttctgaaaatggatgacatgctggacacttgctcactcggttc

SEQ ID NO: 129754 - DNA, 869 bp, Zea mays
  Clone ID: MRT4577_49808C.1
aagagctatgacgtcgcatgcacgcgtacgtaagctcggaattcggctcgagataagaaaaaggtgaacagcaactgcgtactatatttgcaggaatattctgctctccagtattgcacacacactctactctgtatttctccagtattgatcgtcttgcttgataacgcagatgatacaatagtacaagttattatttgaccctgattgttgcctctgcaggtaaagccaacaaagttcaatatttacaataactcgttgtgtccagggtttgcaagacaagattaagcagctctaagattaagatagttgtcatcgatcttgccacaatttttacttgagctgagcagataacaagcgacttggggaagacgtcgaccttctgcttctccatcaccatcgtaatcatgcagcctgctggaatgccacaacgggacaggagcatggggatgagcaggcgcaagatgacagcaagtggcgccagatcccgacgttcgacgactggaacctacaggacgacatgcccgtcacccaatacttgcaagcagggacttcttcatcgttgtgccgccggcagagaaggacgacgacgatgatctgttcaaggtgcccctgtgttccctgccaagccctacaactacaagaaggtgaaacaaaataggacgctgcattagtttctctcgccaattaattacactcagggggaaaaagttttctttcaccagctctgaagatagtatcagttaacactgtttcatatctccatttccatatacattatacctagtcggcactagcgagcgatgagaaagatactgaacaattctatgatccaagcatggaattataatcattgaaactccgttgct

SEQ ID NO: 129755 - DNA, 436 bp, Zea mays
  Clone ID: MRT4577_49809C.1
caacatacagtttgaactgatcataagaggtgacaggttcaggtgtttcacagatgcgagatacgccacctcacattaacaaaaaggaagagatgcagcagcatcaatccgtcaatctcgaccgtagcaacacaaaaaacagtggggcgagacctgttattctacttatagtacacaggcagctcagttttctgggacgcacaaggctatttcatgggactataaaataaaaaggggcatgtgtaattttttcacaggtgtgcgggaattacatgcttaaaacatattagaaaacacccctggggttggtgaatgataacccctaacaggtgagccaggtattttcgtctcaaaatggtgccatgccttggctttagagtggctccaaagcccattcttgtttgggtacactaaaatgggcctttaagaattacca

SEQ ID NO: 129756 - DNA, 690 bp, Zea mays
  Clone ID: MRT4577_4980C.1
ccggccggggcgtcagccagagccgcgccccgtcctcgtcggctcgcctggccgcacgtcgaccggagtcgtgccccgtccgcgtcagatcccgccagacccgcgtgctcgcatgtcagccatcgtcgtcgtggtccgctcgcgtcagatcagcccgcccatgcgcgttggttctgccgtcatgcaaccgctgcaaccccatggcgcccccggggaaccgcgagattaggcgcatgcagacgggaccagcagtggcagcatgttcctgcacggccagcccgcaaggcccgcgctggatccgccagcccgcaaggccgccgtcacgcgctcgccagcgtcgcccgcgctggatccacccgctcgcaaccgctgccgcgctgaaaccctaattcgtggtggtcccggttagcttttatagacgactcgagccctggtatgtttaaggtggtgcggctgaaccgaaagatggcattgggttagggcttccgatcactctttggaagcccaaggctcctaatagataaactatactaaaaatcaccttgttgcaatgggcaaaaattgttgcgatagactataaatcgttgcaataggcaccaattgcgatagaacaactgtcgttgcctgctgttgcaaaaaatagagtggcaataggctatagcaacatttttacgttatggtgcaattact

SEQ ID NO: 129757 - DNA, 304 bp, Zea mays
  Clone ID: MRT4577_49810C.1
cccacccgtccgctagttctagatcgcgagccgccgccctttttttttttttttttttttttttttttgcacaaaagcttattttcttttctttttctcctcactgcggacctgccagagcctaaaaaggtcaacaaatgtgctggtagcctagtacagtggactactacaaaggatcatacggggaagactagcaaaaagaccacggggcaggcatgatttgcatatttgcattacgtgagcaaaacggtcccggggtgtttggtcaaactgctcgcaaaactatttgcctcacgaaacgaaa

SEQ ID NO: 129758 - DNA, 442 bp, Zea mays
  Clone ID: MRT4577_49811C.1
ccggccgggggcagagggcagcggacaccggcaagaagcggaggatacaagagctgctgaccaggatgccccacctgagcaggacgttcgccgacgctataaaagcagcccatggcgcacccgtctcatcaaccgggctaccgttacatatccgaggcatgggcaccgagccaccggcgctacgatgggtgagaactggatctacgaagcatgcgaatactacaattcaacattgctgtaccaatgagcttggccaccacaggtctgtcggagagctcctgacgcggatgagggtccatagggcatatgggacgactgaatcaatgggtgattttgcggaggagcctgagcaggttggcagagtctcctcatgatacggggtgtcggaactgctacacacatgcacgagatagaggggtatcactggtcatgatcacctgaa

SEQ ID NO: 129759 - DNA, 479 bp, Zea mays
  Clone ID: MRT4577_49812C.1
accagcaagttaatgaattaaataatatgtaatggaacaaagcctgttttgaacgttgaaaaaaaaaaaaaaaaataaaaaaaaaaaaaaaaaaaaaaaaaaaaaaaaaaaaaagaaaaatttaaaaaaaccaaaatatggaaaaaaaaaagaagaagtggaaaaaaaagggggggcaaacccttaaggcgcaaatcacgcgaaaggataaaaaataataaaagaccataaaaaaaggggggggggggccctacttcaaccatccgctaaaggggaaattacaagaaatttccccaaaatttcacaggccggaaatttaaaaaaagggggccgaaaaaaccttaaggggagccaattaaatacccttgggcccaattttaaaaaagccaaaaggggaaaaaccgaggggcccccaaaaaaatccccttccaaaaattcccattttcccaaccgtgaataaaccaaaaaaggcccgcccc

SEQ ID NO: 129760 - DNA, 1848 bp, Zea mays
  Clone ID: MRT4577_49813C.1
cattgggaccctcgaggccggccggggttcgtcccccgtgctctttctccctctcgtggcgctgggcgaccgcctacgcaggccaggcgccgtcgccctaagctacgccaggttcccgggtcttggtcggtcccttcaccggcgaagagcacccaccagacgcgccggtgcctggatccggaggaagtgctgcgggtttcggcggttcgtctctctcgttgtttccggcggggttatgaaggcggtgggatacaacctctacgatagcagcgggactgatgacgatctccctccagcacaaaatagaggattgagaggacgggttttcagtgggaatggccgagcatctgctggggcatttccttacatgagggcaaataatgatttggagagtgaaatacatcgagttgagcaagatgcatatactggtgttcttagggcatttaaagtgcaatctgatgcaatatcctgggaaaaagagagcttgattactgaactcaggaaagaactgagggtttctgatgaggagcatagggagctattaaataaagtcaatgaagatgggagcatccgtcaaatgagggagttaagacaggcaggtggaatcccaagtggtctgcatcgtggcaacagggttttatatgatgcagaacctgggcccactaccaagaggcaaagggcatctcattcgattccttcgcaatctgcaggcctccagtcccctatgatgccctcccactcagtttcatctgcaaaatggggtcctttgtcagcaagaggcaagaaggcgaagatgatggcacctgaagatataagatgggaatttgatggacatctttcaaatcatgatggctggggcccttctggccctatgctgaagaggcacatgaccaacaacggtgctatggcaggttcaatcaggggaagaggaaggttatcgataaatgagcctataaaagactatgctccacctcaaaatgacatcaataggaattttgattatattgacataccaaatactgaaagtgttgttactgaggtggagagggtgttggccaatccaaatatgcctgaaatcgagaaggcaaggaaactgctgaaagatcaggagcagtcattacttgatgcaattgccagacttgatgaagcatctgatagcgatagtggtaactgaagatatggctatggaagaccgaaggggttctgctggggtcctggggaatggaacggcattgctacttagttgttggaattggaagattaacatgcatctgtgtatcacctacctcgaccacagaacaaacaaaccacattatggcaaaaaaattgacatgccagaaaatggtgcctggaaactgttgatgcctgaaatgggatttgctggctacacaaaattgagcgcacgaggagcagggatatgcaaatgtcagaactgtttgaatggtgtttcctatgtagcgtagtaaaagtagcttaaatgttctagatgattagcacggatcacttagcattcctgattcagtataggtagatgtctaactctagcataatatccaacttggttgttcttgtactctaatgtgaaaaaggacgttgttcaaaataattgtttaagcgccattgcatggtgtttcctatgtagcaaactagaggcaactaaatgttctagttgatcattagcatggagcacttagcattcctgattcagtacaggtagatgtctaacactccagcataatatccaacttggctgttcttgtactctaatgtgaaaaaggattgttgtgcacgcttttcatgtaagcctcgagtgagtaaaaaaaaaaaaaaaaaaactcgagactagtt

SEQ ID NO: 129761 - DNA, 1104 bp, Zea mays
  Clone ID: MRT4577_49814C.1
cccccgcgtccgcccacgcgtccggtaggcattcattaagaccgctggtacaatatacaaggaaaatccaagatggcatatttgatgtatcaaatgaggttagattttagttacttcctttcctttctcaagtgtttgttcaaggttgtgctaagcattggtaattactgaaatgacaagtttatagcacggtaataattcatttaatgtgggattgtcttaaattttgccaccagtttgcatgattattgcaaacttgccactagaaattgtaaaaatcaacaaaagaaaaagaattgacattcaagtcacatttttgtacaaaactaaaaaacctcttatactcttcactgcccccaaatccttttgtctgtataaatctacaggaatgttgaagtctttctagaaacctgtagaagattgattaaaaatgtttgtgtcttatctgatgcatttgcttacttgttcattcaagaccagttgaactaccatgtgaaccatatgatgttatatactccctccattttagattataaaatgttgtcttttctagatacattgttttactacgcatctagacgtagtgtatatctatgtgcatagcaaaatccatgaatctagtggtgccaaaacttcccggtgtggtgcatgcaccaaacggtgagacggctatcattaaggccgctgcttgcatatgcaagggggtgcgggatggcctttttgatgggtcaaatgagtccaacggggtcgaagttggttacgctgttcccaactcttttgcaggtggtgttggcttgtcctctcaggatgggggctgctgcagtttattgttggcagcaagtctttcaaatgcacaaggttctcccttcagtattttgatgtttgcctatagctggacccggatgatttgttctttcatccctcatgtttcaatccataagcatttcatgttcagtgttttcctgtccttttgcaaaaaaaaaaaaaagcaccaaaaagagtaatagaaaacaaaaaaaaaaaaaaaaaaaaagaaaaaaaaaaaaaaaaaaaaaaaaaaaaaaaaataaaaaaaaatagaaaaaaaaaaaaaaaaaagcggcc

SEQ ID NO: 129762 - DNA, 601 bp, Zea mays
  unsure (1)..(601): unsure at all n locations
  Clone ID: MRT4577_49815C.1
catcgagatactagggacttcgacatctacaagcacgacccgtgggaccttccaagtcgagctcgatctcgggggagaaggagtggtacttcttctgcctgcgggggaggaagtacaggaacagcatcaggcccaacagggtgacaggcaccggctccggcttctggaaggccaccggcatcgaccggcccgtccactcatccggccgcgccggcggcggccccgtcgtcgtcgtcgggctcaagaagtcgctcgtgttctaccgcggcagcgccggcaagggcaccaagacggagtggatgatgcacgagttccgcctcccgccgcgcgctgacgacaccgcccacgccacgcccgccagcgagcgagaggcagaggtgtggaccgtctgccgggtcttcaggaggaacttcacctacaagaaacacccncagcagcagcagcagcagcagcagatggctgcaggcggcagcgaggtgtccgccggcgccggcgcggccaccgtcgcgcagcccggcgagtcgagctccgtcaccggcggcgtcgaatcggacaccggngacgagtacactaatacgatcccgtgaataatacgatcgac

SEQ ID NO: 129763 - DNA, 642 bp, Zea mays
  Clone ID: MRT4577_49816C.1
aaatcatcgagttgagcaagatgcatatactggggttcttagggcatttaaagtgcaatctgatgcaatatcctggggaaaaagagagcttgattacctgaactcagggaaagaactgaggggttctgatgaggagcatagggagctattaaataaagtcaatgaagatgggagcatccgtcaaatgagggagttaagacaggcaggtggaatcccaagtggtctgcatcgtggcaacagggttttatatgatgcagaacctgggcccactaccaagaggcaaagggcatctcattcgattccttcgcaatctgcaggcctccagtcccctatgatgccctcccactcagtttcatctgcaaaatggggtcctttgtcagcaagaggcaagaaggcgaagatgggtgagcatgaactcgtctatgacatgggcacacaagccgagacttgggaatgggttaggctttgtgatatggcacctgaagatataagatgggaatttgatggacatctttcaaatcatgatggctggggcccttctggccctatgctgaagaggcacatgaccaacaacggtgctatggcaggttcaatcaggggaagaggaaggttatcgataaatgagcctataaaagactatgc

SEQ ID NO: 129764 - DNA, 412 bp, Zea mays
  unsure (1)..(412): unsure at all n locations
  Clone ID: MRT4577_49817C.1
ttgctaattgtacttcaaaagatctgtcgcctgtggagatgcaaacatgttcagacatgaaacttgcatgcttctatattcaatgttggaatctttagtcgcaaataataaacactaccatcttccgtgcaggtgagcaagtcgaaggagaggccggcggcatgggcgtgcgacggcggtgacgagaggagcggcagcaagcagaggctgtcaacgagccgcgacgtctccggctccggtggtggtacagggcgctcccggtagagccaaacctgtagaaacttgagggcagggaacggcctctacgcttgaatcttgattagagaactgcttattcacttactggctcgcgtcagtcgtagtagcttcaggcacgntcaaaaggagatagaaaacatctcgtgcattcttc

SEQ ID NO: 129765 - DNA, 578 bp, Zea mays
  Clone ID: MRT4577_49818C.1
gcgagaaggcaaggaaactgctgaaagatcaggagcagtcattacttgatgcaattgccagacttgatgaagcatctgatagcgatagtggtaactgaagatatggctatggaagaccgaagggttctgctggggtcctggggaatggaacggcattgctacttagttgttggaattggaagattaacatgcatctgtgtatcacctacctcgaccacagaacaaacaaaccacattatggcaaaaaaattgacatgccagaaaatggtgcctggaaactgttgatgcctgaaatgggatttgctggctacacaaaattgagcgcacgaggagcagggatatgcaaatgtcagaactgtttgaatggtgtttcctatgtagcgtagtaaaagtagcttaaatgttctagatgattagcacggatcacttagcattcctgattcagtataggtagatgtctaactctagcataatatccaacttggttgttcttgtactctaatgtgaaaaaggacgttgttcactcttttcaaaaaaaaaaaaacaaaaaaaaaaaaaaaaaaaaaagccgtcgtggt

SEQ ID NO: 129766 - DNA, 264 bp, Zea mays
  Clone ID: MRT4577_49819C.1
agcgggccggccctttgttttttttttttttttttttttttggccggcacctttaaaaccgttaagggggggtttttaggcctatttggcaacaaaaattccattccagttcggaccctgaaccttcgggtttaaaacctgaaattcgaccttttacctaatttttccttctaaggttcgtcgccgccgtctggggacttcttttttttttacaactagttacacaggccacgctagcaccttaccagggtccttgacgtccgg

SEQ ID NO: 129767 - DNA, 1444 bp, Zea mays
  Clone ID: MRT4577_4981C.1
cattgggtccgcccagggccggccggacgccagaaactaatccagctagctagcctttgatttctcacttcaatctgacgaactgacgaactgcacacctaggcaacaaactcgaacgcgcgcggtagtggagccgagatgcagggaggggcgacggccaagcagcaggcgcgagacggtgaccgcggcgcggcgaagacgccgacgacggaggggaagggagacgccgccggcgccaaggctagcgccgacgtggcgaagggcgacgccgccgtcgccaaggctgctggggacgacgtcgtcgtagggaagggcgacgcaggcaacaaggccggcgccggggccatgcaccacggcctgtcggccgtggaggcgaaggactcccagaccatcgtcgcgctgcagtcgccggtgaccgtcatgcgccccgtccgcggcgacctcgaggagcacctccccaagccatatctggcgcgagccctggtggcgccggacatctaccaccccgacggcaccgcggccgacgagcacgggcaccaccacatgagcgtgttgcagcagcacgtcgccttcttcgaccgcgacgacaacggcatcatctacccttgggagacgtactccggatgccgtgcgcttgggttcaacatgatcctgtctctcttgatcgctcttgtcgtgaacgggaccatgagctatgccacgctgcctgggtggctgccgtcccctctgttcccgatctacgtccacaacatccacaagagcaagcatggcagtgactctgggacctacgacaacgagggcaggttcatgccagtgaacttcgagaacctgttcagcaagtacgcgcgcacttccccggacaggctcacctacagggagctctggtcgatgacggaggggttccgcgacgccttcgacctctacggctggattgcggcgaagctggagtggacgatcctgtacgtgctggcgcgggacgacgaggggtacctgtcgcgggaggccatgcggcgcgtgtacgacggcagcctcttcgagtacgtggagaggcagcgcgcgcagcacgccaagatgtcctagctagagggaagaggatgcgacgtgggcacgtggcctcgatcgcgcgtgaatgaaatggaagccaagtgaacctgtctcggctggtatgtagatagtgagaagggtgtcggccggaaaacaagcagccgtgtgtactactccctcagctcccatcaataacgcagagttcgccggaccggcacctccccatctttgctacttcaacctggtttttcgcgcggtttatgtggctgtctgaaactgtgcagatccatgccgtggtggtagagcgagacatgaatttgaatattgtttaattttacaaaaaaaaaaaaaaaaaaaaaaaaaaaaaaaaaaaaaaaaaaaaaaaaaaaaaaaaaaaaaa

SEQ ID NO: 129768 - DNA, 623 bp, Zea mays
  Clone ID: MRT4577_49820C.1
ctctcttccgtgtgcggcggaacagcggcggcgccgcatctagcagagaggccggcgagaggatatttcaaggtcaccgtgagcacatctggcagcacaactccttcaattgaggagagttgaaggccaccgtcactacatctagcagcacaagcacaactacaatctgagtcagatcttttaccggtttagctggaccttatggtggatgaagcagcagtacatcaggtgtccccgttgttggcgccaatgtccgaggaggaagctcggcgctgcttctttgatttcatgaccaaggttacgcaatatgaggagctagttgatgccggaaaaatgtttcttgtaaagttccgtcaggaattagagcattttcgaagaccaatgattcccatggaatcggatgctgtcagtcagttagtcaaatctaactacactgatcgactgaggtcctatcttgaagcaggctgccaccttcagcaccaaagtatccggaatattaaccagttacaatcttgcgaggaaaaacttgaggaccatataaataaagctaaagttttgattgaagaacttgaatgcctggccgaggatgtttatagcactacgctaacagccagccttagtat

SEQ ID NO: 129769 - DNA, 476 bp, Zea mays
  Clone ID: MRT4577_49821C.1
cgagtacaagcttttttttttttttttttttttttttgtttttttttttttttttttttttttttttttttttttttttttttttttttttttttttttttttaacccccccgggcggcccctcaaaaggcaaattccaacacacggggggccgtaacaaagggaccccaccccggaaccaaactgggggaaaaaaaggaaaaaactgttccctgggaaaaaatgtaacccccccaaaattccaaaaaaaaaacaacccgaaaacaaaaagggaaaaccccggggggccaaaagagggacccaacccaaataaatgggggggccccaactgccccctttccaaacgaaaaacctggcggcccaactgaaaaaaaaaaacccccaacccccgggaaaaggcggtttgcaaaaggggcccttttccccttcctcgctaaaaaacccgctgccctcgggcgttcggctgggggaagcgg

SEQ ID NO: 129770 - DNA, 1964 bp, Zea mays
  Clone ID: MRT4577_49822C.1
gcagtggtaaggttttctgaacgattagcactttagcagtggaagcctaaagtaagtgattgagcaagcatagacagacagacagacatcggtgccatagaataagtaaaacaaagcccaaacttaaaagcacacccatcatcagaattcagaaattaattagctaggcatcactacactaactagctgcatgaggaccgtgcggacgcgaagctggtggcgagctcggcgcagggcgacggctgcaccccgagcgcagcgccgcgcacgtccctgcacttccaggcggcgtcgctccgccacccgaagagcttgacgttggagaggcatatgcgggtgaagggcgaggcccggatcccctccagtgacccgggctgctggacgttgacgccccacacgttgctgatgcgcacggcgtcgaccgtgggcacggcgagctggctgaagtgcgcgtcggggtggtcgccgacgtcgccggcgatgcggacgccgctgcgcacgccggtcaggcgcacgccgtcgacggtgacgttgcggatgtagccgccccggccgacgttggtcttgatgtggatgccgtagccgctgtcgaagatggcgcagtcctccaccaggacgtcgcgcaccccgccggaggcctcgctgccgatggcgatgccgctgaagggggacgagcccctcacgcgccggaccgtgacgccggcgctcggccgcccgtacgcgatcccgtactcgtcccacccgctcttgatggccaccaggtcgtcgccggtggatatgtacgagtcctcgatgcacacgttggagctggagtctggatcgactccgtctgtgtttggggagtcacgtggtgccaagatcatcatgttggttacgaccacgttgtcgcagtaaacaggatggatgttccagaagggtgagttcttgaggacgatgttggagatgtgaatgccggtggaatgcatgaactccacaaggtttggcctggtgtgctcaagggtccgccgcctccacatgttccaccacacctcaccctgcccgtcgatgactcccctgtcacctgtaatgacgacgtcgcggaggccgtcgccgtggatgaagctggcgtaccgtggccccggcagctccctgccccggccgtacgacggcagcggctccaccagcggccatctcctcgtgtcctgcgtggccttgagcacggcgcctctggcgaggaagagcgtcatgtggctggtgaggttgaagctgccggcgagccaggtgcccgcgggcacgtgcagcgtcgtgccgccgcgccgccgctggtgctggatgcggtacacggccttgcggaacgcccacgtgttcagcgtccgcccgtcgcccacgccgccgaagtcggcgatggatatcacctccggccggtgcttggccggggccaggcccgcgcacgtcgccgccgccgcggtggcggagtcgcacagcgcagccattgcgtggagcacggcgagcgcgcagatggcgaccgacgctggcccgcgcgacgtcgcggcggccataattgttgttgctcgcaggcagcggcgagaatgacgccgggagagaagagagggagaggccaagcagaagggctccaagaagagcttttttcgccccggccggcgtgtggcgagtggcgatccctagaaaggcttcgtgccgggaggccggagcgtcgcaaatctcgtgtggattggatctgggcgggtgatgtgaggtaggagaagggaagcaccaagtgcaagaatccaagcacggggcgaggagtgccaagcagatgagtccagtggaaggcgatgggcctggggtggcacgaaggggagtgaagcgcttccactccaccagcctgcctttcagcgagtgaagagagcgaggactgacgagtgacgagacgacggaggagagagtgaagagggatgtgccccccgccggctcgaggtcccaat

SEQ ID NO: 129771 - DNA, 1788 bp, Zea mays
  Clone ID: MRT4577_49823C.1
ccccccgcgagctctatctttcgtggcgcagctcggcagctgggcggccgccccccgccggcgccacgccctaagctacgccaggttcccagttcttcgtccgtccttttgctaggtcttcgttggacacttaaacggcgacgagcaccgccagacgcgctggtgcctggatccggcgggagtgcttcaggttttgacggttcgtctctctcgttgtttccggcggggttatgaaggcggtgggatacagcccctacgacagcagcgcacaaaatagaggactaagagggcgatctttcagtgggaatgtcgtagcatctgctggggcatttccttacatgagggcaaataatgatctggagagtgaaatacatcgggttgagcaagatgcatatactggtattcttagggcatttaaagtgcaatctgatgcaatatcctgggaaaaggagagcttgattactgaactcaggaaagaactgagggtttctgatgaggagcatagggagctattaaataaagtcaatgaagatgggaccatccgtcgaatgagggagttaagacaggcaggtggatccccaagtggtttgcatcatggcaacatggttttatatggtgcagaacctgggtccactaccaagaggcaaagggcatctcattcgattcctttgcaatcagcaggcctccagtcccctatgatgccctcccactcagtttcatctgcaaaatggggtcctttgcaagcaagaggcacgaaagcgaggacgcccattcctttggcgttaccatctgtggatccaagttcactaataaaccataaagtttatacaaggtggccagaagacaacaacttctatgaggccaccataacacgatataaccctgtgacgggtgagcatggacttgtctatgacatgggcacacaagccgagagttgggaatcagttagactttgtgatatggcacctgaagatataagatggggatttgatggacacctttcaaatcgtgatgtctggagcccttctggccctatgttgatgaggcacatgaccaacaatggtgctatggcaggttcaatcaagggaagagggaggttatcaataaatgagactataaaggactatgctccacctgaaaatggcaccaataggaattttgatcatgtcgacataccaaataccggaagtgttgttatggaggtgaagagggtattgttcaacccaaatatgcctgaaatcgagaaggcaaggaaacttttgaaagatcaggagcagtcattacttgatgcaattgccagacttgatgaagcatctgatagcgataatgaagatatggccatggaaggccgaatgggttctgctggggaaaggaatggcatcactacgtagttgcttctggcatgttggaattttggtagattaacatgcatttgtgtagcacctacctcgaccgcagaacaaggaaaccacattatggcaaaactgcatgccagaaaatggtgtcctggaaacggttgacgcctgaaatgggattttttggctacacaaaattgagcgcacgagcggcagagatgcaaatgttaaagaactgtttaagcgccattgcatggtgtttcctatgtagcaaactagaggcaactaaatgttctagttgatcattagcatggagcacttagcattcctgattcagtacaggtagatgtctaacactccagcataatatccaacttggctgttcttgtactctaatgtgaaaaaggattgttgtgcaaaaagcttttcatgt

SEQ ID NO: 129772 - DNA, 380 bp, Zea mays
  Clone ID: MRT4577_49824C.1
aaaaaaccctgccctctttttgatctaacgcccctttttttggtaaaacaaaaaaacctgctcagtatcacacagtttcccaccaaaacatggtcataatgctgtgcttttatgctaaaacttccccccacctgctcaccgggagaggtaatataaaaccaattccaaacaatcgacctaatgtaacacccaccaaatgaaacaaccaacttcaatgcagcagtataaactaaaaacatgaacaaactttatatagctgctgactcgacgtgcaagcaatctgtcttggactggggaaacacaacctctgcatgaaacacactctcataacagtgaccacttataccacctgttgcttcaggcttgtgctgctcgggacg

SEQ ID NO: 129773 - DNA, 1648 bp, Zea mays
  Clone ID: MRT4577_49825C.1
cattgggtacctcgaggccggccgggagatacgtggtatttgcttacacatctatcctgaaattaaattcaccgaccaccgtatgctgaagcggcgaagctgcttacaagtattctgcaaggctatattttcgacagccatcattcgagcaggagagacgcagatccattccatgaccctcagattctccgttactctgatctgcgagtaggtctctcagttgcagtaggtaccacaacctcgccaagttaagttttgatgtctgccagagatcccatggatgcatggatgaaccgataccgtgctttcacgaaaggagcggtggtgatggtctgtccgctgcttcttgcgataccgctgaataaagatgacctgaacatccaagagcatggtggtgccgtacctaccaccatgctcgtgctaccagagcgtacgtctacccgccggtatttgcccctacatcgtctgctgtctctccaatacattcttcaattataatgcgagctcctcaggctccctcacacgctgctaccatgtatggtgagacccttgggtacctcgaggccggccgggcttgcctgttggatcgtacatctcatcctagacagctgggcgttccctgcggtcggcgccctcgtcggactctgctccgcgattcgtaccgtcatgcacttcacaacccgtgcgggacaaggagatgctgaaatggagtactgcgatagactggagagctcgcttgatttcttggttggtataactgcgcttctgtttctgggactggaaggcctcgctctggagggtcagattaacagctccagcggtcgtcttaccacgccgatcggcacaagcttcgttgtctgtgtttttgctgcgagcttaatgctcgtggagacgatgcctccacgcagactcgtgaggtatctgacagagaccattgatatcctcacgggttttgccgtctccctggctatgttcttcatcatgtatccactcatgggactacgagcattgcttctgctagcagctccgttcctgatcctcatggcgtatgtcttctacgtcgctatcggcaaggatgatggcaacaacaaccaccaggttgctagcgcgaacggcgatgaagaatcgtcaggtgttagcagcagccgcaggagtggtgcggcggcggacggtgataataaaccagcgtcgcttgaactgacaaaagtaacattcgcagggttcctggcggtgtcgataccaagcatcagcaaaggttcagtcaccatttattccgaatgtttcttgcaccttgcagcagcagctgttgtctcaggcctcgtgtggaggctcctaacgcattacaaaaagtcacagaccaccgtcgcaactgttgcagatattgcttccttctgcacccatctctgtgttgcagttgcggtaattccgtttacgataatggccgggaatgcactctcatgattttgtagtactagtctgtcgagtcctgctctcattttgactaataaacattttttatgttaagatgaatgtgttttcttctccttgtcattttctattacaatagggcataatatgtgctcgctctgtagttcctttccaactatgaaaagctatttgtcagtaacatttctcaacatgagcggcc

SEQ ID NO: 129774 - DNA, 410 bp, Zea mays
  unsure (1)..(410): unsure at all n locations
  Clone ID: MRT4577_49826C.1
tacctcgaggccggccggaaanaaaanaaanannaaaaaaaaaaaaaaaaaaaaaaaaaaaaaaaaaaaaaaaaaaaaaaaaaaaaaaaaaaaaaaaaaaanaacccgngcgcctcctgtcctggtcacgggggggtcctccggttcgccgttcaccccaccctctcctccggtccggccatttttcaccgcctcttgccggaggcccaaaaaaaccaaagccgaaggagccgctcccatggccgttgccctctgcccgggcctgcggggtttaatggcctcctctcgcccgctcctggccttgggccccgaagggttgcgcctacccatggggccgggccgtcccgggcatgcccctcgccgcccgggaacgccgcggtttaggttcctccaccgccaaagcccagttc

SEQ ID NO: 129775 - DNA, 318 bp, Zea mays
  Clone ID: MRT4577_49827C.1
aaaaaaagtaatactattttttaccggtgcggattacagtacgccaagatctgtactttggacgcggagcaatgggggaataacccagtcaaaatgggagatccaacagccggtttatcacaacacatcctgaatgatccgttgggttctaacctactgaaattattgtctgcaaggcggattatataaataccaataaacgcagtaagcaaggagcagagctactgcatttcatccactaacgagctaggttccgaataacacccttagaaccatgatcaaagaactcctagaattcatcgaaatgctggacacaag

SEQ ID NO: 129776 - DNA, 1997 bp, Zea mays
  unsure (1)..(1997): unsure at all n locations
  Clone ID: MRT4577_49828C.1
ccatgacgcgtgcagtgcatgagatcggcatggccaactcaactagctaggacggacgacacggaagcgacgtgaagtttctgatcaaaactctccgagatttggagaagaaccgcgagatgagaaaggggggagaggggaaggaaacttcacgcgcgttccatgacgcgtgcagtgcatgagatcggcatggccaactcaactagctaggacggacgacacggagaagaaaacagatcgcgccaacacgcataagatggaaaaaagtgtatggatagatagatagatactcgtcacaccgcatgcgcacttgcgcagcatctgctcctgaattcctccgttcctgaaccagtagatcattttgtttaacagcagggtgcagggcccgtttctgttgctcggcacccgtcccatcccacccacctgctcacgacgacaggccagcacgacacggagggaggaagtagccaggccacctcgcctcgcctctactctcccgcggtcccgccccataccatgtccgactacaaccgctacggccacagctacagctacggcggcgggtacggccaagggccagcgccctcggccccgccggcaccgcacatgcccaccgctacatccgccgccccgccctcctcctcctcatacggcgcgtacgccgggtacccgcccgcctaccctccgccgccctcgcaggcggcgggcggattcggtcccgctggctccggctacggcttcgtccccgtcgcgttcccgccggggacgcacccggacgtcgagcgcgccttccgggccgccgaccgcgactgcagcggcgccatcgacgagcgcgagctgcagggagcgctctcctccgcctaccaccgcttcagcgtccgcaccgttcgcctcctcatgttcctcttcaacgacccctcctcctccacgccgtcacggatggggccaacacagttcgtatccctctgggattgccttgggcaatggcggggaatttttgacaggtacgacagggaccggagcggcaaaatcgactcccgtgagctgaccgaggctctccggagccttggatatgctgttccaccttctgtcatcgagcttcttatagcgaattacagcaatggtgtgcccagcaatggcgcgctagactttgacaactttgtggaatgtgggatgattgtgaagggtttaaccgagaaattcaaggagaaggatacgcgctacaccggctcggctactcttacatacgatggtttcttgtcaatggtgatccccttcatcgtcccttagctgtgctgtatgtagttcggtaacttgatagtagtcatcaaccatggttctagtaggagtgctctcccctagtctgtgcgaaaggttttttttttctcttcttcgtttctgagtcttgtctaccttgttcgttttgtacattaataacctcgatttgtttgtttcatgggatttacatcgttttggactatgaaatcttccaaggattgaaagtcatatgccatccttcagtattcctggatgggtccccgttggggctgcattgctaacaattctggcgactcgaatacacattttttggtgcggagcccattcgcagttatacaatatgcaactgcatatttcatccgaagagctagacagtttttggctgaagttgattgatttctgcaaacggccattgaggctgaaggagcgctgggagaagagccaaaccgtgagcagcgaagcgagagccacacctggcggctagaggagctggttaaagaccgaaaatcgatcgagacccaaaaaactgaagacgggagacaccaaatacctgaaaattcggtccttggttttttgtacgagtatatcgatcggtctcaagtctggagacaccgattttcattgcgtctacgaggtaggtntggcgtgcttcgctccacatgctccagcacacttgtgctcgaggacgaagtgtgggtggtttgcattcatgctgcttt

SEQ ID NO: 129777 - DNA, 383 bp, Zea mays
  Clone ID: MRT4577_49829C.1
caccagggcgccgatcggacagaatcctaggctcgggtgctacgcccccgggaggggcggaggcatagttaggtgctccctgcaagacgcggacgtcggccgccgtgccgagtgacagagcaaatgcgccgtgctatccagcaaggacgccgcactcgagacgcactccgacaacagccacctcgcgccggcgccgactcataacggtgcagagctgagattaggaacccgtgagtagtagttagtatcaatggcgctcatacaccaagaacctgacgcagccgattcgcattgcggacctataccaggcaccgatgcacgggtcgcaggtgcgcctggcacaccatggcgtgcccgacccatacagctagaaggcgatcatg

SEQ ID NO: 129778 - DNA, 1025 bp, Zea mays
  Clone ID: MRT4577_4982C.1
cccccgaggctcggccgggacgccagaaactaattcagctagctagcctttgatttctcacttcaatctgacgaactgacgaactgcacacctaggcaacaaactcgaacgcgcgcggtagtggagccgagatgcagggaggggcgacggccaagctgcagtcgccggtgaccgtcatgcgccccgtccgcggcgacctcgaggagcacctccccaagccatatctggcgcgagccctggtggcgccggacatctaccaccccgacggcaccgcggccgacgagcacgggcaccaccacatgagcgtgttgcagcagcacgtcgccttcttcgaccgcgacgacaacggcatcatctacccttgggagacgtactcgggatgccgtgcgcttgggttcaacatgatcctgtctctcttgatcgctcttgtcgtgaacgggaccatgagctatgccacgctgcctgggtggctgccgtcccctctcttcccgatctacgtccacaacatccacaagagcaagcatggcagtgactctgggacctacgacaacgagggcaggttcatgccagtgaacttcgagaacctgttcagcaagtacgcccgcacttccccggacaggctcacctacagggagctctggtcgatgacggaggggttccgcgacgccttcgacctctacggctggattgcggcgaagctggagtggacgatcctgtacgtgctggcgcgggacgacgaggggtacctgtcgcgtgaggccatgcggcgcgtgtacgacggcagcctcttcgagtacgtggagaggcagcgcgcgcagcacgccaagatgtcctagctagagggaagaggatgcgacgtggcctcgatcgcgcgtgaatgaaatggaagccaagtgaacctgtctcggccggtatgcagatagtgagaagggtgtcggccggaaaacaagcagccgtgtgtactactccctcagctcccatcaataacgcagagttcgccggaccgggacctcctcatctttcat

SEQ ID NO: 129779 - DNA, 355 bp, Zea mays
  unsure (1)..(355): unsure at all n locations
  Clone ID: MRT4577_49830C.1
tattttctttttttttttggagccgccaccacactacgcacttattatatttcatactttcttcaataacaaagattcatatgtccaaattacttacagataacaaacaccacaggcttggaagcaatancacacagtgaggcgttacatctatgtaaacctcatctttacatatccaattattaaccacccatatttcaantacaacaaatacacttctttaaacancttatccttaatcaaaaatnaaactttatccctccccccnttacatnatnacattcanttccttcaacanncccttaccaaacctcagggcggatctttcctttagcccggggcatccatttcccaa

SEQ ID NO: 129780 - DNA, 126 bp, Zea mays
  Clone ID: MRT4577_49831C.1
gagcacactccacttggagctacagctctacgttgtaagactactgtcgaggagcgaccctctggctatcaatcgggccgggcattcgaattaactccacggtgattgagcagaggaccctactgg

SEQ ID NO: 129781 - DNA, 1536 bp, Zea mays
  Clone ID: MRT4577_49832C.1
agtgagggttggtgtgtcgaaaaaaaaaaacctcagccgcacgcaaactcgttgcacaagaattcctcccacccccaccgtctcgccgccgccaccaccgccgcagctagataagaagaaaaaaagagagagaagaactcgtcgggagggctcgagatctgtgtcgggagagagggaattcttgagatcggaatcggaacaagcgggcgcgctcgggatcggggttaccatacaatttttcccaggaacctttagtgaatgtgctaatggagtcaaagggtggcaaaaagtctagcagtagtagttccctgatgtacgaagctcccctcggctacagcattgaagacgttcgacctgctggaggcgccaagaagttctctgctgcatactcgaactgcgcgaagaagccatcctgatatcgtttttggcatccccttcccgtagtttaggatttttatgcaattttattctgactcttttctcccaccaatctctctggcttgctgcttcacgataatcgaccagttctctagtctttctccctctgttcctctctgctctgctttctgactcaaaactgcaacaatggctgccccgacctctgcgatcgggtttgagggctacgagaagcgcctcgagatcaccttctccgaggcatcaatctttgccgaccctcatggtcgtggcctgcgcgccctctccagggcccagattgactctgttcttgatcttgcacggtgcaccattgtgtccgagctctccaacaaggacttcgactcgtatgtgctatctgagtcgagcctgttcatctactctcagaagattgtgatcaagacctgtgggactaccatgctcctgctcaccattcctaggattcttgagcttgctgaagagctgtgcatgccgcttgctgccgtgaagtactctcgtgggatgttcatcttccccggcgcacagcctgctccccacaggagcttctctgaggaggttgatgtcctgaaccgctacttcggccacctgaagtctggtggcaatgcttatgtgatcggagacccagcgaagcctggccagaagtggcacatctactatgccaccgagcaacctgagcagcccatggtcaccctggagatgtgcatgactgggctggacaagaagaaggcctctgtcttcttcaagactcaagctgatggccacgtttcctgtgccaaggagatgaccaagctctctggaatctctgacattatccctgagatggaggtctgtgacttcgacttcgagccctgcggctactccatgaacgccatcaacggatctgccgtctccaccatccatgtgacccccgaggacggcttcagctacgcgagctacgaggtcatgggcatggacgcctccgccctggcctacggcgacatcgtcaagagggtcctccggtgctttggcccttcagagttctctgtggcggtcaccatctttggtggccgtggccacgccgccacctggggcaagaagctcgaagctgaggcatacgactgcaac

SEQ ID NO: 129782 - DNA, 523 bp, Zea mays
  Clone ID: MRT4577_49833C.1
gtgtggggtttttttttttttttttttttttttttgggttttttttttttttttttttttttttttttttttttttttttttttttttggcgggggaacgacaagctcagtggggggaacctggggcccgtccccaaaacgaaaaccggggggggggggggggggcagctccagggtagttttacaggacaggcccaggatacaacccccagcggggcttgaagcaaaagctttgccttcttttctaaaaagggggggggcccctttggaccaccctctgactatgcccttatttttaaaaaaaaacccttttctctttctctacgggttaataaaataccggggataaggaccgaaaacgtacacttggaggcttggacaccccaaaaagggccttgcataccaaaaagcaccactcgaacttggggcccatcacgagcaggaaactaacctgcgaactgggggggccacccccagcggaggagcggggaagccaggctgcccctggccctggctgcccccg

SEQ ID NO: 129783 - DNA, 442 bp, Zea mays
  Clone ID: MRT4577_49834C.1
gggagggggccggggaaaactcaccggggcatgctggtttgcttcagggaaacaccggggtttacaggtgggggggtctactagcagtccactttacatttttgcaagctagagcttaaagattgaaagcttacatttgcaagcaaagcttggggacaaacaacaaacaacgacttaggcccccccgcggtttttaaacaagagcccaaaacgggccccgcaacccaagcgcaaaggggggttttgcgggccacccctaacggggacgggggccaatcgaaaccggagaaacttttgcctaaacccccaccgccgtaaaacctcacctcgaggttttccaggccctgcgcgtcgtaccaaatagccttgttgtcgtcgctgccgacggggtaatagaagtcgtcgtcgttgtccacgaacaacccccaaaagaagaagttgt

SEQ ID NO: 129784 - DNA, 215 bp, Zea mays
  Clone ID: MRT4577_49835C.1
cccactcttcctcccacgcgtccttcaattcataatctcacaaaatgaccgtcagcgaaagcctatcagcatctctggctttaatcaatcattcgttcaccctgttctctatcgtactaactcttctcaatacattcaataatcatactatacatgatctatctcttacattatcacacatgatcaacatcatacatctctacaaactccttttg

SEQ ID NO: 129785 - DNA, 178 bp, Zea mays
  Clone ID: MRT4577_49836C.1
gaggacaacgacgatgactactatttggccatcttcgagccgccttccaggtctcgtctggggggacgcccaccgagacgcttgcaaggatcagctcgacgcgcccgcactggaagagggaatctagagtcaagaagatggccctgatgatgaggttgtctgtgacgctgatgaggac

SEQ ID NO: 129786 - DNA, 616 bp, Zea mays
  Clone ID: MRT4577_49837C.1
ccggccgggccgggatttacaaacttagtgacctgtctatctatctagagagacagatatgctatactatatagataagaaggagcgtctgaactctaaagcaatgggaggcgaggtctcgctgctgctgctcctcgtggtgatacttgcgacgaccgccatggcccgcctcctgcagggggaaacctcccacgtcgacgcctgaactcatcgacgacgaaccctacgcctccctcgatacgctcctctgcggtgaaacctgtcgacttgctaccatggtatacagcagctatggctgatcaatgccttggcgaaatctgcatgatgtgatatctgctgtacggttatttataatctctgctaccagaaacacaacgactgcatctggacggtcatcttattgcatgtgctatggagatctaatcaacctggcataatacctcaggatatgcctcatgtagtgccatcagactgctccttacatcattcttatacatatatatactcccttcagtatgcgaatataatgagaacaaattccccgacattcctctgaatgcttcttgtgttcccctacataataagcaattgctagctctgcatgaatgagtacata

SEQ ID NO: 129787 - DNA, 796 bp, Zea mays
  Clone ID: MRT4577_49838C.1
gccggccgggttcgagagccccgcgcctccagcttaaactccgaagcgcagttcctagtgcatcgccgccgcggccgccgctgagagtagtcatgtgcgagtgtgccccggcgcagtcctaacggtacgtaggtctctccacggtggtttagtgaagttaagaacaccgccatggtgacaggccgggtcaaggcggccatgggcttccagcgcagccccaagtcgcaggtgccgccaccagccgctacacccggttccagatcccgtgggagtggatgaagcaggacaccggcatcgtcagccagatcaaactccagtcggtgaagctggcaatgaagcacctgaaacgggtttcctccgagctcgaggtgatcaagggaggccctgaagaggaggagcaggagctgatgctccaaggagtacggttcgccttcagggtacaccagttcgcaggtgggttcgacgtggacaccatgcgagccttccaggagctcaaggagaaggcgtccatgtgccgggtacagcggcagaagcagcaccgtcacctgcgccagcacaggctcgttgccagggcctgagaggaggagactgaggagtgtgtgaggaccagagcatgcagttcttattttttatatggtcggattatctatacgccatcatctcgtcgtcgccgccacagtgccatagaatgatttgttcattggtttttttttttttgcgagaaaaaagtgatcgtgaattctgctgtaaacgcttccgtactgaaactaatgaaaagccttgttacctttttagg

SEQ ID NO: 129788 - DNA, 2242 bp, Zea mays
  Clone ID: MRT4577_49839C.1
gtgctagtgcgccccggcgcagtcctaacggtacgtaggtctctccacggtggtttagtgaagttaagaacaccgccatggtgacaggccgggtcaaggcggccatgggcttccagcgcagccccaagtcgcaggtgccggaggcggcgtctccttctcgggcgcctacgtcggggtccgtgtccaccgccgggtcggcgccgtccaaggcgtcggcgctcgcgcggtccttcggcgcgtacttcccgcgctcttcggcgcaggtgcgccccgccgcccgcgcgccgccgcaggtcgccgagctgctgcgcgccatcgagcagctccaggagcgggagtcgcgcctccgcgtggagctgctggagcagaagatactcaaggagaccgtcgccatcgtcccgttcctggaggccgagctcgcggccaagaaggccgagctccagaggtgcagggacaccgcggagcggctggaggccgagaacgggcggctgtgcgccgagctcgacgccgccgcgctcgaggtcacgagcaggaagcagaggatcgtcgagctggagaaggagatggcggagctgaggacgcggcaggacgcggcagcggacgccgacgactgctcctcgtccgcttcggcgccgagcgagcgtctcgagagctccagcgctgcgccaaagccaaaccgcgcgagtttagctcagcttgatcctccagcgccgccagcgccagggccagcgcctttgaagtccaagtcctacttctccgcgagctcgtcgcacccttcgcccgcaagctcgtcgccgccgccctcgccgtcttcctccacgtcgacctcgtcttcgccagcgcactcccgctcgtcgtcggacacggcagccgctccaaggccccgcgtggtagagctctcaaagctcccgcccatacctccgccgccgccgccttgccctcctccgccacctcccagcaggagcaagagatcctctcccccgaactcagccagcgtggacggaagcgcagccgccgctccgcctcccccgccgccgccgccgccgccgcctccccctccggcaaggaggcagttcggcgccgcgccagcaccgcctgcaggggcatcgtcggggcagggcgacgtgaggcgcgtgcccgaggtggtggagttctaccactcgttaatgcggcgggagtccaagagggacggcagcggcacagcaagtgaggccgcgaacggaggcggcggcggcgcggcggcgacgcgcgacatgatcggagagatcgagaaccggtctgcgcatctcctcgcgatcaagtcggacgtggagaggcagggcgacttcatccggttcctgatcaaggaggtggagggcgcggcgttcgtggacatcgaggacgtcgtgagcttcgtcaagtggctggacgacgagctctcgcgcctggtggacgagcgcgcggtgctgaagcacttcgagtggccggagaacaaggcggacgcgctccgcgaggcggcgttcggctactgcgacctcaagaagctggagcgggaggcggcctccttccgcgacgacgcgcgccagccctgcgccgcggcgctcaagaagatgcaggcgctcttcgagaagctggagcacggcgtgtataacctcgcccgcgtccgggacgccgccaccggccgctacacccggttccagatcccgtgggagtggatgaagcaggacaccggcatcgtcagccagatcaaactccagtcggtgaagctggcaatgaagcacctgaaacgggtttcctccgagctcgaggtgatcaagggaggccctgaagaggaggagcaggagctgatgctccaaggagtacggttcgccttcagggtacaccagttcgcaggtgggttcgacgtggacaccatgcgagccttccaggagctcaaggagaaggcgtccatgtgccgggtacagcggcagaagcagcaccgtcacctgcgccagcacaggctcgttgccagggcctgagaggaggagactgaggagtgtgtgaggaccagagcatgcagttcttattttttatatggtcggattatctatacgccatcatctcgtcgtcgccgccacagtgccatagtatgatttgttcattgtttttttttttgcgagaaatagttgatcgtgtattctgctgtaaacgctccagtactgtaactaatgaacagcctttgtacctttttttaggagaaatatgtgtttattcagtctcgttc

SEQ ID NO: 129789 - DNA, 516 bp, Zea mays
  unsure (1)..(516): unsure at all n locations
  Clone ID: MRT4577_4983C.1
cccgattcctcctcgctctcgcgtgccatcgccgttcaccgcgcgctcatgtcgtcttctccctgcggatgccaatgtcttgccatgaccatgcggccggccaccgccgtcttttccagctaagaaccaccaccagcaccacgaggctttttctttccctcctcgtcgccgtcctcctggtcgccgacgtctgctcggcggcgcggcagttctccacggtcgccatctcgcacgcgcccaacgccacgctcgtctgcgccctcgtcaccgccgccgccgccgccgatgacgacgcggggtcgccgggctccaagcagctgcgctgcacgtcgctccccgacggcgagcagttcgtgtacccctccgccgacatcccctacaacgcgatcgcggccgggaccgacttcctctgcggcctcatggcgccgctcggcggccacgccgccatgcgctggtggtccttcaccgaggagctcgccgncaaccgatcccgccccgtgggccgccgcctctact

SEQ ID NO: 129790 - DNA, 792 bp, Zea mays
  Clone ID: MRT4577_49840C.1
aattccgctacaaatataggtatttgctgatctccgaccgcgagatccgaaggccgcagcgtcatgcgaggccccccgctggtgcggccgatcaggccgctgtccgactcacgggcatggtcgattacctcagcttcaagatccgcgtcgtctgggtcgctcgacctgacaaccactacatttgatgatgaccatctcactgtgatacacgagaaaaactatgaaccaccctttgtggtgcacatcccgttcgctgctgcacatcaatagctgggctctgatacggcacaactgctgctgatagcttaaggtgagagcattccgctgagccccaactatgtacatgtattagtccactggccaggacgacgcacatcctcattgcctcgtactggaaccttctaggtcatactgtacgcatagatgtctcctacatgcatagtaatgcatcctagcgcatatgtctgatgaaaacatccccgttggcctactcgcgacagaaaggttggtgggaataactaccacgtctgaggatcgcatgatactttcctctatgataagagtctgcagtactatgaaatttctgcgccccagcaactactacttttacaaatctttcctgctaccttgcaaggaagctggctggcgatccgaaccttcgcttatgatgaagctgctgctcttatggctccgcaagttaccatcgacatgactatgcagccgcaacatgaagctgagcttgctgcagcagctgcacgacctcttcctgatgactatgatgatctgactgac

SEQ ID NO: 129791 - DNA, 102 bp, Zea mays
  Clone ID: MRT4577_49841C.1
ttgtagctcttaacagaggggaggaagcgtgacaataccatacacagacccaaagacatgacaagacaaccaccctacacggagaaaagagcatatctacca

SEQ ID NO: 129792 - DNA, 4187 bp, Zea mays
  Clone ID: MRT4577_49842C.1
gaccctgcacctccgccgccagcgtccctaccacgttaactcaggcacaccccccgccttgctaccttctccccgcatcgcttctgctcaagggtcaagcgggaacgctccacccacaggagggcccgggccgcagacacaagcacttgcgctcccaccagcaagtcgtccctcatctcgcggctctggggtgttcgagtgtgtggacacgatgaaacatcaagtgtaccaatggatcgcactggaatctgggagcatcttgcgcgatatgaacctcggcaaagggaaactgaggatactgtactcttagctttacagagtcctgaagtgtatgatgatattgctcgtggcactcgctgtcaaatttgagacaaatagacctcgcgctgttctttttgagggcccacctgggacaggcaagacatcttcagctcgagttattgccaaacaagcaggaattccactactatatgtgccacttgaagttgttatgtcaaaatattatggcgaaagtgagcgtctattgggatctgttttttcacttgcaaatgatcttcctgaaggagggattttattcctaaatgtgttgaattctttaggtattatacgagaaatagcgatccagaagcggaaccagaattcgtgcttgagtcattaccagaaaaatcaatgggtcagacttgcaggggcgggtcgccaacatagaagcaaacgagacagaaagttgggaagccaccaacagaacgtgctacttcagatttttctggtgcaacgcttgctactgccgcaaatattggacgcaatgcacaggcagatgttgatctgtcacgaagagcaatggataaagcgatgatggatatgctgagagcttcttttgccaatagaaggaatgagcataattggtctggcgagcggaaatttgaaagatttgaagagtgctgggcagataggggtacatggtccgcaaaaatggggtagtgctccattctgatggaagatagtcgttgtagcacatatcgagataaatcgtcgtctgatagaatctatgcggtgcatctatcgcctggctacaatgcgttcaacaatcaacccggatcggtccagtgcgaagtataatgcagctagttcaaagcaccatgtctgccccctttttctgtaccagcgacctcctgtggccttgccgccgcgtccggcgcccagccccgcccctcgatcctcacctctcctgccgcccaggactcctcggacgacgaccgaagctggcgagtgcgttatttgccaggcacttcgacccaggcgtctgcgagcccgaacgccggtcttctgccatcatctagcatgcggcttacctttgtttgtaggagagggtgcaccgccgcacaacccatcttgggcaccgactctcgatgcaacctgattatcattgacgccacagaaggggataatattgtatgcagccacttaatccccctacacggcacccacaagtgccgacattcacaccattgatgtccgatcccattgggcatgtcccactcattgatgtttgagcagagggtaaagcctatattgcgagtcatggggccgccaacaatctggatcagtacccctggttcctatattgagggccgtgctgcctgttgcgaagaaggtcgtcaataatagcccaaacgggaacactgatgagcctcatactatgaatgcctaccctgccggcaatcgtcgggtcctgttcccatatcctgggcaactaacaatgtgaagaagcatgttgatgtgtgtcccaatgaaaaagcatccggtacgtcttgtgttgctgctgtgtttggaagtgggatggcacacgctgtggatgaagctcccagcggagcagctgcatccgatccaagggaatccgatcaatcccggactcgtcctcccggccaaccctagcttcccttctcttcccctcccccgatggacccgccgccaaccagggacagaggggaggagctggagcctgaaacccgcgccttccccgacgccgacgacccggagacctcccgatctgaacgcgacgagggtatccctccaccgccaccgccaccgcctctgcgccagcagctcatgggggcttgccgcgccgacgagcgcctcaggccgctcctcaccctcaacgtctcctgcggcgcagcggacgaccgactcatcgcacacctcgcgcagcacttcgaggtgtcggaggtgggcatgctcgcgcgttgcctctgtgttcccctcgtttccctgcgcgttggcaaggttcagagggaaggggccctcctctgcccaacacacattagagggaagctgaaccttgttcttctgccatcatctagcatgcggcttacctttgtttgtgatgatggttatccagagcaactagctctcttgagcaatggctttgaattttctgaagttatgattgaagaaatatcagctgataattctggacgctctttcctaatcagaatttcagaatctaaagtgttttactactggtgtgctgagaagtcgaaggaacatggaatggaacttcttgcaaagatgaaaaaccttttggacgggaggccaacactctctgatctcactggcatctctaattcacgacttgatgcttttgccactcatttacatgcttatcttcttgcatcaagtatcggtgatgttacatcattgggctcacttaatgacttcctgagtacttcaagatcacatgatcaatatttacagctccagtcagatttttccaaaacttccaggttccgtgcctcggctgctagtgcaattaagccaagctctgtctatcaagccagcctaagtccgagatctggcacttttaaagatggggtaccaagggcttcatgtgcaagggttgttgggagggacaagctgaagcgtcgtgtggaatggttaggcccgttaactgctccgcttgatacgaatcctttgacaatcaaccctgattctgccagtgagaagtgtgatgcagattgttcaaagaacgatgttagctcagttccgttggacctgcctctttcgtttcccctgttgccttctatttactcccttggcactcgtccggttcctgaggtttctttggagaaacagtttaagccttactattgctggtgcccaccatgcccatcatcgctgcaatacactgtcacccatttgcatctgccagctacacctgtagatccgttgcccctaccacctttgagttcactgctagcaagtgagcagccaccttcttcaacagtttctgtaaagctggatacaactgatctcccttcccttaatcttccgtccatactgcattcaccacttattcccctacatggtccacaagtgccaacattcacaccattgatgtccgatcccattgtgcatgtcccagtcattgatgtttgttcggcgggtcaggcctatctagtgagttgtgggccgtctataacttcagcagttcccctgctcccgagcttgaagcctctgctgccagaagcagagtcgttagtcgagagaagcgcaagggaaacactgatgaggctcatagcttcgacaccacctgcaagcaatcctctacctggaagtatatcccgggcgaataacaatgtgaagaagcatgttgatgtgtgtcccaatgaaaaagcatccggtacgtcttgtgtttctgctgctgtgtttggaagtgggattgcacacgctgaggatgaagttccaagcggagctgattcacaagagccgtttgccgaatacgatggtaccagcaatgaatgtgatgtacatcattggcagaaattctagcttggctgcatcagcatggtaaatagggttttgaggattcgggggtttgatgtcctgtacgcagcagcagccttaaaagtttctgtgcccagccagcatctctatttggtttgcaaatgtaattactagtttgtactgtcttgtttttggcaaacttgctgcgagcttcgtgcttagtttggtttatttatttatgaactttaggcctgttcgaagcacccagtttgtaagaaaatggattatataaactgaagtgattccaaatttttcaaaaaaaaaaaaaaaaaaaaaaaaaaaaaaaaaaagaaaaaaaaaaaaaaaaaaaaaaaagaaaaaaaaaaaaaaaaaaggcccctagggcc

SEQ ID NO: 129793 - DNA, 395 bp, Zea mays
  Clone ID: MRT4577_49843C.1
acgctcacgcgtccgggacatcaacgcaactagtgttacgagcatgaacatgactaggtcgggatggtacagcttcaacatgtgcttgaagttgcttacaacttaacatatgttctttcgtcataagaacttgaatttacttgtgcacgatcatatgctatctgacatgaacaaagttcttgataaactgctaattgtaatgctctggattatacatttggaataaaggggtttttgataattggtccaatattaattgcccttcttaacatttgctcattctgaattgattattgttcttgccctgtttctgctcattaatctcacttctttttttttttactttcatttggtttatttcacttgcttgtgtatttttgtccgttttttttatt

SEQ ID NO: 129794 - DNA, 536 bp, Zea mays
  Clone ID: MRT4577_49844C.1
aattcggcacgaggcagcaatggcgtggttgctaccaagatgctcactgagaaggcgcatagagatgtttctccggccggaaaagaccggagtaatactttcaagatggcaattaatcccccagctcagactgaagataaacaaagggatagtcagacaagaaggaatttccctactaaaaggtcaaactcgcctactaaaaggactggtgcgatgcctgttaaaatgctgatggagcaggacatgtggaaagaaagacggcctgatgaggagccactgaatgttgttgcaagattaatgggcctacatgagcctccaggtcagcaatccaatttccctttaggaagacaattggataagaaatatcagtgtggtggttttgaagagaactactggaatctcaagtcaaagaaggaaagcaaatgccaccaaaaccaaaaggcagggccacgccatcagcacacttgaaatgggtctggtgaccaaccatgaaggatcaggagcaggcagagcatgcaccaagaaaatgagacttg

SEQ ID NO: 129795 - DNA, 275 bp, Zea mays
  Clone ID: MRT4577_49845C.1
agccggcacgcctgcaggagccgggccggagtatctgtgccgggtcgacgatctttttagtcggcgggcgccctagcatttatttggttatgtttatgaccgagtgagcgacgagctcgatgactagaccaggcagggctgccctacatgaatagcatgggcgcggtgcatacgtacaccatgttgcatggcctaaaaagatgacacgaacgggtaccattgctgaccaatcggcgcgacctcgctgagaaactttggcatactcctggagatgc

SEQ ID NO: 129796 - DNA, 469 bp, Zea mays
  Clone ID: MRT4577_49846C.1
gggaaaaaaagtaaaatttttttccaaatataaagaaaaaaggcaaaaatttttggaaaaaggggggggtttcccaccaaaaagggccagaagcatgcaaaaaaagcccccggggggccggattaaaaaaccccaaccaaaaggtagttttaaaaaaaaccttttcgcctggggctttttttcccctgaaaaaaaattggggtaaaaaatggccccggggaaggggggaaaccggcccggggggaaccaatgggggaaaaaccccccccctggtttgggggcccagggtttaaaaaggaagcacgggggaaagtaacccaagtttgtaaagggaaaaaagggggggggggggccccattcgtagaccaactcccaaaaaccgaggggcgtccaagtttttaaaacgggagggggcgttttaaaagaaccaagtttaagtacccggggatggcaaaataaaaattttttt

SEQ ID NO: 129797 - DNA, 243 bp, Zea mays
  Clone ID: MRT4577_49847C.1
cctggttttttttttttgaggtaagtgtaacttttactttgattggtaagacatagatgtacgtactgagcattgtccagaagcagttgacatgacaggggatatcgcaccacgagtggctgcagacagatcatgctcaggatcaggacacaggagaagcggtcgatccgttggcttccgcgcaggcattgttgacggggtcaaagatggcgacggcgactccagcctcaccgataccagcga

SEQ ID NO: 129798 - DNA, 362 bp, Zea mays
  Clone ID: MRT4577_49848C.1
ctccaaaacttgcgccgccactgcctctcagggagggccggcatggtctccgattagggcgtgtgcgcgaagcgcattgtggcggacgcgcgccaccacatgctgggccgtatctcctcgaacatagccaatgagctgctcaatgggcataaagaggtcctcgctccatgcaaggagatctgcatgggggggggacttgtacgtcacaatatgaataacctccgcttcctccgcaagcggatgaacaccaagccgtgccacgggcccatcccattccgcgccccagccaagattccgtggcataccatcccgcgggatgatatccgccaagacccataggggggaggaggcttttgcgaggc

SEQ ID NO: 129799 - DNA, 230 bp, Zea mays
  Clone ID: MRT4577_49849C.1
ccgccgggccaggatctcttatcatctgcgcctctacatttcttctctctctgctcctccgcctccgcctgatccatccaagacagggatcgccatgtctgactctgaggagtaccacttcgaatcaaaggccgacgatgacagccgagcaagagctactcgagggaacctgtcatggtcggtgagaactccttcgtcgtcatcaagaaccgtccctgcaaggttgtgga

SEQ ID NO: 129800 - DNA, 327 bp, Zea mays
  Clone ID: MRT4577_4984C.1
cccgcacctcctgctagcacagggtgcaagggaaaggatgacagacaggacaatcgagagcggcccatcatgaagggcggcggggggtacacaactgtatctgtcgaccgtgtgcggaacaggttattctgacatgactataaaagcgttgccgagggacgaacctacatggactgggcatgcaagcactgtaaccagacacattcgcatagatgataggaacgagctcagaactggtcaatgaggatcaagcctatgcaatccaggggcatgctgctccctagggcgaacaacctaactaatcctactttacctactgttacctgc

SEQ ID NO: 129801 - DNA, 1626 bp, Zea mays
  Clone ID: MRT4577_49850C.1
tcttacacagggcaacgtggcagaacatcctcagaaagccatggacaccctctttgcaatgcctgggtataattgttggccttctacaaagacattcaattacgtccttcacatgcttgtgtgcaagcggcagtacgaggttgttcacgaggtctactcgagcgcgcccaggcttggggtgacgttggacacatgttctttcaatatccttgtcaagggtttgtgccagtacggtaaatttgatgaggctatctccttgctgcatgagatgccgaagcaagggtgtcagcctaacgcgacaacctactcgacctttatgcatttcctttgtcagcgcagtcaagttgataaagcatttgagctgtttgagagaatgcggaagcaggatattgctgcagatacagttgtgtacaatattttgatctctggtctctgcagggacgaaagagtgaccgaggcattcgacctgttcaagtcaatgacttctgaagggtgctgtcctaattcagggacatatcaggtacttcttgatggtctaatcagtttaggaaaactttttgaagccaaaagccttgtttgcactatgagtacagagggtgtgaggccgagctttcaatcatacaagctactgattgatggcctctgtagtgatgactgcgtgggtgatgcacatcttgtcttgaagcaaatggtgggccaagggtttgttccccggatgggcacttggacaaaacttctcacatccatgttcaagttttagcttccgcatcggtgatttccttggcctaacaagacacatgaatgaaaaattcaaattttggcagactcttgactgaaggtcatcaagtttggttagaggagcaagtggaccaatggcggcttgagtttgtgcttgtagtcctgcataacattgctacctatacatgattatcggttgtgtggaatagcttccactgacatcaacctgaatcatgtgatttatgttctgggcaggtgaatgactgactaatcttgggcaggtgaaagcctacagaactcttcgaaccctgttctgcaaggacggctttcctccaagaccacaatggtggaaattttcctcttaactgccaaacagctgattcaaagacttcttcccataccaaacagcgtcataagaaatgtgcatcttacacagagtggactgcatgcaactccttactacccatgtgggggcttctccaacagcacaggaagagctcttgcagcaaccaagacacttgttgatgtggtggtcctcctcctaccaccattaaagaggtccgtacaggtgtgctggctgttcaacactataacgtacacgactaggccggtttcgccaccccaactccaggcgaacacgagtagttggccattgacacgagcggtgtgcactggctgctgctgatggtgatgggggccaccgtcaccacactgtcgtgaccaaacttttgtcaccaagtgcttagcttggctgcaattccttgctccaataatttatttattcattttctactagtagtgtgcccgtgctttgctacggtttcatttatacagcgtaaactacaaagatgtgtgcatcctatttattaaagccaacaaccatgtttc

SEQ ID NO: 129802 - DNA, 211 bp, Zea mays
  Clone ID: MRT4577_49851C.1
agcaaaagtaattatcgaacaccctttggagaccaatatcacattaaaatccggaaatggaacttcttatttctggttggccacacctcggccggggggggggggggggcgaattcccgcgcactggcggccgctgctggtggctccccgctgggtgccgggcttggcgggttcctgggcgttgctgtcccctgtgtgggtttggtgttcg

SEQ ID NO: 129803 - DNA, 384 bp, Zea mays
  Clone ID: MRT4577_49852C.1
ttccttttttttctgaaaaaaaccggcttaggattgaaggcgggaggacataagggctctcctaaccttaagcccaatgtactatttatcccaccattccacatgatgaaaagaatgtactgcagggagggcctaccagaacctcctccagtaataaccacactaaaattcgacagcgtgcccactctcaaagcacgcaccgctacacccgccccttcatataaaaacccatgcacacccaatccaccggcgtaaccccttcctgccagagaccgtgtccttgacagcgccaacggacaccaggaacccgaccaaagacgagagcgccatcatgtcatccctatggaacgagcagcccggcttccccatgaaggaggcgaggac

SEQ ID NO: 129804 - DNA, 298 bp, Zea mays
  Clone ID: MRT4577_49853C.1
taattctgggctcacaattgttagtcacagtggtgtggaaagtgcagcatatgcatgttcaaatagtcaactagaaagcgcatctaatgtgatatctccaaatgttgatgtaccttttgttgattgggatgctcttgagattgttcctattacagaagagctggttggttctatagttcccgttgttgatgaagacaatttttatgaacacattggtctttgagtaccacatgaataagatctatgaggctgaacctgcagttaaagagtatttgaaaaaaaatcacaaggcattttg

SEQ ID NO: 129805 - DNA, 654 bp, Zea mays
  Clone ID: MRT4577_49854C.1
ccggaaccggcactaccttccaaacggcggcgggcagcacctggcggcggtgggcgcgaccccggtccccggcctcccctggcggtcgtacgggcagcaccgacgcgaggccactcggtccctcggcgtaggccggcgcacgcccgcggcggcatggcgtcccggtgacgctggcggccagggcgtagctctctggcggcgcgggcgcggctgtgggtgtagccccggcgtcccacggcgtggacacgaggcgtggccggtggagccccggtgcagcgcggtcgcgcacccggctcaggccatcccggcccaaatggcgcggcggcgccccctggtggccggatccgcccggcatggccaccccacaaggggcgggcgcagctcggcggtccccctgcgcaggctcgcgcgaaccggcgcggcttcctggagggcgcgcggctccctggtgcgatgaggggcggcggctggggggcttgggctccctggtggcgcgcaggcgcgggatcagcccgactcgggcggatcggctactgccacggcgcggagggtccggcctcggcggctcggcggcccccagccccggctacctggcgcggacggtccggccacggtggcacagggcgcggagggtccggcctcggcggctcggcg

SEQ ID NO: 129806 - DNA, 158 bp, Zea mays
  Clone ID: MRT4577_49855C.1
gaattcatcactccagcatggtacccttattaggtacatggtgcatagattgaagctacacgtatgatatcctgacagtagagagatgactggcgtgcggaagaccaaagttatggcctggccctaacaagagcttggacatggatggccagaaagct

SEQ ID NO: 129807 - DNA, 1016 bp, Zea mays
  unsure (1)..(1016): unsure at all n locations
  Clone ID: MRT4577_49856C.1
cactgtcatccccctctctccctctcccgaccgcaccacctccctttttacagtccatanccgccgcctctttctgtgcttgccctctcgccatcttcgagtacgacgagaaggcggtgatggagctggacgagcaggccttcctggaggagatcctctccctgcggagggacgcctgggactgcaatgccatgggggacttcttcgccccggccgccatggactgcaccttccaggaccgccaccaccaggcgcccaccgtcagcgtcctccccaccttcaccgcctcctacgcccagccgcaagcgcctcaacgaccgcctctccatgctacgctccgtcgtgcccaagatcagcaagatggaccggacgtcgatcctgggcgacacgatcgactacatgaaggagctgctggagaggatcaagctgctgcaggaagagatcgggcagcagcaggaggaggcgccaggcatgctcagcgtcttccgggagctcaaccccaacgagatggtggccaggaacacccccaagttcgacgtggagcggaaggagggcggcgacacccgggtggagatctactgcgccgccaagccggggctgctgctgtccacggtgagcacgctggacacgctagggctcgacatccagcagtgcgtcgtcagctgcttcaacgacttcggcatgcacgcctcctgctccgagatgcagagggaaatgatcagcgccgacgcgataaagcaggagctgttcaagaacgctggctatggcggaggctgcttgtagaggggcatgtcatcatggcatgggaggaagaagaagaagaggcagcaataaattaatcttaagcagctgtgggagcagcagtagtagtatcagttcaggtccagtagcgggaaaggcaggcagggaanagatttgggaggcctttntgcaatccgtctcccccatcataacccacttcgatctatccatgttagcagtaccgtgtccgttcgtcctatagcatcatgcaggat

SEQ ID NO: 129808 - DNA, 277 bp, Zea mays
  Clone ID: MRT4577_49857C.1
gactaagactagatcgcgagcggactattaacttgaatactccttggaaaaaacatgagaccgggtaggtgatctgtcagccttagtaaccagctcaccaccaaggaatgtgaactcctaatagacctgctagccagagaacgtacatttcaagttctttggacatgacaccgtaacatgctatctaagctagagctatgatgaggcctatgctaggctgcctgatgctactctggcaaataaaaagggctctcgaataggatggatgaaaacaatt

SEQ ID NO: 129809 - DNA, 1539 bp, Zea mays
  Clone ID: MRT4577_49858C.1
gtacccccgggttcggccggcatggcactggcatccccctctctccctctccccaccacaccacctccctcctcacaagccatagccgccgcctctttctgtgcttgccctctcgccatcttcgagtacgacgagaaggcggtgatggagctggacgagcaggccttcctggaggagatcctctccctgcggagggacgcctgggactgcaatgccatgggggacttcttcgccccggccgccatggactgcaccttccaggaccgccaccaccaggcgcccaccgtcagcgtcctccccaccttcaccgcctcctacgcccagccgcagccgcagccggcggcggcgcccggcttcgactgcctcagcgaggtctacggcgccgccgcgttcggcgggcccaatgctggtgactacggcggcgagatggggttccttgacgtcgtcgagcccaaggcggcgtcggcggcactggtggacggcgccgcgggcctcggggcctgcaaggtggagcccggcctggcggagagcggcggcgcgttcggcgctggcgctggcgctgcgccgccgccggccctggcgtccaagaagaagagggtcgaggggatgccgtccaagaacctgatggccgagcgccgtcgtcgcaagcgcctcaacgaccgcctctccatgctacgctccgtcgtgcccaagatcagcaagatggaccccgacgttcgatcctgggcgacacgatcgactacatgaaggagctgctggagaggatcaagctgctgcaggaagagatcgggcagcagcaggaggaggcgccaggcatgctcagcgtcttccgggagctcaaccccaacgagatggtggccaggaacacccccaagttcgacgtggagcggaaggagggcggcgacacccgggtggagatctactgcgccgccaagccggggctgctgctgtccacggtgagcacgctggacacgctagggctcgacatccagcagtgcgtcgtcagctgcttcaacgacttcggcatgcacgcctcctgctccgagatgcagagggaaatgatcagcgccgacgcgataaagcaggagctgttcaagaacgctggctatggcggaggctgcttgtagaggggcatgtcatcatggcatgggaggaagaagaagaagaggcagcaataaattaatcttaagcagctgtgggagcagcagtagtagtatcagttcaggtccagtagcggaaaaggcaggcagggcaaagatttgggaggcctttttgcaatccatctcccccatcataacccacttcgatctatccatgttagcagtacgtgtccgtccgtcctatagcatcatgcaggatgcaaaggttgccctgtgctgctgaatctttctcctatatactattctatttaattaacaagagcaaagctcgctgcctttcttctgatgaaagaaaaaaaaaggggtgcatctggcgactagctctcttcttatctgcagggttctatattcataagcatgttgttgcaccacacaacct

SEQ ID NO: 129810 - DNA, 188 bp, Zea mays
  Clone ID: MRT4577_49859C.1
gggaagggggataagttctttgataaagagtttacaaaagcacggggccagaaactccaaaagggccgttggcaaacacccccgccctaaacgggggaagcacccggagggatcggccccctccagaaaataaaagggagaaaggggccccccccgagggagggaacacggacccccctcgcgagccg

SEQ ID NO: 129811 - DNA, 753 bp, Zea mays
  unsure (1)..(753): unsure at all n locations
  Clone ID: MRT4577_4985C.1
gagatccccttttccccttcgtcctcctccccccttccgctcccagctagggttttgcctgccctcccgcctgccgtcagcgacgcccggcgcagccagcgcgatggagcccacctcgtcgtcggcggtggcgaggcagacgtgggagctggagaacaacatcccggcggccgcctccgacccggacgccatggacgcgatctaccgctacgacgaggcggccaacgcgcgggcccaccaggagaagccctgggccaccgacccgcaccacttccgccgcgccaggatctccgccctcgcgctcctcaagatggtcgtccacgcccgcgccggcggcaccatcgagatcatgggcctcatgcagggcaagttcgagggcgactccatcatcgtcatggacgccttcgccctccccgtcgagggcaccgagacccgggtcaacgcccaggccgacgcctacgagtacatggtcgagtactccaccatcaacaagcaggctggaaggttggaaaatgtggttggctggtaccactcacatcctggttatggatgctggctctcaggcattgatgtttcaactcagatgcttaatcagcagtttcaagaaccatgggttggctgttgtgatagaccctacaaggactgtttctgctggtaaagtggacattggnagcttttaggacatacccaaaagattacaagccaccggatgagcctgtgtctgagtatcagaccataccactcaacaagata

SEQ ID NO: 129812 - DNA, 591 bp, Zea mays
  Clone ID: MRT4577_49860C.1
gtaatttatatgaagtttaggacttattttggctataatatgtgcagatgacagaggtgaatctctagatataggttcaggagggggttaattgaagccatttttgtaatgaatgtggtgggtatctttttaaaccaaaaaatggatttgatggctatggtcttctatgaggattactggattagagtgtacagctgcattgattgctaccaaagtagtatctaatctaattagtaaaatgacgtatctctttttttctgacacgcttgcgacactgaggccgactcaaatatctcattaaacaacatgtgcatgtctacgtttatgtgtaatgctcatgtcgactgcacataggcgtttcttagcttgatctgatggtgatcaattgaaaattgttgttgtagattttcctggagatcgaattgtccttttgtgatcctaggtttgatacagtgctgcaattttctgctctcccaccgtacataatgcgctcgaccacattaattttgtcgttaagagtcaaacgatggtttgtgttcacaactgaaaccattggattttgtttttgacatcctcaaggaggaattaacc

SEQ ID NO: 129813 - DNA, 446 bp, Zea mays
  unsure (1)..(446): unsure at all n locations
  Clone ID: MRT4577_49861C.1
ccttttccccaaaagcggcgcgccacagcccccgccaccagagagancagccccggcggcacgcggccatgacgacaccaaggcgacaggccgacacgaagagggcaaagccccagaacaacctcaccaagaggggcgcagggcccgagaccaccgccaaaaagagcaacgaccacccagngggaccgacagaccgaggagccancaaagcagaggccattggatcatccttgttccaaataatcatgacagcgaccagaggtgggctgacctgaagtcaccgagctaaaaccagaaatatatcttttttttttttgccaccccccccccgagcnggagagcaaacccgcccaggaatacgcagcgccaacgacacaacaagacagattgcagcatcataagatgcttagactgaatgttggaaccatgccaaggccgaaaatttc

SEQ ID NO: 129814 - DNA, 299 bp, Zea mays
  Clone ID: MRT4577_49862C.1
ggaaccagccgagcggaagacggagacaatacccctccacacatgcctgcgcctaagccgaacgtgagctacgaggacgaccgcacccgcgcgccagggaaagccgacggggggcgttttattacaagggtgggatgcggcggggcatctttgagaggaagagggcggcagagagaagagcatcactcggcgagctagacgactagaaagtgttgcaccctgggagctgttcatggaccagaggtttcaatgaggatggcgctggtggatccggacggggctcggcaatggccctggcc

SEQ ID NO: 129815 - DNA, 291 bp, Zea mays
  Clone ID: MRT4577_49863C.1
ccgggcagcatggcggagatcagccgtctcctgccacctgtgcgtgtttgttatcggtgcattgatctctacgacggcatcggtgacggcgaccacagttcagtcacggaaggcggggctcattacctcgcggctcagacgcactggattccgggcctagctgatggatgtgctatagccggacaatacatcgggagaaacttgggcggcaccggcgtccataggcaaccgcatgttctcatgatgcgacttctgtcctcgttgactcatccagatgcagttacaccgacc

SEQ ID NO: 129816 - DNA, 1988 bp, Zea mays
  Clone ID: MRT4577_49864C.1
ctaatttatattttttttaggacttattttgggtataatatgtcagtatgacagaggtgaatctctagatataggttcaggagggggttaattgaagccatttttgtaatgaatgtggtgggtatctttttaaaccaaaaaaatggatttgatggctatggtcttctatgaggattactggattagagtgtacagctgcattgattgctaccaaagtagtatctaatctaattagtaaaatgacgtatctctttttttctgacacgcttgcgacactgaggccgactcaaatatctcattaaacaacatgtgcatgtctacgtttatgtgtaatgctcatgtcgactgcacataggcgtttcttagcttgatctgatggtgatcaattgaaaattgttgttgtagattttcctggagatcgaattgtccttttgtgatcctaggtttgatacagttctgcattttcttgtctcccgtcgactgaagaagctctttgctccatcaaccattgcagtgtatatgggctcatcgtgacacaatacggagacctggaagaccccatcagtctcctgcgaaaccgcgaaagcaagcagacgattagctactcaaagcacatataccaattaaccacttcagaccaaagtacataatgcgctcgaccacattaatgttgtcgttaagagtcgaacgatggtttgtgttcacaactgaaaccattggattttgtttttgaaatcctcaaggaggaattaacagagagcttgctgccgcaaagaaggttgctttgctacttatatgaatcttcggccttaagttcataccacatctttttctggatgtgcactggcaattctggcagatttctaacatctgatatcgggagaagaaggcattttcaaggagaatagctgatctgttgatgtgcttggccttaagactgcttttgcaaccttcatgggtaagattcccatcaacaagaaaaacaagaaagatagctactaagaggagccagaagagtgtatcatttcatttgttgcttcgttgtttgagtttatgcttctgtttattccgttgtgcagaaactatgcttgatattgggttttcttaaggaactgctcacaacagtgcgcttgtcagatagttgtattctgcaattagcgaaaacatgctttactacgttcttggtggataattgaaagcgattggggttatttgcacggtgttttcatcatacacacagcacaggagttacttggttgatgaaacacttcaccttattcgtaagttgcagttttccaagaatgtcgttagaacctaccatcttgcagatgaagaccaaaagcaaaaccagtacaatgctagctgagcagtagcttcagatttcagaagtaaataacagggcagcttatttggatttgcaaagaagcaagcacgaaagcacctgctggtttgcactccagcagcagcatcggacagacttcgtgaaggcaagtgaaaagaaggaaatgtagtcccccctggactaggggtaggcaccacaagaatgaatatactgtggaaagggcgttctttatcagttaccatgaccagtcaccagcagtccagcactggtaagaaaacaagaggccaagaggatgtgccaggcagtgcgagtgtgcgacacgtccgaaaaaccggtcatcacagcagccaaaggcactgtcagcttgcacacacagtgaaaagatcatccactaaacaagtggcgatgagcccacaagcacaaaagtttgcgagcataagaattggactttgggttatgctattctgattgtgcaacagactttagagttccaacaaagcatttgcaaaccgatgctttataatagagatttattttgacataatttgtgagatatcgaagtcgatgaatatatatatgttggtcgttgtcgtgtaatcgttgtgcacaaacattttgtaagatatttcgtgtgccgttgcaacgc

SEQ ID NO: 129817 - DNA, 1789 bp, Zea mays
  Clone ID: MRT4577_49865C.1
aattcggcacgcgggcttctttccccctccccacgcgcgcgcaccatcggcttcctcatcacccaccccaccgagactgtactctgtagccataccacacccctcctaccactgcaaggccggccggcccgcccgctcgccgcttcctcgcgtctcgagtccgtgcctgcctggtgcgtcgatcgaccccgagtcccgaccccggccgcctctcacggtggtggtggtggttcttcgacgccgcggtgggcggggggcacgcgtgtggttcgtgcaagccggagggagggggttctgctgtgactgtgatggcggcggcgatgtgcgtggatgacgaggccgcctccgccgccgcggaaagcgcgggggtcgacaagctggatctcggcgcggccgcgggcggcaagaggagcgtctacctcatggactgcgcgccggtctggggctgcgcgtccacgcgcggccgcagcgccgagatggaggacgcctgcgccgcggccccgcggttcgccgacgtgccggtgcgcctcctcgccagccgcagggacctcgacggcctgggcctcgacgccggcgcgctccgcctgccggcgcacctgttcggcgtcttcgacggccacggcggtgccgaggtggccaactactgccgggagaggctccaggtactcttgaggcaggagctgaggctactcggcgaggatttggggcagactagctgcgacgtggacatgaaggagcactgggacgagctgttcaccgggtgcttccagaggctggatgacgaggtgtcagggcaggcgagcaggctcgtcggtgccgtccaggagtcacggccggtggccgccgagaacgtgggctccactgcggttgtcgccgtcgtgtgctcatcccatgtggtggtcgccaactgcggggattcgcgtgccgttctctgccgtgggaaggagccagtagagctgtcgattgatcacaagcctgacaggaaggatgagcgcgcgaggattgaggccctgggaggcaaggtcatccaatggaacggctatagggtctccggtatacttgctatgtcaagatcgattggggaccgatatttgaaaccattcgtcattccaaaaccagaagtcaccgttgttcctagggcgaaagatgacgactgcctcattcttgcaagtgatgggctgtgggatgtagtgtcgaatgaagaggcatgcaaagctgcgcgtcggcagatccagctgtggcacaagaacaacggtgtcacatcatcattgtgtgacgagggtgatgaatccaatgatcctgctgcacaagctgctgctgattatcttatgaggctcgcactgaagaagggtaccgaggacaatatcactgtcattgtggttgacttgaaacctcgaaagaaggccaagagcaactcataacactgggatggatccatcacggtagagctgaccatgatatgtccaaaggcttctgctgctagttgttggtcgtccgcaagagacttgaccccacaggtttttttcgttgggcctcaagaactgtaggtgcattttccatggagggttatgatgcttaaccccactctggtttctggtggctaaaacattctctccagtcggcttctaccatgagccctggcacttagtatattcctaatgttgtatgatggttgaacttgtaaagagacaagcggctgagacggtcactaaaattaacatattgttacttcatgattcaaggactatccatctgcctgaatccgatgaaagttttgtattgcagcttc

SEQ ID NO: 129818 - DNA, 885 bp, Zea mays
  unsure (1)..(885): unsure at all n locations
  Clone ID: MRT4577_49866C.1
cattgggagctggccgcggcggggaacttcttctcccaaggtactaaccacagcacaattacgatggctcgcttccaggaataccagatcatcgggcgccatctgccttccgaggccaaccctgcgccaaagatctaccgtatgcgcatttttgcgcccaacgaggtcgtcgccaagtcacggttctggtacttccttggcaagctccgcaagatcaagaaggccaacggtgagatcgtctccgtaaaccagatccacgagaagaagccccagaaggtcaagaacttcggtatctggatcaagtacgactcgcgctccggcacccacaacatgtacaaggagtaccgtgagatgtcccgtgtcgccgccgtcgaggctctctaccaggacatggctgcccgtcaccgaacgcgcttcaggtccgttcagatcctcaaggttgttgaggttgagaaggccgatgacctccgccgaccatacatcaagcagctcctcaccaagaacctcaagttcccgctgccccaccgcatcaacaagaaggcgggcaagaaggtcttcgctgcccaccgcccatccactttcttctaagcgtgtttcttattacggagtgcggtctggatgggaaggattgttatgggtttccctcggttatgcatgcttcacgaaaagaagtacactaggaacgaatgaaaatccctgatacctccgttcgagtcatcgagacgcgtgatgctacacagggtgctggccagggttccgcaaatagggcaagtctcagactaccagatgagggtatggtacgagctggacgatagacatgaactcatngaattgcgagtncacatgtggtattgcatgtgcctttgctttatctctgacatgcaa

SEQ ID NO: 129819 - DNA, 363 bp, Zea mays
  Clone ID: MRT4577_49867C.1
attcattgctgctcataaatctggcttcgtctgtccatatatataaatcgagggtttcttttatttattaatatgtactgtacctttgctcccacctaccttattattggttgcatcttagtctaatctggcaactaggtcactgaaacttgctacctgttcaaaatatcatttgatactactgggttaggaaataccagtagtgatttcattcatcctcccaccaggtgttgctgcagactccaaattcacttttacatgttcgaagcacagctatgtattgtagtcccctttaatgctcttgtagcaaggaaatttttattttgatgaaccatcataagacacaagtgggttggaggactt

SEQ ID NO: 129820 - DNA, 862 bp, Zea mays
  Clone ID: MRT4577_49868C.1
ccggccgggagtcttcatcaaccgaccaagtcaatttttcgaggtatgtatgacttacgcttgcagcgagtcgaatcaaaaaaaaggatgatgcctttcaccatggcaaagggtggcaatcgaggatatcgtcgtcgaccgtgaaaaaggagaccgatctttcaacaatggccggaaatatctatcacaaactggcgactgtatcctcgatacgctactcttcagcaatgggcggcagaaccctcgcgatcgatcgttgagggcactctcctcgctcaaaggccctcgaaaggctaatatggacttttgtcagatacctcatttccccgtctcgacttgagaatctcctcaaaacaccgcaaaaatggtccgcacttcagttctccacgatgcgcttaacgccatgaacaacgccgagaaggctggcaagcgtcaggtcttgatccgaccttcttccaaggtcatcatcaagttcctcactgtcatgcagcgacacggtatgtgacacgaactacacgcatctttcccttccgaatccgtgtcaagtctccactattcgacatggcaaaaatggtcgacggtcctacttcaccatgatccaaccaccatatgccgtcgaatactctcccacctccatcattcggcatgataactagggctaccgtcgatactgccccacgactcagcccctataaattgccgatagatccaaactcggagacttacacgtttttcggaatccttctcatgatgtctaacgtttaatctcacgaaaatgcctaacataacattcacgtaggttacattggagagttcgaggagattgatgacacccgatccggcaagatcgttgtccagctca

SEQ ID NO: 129821 - DNA, 573 bp, Zea mays
  Clone ID: MRT4577_49869C.1
gttttgtttttttttttttttttttttttttttttttttttttttttttttttttttttttttttttttttttttttttttttttttttttttcaaccccgaacctttaagggcctggaaaaattgggcctaaaaaaaacaaagggggggggggaggcacaacctttttttttggccccacaaatttaaccaaaaaaaaaaccaaaagtttgtaaaaacgggaaaaccgaatttaaaaaccccagggccctgaaccacaaaaaaaggataagcccctggggggggaaaaaaaaaggaaaaaggggcaaccaagccgtggggggggggcttttttaagaaaacccggggtcagccttttttttgtccaaaaaagggagggaaaggggtttggggctaatttccacccttgaaccccctaaacttgggggttaatgcggctaaaaaacccccccccttttgatttttaaattgaagggggggggggcgggcaaaaagggcccttgccctttttaggccccccccggtaaaggcttgggccccccttgcccgccggaaaaaaatttgggggtggcg

SEQ ID NO: 129822 - DNA, 1944 bp, Zea mays
  Clone ID: MRT4577_4986C.1
aattcggcacgaggacgccaccggccaccgcgtcccttccaccggccaccgcgccccctcgctccggcccctccaccggccaccgggcggcccgccccctcgccccggcccctccaccggccgccgcgcgcccgcgcagctccggcggcgcgcgcccccctcggcccggcagcgccagcgagcgcgcctcggccccgccaccgccctcggactgtagttcgagataagctagcaatttttttaggccagtacgcgtctcttctctgttttttttttctgctgaagtaatttgagataaatttgtgttttacctgaagcttctgagctctagactggtgcttccatttttagcacaagctagttatgttagcttctgtttctctaatgaaggtgctagcttccatttgatctgaacacgcctaactgagtggcaagtcttccttgtcaattatgttacccagtcagtaggtttcccttgtggcatgtttaactttttaataaaaaaacaatctgacatgttattgctcagttacaggcttggcaactctgaatcggctataatgaacatgttcagttttagttccttctgccttgtgatgtaaaccacagtacagtactttcttgcattcaattgtaattttctaatagttcctctgatctcgtgttgaactttctgtgttgttatttatcctgatataggcagcaacttccacaggacctcaagccgccatctcgccacatgacctgattgcagccttgcaggcacagcacagaagcagggttgcgccacctctctgagtgtcataggttggtgcataggcacacacacacaggtagccatggcatcgcgtaagcttctcgtgggcctcacagccaggaggcagctacaatcccgcactcagcaactattctgggccaccagtctccctgaagctaccacttctcggtccctaatggtggctgctgcaatggcgcggttatcggacaggtcttcagctccttttatcttatcttcaagggccatctcgtcgacgcagcctgtgatgcaatctacaggagatgtgtctggctctagcccatctgcagtggatcacaagttagcaatgcaagaggatgagtttcacaaattagcagatgagacgattcatgatttgcttgaaaaacttgaggagtatggtgactccattcagatggatggtttcgacactattctgggcaaccagtctccctcaagctaccacttctcggtccctaaatatgttataagcaagggcgcggttatcggacaggtctcccgctccttttatcttatcttcaagggccatctcgttgacgcagcctgtgatgcaatctacaggagatgtgtctggctctagcccatctgcagtggatcacaagttagcaatgcaagaggatgagtttcacaaattagcagatgagacgattcatgatttgcttgaaaaacttgaggagtatggtgactccattcagatggatggtttcgacatagagtacgggaatcaggttttgacattaaggcttggggatttggggacatatgttataaacaagcaaactccaaacaaacaaatttggctatcttctcctgtgagtgggccttctaggtttgattgggatggaacagctaatggttggatatacaagaggactggagtgaaccttgtgcggcttctggagaaggagattggtgagctctgtggtactccagtagaactttagtaagagtactggaaatgccacacagctaggttgtatggagagcagtgctctgaatgtcgaagtgtagtacacaaaactttttttttgttctacacatttgcacatggtttggaataaataacttcccctctctggtagcggggaacagtattattcggaaatggtgggagtaaattttgccctaaaaaagaacacgaaaaagaa

SEQ ID NO: 129823 - DNA, 633 bp, Zea mays
  unsure (1)..(633): unsure at all n locations
  Clone ID: MRT4577_49870C.1
cccgggcgaanatggggcgtttatcggcggttgccctcggcgagccggcgggcagcgatgatgaagaagaggaggatctggatggggagatgcagaaattggagaaggagttgttggagtttgatcctggttttacggaggagatgaccgtggaggcggggaaggattggtcgaagagtttgatgcatgcatttttgaggggcccgtggccgtttgaggcggagagtacgagggagcgacatcagttgcatttgaatgttgagaggattcgggtgccggaagttgtgttccagccagggatcgcgggggtggatcaggcgggcgttgtggatattgctgtcggcgtgctggaatcgggtttcagagatcaaggggatagggaaaaggtgttgaaggatgtgttcttgactggggggaacacgctttttgagggtttcgaggagagattggggagggaactgagaagtcagttgcctaccgagttggaagttaagttgaggaaagcgagagatccggttttggatgcttggaagggggcggctgcttgtgctagggaggagggatgggagagaaagagtgtgngtttggggagtttgaggaacggggggctagtttctctggtacatgagaggg

SEQ ID NO: 129824 - DNA, 477 bp, Zea mays
  unsure (1)..(477): unsure at all n locations
  Clone ID: MRT4577_49871C.1
cgtactcggtctcggnaattcccgggntcgactccacgtccgtctcgggagcacccaagcacaagtncagcacctcggtctaggccntgtgcgccatcnngccgctcggcgccttgcgctnactctacganngaagcacgaggggcgaagaagggactctccgagctacgtcgctatcaggcacatatgatcacggagggagggtcgctgcnctgcggcggcccggtcggcgctcggcgtgctaccgtnnattccacgagcactcacgaagaagggaagaaggggacctacaaggacccgccgaaggagggctagcngtgtcgagaagaaagcactctatccaccttcttcgggctgaaaccgtaagtaccggccccggcgcgccgactncgagctaagctaagctccgggcgcacaaacataccacacaacctggtttaaaattctgtactggcatgccgtgtgtaaatttggatg

SEQ ID NO: 129825 - DNA, 1537 bp, Zea mays
  Clone ID: MRT4577_49872C.1
cccgcgtccgcaaaagggagggacagcccacgcgggccggggtgcgtggctccgcgctctcttccgccgccagtccgccggctcaactccagccgccgcgtgcccctcctctccccacccgatgcgggccctcgcgcgcgccgcgtcgctgctccgccgcgccgcggggtccgcgcctactacggcgtcgctgtaccatccgccgcggaacgtaggcccttgcctcgtgaagaatctgccaggtttctttttcaatgggtattctactcttttggctccaccaaatgaagtgttgattccaccagaactcctttctagcaggactgtgtggacaccagatcgggagcttgggcagtatgaagacctggtagctagggtcacaaacttccataatgaggacaagggcttcatggttttggatggcgatgtttttgatgttccaattaggaaggacattgttcaccgagtagtaaggtggcagcttgctaaaagacagcaggggacacactcaactaaaactatcagtgaagttagtggcactggaagaaagccttacccgcaaaaaggaaccggaaaagcacgacatggaacactgcgcggtgcccagtttcgtggtggtgcaaccatgcatgggcctaaacctcgaagccatgcaatcaagctgcagaagaaagtacggcggctggggcttaagattgccttgtctgctcgaactgctgaggggaagctcttgatctttgaggacttggaagttcctagccacaagacgaaaaacattgtgcaatacattagacagatggatgactcaaagaaggttctgttggtggatggaggcgacattgataagaagctaaagttggccactcaaaaccttcactacgttaacgtacttccttccattggcctcaacgtctacagtatcctccagcatgacacccttgtaatgactcgggccgctatcaacagaatcgtcgagcggatgcatacccccatcaaccgctagcaaggagggtttctgagtcgcaccactgtttcttacagccagcaacctgtgctttttcgttccctgttaaagctcgaaggtttcctgttatcttggtgctaacatggagctgcaacgtgagctgtttattttctgtcagactggaggtaccgaccgaggtaggagggaaatgttgtggccttttgtaagcaggtcattggatgtttattttagattatttttttggcgttttacccacactacccttgaaacttagtgagtacttatctaccaaataagattatgtaatcctggattatataggtccaaagcttgggacagcaatttgtttagagtcctgtataatctagctgtcacgtcgcaggactcacgtggagaaagatgaagggatttgcatcgtttagggtttagtaagaggaaaaagaatatatatttacttggatttggcccattttcatagaagttggctgaaaacgaaaggtttggttggcagaacccaattttaagagccaaagaaaaaaaaaaaaaaaaaaa

SEQ ID NO: 129826 - DNA, 232 bp, Zea mays
  Clone ID: MRT4577_49873C.1
atagtggaccctaatattttttcattattgaaaggttgtttatagattctaattgtacactttacaggttcaaaatttcctgcattgtttaagctgtagggtctattctaccagaataagataatttttagtttatcctatttattcaagggtgtctctatatataattagttttctgtaactgaaacgaatatttaacttaatcaggactattatattttattcattatta

SEQ ID NO: 129827 - DNA, 246 bp, Zea mays
  Clone ID: MRT4577_49874C.1
cacgcgtcaggagacttcatccattcgcggtgtgcctctctgcttgactgtctcaaatttccactaagactgccatggcggaccagcgcagcaagcaggatcttccccagttgaagggtgtattcagtctctacgtttttgatagacaacgcagcatcgtcatgagtgcagttgtcatcgtcaggcactgattcgagtgaagatttcgaggagctcagcctcaggacctcatcccgcacgttgatg

SEQ ID NO: 129828 - DNA, 460 bp, Zea mays
  Clone ID: MRT4577_49875C.1
gataattttctttttttttttttttttttttgtttttttttttttttttggggggaagcaagcaacatatttttttagataatgggaaaaaggttcccggcctacattaaagatgacggccgtccaaaaaacagtagtactgccagaaaataaaagaagccacaagcggcaaaaagacccaagcgcagttgggattggaataactagccactagttattctatttctaaagctccaaccgggcttggcgaagatttgcatcattgagacttccagggtcctgcaggcaactttgatccttacgatgtccttttcacgcctttggagaagcccccagaaccgacaccaataagtccctcgaaagagtacctccgttgcgctccgccttcaggggttcagccctgatcaaggcatgctcgtctgatgtgttcgatcttctttgcgttctgcaaccggggact

SEQ ID NO: 129829 - DNA, 220 bp, Zea mays
  Clone ID: MRT4577_49876C.1
tcgtctcccggacctccctaaaaaaaactgctcggttgctgctcctgctccgccgcgccggcatcatgtgtggcatcttagccgcgctcgcctgctccgactgccactcacgcaaagagggctcgcatcctcgcctgctccagaaggctgaacccccggccctttctattggtcggggtctttactagcacgagggcaacttcctggctcagcatcgact

SEQ ID NO: 129830 - DNA, 867 bp, Zea mays
  Clone ID: MRT4577_49877C.1
gggtacctcgaggccggccgggaccgctctacggccaacggccttatcccacacgcgcagctccctccttcccatctcccatggccgagcgcccaaccaaactcctccctcgtctccatggcgcgcgctcctccctgcttccctgctccgctcggcaacaagctcatcctgcgcgggcccgtggtccctgctcagagcttccccggcgtcattcccatggccgccggtgctcgcatctccatggtggtcaggagcttgtcccatggttgccagcccaccatggtggcgcttcgttcttcccctgcgctgctccctgcttctctgctggccggctccgcggtgcatgcgtcgcaggggcacgcgcccaccgcgctccagtaccccgccgttggcttctgctccaactccagccccagctcggatctcgactttgtgctcgacgtctctggcgccagctgctgtgccctccccatgccagctcgctggtgacggtaggtctggccgtccctgctccccggccttcatccccgtcgcgccgattcgctcgccctggcgtcgatcccgtcggtgctcatgtccctgtcatcctcgcggtggatttactccgtgtgcttactctactcgccgatcttctctgttgagacgcgcattggctgtcttccttctccctcggccacggctccttggtgccgagcctccatccccagtccgccgtcaccagctccgtgcctccatccatggttgcgcgcgcgagctttattgcgagagcaccgaactctacctacaaagcctcgccggtgaagtccgccgccgtcctctggtctcagctcgccccagcactcttgcttgcccctatgctctggccgc

SEQ ID NO: 129831 - DNA, 639 bp, Zea mays
  Clone ID: MRT4577_49878C.1
gatgtaatagtttgtagattcctctattcaattttttgagtttaggtaattaactttatggatcatcttaagtcctcatggttggggagtatgtactaacaactaaagtcaagcctaggcaaaatgaatcaaacaagtaaagcgtgtggctgcctgtagcttactgacaaataaaaacgaatcaagttggcaccatagtaacacaagagaagctgtcattctccttttattccccacgcgtatgcccacgcgtccggttatttcacagtttatgatggtaacggaacccttgagggagggggaactactgaagggtgtttcatcaagatccaagcaacacatgagatgaaaggagaagggcatgtgatagagagcatcatgtgaacccgatgaagattaccactgtatcatgattcatcagctctaacatgcgcgacccaacactatgcttctccacttcaggacatggatatgactcttctatgtttaagccacggcagcttggtgtatttatgccaaagattttttgagcactaacacaccaaaccagcgcctatgaagtgcttttgtatgatcaccttcttcttgcaccatccatggataatctacgtagctgcaaactgtcttagttacatatta

SEQ ID NO: 129832 - DNA, 1761 bp, Zea mays
  Clone ID: MRT4577_49879C.1
gaccctccgggcctgccgggctgacaatccattccaagtctatatgctcatattatttttagtatctttgtattttacttccgaaggggcgtgtttatatgatagaaaaagtattacaacactaagtctttgccaccagagtttagcagcaaattattttttgccatcatacatgcttagattttggaggcccaagtgagcaggccttcctgttatctagaacacaaaggccatttactccattgcagtggatggagttggagcaccaggctctcatgtacaatctcaatgcaatggccccggtaccgtaccttccagcctgctcatttcaatcagcaagaacttcatatcatccaatagagatatgcatattctgaatcataaggctaaggttctctactccaaaactactagcatttgcaataaaacaaaaatagaagataaaaatattatttgcacaaatgaatgcctttgtaatgttacatggtaaataataatgttggcagctttgtagtatcagaaactacatgagccatttgctcattgtattggatgtttctatatctggagttgtgctgttagagtattaaagttctacactttacgatgtaatagtttgtagattcctctattcatattttttgagtttaggtaattaactttatggatcatcttaagtcctcatggttggggagtatgtactaacaactaaagtcaagactaggcaaaatgaatcaaacaagtaaagcgtgtggctgcctgtagcttactgacaaataaaaacgaatcaagttggcaccatagtaacacaaaagacatttattatgtgttatttcacagtttatgatggtaacagaacactagagggggaactgctgagcgtgtttcatcaagatccaagcagcacatgagctattgattcatgatgaaaggagaagggcatatgatagagaggatcatgtgaacccaatgaaggtcttataattttcttagccactcagattaccaccgtatcatgattcatcaactctaacatgcgtgagccaacactatgcttctccacttcaggacatggatatgactcttctatgtttaagccactacaacttggtgtatttatgccaaagattttttgagcactaacacaccaaaccagcgcctatgaagtgcttttgtatgatcaccttcttcttgcaccatccatggataatctacgtagctgcaaacagtcttagttacatattactgtactgaacatcctttcatagactacttgtacactgcctttttagaaccgttgtaaaacctcatgcgatacgtctgcgcctttgaaacagagatcaactgaacaacctgttcaatgtttccttctattgcatatgtattctgttgtcatactatgtccaacaatgcatttatattgcgagcctatgaagtgcttttgtatacaaagatcacctgcttcttgcaccatccatggataatctacgtagatgcaaattgtcttagttacatattaaaaccaaaaacttgttgttgaaggaactccaaaaattttaccatgaaaaaggggaaaaatttaaaacttttaaaaacagggggccgcccctttaaaggaccaaactttactgacgggggcccacaattccataatgttttttttggggaacctaagcgaaaccagggggcacacttttaccccctgcgaactggaaaaacccccagggtcccccaatttatcagcctggaagcaaataccct

SEQ ID NO: 129833 - DNA, 317 bp, Zea mays
  Clone ID: MRT4577_4987C.1
ccctgcccatgacagtttctcagtttctaaacttaggttcacttggattatctctggggaagttttatgtgcttgtttctagtaggcaaataattttgtttaccaacatattttctttgactgttaagattaactggaagaaagactgaaaacttattaaatggcacatgcagtacttcacatattttaaccaatattaatacatgtcaaagagaggaaagaaatgtcctgacttttctagatacatagcttttgttacgcacctagatataggttgtctagaaaagctaaacaacttacaatttgaaatggatata

SEQ ID NO: 129834 - DNA, 693 bp, Zea mays
  Clone ID: MRT4577_49880C.1
aacttcggcacgagggttgccttactttttttcatccttttcaatgtcttctaaccttagatttctggattctacgcacaaagcgtttattagtgtcaacatttctacacttccatttaaccttgaaatgttcacccgtggatcctaagacgcaatactaattggaagagaggcaggagaaagccgaagttgacatgtgaagagacagtaaaaggagatttgaaaggatggaatgcatccaaagatttagccttggataggagcaaatgaaaacaactatccacatgctgaactttgattagtggcttctgttgggtttcaattgtagcctacccgacttgcttgggactaaaatgctttgttgttgttgttttgttgaaatgttcacccgtcgggattggagaactctaaaggaatgcatggatatggtcaatctatcttttatcttcgtagaggtggttgttggaatccaatgaatttaacacatccacactgcccctgttggtattctatcactcgaggctaaaacatagcacttaccaatactatggcttacatgttgctatgagatgccagctagtgtctgtttccgattcattccttaatatttagatatattccacttgcagacctgcttcttgggacattttttgtctgtctctgctactactaacataatggaacctattttct

SEQ ID NO: 129835 - DNA, 105 bp, Zea mays
  Clone ID: MRT4577_49881C.1
cagagcggtgtcgcacagcgagaagactcgaaggtaacaacctggctgctgtgtggtgagaaatggtatacgcaagaagcattggacctgattaggtacttggtg

SEQ ID NO: 129836 - DNA, 206 bp, Zea mays
  Clone ID: MRT4577_49882C.1
aaaaaccaaaagtttttttataagccttttttgcaagggaaatgcaagctacccgggcagccttgtgtttttttttcacgagcaaaagcccaaacggggacataacgtcccgatacacacttgggttatgggggaggcctaatttacatggcctttttatgggaggggtttttatccatttgggttttttaacactaccctttttt

SEQ ID NO: 129837 - DNA, 1036 bp, Zea mays
  Clone ID: MRT4577_49883C.1
cgggagtcctgatttcctgaaacacagatcatcatcattcatggtcatggctatggcaaactcggcaacgatcctgaccgtcgttctggctctcgggctagcgttcctccgcgccgcagctccggcctccgcgcagaactgcggctgcccgccaggctactgctgcagcaagttcggttactgcggcaccagcttcgactactgcaatgccaacacgtgccagtccggcccgtgcacggccgggggcgccggtagcggcggcggcgcgaacgtgagtggcgtcgtcaccgacgcatttctcagcggcatcaagtcccaggccgggagcgggtgcgagggcagtagcttgagcttctactcgcgaagggcgttcctgagcgccgccagctcgtatcccggcttcgcccgtgcaggatcggaggccgacggcaagcgcgaggtcgccgccttcttcgcgcacgtcacgcacgagaccggccatttctgctacgtcagcgagatcaacaagaacaacagctactgcaactcgagcaacacgcagtggccgtgcgccccgggcaagaagtactacggacgcggcccgctgcagatctcgtggaactacaactacggtcccgccgggaggagcgtcggcttcgacgggctggggaacccggacatggtggcgcaggaccccgtggtctcgttcaagacggcgctctggttctggatgagcaacgcgcaccaggtcatgccgcgggggttcggcgccactatccgtgccatcaacggcgccctcgagtgcaacggcgaggaccccgccgccgtgaacgcgcgcgtgggctactacaaggagtactgcgagcagttcggcgtcggcccggggaacaacctcacctgctaggaccctattcaagtgttgtgttgggttcatgcatatgcgggcctcattggaaaactcagtccgctgtagtgaagctcagagtttgagagtacctgtttattatatacaagaaaaatgaagcagttcctaatatacagattatatcatttaatt

SEQ ID NO: 129838 - DNA, 704 bp, Zea mays
  Clone ID: MRT4577_49884C.1
ccccctctcgagttttttttttctttttttttttttttttttttttttttttttttttttttaactttttaacccttttgggccctgcctgcccccgggaaactgtaaaaccaaaaactattaatctatttttctctaaatactaagggaccacggggacattggtttatttaaaaaaaaaatacttatatcctgaaatccggcaaatccggccattctctcaatcaatgataaagggctattgttcttttgtggtttaggggaacaatccaacaaacctggaacaaaagcataaggaaataaagactatgcccccactcgaccccttttttttttcttttttcccccaccatccctcctttgggtttctaggattctaaaattaggtgggggggtagaacgggccaacaagggtaaaatgtacaaccccacggccccatgaccccaggaccgcctgaccatcgggaaaaaggaaaaactgggcaacgggattaccaactccccggcgcggagaggggggaatgcaccgttaaacttgctacctagaccgggatcccggccaacacggaacacgggggggctctggggctccggggctccgaaactgtcaaacaaaaatgcaaaccattcgccccccctaataaatttgaaaatcttttgcattttagaaaaacagccaaacgcccaattcccgaatcccgggg

SEQ ID NO: 129839 - DNA, 503 bp, Zea mays
  Clone ID: MRT4577_49885C.1
cggccgggccggggtatcacatcgcccgattgctcgctcaccaaagagctctctcttgctaggcaaggcaaaagtcgaagacataacagaaaggtcttgttgccgatggacagctcacgggttctcgtggacgcttccggaccaccccaagctccccaaggtctaaataggtggctggcttcgcgctggacggatggggcgaggccaatcccgaccaagtcaattgcctacatgtcgctcaaactcctgtcatggactcgctaaagaatgagggtcctgagaaatggagactagtgaagggtcctggaacagttgcaggcctcccatctgatgatgatatgggccacagtgtatatgttcacaatgaacttggggctggtcgaattttcgaccaaggagctaagcttgtctatcaaggtcttggctccggaaagacttatggtggagatggggtcaactacatccacgaatcctttgaaagagggactctttccccttattgg

SEQ ID NO: 129840 - DNA, 231 bp, Zea mays
  Clone ID: MRT4577_49886C.1
ggaatgataattggtgaagtttggaaaaaaaaagtttttaaaccctggagtcatttgaaaaattatcctgaactggggaaaaaaagggcatgggaatgtagcttatataggcccctgcatataggaaggaaaaaaggcgggggtttgaaaaaaaattggtgaacaccaaaacccggtcccggggggagaaccgggaatttcggaacgggtcctggaggggtaaccatatat

SEQ ID NO: 129841 - DNA, 779 bp, Zea mays
  Clone ID: MRT4577_49887C.1
tcttctttctccttccctgcccaccagtccaccgccgccgcctctccccccatcctcctctcccacctcctccggcgtcggccagcaagaagccatggcgagccccgcgcgcatcgacgtggataagctgagcgtggagcagcttaaggcgctcaaggagcagaccgatctggaggtcaatctcctccaggacagcctacccaagatccgcaccgccgccacccgcctcgagaacgccacggccgccctccacgagctctccctccacccccaagggaagaagctgctcgtgccgctcacggcgtccctctatgtacccggcacgctcgacgacgccgagaaggtcctcgtcgacgttggcaccggctactacattgagaaaactatgactcaaggaaaagaatactgtgaaaggaaaattaatttgctgaagtccaacttcgatgaactacttgagatggcgaccaaaaagaagagcatagcagacgaaatgggcatgtttctgcaagccaagctgaggcaggcatcaccgagctcgagttcgtgagagcagagtgcgtgccctgccccttgctttgttgaagcgccggggtagttcgctcgctcgcagccctcagggaacataggacgttctttagctgttttggccgtgtgtgcaaatttctctgagatgatttactgaaacagcctgctctatcgtcagacttcgtcctcgagtaatttggaactcagtatcaaacgtgtgtcttggatgcacaatctacactttagtggctttg

SEQ ID NO: 129842 - DNA, 802 bp, Zea mays
  Clone ID: MRT4577_49888C.1
ccggccgggaaaaataaagccagaccgatcgaggaccagccctgcatccagatctatgttttttgtgcccctccacgtgatccctgctggcggaggtagcaccgtgtgggagaatgacgcccccccacttcggcaatatggtcgcacggtcgcacccgtggtggcctggccacatctacaaagtcaggctcaccgtctcatcgatgacgatgaggtacaccgcggctaccgcgacgggttcatcctggtcgtcttcttcggcgacaagagcacgggtggttcgagcccggcgagctcgtccccttcgaggaccgcttcaccgagaaggcagcccacgccgaggccgtcgacaagcgacgtcattttcttccttgtcaatctcccggcattcgacaccaacgttgactaccaccgccaccagacccaggccgcgcggcaacgatttgtgcgcagaaggagctcgactaagtgcttaacgctgccatggctgatggctcaacgggacgcggcggaaaaggctgcacacaccgtgccagggatggagatgaccacgttgttctcagcgtaccgtcgcgcagtgttttcgcccatagaccacctacgcccaagcgttgggacttcggggtggatcccgagcttccgcttgctacggactagagagccacggcggcagagcgagctcaaaaggaactgattgaagaaagaacaccaccatttgcatcatcaagtatcatttaaggcgtcattattgggcactcttatttgaccatgtcataagatcacccttacacattaaaatatt

SEQ ID NO: 129843 - DNA, 511 bp, Zea mays
  Clone ID: MRT4577_49889C.1
gcgctgggtttgtgggtgggttttttagccttgcgagcgtctcaatgccatgggatccatgagccaccaaccagaccatctggggcgtagcactacatctcacagcagcaataatgggcaaaacttgggcagaaacttggtttctttgtgcgagggggggggggtactatgagctagcgttctacccaaaacaacaacacaggagcttggacgtgtgaattcagacacctagtacacggatatcaactctcggccatggggtcatttccactggctcgctcgagctctggatccttgggtccagcgttcagaagcacctcttcgagccgaggcttccaatggctccaggagcgagaccaccgtgaacttatatttggcagggggaactccaaattgagcaagagctatctgcccagtccggaaaacgggggggaatgcatctaattgtgtggggcaaaggggggggttgtggagaaggtgaacggtatgaccagggatgcatgagcgaccc

SEQ ID NO: 129844 - DNA, 840 bp, Zea mays
  Clone ID: MRT4577_4988C.1
gaagcgacttgcacaagtcgccagccgggccacccccttcgcctacctcccctgccggcgctcagatccgccgccccgcagcaccctcccgcgccggcagcaaccacgacagacaagcagcccggcgcgcggctagctcacacccttcgcaccatgccgggtctggtcgcctactcgggcctcggtctaggcctcctggccctcgccgcgctcgagtcactgcccctccgcgtcccgccgctccggtccctcccacgccgcctcaccacgccgctgcacctccgccatctcctcgccgcggccgtctccgcgctctgcctcatctccgctctcgtctccgcgcaccacctctcgctccccacgctcgccgcctcggccctcttcctcctctattccctcgcacccttcgcgccgctcgcggcgccgctgccctcccccctcctcgatctcctcctcgccgccgccttcgcgcaggagctgcttctcttcgcgcaccgccgcccctccaccgcggctgggatcgagaaccggtacttcgacctgctcctcgtccccattgcgctctgcctcggcgccacgctgctcgccgcgcaccggccaggggagcccgcgccgcggatcgcccgcgcggcgggcctggcgctgcagggtacgtggatgctgcagatgggcttctccttcttcaccagcgccatcgcgcagggctgtgcgctccacgccgccagccgcgctgactacaccattaagtgccgcacccacgaggattaccaccgcgcgcggtccgtcgccacgccgcagttcaacggacacctcgcactgctttggatcgccggcgcggcc

SEQ ID NO: 129845 - DNA, 156 bp, Zea mays
  unsure (1)..(156): unsure at all n locations
  Clone ID: MRT4577_49890C.1
gaggcaaacaccagttacagctgcaaagggaagcactaggatgctgttcttatttcggggaaagggcctcaaggccccttcgattataaccgccggagccctcccccgcttntgtgcncccctcctcctcgttgggggggggggggggggggcctt

SEQ ID NO: 129846 - DNA, 183 bp, Zea mays
  Clone ID: MRT4577_49891C.1
atatcgcacacctctcctgtcctcacctcacctctcgctgcgctccggcgatcgagcttggctagcttggcgatggaggcagggacgtgggcggtggtggtggcggcgacggacgcgtacctggcgtggttctggcggatgacgcacgccctcaccgtccccaagacctccaccgctcatcac

SEQ ID NO: 129847 - DNA, 325 bp, Zea mays
  Clone ID: MRT4577_49892C.1
gcgaaggaaaaacccaacaacggagggacaggaggaaacacgccacaaccgcacgggggctatactgcagccccgctgcaccgctgaaattatcaacaccaaagcgaagagcagcacacagaacccggcccacacaaaagtagttgtacacacactggtcaaggaccatcctaaagactaatggacataaatggtcacagccagaacaaggaagaccgcacaagcccacggcatcgaaaacctgggcaggacaacccacgaccctaaaaagcaaccccagaaagcaaacggacactgcccaccgaactgacggattaaacacccc

SEQ ID NO: 129848 - DNA, 619 bp, Zea mays
  Clone ID: MRT4577_49893C.1
attgggtacctcgaggccggccgggcatcaatgcaatttcagacgttgcccgtgaaagaaaggagacctaccttaccacctatatcgggccacatcaagtatataacaaacacgcctaacatgcctcctggtcacaccacctgccttcttacgcttctgcgttcaacctctgtgcctcgcttgtgctccctgaacaatattctgcatgacaagagtgaatacttccgaaccaatgaacactattgctctactgttcatgttgccattgcccaccgtggatgatgtaggacccggctactcctccaataacctcatcccctactgcatggttgcttctttcgacgacactcaccacctcctcacacatgagataccctctggaggtgatttctatagaaattgatcctatccagcgactggcacaacaactgctgagggatgtgctagctcaagatagctctgatgtgatctactaggataaggctatgaacaaggctaggacttacttctagaggtctccagtacgagccgcggactcatgagaaagaactaccatatctactaacattcaagcacaatgctctatttgagtgcgattgcacacgagttggattctttg

SEQ ID NO: 129849 - DNA, 3425 bp, Zea mays
  Clone ID: MRT4577_49894C.1
acgggcaccaattcggcaagcgtgtcattcttctttttttctcttccacttgtattcctccagttgcagaaagaactgatattgcaggagtgaggattccatctccagctgccacccatctgctgacaagtccgcataatacaaagatcatccttgcggccgggccgggaaggtcttcgccgtggggtcggcaggcagggcaaggctaggcagcgcctctccgcgtgtggtccgtgtgcgagggtccgctcctcctcccctccgtgcacccgtccgggagcggcgtctcttcttcctggtcgaatctccccgcggctgtgaataggaggaggtcgacgacgccatagcaaaaaacaaatccttggaatgctttcggagggtcggggattcgtcgccggctgcctgcactgatgcttggagcgcgcgaatctgctcaagttttgatcttggcgtgctcttgagtctggaatccgggcattcattggggctttgttctcagtttgcaaggctgcaaggccgtgctagtttgaacccatggagactactagcacaacaaatgaacagactgataggggggcgatgtgggagttggaaaggaatctcgatcagcccatggatgcagaggccggcagattgagaaatatgtacagggaaaagtcctaccctacacttgtgctgttacaacttgctttccaaagccttggtgtggtgtttggggatttaggcacatcacctttatatgtcttctccaacattttccctcatgaaattgaagacacggaacaaattattggagcactctcgcttgttatttactcccttaccctgattccacttgttaagtacgtgttcattgtcttgagggcaaatgataatggccaaggtggaacatttgctctttactcgttgctttgccggcatgcaaagataaacactattccgaatcagcatagaacagatgaagaactaacaacatacagccgccacacatatgatgagaaatctcttgctgcaaagatcaaaaggtggttagaggggcaccaattcagaaagaatgtcattcttattcttgttctttttggtacttgtatggcagttggagatggaatcctcactcctgcaatatcagttctttctgcaactggaggaatacaagtggaagagaaaaaaatgaaaaatgatgcggttgtcatcgtctctgtggtcatattgattggattattcagcatgcagcactttggtactgataaagtcagttggctttttgcgccgatagtatttgtttggttcatactcattggagtcctgggcgctgtaaacatttccaaatatgaccaatctgttctcaaggcttttaatcctatctatgtatatcggtactttaagcgagggaagactagctgggcttctttgggaggaattatgcttagcattacaggaacagaagcactgtttgctgatctctcatatttccctgtacaagctattcagattgctttcacggtggttgtgtttccatgtcttcttttgcagtatacaggccaagctgcctatatagctcagaacaaagatcatgtctcccatgccttctatttttcccttccagattctgtactctggccatcattcattgttgcaacagctgctgcaatagttgctagtcaggcaactatatcgatgacatattcgattatcaagcaagcacttgctctagggtgcttccccagagtgagaattatccatacttccaagaagtatctaggccagatatacagtcccgatattaattggatccttctggtattctgcattgctgtcactgctggatttaaaaaccaaagccagatagcaaatgcatacggtactgccgtgataatggttatgcttgtgacaacatttctcatgatccctataatgctgttggtgtggcgcagccactggaccttggtcatcctgttcaccgtgctgtcactgtttgttgaaattccgtacttcaccgctgtggtgcggaagatcgaccagggtggctgggttccacttgtgtttgctgttgccttcctcatcatcatgtatgtatggcactatggtacgctcaagcggtatgagtttgagatgcacagcaaggtgtccatggcatggatcctaggccttggtccaagcctcggtctggtcagggtgcctggtgtgggcctggtgtacaccgagctggcaagtggtgttcctcacatcttctcacacttcatcaccaacctccctgccatccactccaccctggtctttgtgtgtgtgaaataccttcctgtctacactgtgccactggatgaaaggttccttgtgaagcgaattggtcccaagaacttccacatgtttagatgcgtggcgcggtatggctacaaggacatccacaagaaggatgatgacttcgagcagatgctcttcgacagcctgatgctattcgtcaggctggagagcatgatggaagagtacacggattctgatgagtacagcacccgtgagacgaacctgtcaggcagcgccaacccaagaatcaatggcatcagcgccggttcaaacatggatctcagctacacatcccatgactccattatacaggtgcagtccccaaattatacggggaacagccaggcggtgtcaccaggtcagctgtaccataccgtgggcgacgagattgcgttcctgaacgcgtgcagggacgccggggtggtgcacatcctcgggaacacagtcatcagggcccgcagagattcagggttcatcaagaagattgctatcaattacttgtatgctttccttaggaagatctgcagggagaacagcgccatcttcaatgttccccatgagagcctactgaatgttgggcaggtgttctatgtgtaagcactaaaaccaaacacatgtagtagatgagagttcagcttcggaaccactggagagaatctagctgtgttttgttcataggtaataggagtataatagttgaaagaattgtacagcaaaacagcatctttaatgtgaccatttggagcctgatcagtagtggctagggctggacgaaatactcgtggctcgataactcattcgactcggctcgttttgattctgtagcgagccaagctagcattttagcttggttctctaatgagccagctcggattagctcgtgagctagctcacgagccaaacgagccaagccacaacacaagtttgtctagtcgtaagtgtcgtctcatctcttatagtctcgatttctcgtagttatgatcagtgatatggacatgtgtggatgcgtcatatgcttacatgtttgtattattgtatggctacatacctacattgcatatttaatatttgatcattggttaaaaaaaaaaaaaaaaaaaaaaagactcgaggggggggcccgg

SEQ ID NO: 129850 - DNA, 835 bp, Zea mays
  unsure (1)..(835): unsure at all n locations
  Clone ID: MRT4577_49895C.1
actcctatgggcgattgggaccctcgaggccggccgggcctcttactgaggaggagaagaaggtctactttgtccacgacattgagggcattgacgagtccagcctcgcccaggcttacgctcgtgcccgtggtgccgaccgcatgagcagctttggcgacatgattgctctcagcgacgtcgttgatgttcctactgctcgcatcatctccaaggaggtctctgacggtgtcattgctcctggctacgaagaagccgctcttgagatcctcaagaagaagaagggtggccgatacctcgtccttcagatcgaccctgagtacaaccctcccgctactgagacccgcactgtctacggtatcaacctccagcagcaccgtaacgatgttgagatcactcccaagcacttcaacaccatcatcacccccaaggacactgcttccctccccgagagcgctgctcgtgaccttaccatcgccaccatcactctcaagtacactcagagcaactctgtgtgctacgcctacaacggacaagtcgttggtctcggtgctggacagcagtcccgaattcactgtacccgacttgccggtgacaaggctgacaactggtggatgcgattccacgagcgtgttctcggcatcaagtggaagaagggtaccaagcgtcccgacaagagcaacgccatcgacctgctcgtcagcggtcagctccccaaggacggtcctgagcggaagcctttcgaggtgccctttgagggagtccctgctgnctttactgccgagnagcgtggagcttggatgagcagctcaagaacgtttgcgttccagcgatg

SEQ ID NO: 129851 - DNA, 977 bp, Zea mays
  Clone ID: MRT4577_49896C.1
gccggccgggagtttaggaaaggaagcaccggatcggagcaggcgatacggcgccgacgacaatggcagcaacaagggcttccccggtgcttctcttgctgctgctcaccgtccagctcagcttgctcttccgcctccccgactccccctccaccctcgccctcgccctcgccctcgccgcggaaccagagcaacagaacgccaagcagcatcgccagcccgcgctgctggtgcagtcgacgtgcaactccaccagcttctacgacctctgcatcgccgcgctcgccgccgaccccgccagctccaccgccgacgtcccgggcctcggcgccatcgccgtgtccgccgccgcaaacaacgcctccggcacggccgccttcctcggcaacgccagcgacgccgcggccaccccgcaggcggaccgcgcgctcctccgcgcctgcgccggcaagtacgccgccgcccgcgacgcgctcgtgcaggcgcgcgcgtccctcgccgagcaggcctacgactacgccttcgtgcacgtgagcgccgccggcgagtaccccgcggtgtgccgcacgctgttccggcgccggcagcagcagcagcgtggggcgagtaggactgcgtacccggcggagctggccaagagggaggaggcgctgcggcgcctgtgcaccatcgccctcgacatcatctccctgctgcaaaaccaggagacctactagctccatgcatctcaattctcaactctcacagaaatgcagttgtcagtcggttagtcgatcttgtcgatgcacaagagtagtaagggcttgttcggttagctctcaatccatgtggattgagtgggattggatgtgtttgaatcccaaacaagtcaaacgtcttctcaattttttccaatttcatcaatccatgtgttttgggaataaccgaacaagccctaaaatggaccggagcaatgaacattgatcaagcattcaagc

SEQ ID NO: 129852 - DNA, 393 bp, Zea mays
  unsure (1)..(393): unsure at all n locations
  Clone ID: MRT4577_49897C.1
aaaaaaaaaaaagggccgggggcttttaatcaaaaaaaaacggccgactgcgggtttccaaggcatgccgctgcaacccccgggcccgcccttgcaaatatagaacaaaacgtgactgtctgtccctggttttttgattaaaacaactttggtacctccatcccttggcccatcaaaacccccccaaatgtaaaatgggatgggctgtttgcccgcttttgccccaacaggggaaagggatccatcaacttcagnttcccatgacgttttctttggcccccagtcgggactgaaacccccttattctttttcccttacatgaccttccacaagtccaccgtctgaaacaacggtttctgttgcttttccccccccctggggggccaggccccc

SEQ ID NO: 129853 - DNA, 116 bp, Zea mays
  Clone ID: MRT4577_49898C.1
aagagctctaaggagagagctttcctgacttggtgtttggtttctaggcactaatttttagtccctatatttgtattccattttacgcgctaaatggccaaatgcgaaaactaaaa

SEQ ID NO: 129854 - DNA, 591 bp, Zea mays
  Clone ID: MRT4577_49899C.1
ctagctgactaaacgagtgcgagccttttcccccatccttcctccctcgtccccctcctctaccgccgcgcgccgccgctcctcccccctcgcctcgctgccctcaccgagctccatggcggcgccggagacctccgcctgcggtgcgggccccgcgctcctcttcccgtcgtcctcgtcctcctcctcgtccgcgcgggtggaggccgtcgtcgtcttcaccatctgcgacagcttcgtgcgccggcccgaccaggcggagcgcgtcatcggcaccctcctcggctccgtcctccccgacggcaccgtccacgtccgcaacgcctacgtcgtccccacagcgagtccgccgaccaggttgctctcgacattgagtaccaccacaacatgtacgcgtcgcaccagaaggtgaaccccaaggaagtgcttgtgggatggttctccactggctttggtgtttcagggggtagtacgcttatccacgaattttattcaagagaagtacagagccctattcatcttactgttgacactggcttcaccatgggggaggcttccatcaaagcctatgtctcatccaacctgtctctt

SEQ ID NO: 129855 - DNA, 365 bp, Zea mays
  Clone ID: MRT4577_4989C.1
aaaaaaaaaaaaaaaaaaaaaaaaaaaaaaaaaacaaaaaaaaaaaaaaaaggggaaagtgataaaaaagaggcagagccccacaaataaaccaaacaattaaacccggtcgcccactttaaagataccaaacttacctccccttccatccaacgtaataatttttttttctggccacctaaattcaatcaactggcccgattttaacaacaccctaactggaaaaacccttgagttacccaatttaatccccttgaaacatatccccttttccccagctggattattaccctaaaggccccctccaattatctttccaaacattttcccaatctaaattgcaaatgataccccccctttacccg

SEQ ID NO: 129856 - DNA, 697 bp, Zea mays
  Clone ID: MRT4577_498C.1
ccggccgggaaggacgcagacggccaccagaagctggagctggcgaacgtgccggggggagcctacgcgttcgagctggccgccaagttctgctacggcacaaacttcgagataaccgcggcgaacgtggcgcagctgcggtgcgtggcggagtacctggagatgacggaggactggtgggtggaggacctctccttgctccggatcgaccactaccgccgcgtcatcgccgcgatgcggcggagcggggtccggccggagaccatcggcgcgtccgtggcgcactacgcgcagacgtggctcaagggcgtggacgtggagcagcggcggcgccagcgcgcctgctgggacggatcgggcccgttcgtcggcgacggccagcggatggtcgtcgagacgctcgtcgacgtgcttgccacggagaacgtcgcggccgtcacgctctccttcctgttcggcatgctgcgggtcgccgtcgaggtcgacgccagcctcgactgccggatcgagctcgagcgccgggtcgggatgcggctggagatggcggcgctcgacgacctgctcgtccccgccgcgcaggccagcgacttcatgttcgacgtcgacaccgtccaccgcgtactgctcaactttttgacgtaggatgatgaagaatagtcgggggacccgtcggctcccccctgcgggtacgactttc

SEQ ID NO: 129857 - DNA, 207 bp, Zea mays
  Clone ID: MRT4577_49900C.1
cggtgcggttcggctcggggaggcaccgcacggacggaagcaatgccgtgccggcggatgactcccaacatcgaggagctcaaggcggaggacttcgtcgactcggtgctcaacttttgccgcgaggaggaggattgtgaacaggataatcatgaggccttctgtgaccaccagcccgctgccgttttcaagtccaagaacctgtaa

SEQ ID NO: 129858 - DNA, 255 bp, Zea mays
  Clone ID: MRT4577_49901C.1
cggagatctttttcgcgcctcccagctccaactgaagcaccagctctccaagaccgggggggggggatccgtcttcattggcctccagggcattggtattaataattaaattagggtcgtcgtcttaaggtagcctcgcgtcgtcctcttaaggtagcctcctccaagtcagggtagagccagaggtaaaggtcctctgtcattcgccattgaaccggaaccgctttttcaagaggaatactccccctctttttt

SEQ ID NO: 129859 - DNA, 203 bp, Zea mays
  Clone ID: MRT4577_49902C.1
aaagaaacaactaaaaagagaaaacagttttacctaaaaacgaagagatctacctaccgggatcgtgctaaacgagcaccagatgatcaaagaccatcgatccggagactaaagtcgaggtgatgaacatcactcccgttcagaagccgacccgctccgcacagcgcacccgcttcaaggcctttgtcatcataagctactgc

SEQ ID NO: 129860 - DNA, 130 bp, Zea mays
  Clone ID: MRT4577_49903C.1
gtctggagtctggactcggataaagggctagaatctgcttactccttgtatcttgttgcattaataatgtactatgcacgaactatgttgaggaatgaacagtagtgttggaaataaaataagttcagat

SEQ ID NO: 129861 - DNA, 726 bp, Zea mays
  Clone ID: MRT4577_49904C.1
gaagagaactgcgcatcattgtattaagaagagaaaaaggtctaaaccgacaagtacaaaccagaaatttggagcctccaaatttggagggattttatcaaacacatagcggttccgatgattccataggatccaaaaccctaaaataattagagaattgagaccctctttggctacaccttgcagctggtcacttaatctctcccaccactgcatactgctagattcacctggttgggggctgaatccctgcaaattaacctgaccgagcaaacgaaaccagaaatgcctagcaaagacacatccaacctgtcctcaggctcttgcggacaactttctctcttttggagtcgatccgctgtccaacatctcttaaaagcagccaaccattgaaaaaaaaatgcatttgggaggggcccaagaatgccaaattctctcccagtgcccaaaattagtagaaccaatgaaaagactttcgtatgcagctttggcagaatactttccatctgttgcaaatctgaatatatgtttatcttcctgattctgcagcaggttaatggagcttaaaatgtcccaaaggtccaggaaatcaactagcactccaactgaaactgcacctcttatatctgtcaaccatcttctatctgtcaaagcctcctggactgatctagtgttcaaaattctcttgggcacagcagcaaatagtctaggagccaaatccttttt

SEQ ID NO: 129862 - DNA, 259 bp, Zea mays
  Clone ID: MRT4577_49905C.1
tgacggtcgtctcgccgatcgcgccggacctcctggcggcgttcgagcgcaagttcccgggcgttcacgtcgaggatgcggaggggctcacgtagcacatgtgcatcacgctgacgcacgctagcggcggacagctaggacgttgcagtcggctaatgcaagctgtcaataacaagtcggtcgggttcattctgaccaacctggacgcgaacttcttggaccccgacacggggctggacgctgcccaataacactcctt

SEQ ID NO: 129863 - DNA, 1545 bp, Zea mays
  unsure (1)..(1545): unsure at all n locations
  Clone ID: MRT4577_49906C.1
gtccgtgaaacaaaaggctcatctgaggaagttaagaagtcggactctgtttctatttctgaagatttccgttgcccaatatgtctcgagctgatgagagatccagtaattgtttcaacgggacagacctatgagcgcgctttcatcggacgcgtgggtgactgtggaaaccgaacctgcccaaaaactcagcagaagctccagaacctttcgttgaccccaaactacgtgcttagaagcttaatactgcagtggtgcgaggaaaaggggatggaaccacctagcaggtctaaaagcgacggttctcctcttgaggttgctggcaacagattagcaattgaagcgttagtccgcaacctctcgagcagttcattagatgatcggaaatctgctgcggctgaaataagatccttggccaagaaaagcacagacaaccgtatacttctagcggaatctagcgctataccggctctggtgaaactcctgtcgtccaaggacccgaaaacccaagagcacgcagtgacagctctcctgaacctctccatatacgatcagaacaaggagctggtagtggttgccggtgccatcgtcccaatcacacaggtgctgaggacgggtagcatggaagcaagagagaacgcagccgcggctatcttcagcctgtcactgatggacgacaacaagatcatgatagggagcaccccaggggcaatcgaggcgctggtggagctgctgcagagcggtagctcgaggggcaagaaggacgcggcgacagcgctgttcaacctgtgcatataccaggcgaacaaggtgagggccgtccgagcggggattctggtgccgctgatccggatgctgcaggactcgtccaggagcggagccgtcgacgaggcgctgacgatcctgtcggtcctcgcgagccaccacgagtgcaagaccgccatatccaaggcccacgccatacctttcctgatcgacttgctgcggtcaggccaggcccgcaacagggagaacgctgccgccatcatactcgcgctgtgcaagagagacgccgagaacctcgcctgcgtagggaggctgggcgcccagatcccgctcgccgagctggcgaagaccggcacggaccgagccaagcgcaaggcaacctcgctcctggagcacctcagcaagctgcaggtgctctagtagtcccacccaccactgtccatccacagccacaccactctgtgcgcgcgcgtgcgttttcgacttttccacgccacggtgtatgcgtacaaatgcgagtagtgtagcatcatcatcatcatctgtcgtcgagtgtgatttcggtggggttggtgataagttcgtttcagtcagaggagcaagaccaaacgcttgttcgttctgtcagctcatgtctgcgtgtagtttgattcgagctttttcaaaagctcgcggtgtgggaattacctcggtcgccatcgaaattttctacttatattattattatgactcctttgtcttcaagccatcaacctgatcgatcaaaagacaaaagncaag

SEQ ID NO: 129864 - DNA, 175 bp, Zea mays
  Clone ID: MRT4577_49907C.1
tacgtaagctcagcatacgtaaggtgagcattctgctcaatccaatatgactaagaatagaaggaacaatggtcgtgcaaaaagggacgcagcacgtgcagcctattcgctgcactaactgtgcccgatgcttgcccaaggacaaggccattaagaaatgcgtcatgcgaaacat

SEQ ID NO: 129865 - DNA, 178 bp, Zea mays
  Clone ID: MRT4577_49908C.1
gacggaccgggcggacccacgcgaaataaaagaagcacccagaccaaacggccgggtggggcatagggagagagcagcctcaccaaaaccgcactggagagatgtgaccgcacagcaaaaaaggagagaaaacacgccaaaaagtgcaggaaaacgcaaacacaacttcacggggaac

SEQ ID NO: 129866 - DNA, 616 bp, Zea mays
  Clone ID: MRT4577_49909C.1
gaccatatcgacgaccctttctcagattaaacatgatgatcacaaacacagttgacagttacaaagtcgttatggatcactcaactcaactggtgaattctaaacaagtgttctaaacaaaatgacagtaatttatactaaactaatcagctcacccttcaatttatagaattatttctattttctaaactaacctatttatatagagtggattatatagagtatccactctgccaggagcaaaataaccaactggtggctacccctaagattttgcaggacaaaagcgaccgagtggctctcgacctctcgaccagagcaggacttccgtaaggccttgttcgtttttatcggattgcacccggaatcgttccagttcatcaaagtttatataaattagagaaacaatccggttaggaatcgttccgacccaccaatccgacacaaacgaacaaggcctaagtcgcctcaatttatatttgttagaatatattagataacatcaaccacaatacaaatacgggcaggacaaaaatcttcctctttcatgagctcatacaaaggataaatttgcgcagcgccgttttgttcacaaatataaataatagtatgattg

SEQ ID NO: 129867 - DNA, 236 bp, Zea mays
  Clone ID: MRT4577_4990C.1
tgataagggaagggatggcggggcaggagcttggcgagcagaccatcttctaggccttctccattaccagtttccgggagaaagaaacttgtagtagattctatgccgacaatgtacttgtagaaaggtgagctttttgacttgctgatgatgtaaacacgactcgcgattcaatcataccaaagtatgatgattgtctaatttggaggaagagaaatgttttgacttgttgcttc

SEQ ID NO: 129868 - DNA, 365 bp, Zea mays
  unsure (1)..(365): unsure at all n locations
  Clone ID: MRT4577_49910C.1
attgagaccgagtttctgatgttagacgtactaataacacaggacggaaagtcgaacaatggcaatttttacctgacgcctggtgtatagaccacccccattggtgaaggctatatcctcggttgaggtgacctgactctcggccgaaaaaaggagggggccctatcagcctatgacattatattttttgatggtatcngaggcccaggaagggccaaagaacatgatctaaccaagttagcccaatctgtttcttgtaactctatgcgagctcttgtataactttgagctgggtgtctgttctacacaggacctaagaagttgttttgggccgtttgatgctccagtacaaaaaagctaccact

SEQ ID NO: 129869 - DNA, 107 bp, Zea mays
  Clone ID: MRT4577_49911C.1
acccacgcgtcctcccacacattcaagcactccttgctacatttctataaagtggacgactccaccaacaggcggatcctactgccataggagtgccccaaaccaaa

SEQ ID NO: 129870 - DNA, 250 bp, Zea mays
  Clone ID: MRT4577_49912C.1
aaaagaggtaaataagtaccagtctgtttattgcatcaacgtgctaaactatacagcaaacagcccacactccgtacaagccggcgatactggcaacgccatccaaatacaataggcaacaacaacggaaatgtatgctaggatgcaagataccatatactcatatagtaggacacagcagcgtctgctgaggctagaacgtaaacgaacgcaggcatcatcaacccaaatagcaaagcactgaactgta

SEQ ID NO: 129871 - DNA, 817 bp, Zea mays
  Clone ID: MRT4577_49913C.1
ggcttctcttcaaccccgccctctccctggaaattcggcacgaggggactacggtccaaggcctaagggcctaaatgggagagctcgagaaggatttggatgctgccattcacacctctaaaactcacccaggccgtcgaccaaaagatggtcgagctgaaggacctgtccgacgcggtggtggagtttggtcgagaccttggcgtcgcggatgttcccttgggtgagtacttgcggagccgcatgcgagccctgagtggctacgtgcggagcgaactccgtgaggccgtccatcttggggtgaagcaagtgttggccgtagtcgcctcccactatgagattaatctcgagcgggcatgcgaaggctacgtcttgtcggacgagcgcaacctcgccgaggccgagatgcagaggctcaccgatgttgtcgaggggtcgggctcagtgtaacaccccgtccaatccctggaccggcggtacttactcctggcagctctctaggatcatttatcatccacacaaaccaacacgagtcttttgtgcgcactttgtcctcactcatgtgcacccgataaaacttcccggtcggtcactcatcctaaatttctccaagtcaagcacgcttaacttggaggttctttcgaggtaggcttccgaaaaagaagatgcaccttgttggtatgattacactattaattctattaagccttgggccaggacatcccatcccaggggctaggatatcacagaatgtatctataatattgtatctatattttttcacacataatgaaacgttaatatatgacgtaacagc

SEQ ID NO: 129872 - DNA, 1898 bp, Zea mays
  Clone ID: MRT4577_49914C.1
cggaccgggattgaactcacgaagcaagcaagactactgctatagaaagcagtagcaaggtctagtcggctgtgtctaggcgcctagctatatgcctatatagtaaacggtatccagcatggacgagtacatctaccagtcgctcttcctctccgtccttgctgtggcactgctgcagctggtgaagatggccctcaagccgaggccacggctgccgccagggccttggaagctgcccgtcatcggcagcatgcaccacctcgtgaacgtgctgccgcaccgggcgctgcgggacctggcggacgtccacggcccgctcatgatgctgcagctcggccagacgccgctcgtcgtcgcctcttccaaggagacggcgcgcgccgtgctcaggacgcacgacaccaacttcgccacacgccccaagctcctcgccggcgagatcgtcggctatgagtgggtcgacatcctcttcgccccctccggcgactactggcgcaagctccgccagctctgcgccgccgagatcctgagccccaagcgcgtgctctcgtttcgtcacatccgggaggaggaggtgatgctgcgggtggaggagatccgcgcggcgggcccgtcgacgccggtgaacctgagcgtgatgttccacagcatcacaaacagcgtcgtgtcgcgggccgcattcgggaagaagcggaagaacgcggcggagttcctggcggctaccaaggccgtcgtcggcctgtcgagcggcttcaacatcccggacttgttcccggcgtggaccacagtcctggccaagctcaccggcatgacgcgcagcctcaaggagatccacaagacggtggacaccatcctcgaggaaattatcgaggagcgcaagcgcatccgcgacgaaaagatcatgggcggcgccgccgccgaggacgtcgacgagaacctcgtcgacgtactcatcggcctgcaggagaaaggcggcttcggcttccaacttaccaacagcatcatcaaggccatcatactggacatgttcgcgggcgggacggggacgtcggggtcggccatggagtgggggatgtcggagctgatgcggaacccgccggtgatgaagaagatgcaggcgctgatcagggaggcgttccgtgggaagacggctgtgacagagggcgacctacaggcgagcaacctccagtacctgaagctggtgatcaaagaggccctccggctgcatccgccggcaccgctgctggtgccccgggaggagagcatcgaggagtgcgagctggacgggtacacgattccagccaagtcacgggtcatcatcaacgcgtgggccatcggccgtgaccccaagtactggaatgacgccgacgagttcaagccggagcggttcgaggacggctcccgagacttcacgggcagcagctacgagttcttgcccttcggctccggccgaaggatgtgccccgacttcaactacggcctcgccagcatggagctcgcctttgtcggcctgctctaccacttcgactcgtcgctgcccgatggcgtcaaggaggtcaacatgggggaggtgcctggactcggcgtctgccgccgcacgccactaatgctttgcgcaaccccgttcgtcccggtccccgcctagctagccaacgtacatcgtcatgccagccgcgagctgagggacctattgtatctctgtctcagtatctctatgtgcttgctggctaaataaacacgtcatctgtacgtctcgttatgggtgctgcccattgtagtgtgctgtgcgtacgtgtagtagtacagtgaagagtgtactataatcatgtacctaaagtttcaacttccaaagtaaagtgcgtcccaagggtaataaatctatacttacactctggacc

SEQ ID NO: 129873 - DNA, 479 bp, Zea mays
  Clone ID: MRT4577_49915C.1
accacattcttattcttaacaggttcacttattgaacattttgggcctgggtatatgtgaccacacaaggaaatagggggtggaagggaaaaccttaccaattttaacaccaacaaggggattaagggattcaataagaaaaacgaaaacctaattttgaacacttgggccttggctttgggattagaataaaggccggggggtaagcgccaacattaacaaattgggctggttggttatttggattaaggtggggaaagggaacggttaatttaacaaggggggtgaacatttcaaccttattatttagaacattaacgaacttaattttaacaagcattggctttggtttcttcttaatattaggccacccaacccaattaccggatggaattaaagacatggaatggcaagaagcaccaacttggggggtaacttgatggccttggcgaattggttcctggtccttagaacttatg

SEQ ID NO: 129874 - DNA, 346 bp, Zea mays
  Clone ID: MRT4577_49916C.1
ccttttattaatttttttttttgttttttgatttgttttttatttttttttattttttttttgttttttttttttatcatggttttgtaaagaggggacatctaataccccatacttaatagtccccagggtgtaacaatggcaaaagctgggaaaaactgcaaccatttacggaaacccgaaatggccttaatcccctaggaagggaaagcttaaaaaatttttaaaaaaaaaggggggaaaacgcaaaaaaatttgtaaccccacgaaaaaaaaacagggggtcaaacgcggattggttgagaattatacttaacaaaaacaaactttgggcctaagggaaaaa

SEQ ID NO: 129875 - DNA, 1251 bp, Zea mays
  Clone ID: MRT4577_49917C.1
cattgggacctcgaggggggccggccgggattttagaaaacaaacattagagggggcaacgagtaaaaaaggaaaggaagaactcccttctctcctcttcgatcccgacgaacgccgagggccgcggcgatggaatactcaggcggcggtgcgacgctgtcggagatgtaccagagcgcgcggcggctgctactctcggcgcgggatggcgtgggccgcgtcgagcgccttgcctcggcacccacttcgtcctcctactcctcggcgccgctcgtcggtggtgcgtcgggggaccccgcggttgctgaggaggtgcggcgagaggtggcgcagatccaggggctgtgcgcgcagatggaccgactctggcgatccatccccgccaaaggccaacgggacctctggaagagaaaagtggagcagctctctgaagaggtagattcattgaaggaaacccttgacaggcattctctgcgacagaaaaaacggattctggaagcaaaagaaagggctgagctatttgaaagagctaacggtgaatcttcacacgtcctccgaatattcgacgacgaagcccaagcaaagcaatcagcccgtaactcctcacgaatgctcgaagaagcttatgagacaggagtgggtatccttcacaagtacgctgaccagagggatcggctgaagagtgctcaaaggaaagctttggatgtcctgaacactgtcggtctgtcaaactccgttctgaagcttatcgagaggcggcaccgcgtggacaggtggatcgcgtatgctggtatggtcatcaccgtggtggtgatgattgcgttttggcggttaacgcattagtgctgggctgtgtttgttacatatttctatccaagatatcaatgtgcaaacgagggagacggggcagattcagatggtacagttttttttcgctggtcgtggagcagttcaagtttgcctcgccggtccgtcgcccgcatagttgatgccggacccccaaagtgggttaaatgttcaaattccattgtatgcaatgctgctgtgtagtctattgttacgacttccgtgtaagtacacaagcttttgcgggacacagaagagaaaatgcgctgtattatttctgcacgaaatattgtactcgtaatatctagcctgcagttgaatagcacaaaataacggaaacctgtgagacctgaattttcagatttaactgagcaaaaaaaaaaaaaaaaaaggggcggccagcgt

SEQ ID NO: 129876 - DNA, 284 bp, Zea mays
  unsure (1)..(284): unsure at all n locations
  Clone ID: MRT4577_49918C.1
ggttttgtttttttttttttttttttttttttttgggggtttttttttttttttttttttttttttttttttttttggnttttaccaggagactcgcaacaaaagggggataaccacacccagggcaatccattttttttttccagggtttgtttgggttcaccaaaacaaactgnntccaaacctttttccttcaaacttnttcaacctttaaatacatacataataaaaaannaaaaaccanntaaaaccttacttaaacactttattttaanacatattat

SEQ ID NO: 129877 - DNA, 284 bp, Zea mays
  unsure (1)..(284): unsure at all n locations
  Clone ID: MRT4577_49919C.1
ccggttcgacccagcgtcctttaaacanaacagaaaacttttcatgggtgagtgttaataaggggtcagtgcatgaaactttgatattgaggatctaaaaagccagccatcactgatttgcaatgatgatgcacctgaaatagaagaacatgatgacactgctagaataactgacttcgataaatcatgtgtactaggaataatgacataaatatgatgtaagcttcacagagtgaaaaaaaaaaaaaaaaaaaaaaaaaaaaaaaaaaaaaaaaaaaaataaa

SEQ ID NO: 129878 - DNA, 424 bp, Zea mays
  Clone ID: MRT4577_4991C.1
ccaccactcccggtgcgacgcacgcgtccgcaagtgataacaatagagacgaccgccctatttttgcattgatcatgtcggacatgctgtcgaaagtacaaggatgtgctcgtcaaggatgctggctacattggcacccactggcaagggtatccttgctgctgatgagtgcactggcaccattgggaagcgcctttccagcatcaatgtcgacaacgttgatagagaacagccctgccctccgtgagctcctattgtgctgaccaggtgctctccagtacattagcggtgtgatcctcttagaacagaccctgcgccagaagaccaaagatggttagccttatagatgcgtgctcaaggatggaggcgatctccgttgtattcaaagtggacaaggaaccacagaggttgtcgcttctgataa

SEQ ID NO: 129879 - DNA, 243 bp, Zea mays
  unsure (1)..(243): unsure at all n locations
  Clone ID: MRT4577_49920C.1
cccacgcgtccgcccacgcgtccgttcaggtgntcttgaaataaaacggaggggactgtattctagagtctagacaaatggaggcgacttgggtgtcagctctgagcaaaatctattggatcatctcaagtcaaaagagaaacagaacaagcactacaaataaatgctgcatgtgctacaacaatatgttttttttgtccatgcatgtgaaagtgaaataattaactattgtgtggatggagt

SEQ ID NO: 129880 - DNA, 130 bp, Zea mays
  Clone ID: MRT4577_49921C.1
actggcttcagtcttccatataattcctattaacaagacaacaggtcatcacatattttgttaactcctaagccaaataccccattaagcgcgaccaccgtaaatagagggaaaacaacaaagccggcat

SEQ ID NO: 129881 - DNA, 185 bp, Zea mays
  Clone ID: MRT4577_49922C.1
gtagcactaccacattcacaaggctttaatttacacgcctctttgccaacttcacccgggaggtttctctgaacatatctctgatccaatctctcggcatgaataacttcatacctaaacgacatctcatcaagaataatctccccatggtgcaatactaactcaatctccttatatagcatgca

SEQ ID NO: 129882 - DNA, 394 bp, Zea mays
  Clone ID: MRT4577_49923C.1
gagctagctcgatctgcttaattaagcctctctaagtcatcttgattattatattaacagtgtaacaatgcagggcctcacgccaacttacaagctcagctcgatcagtgtcgtcatcttgttgcttgtgctgaccggcggcggcggcgtcgcccatggccggaagaagaagctcgtgtcgagctacgacgagccgtgccagcagatgacggtctactaccacgacatcctgtacgacggcaccaacacggcgaacgcgacgtcggcggtcgcggcgcagcgacgctgctgagccggtcggtgtccgtcaacgacacctacttcggcgaggtggtggtgttcaacgacgcggtgactgcggggcgcgcgctggcgtctgagcccgtggcgcgcg

SEQ ID NO: 129883 - DNA, 419 bp, Zea mays
  Clone ID: MRT4577_49924C.1
gttaaacatcaccatttcagggttttaagataacaattgcaatttccttacaaaaggaaaggcggggccccaaaagcataaattaggaaaacaacccaaatttttacgggggggggggggatttcaccaaggggcagaacccattggatgacaaggggaaagacccaaggggggctcacagctcaagggaaaaacacaaaaaaaccctgactggatttagggggattacaagggattaaaaccttaaaaaaggaactttggccccaaggcggggccaaatcccaaaccaagttggcaccccaaacctactcaatggacttgacaaaaaaatcccggcgggctgacggggttaatgacaaccgggggcccaagagtgccaggccaggcctgaaacttggggtctgaggcttgccaccaat

SEQ ID NO: 129884 - DNA, 791 bp, Zea mays
  Clone ID: MRT4577_49925C.1
gtggtacgcctgcaggtaccggtccggaattcccgggtcgacccacgcgtccggaagaagctgacacagattcaggaatctcaggttacttccacaataaagaacggcgttccaagcgggatgaaaaactagataagaaatctcaagccatggaggagctaaaagcagagcgagaaaaacggaagaacagaacagctgagctcctcgccaaaaaacagccattgaaaaccagtgaggtctactctgacgatgaggaggaggaagatgatgacaagtccagtgagaaatcggaccgctcatcccggacatcatcatctgatgaagaggaagagaaagaagaaatccctccaaaatcacagccagtctcattacccgaggaactgaatcgggttcggttatcacggcataagctagagcgctggtgtcacatgcccttctttgctaaaactgtcacaggatgttttgtacggattggcattggaaaccacaatagcaagccagtttaccgggtggctgagatcacgggtgttgtggaaactgccaaagtttaccagctgggtggcaccagaacaaataaagggctccagctacggcatggcaatgaccagcgagtgttccgcctagagtttgtgtccaaccaagaatttactgaaagtgaattcatgaagtggaaagaagcgatgttttctgctggcatgcagttgcccacactagatgaaatcaataaaaaggattatctattaaggaagctctcaattataaattcaatgatcaggacatttgagagattg

SEQ ID NO: 129885 - DNA, 292 bp, Zea mays
  Clone ID: MRT4577_49926C.1
aggaaacgcaccatcacttatcatttggctttcatgatcttgataatgtagctggtggggtgtctgagtctgggtctggtggtcaaacacaatcatctttgctatgtgtgtcatcataccaacatatctatgatggaaacagtggtccaagtctgcatgtgcacaatggttttcacaactgtccaagccattagtccttcatccttcttaatttctcatagaagtggacatttcatggtatcatatggaaggcctttgaataggttggctgatgaatctctttctgttcatg

SEQ ID NO: 129886 - DNA, 601 bp, Zea mays
  Clone ID: MRT4577_49927C.1
acctttgtcatcggcgcttttgactgttcacttcgttattatgtttcgtacccaagcggttgctaaagggcggattttctactcattttggggcagccttcattcatcgaatgtagtggttagtgaaacgcaatactagatagatgttgttgtacccctgcccggcgtaaataattgtgcctgtgggctgtggtcattttcgtgtgcctcctaagttaaatctgaactgtttctctttaggcaatctctagtagcactgttggtctgatatgaactttatttacatgtgatgcatatgcttctgctattattgtactgtcttgtccttttttttctgtagtggttactagtggaagtttagcacactgattccgtcatagtgggatccttgccaaatgaagtgtccatccaaccaacccaactaactgtactgaaatctcattgctttcagaatggtacggttagtaaattgaggttggtggtgggtttggtggccatactaggggaaggtacgtgtttgttctttatagatggtgacttggtttcaacctgagggttttgcccttgatgataggttgtcatagaattagtgggatatatg

SEQ ID NO: 129887 - DNA, 482 bp, Zea mays
  Clone ID: MRT4577_49928C.1
atacacttttatcgtcctgtaaatttactttaatgaaaaataaattttaagaaataattttttcacttaaactctattaaagatgctcttaagacatattgatattttcatgtcttttaattgattaattgcttaatttttaaataaaaaataataaaatatatataattaagggtgataaccaccgtaagacatttatttattaacgtataataacgagatttaacaaatttaacaacttatactattaaatggattaaaagagcaaattattaattaacagtgtaaaattatttacattaagaattaaaaataatgaataagagattcacattaaagttaaatttaatatttatgtcttattaaaacaaataaattttaaattgaattaattctcatatcttaagcaactattcaaatatataattagctatataacaaccgcgtacgtattaatatcacgattaacaaattttcttata

SEQ ID NO: 129888 - DNA, 1611 bp, Zea mays
  Clone ID: MRT4577_49929C.1
cccacgcgtccggcgccgcgacgctgtccaacggcgcgccgtggatcaccaccgtgggcgccgggaccatcgaccgcgacttccccgcctacgtcacgctcggcaacggcaagaactacacgggcgtgtccctgtacagcggcaagccgttgcccaccacgccgatgcccttcatctacgcggggaacgcgtccaacagcagcatgggccagctctgcatgtccggcagcctgatcccggagaaggtggccggcaagatcgtcctttgcgaccgcggcaccaatgccagggtccagaagggcttcgtcgtcaaagacgccggcggcgccggcatggttctcgccaacaccgccgccaacggcgaggagctcgtcgccgacgcgcacgttctcccgggctccggcgtgggggagcaagccggcaacgccatgagggactacgccatgtcggatccgaaggcgacggccaccatcgtgttcgccgggacgaaggtcggcgtcaagccgtctcccgtcgtcgcggcattctcctcccggggccccaacactgtgacgtcgagcgtcctgaagccggacatcatcgcgcccggcgtgaacatcctggcggcgtggtcggggtccgtcggcccgtcggggctccccggcgacggccgccgcgtcggcttcaacatcatctccggcacgtccatgtcgtgcccgcacgtgagcgggctcgccgcgctgctccgcgcggcgcacccggagtggagcccggcagccatccggtcggcgctgatgacgacggcgtacaacgagtaccccggcggcggcaacggcatcctggacgtggccacggggcggccggccacgccgctggacgtgggcgccggccacgtcgaccccgcgaaggccgtcgacccggggctggtgtacgacatcgcggcggcggactacgtggacttcctctgcgccaacaactacgaggcggcgcagatcgcggcgctcaccaggcagcacgcgtccgaggggtgcagcgccaaccgcacctacgcggtgaccgcgctcaactacccgtccttctccgtggcgttcccggccgccggcggcacggcgaagcacacccgcacggtaaccaacgtcgggcagcccgggacgtacaaggtggccgcgagcgccgccgccggcggcaccccggtgacggtgaccgtggagccgtcgacgctgagcttcagcagggccggcgagaagcagagctacacggtgagcttcacggcgggcgggatgccgtcgggcaccaacgggttcgggcggctcgtctggtccagcgaccaccacgtggtcgccagcccgatcgcggcgacgtggacctaatggctagcggcggccgtaccgtagcaatagcgagataaaatcccgattgggggacggcaatggcgagcgcgcgccattctcgaatgcgagagagatggcggatatcgtcgaggatgtgctgttgtattgtgtgcatgagtccgctccggtgtgtaagctgccggtgtagtgtaatctatctgtagctgacccgattgtagcgatgcagcaattaaatctcaaaagggttgcagacttgagcactttttcggaaatttattta

SEQ ID NO: 129889 - DNA, 243 bp, Zea mays
  Clone ID: MRT4577_4992C.1
cccatctacccactcacttaacaggaggtgtctcttccaaccaaggagggttatacactattcctactttccacttcctgtactcgagtactaaccatcatctattctaccctaatcattaaaaaaatctgcttttttttttccatattcctacttacctacaatatttattattacgtttatttctttctaaattttttcttccaaattaattatttttctcaaattcttttataaattgaa

SEQ ID NO: 129890 - DNA, 351 bp, Zea mays
  Clone ID: MRT4577_49930C.1
gagcagggaaacacaggggaggggactgcataagagaacgagcgcaacaccacacccgcacggccacagagtgaccaccaccacaagggcaaccacgacccgcaagcgcaccgcgccgcgcacgggcagaggcgcgagggccgcaccgcaccggacctcctccaacagagccgcgcgcacgaggagcccggcgacagacacccaccccggcgcgcgcataggctcggggaccccgaccgaccacgccacgggcaacgacaccggcgagacggccgaccgagggaacgacgcccccatcctgcacggcgacacccccggcggcacgggaaaggaggccggcgacccgcaccc

SEQ ID NO: 129891 - DNA, 121 bp, Zea mays
  Clone ID: MRT4577_49931C.1
tgacacagcattaattagcatagccgtgataacaatgaatatctcatcataaacaattcaatccatcaacacatcgaagcaaaaggacccaaaggaattagcagcaaaaggagatgtaatc

SEQ ID NO: 129892 - DNA, 230 bp, Zea mays
  Clone ID: MRT4577_49932C.1
gccggtgttttacaaagggctgacctgaccatggggaaagcccgctttcttttccccatggggaaaaaaaagggggggggggccggtttctagacaaaaacttttcgcaagcgatgtcatgaaacaccccccgtgttgccggggggactaaccccccctttttgtgggggtggggaaaaggggcaccccggctggtcgcccatgttggattctgaagggggcccttctgg

SEQ ID NO: 129893 - DNA, 1643 bp, Zea mays
  Clone ID: MRT4577_49933C.1
acagcttctctattatctattttctttctagttaatacgtgtgcttgggagtccttgcaatttgaataaaccaagatcttaccatgactgcaattttagagagacgcgaaagtacaagcctgtggggtcgcttctgcaactggataactagcaccgaaaaccgtctttacattggatggttcggtgttttgatgatccctaccttattgaccgcaacttccgtatttattatcgccttcatcgctgctcctccagtagatattgatggtattcgtgagcctgtttctggttctttactttatggaaacaatattatctctggtgctattattcctacttctgcggcgatcggattgcatcccgatcccgtggactcccaattgcctgcctcctctacctgtccggctgtcccggctccagcatttccaccctcgcgcggcggtcgccggagcgagcagagctgccggaaggcccgtcggatccgccgccgccaagatgaatgacgccgatgtagccaagcagatccagcagatggtgcggttcatccgccaggaggccgacgagaaggccaacgagatctccgtctccgccgaggaggaattcaacattgagaagctgcagcttgttgaagctgagaaaaagaagattagacaagagtatgaacgcaaagagaagcaggttgaagtacggaagaaaattgagtactctatgcagttgaatgcttctcgcatcaaagttcttcaagctcaggatgatctagtaaacaaaatgaaagacgatgcgatgaaggaactcctccttgtcagccacaaccaccatgaatacaagaaccttttgaaagatctaattgttcagggcttgctccgtttgaaagagccagctgtattgctccgttgccgcaaggaagatcaccatcatgtggaatcagtactgcattcagcaaagcacgagtatgcatcaaaagcagatgtccatgaaccagagatatttgttgaccatgatgtgtacctaccacctgccccaagccatcatgatgctcacggccagttttgctctggaggtattgtcttggcttctcgagatggaaagattgtgtttgagagtacacttgacgccagactggaagttgttttccgcaagaaattgccagagatccggaagcttctttttggccagactgcagcctaattgactcaatccgcagatgatggtatggctcgcttctacctagtggtttttgccaaattgatcgtttacggtattcatccccaatgtacaaactaccttatttgttcattactgtcgccgagcaccgactgtttgtacttcgttcgctccgaggaataagaataaagcactgctagacttcccattgcgaagctgaataaatattgtaaagccatttgtcgtgctgaacttcccgttccgttcctgtcctgtcctgttgatgtgtatatctagttaatgtcggatacggttcttgtgggaaaaataaaaaataaaagttcttgtaaagttcgccagctcacctcctgtcatgtttctccgtttatttgaagagtgccgcttctgagcacaaacggtactgggttttgtaaaaaaaacaaaaaaaaaataaaaaaaaaaaaaaaaaaggggcggcc

SEQ ID NO: 129894 - DNA, 1187 bp, Zea mays
  Clone ID: MRT4577_49934C.1
taggggccttttttttttttttttttggggaaactttcttatacttattttgtacggtaatacagtgataggaacacgagatgctcaaaaccaaacaagctatatctttaataatctccatataccttgtcgtcagttttggccgggttgggagcctgggagctcgccagctagtagcacacatgccgccatgtgagccgacgcagagcccgggccccggccagccggaaaggacgccctaaaccaagcacgaaaaagatgtatcgcccaccaaccgcaggctgctgttcacatgtccctgcgcgcggcgcggctacggcttgtgcagtaccctgccggcgacgacggcggcctctatgacgagcgagatcacgtcgatgaccttcgtcgatccatgcacttgttcccgttgaacgtggacgtgccctcccgcagcctggccaggcagtccagcagggcctcgttgcaagccgtgctcaggtagtccatctttgcctggacgcagttgtcgtggtgcatgcagcaggcgtccagcgcgtcgcacggcggctcgccggggcagccgctgtacaggatgccgcagtacttgccgtaccgcaggaacggcggcgtcgtgcagtggtccgactcgcacgtgcggctgcacgcctgctgcttgctctgcgcgcgaatcaaagagcgcaattagcgtacaggggagtggatcagaggagctagattagtggggcaacgtacggcgtgctgcgtgtgtgtgtgggcgtgtgagcatgatgaaagctattactccaaccatgatttatcctgcgtactagtacgttccaccccgtcgccggcggactggatgccgatgttgagcgcggcggcgggcggcgagaagagggccgcgcagacaaggatgccgacgaccaccgccgggagtcgccaggaactgccgcgctccatcctcgcgggagctctagaacgaagtctcttccaccacgcgcgtgcgcgctctctctctctctctctctcggtcgctaggagtctcgtgacggcacggcctgccgttcccgtccctggcgagacgagaattatctagtggcggcgagctggttttcccactccagttgcgcggacgcgtgggcgaaaagttgaataattggccatgtcgacctcctgggccctaacagctggcatgttttgttttt

SEQ ID NO: 129895 - DNA, 410 bp, Zea mays
  Clone ID: MRT4577_49935C.1
gcacgaggggacgttttccagcaatcatagtgcgcagcttcaattagcagtactgcactctagacatgccctgttccattgatcaaaccaccgcgcgtgtccggtgaccacctcgaccacacctcggcttcacgtggccaggcggttacggtgaggaagcgacaaatttttgttgcttttgctccaaggtggtatcaaatgaaggaaaacaggagtaaagatgcgggaggacttggtcctccatataggatctttttgttttaaagctatcgggaggagtctgtgcctcccttgatatgtgtaactactcagcactcgtttatagctctggtctgtaataagtaacttgatcttactttctaaataaatgtaagtttatgtaattgcttccgcaaaaaaaaaaaaaaaaa

SEQ ID NO: 129896 - DNA, 182 bp, Zea mays
  Clone ID: MRT4577_49936C.1
tttatattagtagaacagttccgttgggcggtagcaacagattgatgactgactgacgcggctgtgagacacagcccattattaaatctcatgaatcaggcgacacaagcctttataaagcgagcccaaccacgtcaaaaccgccctctatgcagcctgcacggacgactgtgccaacccca

SEQ ID NO: 129897 - DNA, 213 bp, Zea mays
  Clone ID: MRT4577_49937C.1
gttaaaaatgacggttcactcaccatagcttggcatgtaaatgcaagtgatggcaatgggaatcctactggtatcagttacaacaagagtgctcctgaacatccaaagctggatgcctcacacatcgggaacgcagcacccgtcaagctccagtttggtccttttgggatcaatggctggatgaatgacacggatggtaccagccatactggg

SEQ ID NO: 129898 - DNA, 274 bp, Zea mays
  Clone ID: MRT4577_49938C.1
gcagtttcaatttcgtaacatgcagatgtaatttaggttttctttattaaatgtgtggttgcagacattactgatccatctcaactactgacagcctgactacttgtgaaagatggcttttgtgccaccagaattttaggcttaggggaaattagtgaaaatgcaaccccatgggaagccaaggtaacctggaaaaacaaaactaacagctgatgccagtgaaagaaggtaaagtaaggaatgcagcagaacctctgtccttgctgctgatggc

SEQ ID NO: 129899 - DNA, 222 bp, Zea mays
  Clone ID: MRT4577_49939C.1
ggggggggggggtttttttttgttttttttaaacaagtagcttcgaccggtttaatttacattccacaaagaaatggtgcacccagttcttgatttaaaacaactggaattatccaagtcttgcaatttcttgtttttcagtgtggccgcccacaaagaagtttccaaagggacccgggttgcggcgacattaagtattcatcggttcaacatgaaaccctt

SEQ ID NO: 129900 - DNA, 259 bp, Zea mays
  Clone ID: MRT4577_4993C.1
agcaaaaccatcagatctagcagaactctttggacctgatcggcgttggccgatcacgtgttgaccttagatggcgccacgcggcttgaggaggattgcgccttaacgtgtcgcctggcgcccggtcatgatttgcctgttgctctcgctcgccttctgcgtactgacgctcgaccagtctaacaaggacctgacggttgttacccacaaggtcttacttcaacatcgagatccacatggagcgcctcaacccggattg

SEQ ID NO: 129901 - DNA, 2553 bp, Zea mays
  Clone ID: MRT4577_49940C.1
cttttttggcgaaagggcctctagccgagttggttaggtggtctgagtagcactccttaggtcctgagttttaatcccagtgaaagcgaatttcaggctgagattaaaaaaaggttactcgctggttcccctggtcatgtgcacacgagatagactggcctatgggggcggatcctcgtgtaggggctgggagagcttaaagcacgagtaaagatctggcttatagggggtggaccctcatgttgcatgggggaccagctttcgtgacctttctcggtcggggattcgattgagcttcttctttatataacaccgtgggggcagtctttcccctactggccacatttggcttttttgaccatatcctcctggtgcaccactgtcattttggttccagcttcaccgctgaactagacttgcaatctgcaaacaaatctaaggccatctaaaagacatatatcaagcaattaaaagaaataatgaattcacacaggacctaagcatttacttactggaaacgtccttatccacagctcaaaagtgactattgtgtttttatttcttcttctgagaagctatggttgattatagtctccttattctcgaaaatagaccctgcaaactaaaatcagttgatgagtctatcccgacttgcttgggactaatatgctttgttgtagtttttgcatggatgagttgatgaaacatcttggaagttggaatttaagtgcactacaggtggcattttcatgctaataacatgtctgagtctaactttttttttatccttttacacattttacaattttaaaataaattagagtattagactagtataagctgtgagctatatactggtgcgagttatttatttatttatttatttagcttaaactatctgaaggacaggcttggcacagtggtgagaagcctttccactgagccgaaggtcctgggttcgacacaacctctttgcaaaaatgaaggggtaagggttgccttggttatcacttccttagaccccacttatgtgggaaccgccagcactgagtctgtcctttatttatctcaaactatctatattcacttgtagcgtttctcaatagtcatactgtcaagagtcagattaacttgtgtgttatgttgctttcatagatactgaaaattcaacagctgtatgatggttcatcatgtattttctcccatggtcagcagcggtttcgtcttttgcgccattggttggatgtcgacggagtaccatggggtgaagtgcaaattattgaagaagatacacctcaaagaactccaagagatgcttttgcacagttagctgcacctaacagtttcaggcaatgtgcttcatcgataatgcccagtttgcatgtgtattgttctacacaacttgatcatgtggattctgatatggacagggattcactatcacccactagcacttcaagtgatcactcaataacagataaaagaatataccttttaggttcccgctccagtgatttggtaaggtgtggtattgcggatgaatcctcaaatgaaggccaaaattctgtacatgaacagtcttgtcagagccatgactctgttaaagaaattgatgggtatggtcagccagataagaatacaaacacaggagatgaggataatctttgtttcatatcctccaaatcctttcagagaacaagaaagaaagataccaaacagcagaaacactacttcacaacgaaaaatgcttcacaggctccattgtcattttggcctcactgggcttatgagatgtatgattcgtattcactttccaggagagctgcagatttgtggagacaagtaattttaaacccaagcatggatgatcatgtgagaaaaccaaattatttgtcatattgcattggaagcaaacttcctatctcagaatctctgaggcaagaattgcttgagattgatggagtctcatatcgactacagcgggagattcagctgctcaaagccttcaatatcatacgatgtagaaattgcctgatccatattgcaagacgaagtgacatggtggtgacgtccagtgacagccctatgtctttgcacagcaggcctcacggttttgtgaaagagattattacagtatacaatgccactggccttgcactgcgtggcgacccttccaaaactcacagctggtttccagaatacacatggacgatcgcgttgtgcaatgcctgccagtccagtataggttggctgttcagagtcgatgacaagaacctgcatccgggatccttctgggcgatacgcagttcccaaatttcagacgatacacagtcaagagatagaactgatcagaccatccatgtataagctgcgtgaccatttgttgaaattccaacaatccattaacatctgccttccattattctctgcgagattcaatttggctgcatggtgtccccaagtggctaaggtttctagtaaaatgtaactgaaaacaaagatactgagatcataagcttaacccgcgacatgggcacctacgtttttttgaag

SEQ ID NO: 129902 - DNA, 1090 bp, Zea mays
  unsure (1)..(1090): unsure at all n locations
  Clone ID: MRT4577_49941C.1
cccacgcgtccgcggccgcgtggngaaacaattgcctcgcacgagctcttttcgttgaacagtatagactgagaatggattggggaacaaggcataagatttgccttggaatagcgaaaggtctagcatatttgcatgaagagtctgcaataaggatcgtgcacagagatataaaggccagcaatatactgctcgacaaagatttgaatgccaagatctcagattttgggctagcaaagcttaatgaagatgatcacacccacataagcacaaaagtagctggaactatcggttacatggctcctgagtatgctatgcgtggttatttaacagataaagctgatgtatacagttttggtgttgttgttttggaaattgtcagtggaaaaagtaacacaaactacaggccgaaggaagactttgtttatcttttagattgggcttgtgttctacatgagagaggaactctactggaattggttgatccagatctaggatccaattactcgacagaagaagcgctcctcatgctgaatgttgccctgctatgcacaactgcagcgcctacactcagaccaaagatgtcaaaagttgttagcctgcttgaaggcagtgccccattgcagcctttgctgtcagacctcagccttgcagcaaatagcctgagctcaagtggtgtacgcaggaacttttggcaaaacccaggtgagagtcagagcctgacagcacaagcttcatgcagcgatactaatgaatcatcccccattgatatagatggtattctactggtaagttaaatgtagtttgctgtgcatcatgaactaggtttacatgtaggaactactaagcataggccagcatgtttgtattaagttcaccagtgcaatgtaaatagcaagtagcatactaatgtctagtacaggtagagccctatgcattttaccccagtgcaatgtaaatagcaagtagcatactaatgtgtagtacatgtaaagccctattcattttagtagtctctgtttcatattacatgggaatattaagatgtctgtgacagaacactggaagttctctactggcctttagtctc

SEQ ID NO: 129903 - DNA, 187 bp, Zea mays
  Clone ID: MRT4577_49942C.1
aacagaaaccgatacggggtgcggccacactacaatgctgcaaacgccgaagcgaaaaggcatcaccatcactgttctgggcagatgtgagccccctgccggacaacatgactcattgactggacagaataaggtgtacatatacccaaaagccgatacatttgtcccgtgtttacttctaagccac

SEQ ID NO: 129904 - DNA, 144 bp, Zea mays
  Clone ID: MRT4577_49943C.1
acccactctaggcggttgcacatacttactataccatactacacacaccgtttcgacttttacacactcgctgagcaactagcggggttcgggcgtgaactcgtgtcgcaggaagctataatctagcacggacggggaataata

SEQ ID NO: 129905 - DNA, 284 bp, Zea mays
  Clone ID: MRT4577_49944C.1
caaaccccaaaggcccaaggggtccttaaatcccccgcaaaaaacacacgcggcacacaaaatttcccccagcccgcgccccaccgggggatcaacgagattcctccattgaaatttgtactagggggggctggtttttggcttccaactttgccagcccgcccttggggttccccacctccttggcccagacggttctggcggggacccataaaccggtcagcctttgtacgaaggttcccccgatgcccatgccgttccaaacccccttggggcctcggtcc

SEQ ID NO: 129906 - DNA, 229 bp, Zea mays
  Clone ID: MRT4577_49945C.1
acacgagctggacgcttcgtattacttctgccgcacctaggtctagccctatcccgcagtggccggtgcccggttctcgaaccctaatcccctaccaccgtcgggtctcgcctgcgaagaagagggagccgcgcgtcgtctccagggagcacgcgcccccttcctttccggatgcctccgtgccgtggggaggagcggtcacccgtatccgtccttaccgcgaggcaga

SEQ ID NO: 129907 - DNA, 328 bp, Zea mays
  Clone ID: MRT4577_49946C.1
agcagtggtaacaacgcagagtactttttttttttttttttttttttttttttttctttttttttttttttttttccacccagaacggggttttgaattaaagcaaaccaactcgggggctggtacattcgactcgaataggatccaaaattactcccggcacgggcactgggcggggggggcacacatggagctatgggtaaattaggctggggcatggcccagccaccaccatgggcggggccccaggggagggaccccccgtactctgccgcgctggcgcggctcccgggcgctttccggtgttctgtcgggcgttgggggtggt

SEQ ID NO: 129908 - DNA, 270 bp, Zea mays
  Clone ID: MRT4577_49947C.1
attgttatttttgacccgtaacggacgtgattttgttctttctctgtgcactaacaaatggaaaacccatgacaggaagctgttaccattcaagatcatacccgcggtgggcgtatttgtaactaaaaataacaaaatgatcgaagacttttgggggcccgtgtatcaaaagataccatactcagtctcatacaaacaagactaaggctcgcgaggaaaacgtggatgcaggcaacattcgcccccgaaagcttgtgaatgcgataggcg

SEQ ID NO: 129909 - DNA, 437 bp, Zea mays
  Clone ID: MRT4577_49948C.1
ggccggccgaggcgtacggctgatatgctccagactgttttgaggggtttctatggcaagcctcatggcaccttttctggggtggacattgggcaggtcctcctttcttttctatgcaaggacaacaatgcttcacatgccattgaagctctgcgtcgcgccatgttcaagttccttgtcctcctaaagattattgtgagcagaaagtggtgcttcaccaagttcattcgttcctactaccttaattacaagagtgatggtagaattgttcctgatggtgttaactcatagctgctctttaaccatgtaatactttatattcgtgctcctgggaaggcttttctttaggccgtttcttatatctaatctactttttgaatgttattacatactttttggtttatcctatcttttatgctatgtgcaacatttatttt

SEQ ID NO: 129910 - DNA, 852 bp, Zea mays
  unsure (1)..(852): unsure at all n locations
  Clone ID: MRT4577_49949C.1
tcctaaaggccggncgggatagagatataatcaccggccgagatgtagcctttggcagctccaaataccatcgtgtacagtgtgttcgtgtgaattttgcctccctccgatcggtgttctaacaacccagcaactcgcttaccagccgaccagccgccacaccacatttgcatacctctgagccccttccgtcgagcaccgagacccctgtcccagcctacctgggctccagccattcgaccgtcacccgccctagcatcaatgcctcgcccgctgggtcgtcgctcgcatcgctctcttgcctggcgacaccttttttagtgcagattgcagaggacatgtcgccttggctgtagaataatcgagtaagcgatagaagccactcgtatggagaggtagtaggaagagatcatgaaacatttttcaccgtcagaattagatcgagcgaccaagaaaaaagaagacatggcattgcgagatttattgggttcaattgtgctctacatttcaaagctgagctgtgatgattggttgctaaacaaaacatttgttttgcagccctcgcctttataaatcataaatggatctggaggaaaataacacttcgtgtacaccatttggagacctgataaacaccaccaatgaaggtaaccatttatctatatggatctatgtagtatagtttgggaaatttctatcttgcttctagaaattccaactagtagggatttatgggacacatgttttaatgtttcacaagaggcagcatatgctgaagcaggtatcatggggttccctttgatgatgatgatatacgttgattaatgagtgtgatcgataatggtggtttcc

SEQ ID NO: 129911 - DNA, 334 bp, Zea mays
  Clone ID: MRT4577_4994C.1
gaagaagctgccacatactgatactgatgttcagttcaaggtgatgtttggaaaatatgggagcatggctagtgctagagttatgcgggatagcgatggaaaatacaggtgtgacggatttgtcaagtatcaaaatgcacatgctgcttatcaagctgttcaagagttgaatggcagcatattcattgattaacaactgtatttcgaatgatcacataacaactcttaaagatagattgattcgaacgataaatttgacatgaatgttcactaggtagctcaaaagtttcgcatcacagacttgtatttgaagaacttacaggagaacatcgat

SEQ ID NO: 129912 - DNA, 324 bp, Zea mays
  Clone ID: MRT4577_49950C.1
tgtgttcttgcgcgtccttcttcacagccccagaccgaatggaggttctcgggagcctaggcgctcccccactctgagaccctcggtccaagatgcatatctttgatgaagaccctagccagcaagactatcaccctggaggaggagccttcggacaccattgacaagggtaaggctaggatccaggacaaggaaagcatccctccagaccagcagcacctgatcttcgtccgcaagcagctcgaggacggccgaacagtagcctgactccaaccatgagaatgagtcaagccttcatcagaggccagaccttaagggaggcat

SEQ ID NO: 129913 - DNA, 408 bp, Zea mays
  Clone ID: MRT4577_49951C.1
cggacgcgtgggcggacgcgtgggcggacgcgtgggcttctatcgtctatacgcttgggtctcctccatattgtcgtatgaattatgcgatcacgaaagggaggggatactgggtagcaattggtgtggagaggaaaggttcaagttgattttaaccaaggcagcacgacggcagcgacgacgacatacaacaacacgacggtaggggtgatgatggcagcgccatcgggtggtggatgcagtggctgtcttgactgcctgcatgatattgtgcatgcactatcgatgggatcatgcctgacagtagagcagcggcctgccatggctacgggaggtgcgcacaaagggagagatgtaaaagagaggaaggaaaaggtggagggtaggataataggaaatggagtgggt

SEQ ID NO: 129914 - DNA, 491 bp, Zea mays
  Clone ID: MRT4577_49952C.1
agcagtggtaacaacgcagagtacgcgggaagccttgttcatatctagcgcgttgaatgcgcttcacaatcactcgatacatataagataagaatacctaaatttacctttaaatctatcagagtttagctcatttttaagagccagcctcactacagaaagaaagcagcaatgccctcccgaaggaaaacgtttggattagagctcgacacgaagcaaaatgtagatgatctccgcaaatgggcgaggtaggaggacgtggacgtggttggatgttatttgacacgaggccttgtgcaaaagacgagtacttcagagtccaccaggaaaaggatattggttcgcatctctatattgatccgcggcgcttctatttctatttctatgaagtagttttcctttgtctccgatttcaaagctgaatggatgactgaatctgtcgaagcatcattcgatatttgcggggtagcgtaatgctatgaggagttaga

SEQ ID NO: 129915 - DNA, 116 bp, Zea mays
  Clone ID: MRT4577_49953C.1
aagggattgtttgggactatcatctcacttctaagtaagttaactggaaagaagattacatgagaacaccatagttagttttcacagcacttcctaagggtggtgtcagtagccat

SEQ ID NO: 129916 - DNA, 1719 bp, Zea mays
  unsure (1)..(1719): unsure at all n locations
  Clone ID: MRT4577_49954C.1
cccacgcgtgcgcctaaataagccatcgatccatgctcttatccatgggctgaacgggaccggcgcaccggttgcctacgactgtgcggtcgaaaagaaattaatgaaacgggcgccaccggacctcgcactgggccggagcgggccgacagcaaaccgaacgaacccaaccgaagcgagagctgagcaaggcacgaggcgtcgtgacagcgcgatggggcggggcgccagcggagcttggcggcagctgcggtatggcggctgccgccgcgccggggcgcccccgggcccggggggaaacggcggccgaggccgcaagcttctcactggccgcaagcaaaccgaacgaacccaaccgaagcgagagctgagcaaggcagaggcggcgtgaccggcgatggagcggctgcagcggatctttggcgcctccggcatggggcagccgccgacggactcgccgctgctcgattcctccgagcaggtctacatctcctccctagcgcttctcaagatgctcaagcacgggagggctggggtgcccatggaggtcatgggcctcatgctcggcgagttcgtcgacgactacaccgtcagggtcgtcgacgtcttcgccatgccgcagagcgggactggtgtcagcgtcgaggccgtcgaccacgtcttccagacaaacatgcttgacatgcttaagcagaccggcaggccagaaatggttgtaggttggtatcactcacatcctggcttcggatgctggctatcaggcgtcgatatcaatactcagcagagttttgaagctttgaaccccagagccgttgctgttgtgatagaccccatccagagtgtgaaggggaaggtggttattgatgcattccgcctcattaatcctcagaccatgatgcttggccaggagccacgtcagacaacatcaaatgttgggcacctaaataagccatctattcaggctcttatccatgggctgaatagacactactactcaattgcaatcaattaccggaaaaatgagcttgaggagaaaatgctgttgaacttgcacaaaaagaaatggaccgatgggctaattttgaagaggtttgacactcactcaaaaaccaacgagcagactgtccaggaaatgctaaacctagccatcaagtacaacaaggcagtgcaggaggaggacgaactgccacctgagaaacttgcgatagcaaatgtgggtcggcaagatgcaaaaaagcatttggaagagcatgtgtcgaatttgatgtcatcaaacatagttcagaccctaggaaccatgctcgacacggttgtcttttagtctactaataatattgttgtcccaaactgaaacatagccacactatcgaagcatgacacatgcaatgagcttgacgccggatacattttggttctaaggtttgtttatgaatggatttgtctacatttcattgttgttaaacttcctaccttttctatcaaagcttcagtgcgttctagttatgtttaagccaaggtggctccagatgtcagttgggatgtcattgccctggagtgtaatgtgattatgacctgtggcagatgacttattttgtttcttctacatgcattgacacgaatctgagtgatctcgtaaactcttcggagccaaaaaaaaaaaaaaaaaaaaaaaaaaaaaaaaaaaaaanaaaaaaaaaaaaaaaacnaaaaccccccccc

SEQ ID NO: 129917 - DNA, 264 bp, Zea mays
  Clone ID: MRT4577_49955C.1
ctggagaagttatcattcattggggagtttgcagagacaatactatgacatgggagatcccaccagaaccacatccaccaaaaacgaaaatattccgacacaaagctcttcaaactttgctgcagcaaaaagctgatggagcaggaaactcaatttcattctcacttgatgcagagtattcttgtctgttttttgtgctcaaacttgacgagtatacttggttgagaaatcttgagaatggatctgatttctatgtgccactta

SEQ ID NO: 129918 - DNA, 1740 bp, Zea mays
  Clone ID: MRT4577_49956C.1
caagctgtgaaaacacgtctgataacttttgtgagatcgttatcaactgtcctggctgttgcatatattctcacaagcttgattcagcaggtacaaaagtttcttatggacatgcgcaatcccaatgatacaagaaatatggggtttgattttaccatgaaagctctttatactcttgtttggattgcttctgtttctctctttatggagttgctgggtttcaatacccatcagtggataactgctggagggtttgggacgctggtacttacacttgccgggaacgagatttttactaacttccacgagatgggcatgtctcggtggctaagccaattaaaaaatcttgaacagttcgatgcgataacattgttctgggcgtagtccgggagggttgagcatgttggtttgtggtctccaacactcattagaggtgttgatcgagaagcgatatacattcctaaccataagtttacagtttctatattaaggaataacactcagaggacccattggcgtattaagacctatcttgctattagccacatggatgctggaaaaattgggactatagttgctcacatgaggaaagttttggcaaaaaatccgcatatagaacaacaaaagctgcacaggagagtattctttgagaaaattgatccaaaaaatcaagcacttatgattttcatatcctgctttgtaaagacatcacattttgaggagtatctcaatgtccaggaagctgttatgttggaccttcttagaatagttgggcatcacaaagcaaggcttgctacccaaattcgaacagttcagaaatcatatggcaatgcagacttcgataacattccttttggagaggacatgtatagtcgagtccgtggccggccacttctgattgatacatctgcaaggatcagtgatgacaaacccaggcctcgacctgtatcatcacgtgaggagcagaaagtcaagacaaatggctcggtagatattaagtccagttcccctgaaaatgctagttcaagcaactctgaaaagcaggagccgaaaaaaatggtgcctgaagatactcgggtgaagaacattaagggtgataatgtgatgccagtaacaccatctttagatcctgctacgtcaacttctaaggctggtaaagggaagacacgggaaccagagcccactgagcggcaaggagatgggccagtctcggtagctaatccaaagaaagaatctagaccagtttttgaggataacattgttctgggcgtagcccttgagggttccaggaggacactgccaattgaagaaggaaatcctcatctatcactatctgagactgaggtcgacaccgaagaggcggcttcatcgccgaaggataagataggccaaagcccaaaactttgaggtccagaaaaaaagccgttcagaggaatctcgataggtcatccgagttcaaactgtatccttgtgaagatttgtcaccaagcctaccttttttgtgcgcttgtgcaaatacaatgccaccacacatcagtgttgtatgcttaaggggtaaattcacactgacgattattcagggaacattacctgttgaaatataaatatatcagtcgtattgctacaggcttgtgaagaagcaagtgcttcaacaggcattttgtaaagattatattattgctcatttaagtggcttcttgcatatgcatcggcaattcagcatgcgccgttgcaactgtc

SEQ ID NO: 129919 - DNA, 1264 bp, Zea mays
  unsure (1)..(1264): unsure at all n locations
  Clone ID: MRT4577_49957C.1
tgtgcggcgctcgaggcggcggtccgggatttaggtgacctatagaaaccggccgggggccggccgggcaggccgggaccacgattttagtcgcaactcgcaagcaaatcgaacgaacccagccgaagcgcgagctgagcaaggcggaagcggcgatggagcggctgcagcggatctttggcgcctccggcatggggcagccgccgacggactcgccgctgctcgactcctccgagcaggtctacatctcctccctcgcgcttctcaagatgctcaagcacgggagggccggcgtgcccatggaggtcatgggtctcatgctcggcgagttcgtcgatgactacaccgtcagggtcgtcgacgtcttcgccatgccgcagagcgggactggggtcagcgtcgaggccgtcgaccacgtcttccagacaaacatgcttgacatgctcaagcagaccggcaggccagaaatggttgtaggctggtatcactcacatcctggcttcggttgctggctatcaggcgttgatatcaatactcagcagagttttgaagctttgaaccccagggcagttgctgttgtgatagaccccatccagagtgtgaaggggaaggtggttattgatgcattccgcctaattaatcctcagaccatgatgcttggccaggagccacggcagacgacatcaaatgttgggcacctaaataagccatcgattcaggctcttatccatgggctgaacagacactactactcgattgcaatcaattaccgaaaaaatgagcttgaggaggaaatgttgctgaacttgcacaaaaagaaatggacagatgggctaattttgaagaggtttgacactcattcaaaaaccaacgagcagactgtccaggaaatgctaaacctagccatcaagtacaacaaggcagtgcaggaggaggacgaactgccacctgagaaacttgcgatagcaaatgtaggtcggcaagatgcaaaaaagcatttggaagagcatgtgtccaatttgatgtcatcaaacatagttcagaccctaggaaccatgctcgacacggttgtattttagtctctactaatattgttgttccaaactgaaacatagcccactctatcgaagcatgacacatgcaatgagctcgatgccggatacatttttggttctaagatttgtttacgaatggatttgtcaaaaaaaaaaaaaaaaaaaaaaaaaaaaaaaaaaaaaaaaaggggggaacggtcatannnnnn

SEQ ID NO: 129920 - DNA, 1306 bp, Zea mays
  unsure (1)..(1306): unsure at all n locations
  Clone ID: MRT4577_49958C.1
aattcggcacgaggcccatcttactttttgtttccttctttctcaccaaacaaaaccaaaccaaaaaccgatggaatgaaaagtcgtattccacttcagtttttgtctactaactagaggttagccgaggatccggtccctcctcccctaacataagtcgccatccccgccgctgcagttcgagctccgaccggcccaattcggcacgaggccggtgtcgtcctcgactttcgccgttagtcccctcaaggaaaggaaagaaggagagggatgacgtggttccgcgccgcatcgggtgccgcccgcctcgccctccgccgcagcctcgccacccgcacgccgccagccgccgccacccgatgcggccgctgcttccactccaccgctatgcgtccccgctccgccgcccccgtgccccgggccgtcccgctctcgcgcctctctgacagcttcctcgacggtaccagcagcgtctacctcgaggagctccagcgggcctgggaggttgacccttcctccgtcgacgagtcatgggacaacttcttccgcaacttcgtcgcccaggcctctccttccgccggcgtctccggccagaccatccaggagagcatgcagctcctcctcctcgtcagggcctaccaagtcaacggccacatgatggccaagctcgaccccctgggcctcgacgacagagccgtccccgaagatctccgcctcggcctctacggcttcacagaggccgacctcgatagggagttcttcctcggcgtctggaggatgtccggttttctctccgagaaccgccccgtgctcacactccgtgagatcctcaacaagctccagcaggcatactgtggacccatcggctacgagtacatgcacatccctgatagagacaagtgcaactggctcagggaaaagatcgagactgccaagcccaaggaatataacaaggaccgccgccttgtcatgcttgacaggcttatctggagcacccagtttgagaatttcctagccaccaagtgggccaccgccaagaggtttggccttgagggtggtgagacgctcatccctggcatgaaggagatgttcgatagggctgctgacctcggtgttgagaacattgtcatcggtatgccgcataggggaaggctcaatgtccttggtaatgtcgttcgcaagccactgtctcagatattcagcgagttcactggcggcacaaggcctgttgaaggcgaagatggtctctacaccggaactggtgatgtcaagtaccacctgggtacctnctatgatcgcccaactc

SEQ ID NO: 129921 - DNA, 1002 bp, Zea mays
  Clone ID: MRT4577_49959C.1
ccggtcgtcctcctcctcatcatcgtcagcacgggagggctggggtgcccatggaggtcatgggcctcatgctcggcgagttcgtcgacgactacaccgccatgccgcagagcgggactggtgtcagcgtcgaggccgtcgaccacgtcttccagacaaacatgcttgacatgcttaagcagaccggcaggccagaaatggttgtaggttggtatcactcacatcctggcttcggatgctggctatcaggcgtcgatatcaatactcagcagagttttgaagctttgaaccccagagccgttgctgttgtgatagaccccatccagagtgtgaaggggaaggtggttattgatgcattccgcctcattaatcctcagaccatgatgcttggccaggagccacgtcagacaacatcaaatgttgggcacctaaataagccatctattcaggctcttatccatgggctgaatagacactactactcaattgcaatcaattaccggaaaaatgagcttgaggagaaaatgctgttgaacttgcacaaaaagaaatggaccgatgggctaattttgaagaggtttgacactcactcgaaaaccaacgagcagactgtccaggaaatgctaaacctagccatcaagtacaacaaggcagtgcaggagggaggacgaactgccacctgagaaacttgctatagcaaatgtgggtcggcaagatgcaaaaaagcatttggaagagcatgtgtccaatttgatgtcatcaaacatagttcagaccctaggaaccatgctcgacacggttgtattttagtctctactaatattgttgttccaaactgaaacatagccacatgcaatgagctcgatgccggatacattttggttctaagatttgtttacgaatggatttgtctacattccgttgttaaactccctgccttttcaatcaaagcttcagtatgttcccgttacccttaagccaatgcgggtccacattgtcaaa

SEQ ID NO: 129922 - DNA, 477 bp, Zea mays
  Clone ID: MRT4577_4995C.1
aaggctgactggcccaggctgctgtccatcgccgtcgacgtcgcccaggggctggcgttcctccaccaggtggccaccgtccacctcgacgtctgctcggggaacgtgttcctcgactcgcgctacaacgcgctgctcggcgaggtcgagatctccaggctgctggacccgtgctcagggtcgccatgctgtgcacggagcgcgcccccgcgaagcggccccggatgaagaaggtggtggaaatgctgcaggaggccagggacagctgagtggtctggttcctctgctcaatgatgtgtggttggctgcttggaacttggaacttggaagtcgaggcgagaaactctgaactgatcatcgttggagttcgagtatggagtccatccggtagcgtttgattctctgtatatattcggtaattagtatcccgatcatgcgccatggatcactggatgttcggtcttggagcaatgcctg

SEQ ID NO: 129923 - DNA, 1429 bp, Zea mays
  Clone ID: MRT4577_49960C.1
cctcgaggccggccgggacattctatctcgagggccggggcgacgatttttctcactactagtcggcgtagtcgcaactcgcaagcaaatcgaacgaacccagccgaagcgcgagccgcgagctgagcaaggcggaggcggcggaaccggcgatggagcggctgcagcggatctttggcgcctccggcatggggcagccgccgacggactcgccgctgctcgactcttccgagcaggtctacatctcctccctcgcgcttctcaagatgctcaagcacgggagggccggcgtgcccatggaggtcatgggtctcatgctcggcgagttcgtggatgactacaccgtcagggtcgtcgacgtcttcgccatgccgcagagcgggactggggtcagcgtcgaggccgtcgaccacgtcttccagacaaacatgcttgacatgctcaagcagaccggcaggccagaaatggttgtaggctggtatcactcacatcctggcttcggttgctggctatcaggcgttgatatcaatactcagcagagttttgaagctttgaaccccagggcagttgctgttgtgatagaccccatccagagtgtgaaggggaaggtggttattgatgcattccgcctaattaatcctcagaccatgatgcttggccaggagccacggcagacgacatcaaatgttgggcacctaaataagccatcgattcaggctcttatccatgggctgaacaggcactactactcgattgcaatcaattaccggaaaaatgagctagaggagaaaatgttgttgaacttgcacaaaaagaaatggacagatggactaattttgaagaggtttgacactcactcaaaaaccaacgagcagactgtccaggaaatgctaaacctagccatcaagtacaacaaggcagtgcaggaggaggacgaactgccacctgagaaacttgcgatagcaaatgtgggtcggcaagatgcaaaaaagcatttggaagagcatgtgtccaatttgatgtcatcaaacatagttcagaccctaggaaccatgctcgacacggttgtattttagtctctactaatattgttgttccaaactgaaacatagcccactctatcgaagcatggcacatgcaatgagctcgatgccggatacattttggttctaagatttgtttacgaatggatttgtctacattccgttgttaaactccctgccttttctatcaaagcttcagtatgttctagttatattgaagccaatgtgggtccccattgtcaattgggatgtcattgcccctgggagaaattgtgtaatgcgattatgacttgttgcgtgggccgcgtgtgatggcttattttgtttgttccccaaaaaaaagcaacaagttttccatgcaaatatttgagtgatcttgcaacctc

SEQ ID NO: 129924 - DNA, 753 bp, Zea mays
  Clone ID: MRT4577_49961C.1
cattgggtacctcgaggccggccgggctctgaggccctacggagtaccaaccacgtcaccgaaactgtagacgaggaggacaagggtcaagggaaagaaagccaaccgccccaatctcgcgtcccgccggcggccaccaccaccaccgccatgatcagcatcctcgcgcaggagcgcctcctcgggttcgccctgggctccgtctctatgggaggtttcgtcctccaccagcgccgcgccatctaccgctcaatcgctgaagccgatgggtcgtcctacttctaccagcctggtgaaattgccggtcgtagaagttcaactgaactggctcatgtatggaacaaggcggtggacgagactcttgggaaacttgttgtgtaccttagctctcgtggatggtgatccaagcaccatgtcgaacatggcaactgaggaggcacgggtggaggaagactcttttttgaagccactgatgtgctcatatttctctgtatccggattgagcatgttttgttttaaaagaaaagatgctcccagtgaccgatttatctcgaactgagctgattctactgcatgtttcccttaactggtgcatgttacttcgaggtcaatgttctggcccctgtgaaaggcaggattcgtctaactattttgcatatatctattgaaaataaagccttcgtccaaaaagattgcaaataaaaaaaaaaaaaaaaaagcggcggacaggagaaaaggaaaaagtgggagggg

SEQ ID NO: 129925 - DNA, 190 bp, Zea mays
  Clone ID: MRT4577_49962C.1
gatggacattatctccgttgactcgcaatgacctcagtgaccacgggactactacaatcgaatggcgaacgattgggtggacacacattctaataccacactcatgatggatctacgtactgagcagtggctaccaagccacgtgctctctagatatccaatgacatccattgagagagtcaaagaagat

SEQ ID NO: 129926 - DNA, 548 bp, Zea mays
  unsure (1)..(548): unsure at all n locations
  Clone ID: MRT4577_49963C.1
ggcggacttcnctgcagcttccgccggtgcgggtggcggcgggggatgttcaccaaccctctcgggcgcgagcgggtccatttgagcgtgacctcgtggtgcgggtggtggatgggcagggaccctctttcaaaatgggagcacgagctcgngaaaaaggggagtccgaatctgccatgatcaaggatagaggggggggggggagttcctgtgattgtggagaaagctggcaaaactgaggtgcccgagattgagaagaagaagtaccttgtgcctgctgagctcactgtggggcagtgtgtgtatgtggggaggaggagaatcaaggtgagcccagagaaggggctctttgtgtttgggaggaggagcttgggaccaactgcgtttttgatgtgtgggatctacgaagagaacaaggacgaggatgggttnctttacatgagctacagtggtgaaaacagcttcgggtttggctagagcaatcggccctgccactgtgaataaacgagcatgaggggggtgntgntattgtgaacctgtgtatatac

SEQ ID NO: 129927 - DNA, 411 bp, Zea mays
  Clone ID: MRT4577_49964C.1
tttttgagaaatagaaagatgctatatatttattctttgaaatagcaaatgtcaagaacaacctaggatttcaaagggagaaatcctagattacaacttataagcatcattttgaaacaaaatcctaattaacagcgatatagctcaatgacaaacaaaacaagtagtccacaccacacacaattttccccagagattctgagtctcacatacatgaatctattttgaagcagtgaggctttcatagaagcctttaacaaacacataattcttagaaatactaagtctcacaccacatcatcaaatctattttgaaccaaaaaggctttcatagagacccttgaaaaaggagaaaacaggatctctagggggcagactttctttgacaattggatggttcaaaaattcttg

SEQ ID NO: 129928 - DNA, 527 bp, Zea mays
  Clone ID: MRT4577_49965C.1
aaataatgatgatacatcgacaaatcatatacattcttatttcataaacatggataaatattcatgatatttatattacattaataccttcggcttgctagaacgtgaaaatgcgagagtgacgcaagattacaatgccgcgtgaacagtacggtgttactgttcatctatttataggcacgggacgcaacccggacaaacttacattcatatccctgacatttactgctaatcataaggtgagctatcaagggctgagtagtcttttcccttttaggtcggtttcatcttccaccttcatcatcatactaagccaaagctccttcagccacagcttcggcgctcgttcatcctaccttcgggttgtatttccatatcacgtataccttcgtcttaaagccaaagcttcctgaagcatggtcgattcgttgcacccacccgacgaaaagcgcgcggattgcagggagtccgccacggcagatcttaacagcccggggaagggatggatctgacagcccacgcgtccg

SEQ ID NO: 129929 - DNA, 270 bp, Zea mays
  Clone ID: MRT4577_49966C.1
accgacgcgtccgaaaaaaaataaataaaaaataaaaaaaaaaattaaaaaaaaaaaaaagattttaataaaactaaataaatatttaacggatgatataatgtaaagctagaaagtcttcatgtgagcttcgatggaatcgattcgggggtcggtcaccggagggcttagcttgagattccttcgagtttaaatgttacttattttcaatgggccctatatttaaattctctggccggggtttttgcaaattttcccttggaaatcccc

SEQ ID NO: 129930 - DNA, 292 bp, Zea mays
  Clone ID: MRT4577_49967C.1
gcgataggattatgttctacttattagaaccattagttgggtgctttatttagtcgatatgctttgcgataatattttagaataggagattgtaaagctaattgtaaagctactaattgttaccctaagtccgaggtatactagattaattaacctaagtattgttagtctttggtgttaggtgttagttaagaaagaaataaaatttatgcttagtgtgttgtttcgtgatgtttgagctagcgccggatgagcataagaagcgcgaatattatagttagtcttatcgaca

SEQ ID NO: 129931 - DNA, 532 bp, Zea mays
  unsure (1)..(532): unsure at all n locations
  Clone ID: MRT4577_49968C.1
cccgggncgacccagcgnccgcccacgcgnccgcggacgcgnggggccgagggccaggccancgncccgcagccnncggcggaggnnangaggancnngcaaagacnnagcagcancggagacacagncgncancncggggaccaaggagggcgngaaanncnccacancnggagaaanngggagngcaaacangggcggggggggggaccaaacnanngacaagccagaagaggcnaccacnannagagagcaggagccggnnncccngaccnnngcccngcgggacaggaaccccnncaccaaggcgncnncacgggcggagcaaggcacnancagccnggcgnccgagcnnccaggggngggcgaggacaagaacgcnngagagggggacannagannnnaccnggcccccaagancgacgangacgaggagangaagcccnngaggccngngacgacanaangcncgngnngccggcncnnccnnccagccgnnnggggcnnagcnacncnnngcaagcgaagaaggg

SEQ ID NO: 129932 - DNA, 645 bp, Zea mays
  Clone ID: MRT4577_49969C.1
gaaagtggatgctgttggagagagttcgttttacagacggtgtcgaatgtaacaagattggtgttggttatgaggctttccaaaaccaacctaacttttgtgcatcgccatttgagagctgtttgaacaatcagctatggacctttttggagggaaggtttcagaggatcaatcaacatccagatgcaagtgttcattctttttctattggagtgacagaagttattaatagcaatttacggatagagctgagtgctgatgacatagaatacatgtatcagaggtatatttgttggccacggccctactaatttgaaattagcaagtacagacagatttatgtttatcaggtgttcatactcattggtgttcatactcatttcaatttagctattacaaccatatttatatttgttgaccacggccctactcttaaaattagatgctatccaaataacaagtgtccctttaaatctatgccatgtttgacaaacagtagggaaacaaacattggtactacaggtttcttctcaagtcctactctttacatttttatgttctttattaatatataggagaatgtctaatatgttgtgcttccacatcaggagtccagggaatataacagacattagtgttccagca

SEQ ID NO: 129933 - DNA, 808 bp, Zea mays
  Clone ID: MRT4577_49970C.1
gccggaccaaccataatgcagaaagtggaggcccccgcgtcgcccccgcttgggcggcgctaaccgtcgtctcctcctcttcctcccctctctacctcgccgccgtcggagctagccggcgggttgttcgcccggctcgtgaggaaggcggcggtggggcgtttcggcgtgtcgtggctcgcggcggcggtggcctgtgctcgcgcgcacgccaacggcggtggcattgctgtgctccaacgcgtggccgaccggtttggaggttgttgttggtccagagaatagaactgttgtttctaaagacaactttctgagagtgaatctcattggtgattttggtggttataccagcatcccagcatttgaggacttctatcttgtgacccctaggaagagtgctggtagtggtgagccacaaaaccttggtgctgaatatagaaagtggatgctgttggagagagttcgttttacagacggtgtcgaatgtaacaagattggtgttggttatgaggctttccaaaaccaacctaacttttgtgcatcgccatttgagagctgtttgaacaatcagctatggacctttttggagtctgacaaaaaccggataagcatgagccgacagccccaatatgttgtgcagggaaggtttcagaggatcaatcaacatccagatgcaagtgttcattctttttctattggagtgacagaagttattaatagcaatttacggatagagctgagtgctgatgacatagaatacatgtatcaggaggagtccaggggatataacagacatttagtgttccag

SEQ ID NO: 129934 - DNA, 378 bp, Zea mays
  unsure (1)..(378): unsure at all n locations
  Clone ID: MRT4577_49971C.1
aaccaacctaacttttgtgcatcgccatnngagagctggttgaacattttggtgtgggcctttnnggagtctgacaaaaaccggataagcatgagccgacagccccaatatgttgtgcagggaaggtttcagaggatcaatcaacatccagatgcaagtgttcattctttttctattggagtgacagaagttattaatagcaatttacggatagagctgagtgctgatgacatagaatacatgtatcagaggtatatttgttggccacggccctactaatttgaaattagcaagtacagacagatttatgtttatcaggtgttcatactcattggtgttcatactcatttcaatttagctattacaaccatatttata

SEQ ID NO: 129935 - DNA, 369 bp, Zea mays
  Clone ID: MRT4577_49972C.1
ggaatctttcctgctctatagtgattattccatacatggtttacccaagggaccatgctacctatggaggctttcttgcgtggatgtttgcccctgttcataagcaatgttctctgtacttgtcaatttacttgatgacagattttgggattctaagtgtacacatgaagtatgttggcagtgaacataaaacctgattgaccacctgcagtctgcctgcttgtgatagaaataaagatgtggttgacaatattttttcaattttctgtacgaggggtagaaagtttttcatagatggtctattatgtcccatgggcaaccctaaatatgtgaaaggaagaatcccaacttgaaactgagaggattgct

SEQ ID NO: 129936 - DNA, 2125 bp, Zea mays
  Clone ID: MRT4577_49973C.1
ttgggtacctcgaggccggccggaaagaccaatccataaaatgcagaagtggaggcccccgcgtcgcccccgcttgggcggcgctaaccgtcgtctcctcctcttcctcccctctctacctcgccgccgtcggagctagccggcgggttgttcgcccggctcgtgaggaaggcggcggtggggcgtttcggcgtgtcgtggctcgcggcggcggtggcctgtgctcgcgcgcacgccaacggcggtggcattgctgtgctccaacgcgtggccgaccggtttggttccatgtttttggaattggaacaaggtcacttgggttcaacatcagggtacaagttaagaaaggttcatctgtatcggaggttgttgttggtccagagaatagaactgttgtttctaaagacaactttctgagagtgaatctcattggtgattttggtggttataccagcatcccagcatttgaggacttctatcttgtgacccctaggaagagtgctggtagtggtgagccacaaaaccttggtgctgaatatagaaagtggatgctgttggagagagttcgttttacagacggtgtcgaatgtaacaagattggtgttggttatgaggctttccaaaaccaacctaacttttgtgcatcgccatttgagagctgtttgaacaatcagctatggacctttttggagtctgacaaaaaccggataagcatgagccgacagccccaatatgttgtgcagggaaggtttcagaggatcaatcaacatccagatgcaagtgttcattctttttctattggagtgacagaagttattaatagcaatttacggatagagctgagtgctgatgacatagaatacatgtatcagaggagtccagggaatataacagacattagtgttccagcatttgaagtcttaagtcaatatggtactgcaaaggtcacaactaagaatattggtacactggaggcttcgtataccttgacatttcactgctcaagtggcatcagttttatggaggagcagtactatatcctcaaaccgaatgaagagagtacccgtttattttacttgcacgcatctacagatcaagcagcaaagtatcaatgtacagctattctgaaggcgtcggattctagtgaactcgacagacaagaatgtgttttttctactacggctacagttcttgataatggaacacagattatcggttcaaatggctacaaattgggtttctttgacaccatcaaaggctatttggttagcttctgggattttctgattgatttaatcagtggcaaatcctgcaggctgaacaaatgtcggagcttttttgacttcagctgccatgcgcagtacagatgcataacctggctcgtcatgttggtgctgctactttttatgttacccgcaggcgcaattgtcctgtatcttcttcatcagaaaggcttcttcgacccagtatacgactggtgggatgacctgctgggggcggactaccgcgcgcaccggaggcacaagaaaggccgccgccaccaccatcaccaccacgaccaccatcaccaccggcaccaccaccaccacgggcactcgcacggccatgaccaccacccccacagtcaccaccacgcgcaccagaggagaaagatcgagcccagccaccaccacgtcctacacaggcagcagcccgggacagcggcagaaggccaccggcacaagcacgacccggcgctcggcgtgcagcacagggaggccgggcacttggggcacaagcgtcggcatggcaaagcggtggtcgcggaggacgccctggacctggagttcagggaacgaaggccatacgaggtcaggcatgccgggcacctgcaccgcgaccaccaccaccaccaccactcctgggaagtgtaggaatagttctgaccgtctgaactttaagacatctagcgtaagatgaagttggtgtaccgtgggcacgggacatgcccttttgcatgcatgcagtgagttagtgggtgtttaatttctagtaaactaatttgtatcgcttcattttatttcattttagtctttaatttgcttaatattgaaactaaaatttcataaaaaaaaaaaccacacgc

SEQ ID NO: 129937 - DNA, 295 bp, Zea mays
  Clone ID: MRT4577_49974C.1
ctttttggtgggtgaaccccatgttggcagggagtatttttaaaatggagcaatggttgcggaggaaactgtcaaccacgcaatattgagagctgctgaaaactggatgcttgctgggcaggtcccataaattcctaatggtatgtgaacttcatcagtagatgtgagcaccatcgatttaggttctcatccatcaaccaatcagagcttcgactgtggtggtactacatgcactattgtctagaatgccaccgcgtctagtacacgatacagcaaagccattgaggagaggcta

SEQ ID NO: 129938 - DNA, 304 bp, Zea mays
  Clone ID: MRT4577_49975C.1
caacagatcatacaatatttatgattaggggcctggggaaacaggaccacatgcacaagcatatgaacatgatgcatacggaaaaaaaaagcggggatcgagggagctttatcgtgccagattgcactacacaagagggggagtttcttttttagaaaggcagaagaggaggaactagagacaaaagaagcaacatcataaaaggcaccttcttagaacgaaaaaaggtgaaaaaccaaaaaaatctgattgatcagggacaagaccccctctggagggggggcttccggtcttttctgaagaa

SEQ ID NO: 129939 - DNA, 234 bp, Zea mays
  Clone ID: MRT4577_49976C.1
catttgactcacgactgcgcctccatgcccagcgttgtaccggcgagctcctggcctgcttcatgactgggactcgccagctgtcgacacgaatggtcctgagaccattccgcattacactgcttgtggagcaactatctgacatacctgcggatatgcagcttgtgccgcacctaatcgggtgactctaaaagccatgcgtcaagctcgtaataaagggcgcgatcttgctcg

SEQ ID NO: 129940 - DNA, 172 bp, Zea mays
  Clone ID: MRT4577_49977C.1
cccccgccctgcaggcaattcgccacgaggagagagcgagggatgtcattttctgcactttgtgcctggcggggacccggcagtggcatgagatgccgaatctaagtagatatgctggatgtggaccatcaacaactgatgtggatcatgccgatcttaccggtgcctctca

SEQ ID NO: 129941 - DNA, 537 bp, Zea mays
  Clone ID: MRT4577_49978C.1
ttcgaagccaaaagttgccttttcggtcgctagttcggctggatgattttggccgatcgatgcccatgccggtgcgcggcggcaccatgacactccgacggaccaccgacgatcacttgcgcgcgcggcgccatgacgtaccgagcgacgtcgacgtcgacggcgcgcggcgtggtgtggtgtggtgctccggccccgcctcaccttgatcatccttcggcgtgaagactctatcaaacttaaggtctttttagttgttctgccatttgcattctggcctgatgacacctcatctttgcttaagggccggcatcgacaaaaaacctgatatttcttttgtctcctgaacaatattataaagtttcttcctcttatccatctcttcatagtacttcaattttaaatcttcacactgagcaactccacgccgacttcttgctgggctcgccaaccttgtgcctggccgctcccttctttgccttccctccccctccgatgtcggtggcgtccatggctgcagctgcgccttcgacagca

SEQ ID NO: 129942 - DNA, 472 bp, Zea mays
  unsure (1)..(472): unsure at all n locations
  Clone ID: MRT4577_49979C.1
cctcatatgtattgaaaaccctctngcgacatatataagccactagtgtaccaccaagtggcagcgcaagagatattgagcctcgcgtacgctccttggtctttatggacgggctggtacggggaccaaagaacgggactgctcacttgctcatatagtgcaccattctctgcgccggacctgtaaccagaggtggcctcgctatgtgagaacctagttgatcaacacctacgggatccaacaggcagttcagatctcatctaactctataacacatctttcgccagaagcaccaaagcaaccgtatcacatgacggacctttgtcccataggaacctgcagaacatgaccaaacagcaactataacaacacagcgctcgcaaaccgttgttgcctactctgatgaccaccaggacctatacttctatcaactacgttgcttgaacatttgttgatactagggccagcaaca

SEQ ID NO: 129943 - DNA, 471 bp, Zea mays
  Clone ID: MRT4577_4997C.1
attgggtacctcgaggccggccgggctttctaccgatgccatgcgagtagagtgaagagattcagggcgccattgcctgggtgttcttaccagcactactcgaagcttgggctacaccatgggcggacctcggtggactggcgtgaacccgctcgtgacctcaggttgggttgggagtcgtctggatagggggaaattctcgttggagagccgcgcagcagcaggaatcgcgctgcgccgcggacgacctcgccgctaccgcttcatgattgaggtgaagtgcaggtagtccaggaggaggtctacaacgaggggtacaagcttatctaggtggcgtctcccagtcagcttaatggcgccaaggaataattattagttcgctttattgttatcatttattattgtaagacactttcactatgtaataatatttgtgacatttatctcgaaaaaaaaaaaaaaaaagcggcc

SEQ ID NO: 129944 - DNA, 836 bp, Zea mays
  unsure (1)..(836): unsure at all n locations
  Clone ID: MRT4577_49980C.1
cattgggtacctcgaggccggccgggaccgccatatgagttgtctcaggatgcgtcgcacgcagcttgcgagccagctcgcgaggagtttccgcccaagcacacgtgctttctcctcaactcgacccttccaacgtataatcgctaccgagaacctgcgagcaaaggaggcttcaggcttcatctccagcaagtaccctgtcattgaccatcaatacgatgccattgtggttggcgctggaggagctggtctgcgagcagctttcggtctcgccgaggcgggcttcaacacggcctgtatctcaaagcttttccccactcgatcgcacacggtagctgcgcagggtggtatcaatgcggcgcttggaaacatgcacgaggatgattggaggtggcacatgtacgataccgtcaaaggttcagattggcttggtgaccaggacgctatccactacatgacaagagaggccccacagtctgtcatcgagctcgagaactacggttgcccattctccagaaccgacgacggcaagatttaccaacgtgcctttggtggtcaatcgcaaaagtatggaaagggcggacaggcataccgatgctgtgctgccgccgacagaactggtcacgctctcctgcacacgctctacggacaatctctccgccacaacaccaaatacttcattgagttcttcgctaccgatttgatcatggaagatggcgtctgcaagggtgtcgttgcctacnaccagnaagacggaactatccacccgttcatcgctaagaacactggtnntggcactgggtgggtacgnacgtgnctacttcagctgcacatcg

SEQ ID NO: 129945 - DNA, 326 bp, Zea mays
  unsure (1)..(326): unsure at all n locations
  Clone ID: MRT4577_49981C.1
gcgtccgtagnaacacgcatcgaccacacacaagccgaatctcgtttaggataaacacataacaccaatctgtgcaagcatcatggagtccggtcagcaggggcagagcggccactggcgccactggccatgttgaccagtacggcaacccagtcaggcggcgtcgatcacggcaccggcggcatgaggcacggcacgaggaaccggcggcggcatgggccatctgggtgagcacgggggcaactggaatggctggcgggcagttgcagcctgcgagggaggagcacaagaccggcggcattctgcattgtttgcggcagcttcat

SEQ ID NO: 129946 - DNA, 768 bp, Zea mays
  Clone ID: MRT4577_49982C.1
cacttgcgagcgagctagggttccgagagccgccggcgccatgttggtctaccaggatctgctctctggcgacgagctcctctccgactccttccagtataaggagatctttgacggcgtcctctgggaggtcgagggcaagtgggtcgtcaaaggagctgtcgatgtggatattggtgccaatccatctgccgagggtggtgaagatgagggtgttgatgaccagactgaaagggttgttgacattgttgacaccttccgcctccaggagcaacccacatttgacaagaaaacatttgtgactaacattaagcgctacatcaagaacctcactggcaagctggagccagagaaggcagatgaattcaagaagggcattgagggtgccaccaagttccttcttagcaagctcaaagatcttcagttctttgttggtgagagtatgcatgatgatggaagcctagtgttcgcttactacaaggaaggtgccactgacccgacattcctctattttgctcatggtctgaaggagattaagtgctaggcgggcatgccctctttacctcatgttgcttgttatcatctttacctcatgtcgatggttatcatctatataatactatcctatttttgttctagtatggattatgtcatggatggttatggaaaaactgttttggaaaaaaactgttggaagaatggattcggattatgacgtgaaatgttttggaaaaactgagaagattggattggagttttccaatatct

SEQ ID NO: 129947 - DNA, 232 bp, Zea mays
  Clone ID: MRT4577_49983C.1
gtctccttacagacactgaaacctgttatcgacagagcaaacccgaaaatcggcataggaatgctggcatttagtcctgatatctacttcctggcgacaaggaacgacaacattctcaatgcagtctgggtctgggacattcagaagctgaggctgttcgcggtgctcgtgcagctgtccccagtgagcgcgtttcagtgggacccgcagcaccggcggatggcaatctgca

SEQ ID NO: 129948 - DNA, 659 bp, Zea mays
  Clone ID: MRT4577_49984C.1
attaactctcgcctccgccattccttccttcatatctgctctccccaaaactcccccaaaccccaatcgcgcgagcacgcacgcacgcacgcgagtccaacccctccaccccgcctcgcacgaaaccctaaccctaggttggccatggccggcgatgggaccgacgccgccttcgaggacgaggtggagccgacggtcaccatcagcgagtacatggacggcatcgaggccgaggagctggaggcggatttggtgctgggcggggacgacggcaacgagtgcacctacggcgccggctacctgaagcgccaggccgtcttctcctgcctcacctgcgtgcccgacggcgtcgccggggtctgcaccgcctgctgcctcgcctgccacgacggccacgaggttgttgaactttggacgaagcgaaattttcgttgtgactgtggcaactcaaagtttggaggtcacctctgcaaacttagccctgagaaagaccctgaaaatccagcaaattcttataatcagaacttcaagggttcctactgcacatgcagtaggccctatcctgatccagaagccaaggagcaagttgaaatgatacagtgctgtatctgcgaggactggtttcatgaagatcatattgggcttgactctttggagaa

SEQ ID NO: 129949 - DNA, 232 bp, Zea mays
  Clone ID: MRT4577_49985C.1
tttccacaggaaccaccccaccatgaaaaggctggctgacccaaaaaaaaaagaatgttttgagatctgatccaccgggccccccatagcaaaaagtgccccgaccgcacaacgaagcgagcagtttggtaccacgccacaccgtcaggagtacacagagaagggcacataaatctaccctcgcagaggccccccaaacgcaaaaaggaacaccccggcgctcaagcagaac

SEQ ID NO: 129950 - DNA, 659 bp, Zea mays
  unsure (1)..(659): unsure at all n locations
  Clone ID: MRT4577_49986C.1
tttgggatggcangacaacaaagagaagtggatgacatatctgcaactttggctggtatttcaactgagatagacattagcatattctaccgtggcctagatcaaggaagcaaacacaccctggtgtcagtggtatggccaaggagaccctttgttttattttatctcattcttgaatgtgtggatggttttgttgattgtagttttcttaaatctcaaaattatcttcttctggtatgtgtatttatactacttatgcagcagcaaaaccatatgcagctggcctgtgctttttgcaggcccggctagacttttgaacaggtttagggaactaccaaaataactccagtttgagaataaaatgatgtctccagcttgggatactatttgtttctttttccagggagctcattgtgttgtcacttgttagtattatgtcatcagctgatttgggagcttgctttcagtaatttcgtaaactgggagctgataggatacgaagcaggttgaatatatttaaggcggatagcaaattgagttcagctgcatataacgttaatgtgactgtattgttattgctgattgtggtaaaaaaagtgtaacattattgtcaatctttccatttgttgtcaattttttttcccatttagcttcattac

SEQ ID NO: 129951 - DNA, 522 bp, Zea mays
  Clone ID: MRT4577_49987C.1
aatcacgacgccgccgccgccgcaaacaccctgctctccacgccggagagcggccagccccgatggactcgccgcagatccccgacgatcttttcccggagatcttcctccgcgtccccgacccagccgacctcgtccgaatctcggccgcctgcgtctccttccgctgcctcgtcgccagccgctccttcctccgccgctaccgcaagcgccacgccccgcccctcgtcggcttcttcgattttcagcgagtcttccaccccgccgaacctccttacccctccgcttcggccgccaaagccgtcgccctcgccgccgacttctctttccccttcctccccgccccagccagcgactggcacatttttgagatccgtgacggtcgtgtcctcctcggccgggaccccgatgacttcggggagctgtgggtgtgcgatcccttgcaccggcggcacctcctgcttcaccgacttcctgtactctacaagagccttccttcggtcacgaccggcgggataagat

SEQ ID NO: 129952 - DNA, 333 bp, Zea mays
  Clone ID: MRT4577_49988C.1
gggggaaaaaataaattttaaatttccccccgatctttcctgaaaatcaagaccaaacaaaactttcagtggggtccagaggtgcttgaaacggggggttttggcctcgttaatttggggcataaacattagtttgcaaccggtttgccgattcccccggtggggactttggctatccccaataaaggggttttcaaaggccctcctccaggggggtgaaggaaacaggagggttcctttgtcacttaagggaccaaaatcaattaatgggattgggggtaaaaaaaagggtttcccggtcccaaccaaacgggcaaattaactggttggttt

SEQ ID NO: 129953 - DNA, 648 bp, Zea mays
  Clone ID: MRT4577_49989C.1
cattgggtacctcgaggccggccgggacgcacttacctgaagtcaccactcacaagacaggacccacatgccctacgcacgagtcaccacgaaacgtagtctagatcaccaaacgggccgacatcggctcgtacgcaattctcgccgtagtcggtcaccagggatgcccagtggtagctgatgctgaggaacatctgccagcacgacctgccgagcgacgccatcacctgctccgctgctgacatccgtctatcgcgtcctgtctctcctactgccgactgacggggtgcggtccctccgctccctgctgtagcacaggctcgaacctaaagagaagcgccaggaccttcgtcgacataactgtcgcctggaactgcctcataaactgcaccaggggagtcaacaccctcaacgtcagctactccgccatgatcccccttgaagcgcttcttgagcatgcccaacaccattatcacctccactcgactgtgtctacagcagaactataacctaaaccacctgctacgaccatcgacagatctgatcaatgaaaccctgcacctgctgcgacttgcgaataaacgagcagctacgagattatatccatcaacctacgcaggatagactgatgcctacttggctactgct

SEQ ID NO: 129954 - DNA, 622 bp, Zea mays
  Clone ID: MRT4577_4998C.1
gggtacctcgaggccggccgggccctttccaccgatgccatgcgagtagagtgaagagattcagggcgccattgcctgggtgttcttaccagcactactcgaagcttgggctacaccatgggcggacctcggtggactggcgtgaacccgctcgtgacctcaggttgggttgggagtcgtctggatagggggaaattctcgttggagagccgcgcagcagcaggaatcgcgctgcgccgcggacgacctcgccgctaccgcttcatgattgaggtttatgcatctgggggctcaagttggatcatcgacagcgggtgcacaaaccacatgacaggggagaagaagatgttctcctcctacgagaaaaacaaagatccccaatgagctatcacattcggggatggaaaccaaggtgaagtgcaggtagtccaggaggaggtctacaacgaggggtacaagcttatctaggtggcgtctcccagtcggcttaatggcgccaaggaataattattagttcgctttattgttatcatttattattgtaagacactttcactatgtaataatatttgtgacatttatctctatacacttggtcaaaaaaaaaaaaaaaaaagcggcc

SEQ ID NO: 129955 - DNA, 773 bp, Zea mays
  unsure (1)..(773): unsure at all n locations
  Clone ID: MRT4577_49990C.1
ggtctccggcaagcagacgactacatcaccaaggcctgccacctcgcggacagactcaacatcgctactgtgccattattgccaggggaccgggcctggtccagtgctgatactgtccctgtcagcagggccatggggcgcatcttgtgcgccataccagctcataccagcgggggcgatggtggtccgttcattgatcatgtcgatgagatggtggtttccatgcgcgagctagagattgtgactgattctgtggttgatgtggctgctgactctggggctgctgcggccgctgcctgcgaggtcacggccggatgcagcaaggtggtgggctccctcgtggaacctgcaagcgacagcgaggtggtggagcttcccggctcccccagggagcatcgttctaccgtggcggcgactggagcgtctcaggtccccctgccttcaccaacacaagcaatccatggatgcttcttctccacgccgccgttaccgctgctgaaggaagcgccaccccttcctcagcagaggcgacggaggacgtacgacatgacgaaagttcgccgcagcgcgcgccttgccaatcgtccggcaatgccggnccctaaagcgggcccaaatcatcctctgccaacggcttgggctcactgcagaggagactaatcacaattcggtagagcaggctctgaaagagtacgtcgccatgttcaacactgctctgcccgaacctgtcaccgccgctcttaccagcttgctgggaatcgacgacgagcata

SEQ ID NO: 129956 - DNA, 478 bp, Zea mays
  Clone ID: MRT4577_49991C.1
ttttttttttttttttttttttttttttttttttttttttttttttttttttttttttttttttttttttttttttttttttgggaaaccaaaaatttatgttttaaaaaagggctagccggagtaaaacaaaattaaaactaccggggtacttgatgcaaaaggatcatagggtaaacctggacaaaaccgttgacactttaaaaagggctggggtccctgaggacaaaaaggcaaccttggaaaggaaaatgggttctggaccatccactggaccaggagaaaaaccaaatggcccaacctttggtaaaaagaaaaaaaaatttgtcaaggctggaataaaggcccaggcaaaaaaaaaaaggcaaaagggtggtaaaaaagaggacattgaacttccccccgagggggaccaccaggaaccccttgtcaaaattggggaaaaaagaggtcctggtggggtatttggggagcccgg

SEQ ID NO: 129957 - DNA, 207 bp, Zea mays
  unsure (1)..(207): unsure at all n locations
  Clone ID: MRT4577_49993C.1
ccggccttagatctgatatggacggaactatatattgtatncctantaatctggcagtttctaagttaattgtttttttngcaaatataccgtcgatggaacgcccantgnaatgtnacgcanatgtgtgttnttcatcgattgaatggataataataaaaaggcatgctggcagttactattaaaaaaaaaaaaaaaaaagcggcc

SEQ ID NO: 129958 - DNA, 1031 bp, Zea mays
  Clone ID: MRT4577_49994C.1
ggggccacgcacgcgtccgcaaaccgcgtccgcccacgcgtccgcagagaggagcttcatcagctcattcaattctcgttccatccctcgtctcttgtgtcccgcctccgttccataattcaccagcgtcgtcctacccatatctcctatcgtcttctccctcgcgccatcagcttccccaagccagcggcgaccatgatctccccggacaccatccgcacggccatcggcgtcatcggcaatgggactgcactcgtgctcttcctctccccagtgcctacgttcatccgcatctggaagaaagggtcggtggagcagtactcgccgatcccgtacgtggcgacgctgctgaactgcatgatgtgggtgctgtacgggctgccggcggtgcacccgcacagcatgctggtgatcaccatcaacggcaccggcatggcgatccagctgacctacgtggcgctcttcctcctctactccgcgggggcggcgcggcgcaaggtggtcctgctgctcgccgccgaggtgggcttcgtcggcgccgtcgccgcgctggtgctcagcctggcgcacacgcacgagcgcagggtcatggtggtcggcatcctctgcgtcctcttcgggaccggcatgtacgctgcgccgctctccgtcatgaaattggtgatccagacaaagagcgtggaatacatgcccctgttcctgtccctggcctccctcgccaacagcatctgctggaccgcctacgcgctcatcctctgctccgcgggggcggtgcgccgcagggtcgtgctcctgttcgccgccgaggtcgccttcgtcgtcgccttgggcgcgctggtgctcaccctggcgcacacgcacgagcgcaggtccatgctcgtcggcatcgtctccgattgcgatctccccaaggggacgatgctccgttgcattctctgcgtatcctactgatactcccggaacgctccactgcataagacaggacgaaggggcctgctgggctcacatttacctagccttctaagaacggt

SEQ ID NO: 129959 - DNA, 126 bp, Zea mays
  Clone ID: MRT4577_49996C.1
aatatattggggctggactatagacgatattgcctgaccctttttctgaagctaatacatggaatgcaaaaacgaacgaggaagatgtttaacgggcccaaaaggagatatactactagagaaaat

SEQ ID NO: 129960 - DNA, 1182 bp, Zea mays
  unsure (1)..(1182): unsure at all n locations
  Clone ID: MRT4577_49997C.1
cgtgctcttcctctcccagtgcctacgttcatccgtatctggaagaaagggtcggtggagcagtactcgccgatcccgtacgtggcgctcttcctcctctactccgcgggggctgcgcggcgcaaggtggtcctgctgctggccgccgaggtgggcttcgtcggcgccgtcgccgcgctggtgctcagccttgcgcacacgcacgagcgcaggtccatggtggtcggcatcctctgcgtcctcttcggcaccggcatgtacgccgccccgctctccgtcatgaaaatggtgatccagacaaagagcgtggagtacatgcccctgttcctgtcgctggcttccctcgtgaatggcatctgctggactgcttacgcgctcatccgcttcgacctctacattactatccccaacgggctgggcgtgctgttcgcggtggcgcagctggtgctgtacgccatctactacaagtccacccaggagatcatcgaggcgcgcaagcgcaaggccgaccagatcgccatgaccggggtggtcgtcgacggcggcaagaccaacaaccaagccggcgcgggccaatactgaccgacgatcaagtgacgatcgacaccaatatgctcaagcaagaagccagcggcaaatcaattatgtcgccgctgggttttatgtattttgtgattctatctgcacgctgcttgtccgtcccggccaatggaaaaaaaagggggggaagaaaaagcggcgtcggtatatgtgttctcgccgaataactctcgcgcatagctagctggtggggctgagtcactgccttcgctatatgtatacgtgcaaaaattagaggtggagggttgttttagctaaaaaaaaaaaaaaaaaaaaaaaaaaaaaaaaaaaaaaaaaaaaaaaaaaaaaaaaaaaaaaaaaaaaaaaaaaaaaaaaaaaaaaaaaaaaaaaaaaaaaaaaaaaaaaaaaaaaaaaaaaaaaaaaaaaaaaaaaaaaaaaaaaaaaaaggggggggngtttttaaaaaaaaaaaattttttgggggggggtttggaaaaaaaaaattttttttttgggggaccaaaaataaattaaaggggcggtgtttaaaaaagtggggagggggaaaaacccttggggaacccaaataaaagcgtttggaaaaaaacccccttttcccca

SEQ ID NO: 129961 - DNA, 805 bp, Zea mays
  Clone ID: MRT4577_49999C.1
agaccttattccctcccctcccctcccctcccttccccccctgactcccgctctactggatcctccgcctccatcgcctctcgcgcctccatcgacctcggcgcctcgtccgtcctgctccacctcttcttacgccgggttaacatttgaggcatggcgaaacaccacccggacctgatcatgtgccggaagcagcccggcatcgccatcgggcggctgtgcgagaagtgcgacggcaagtgcgtcgtctgcgactcgtacgtgcggccgtgcacgctggtccgcgtctgcgacgagtgcaactacgggtcgttccaggggcggtgcgtcatctgcggcggcgtgggcatctcggacgcctactactgcaaggagtgcacccagcaggagaaggaccgggacgggtgccccaagatcgtcaacctcggtagcgccaagaccgacctcttctacgagcgcaagaagtacgggttcaagaagaggtgacggatcagtcagttgagcatccgtgatgtgcttctcgtggttctgtgtctgagcagcgtagcgtgactgatcatatgggcacacaatgcagttgtgtaccatgtgcatgtatgtgttcagaaatttttctgttgacagattgaagcaggagagtacgctcaagtttgacactgttacgtattctctttgttcacggattcactcatctactctcctgatacaagacatttgggcaagtttgtttggatactaaggagaacttattgcacaaatcaaacagccacaagttcatttgatttcgtggtgctgcaaaattgta

SEQ ID NO: 129962 - DNA, 354 bp, Zea mays
  unsure (1)..(354): unsure at all n locations
  Clone ID: MRT4577_4999C.1
tctcgcggccgccatgccctgcacggcgtcgcgtcattgcggacggtcgctcagccttctcgctgatacgcagtgcatcgctacactctcacatatcagatgtgcacgaacagacttcccaatctgcccagcgacctgtgcaaactactcgctggacgaacactcgcaacatntaaatatgtacacagcgacgccaacatctccccctcatcgttcagtctgggcggcccatacgatagccatggcctatatccaactcatccttcttgaccactgttctatccgaagggcaccggctactaccgctgataaaggatcacactgcatctgctatgcaagaagagaaaacacaca

SEQ ID NO: 129963 - DNA, 237 bp, Zea mays
  unsure (1)..(237): unsure at all n locations
  Clone ID: MRT4577_499C.1
cccgcccccggcccgtgtacctggtgtacctgtccgggtacgtggcnnacnctgttcagtaggcattcttttctgttagtatcacccacttcnnncnnnncnnncngttcaacgaccagagcatggcgttccataaccggatgctggagcggacactttttttttagcatacccacaaaacaacgtcgctcattagttcacccccggcaccaaacactactacagttgcaaactgaa

SEQ ID NO: 129964 - DNA, 3057 bp, Zea mays
  Clone ID: MRT4577_49C.1
atggcgcctaagaggaaaacctcgagttcgtctgctgtggtgattcctccaattgaccccaacagccagttgcctttcgcaggtaaccacatgtccgtcatttctgagcctgaacttctccatcttgtatctatcggggttcttcctccgcgggaactctgttcttggcggatttgccatgggtttaccgttccaactgaggatacccatgagtccgttgtctatgcccctttccttctccgcggccttggccttcccatttctccctttttccgcggcctccttgatttctaccatcttaacttgacccatttgaaccccaattcaatcctgcaaatctccattttcgttcatttatgcgaggcctttcttggcgtgctgccgcattttggtctgtggaaatacttgtatcattgtcgccctgggatggccgggggacaacatcagttggttgggggtgccagcttggagatgcgccgcgggaggaagactgaatatctcgagatccctctcaaggacagtatcaagggatggcgcttggagtggttcatagttgagaattatgggaattctctcccctcccggtcgggaagacagccggacgttcgcaccccaagctggagcgagtctcccacagatcaggaggtagctgaggcaggtgtgttgctagctgaagttggactgctgaaagagaggggtctgactgctgaaaccatggttactgattttgttttcaagaatattcagccattgaaagacagggcatacccagcttatctgtatcgagggctagccgactcaactcgggttaccaacagaagaattccctctgcagacttggtgagccgacttgagatgatccttaggggcaaagtgtcaaatgttggtgctccagtggcatactcggcttggaacctgcctcctcccaaagccttcaccctttttgtgtcgaatccacctgtcactgatggcagtttgggccttagagtgcgaccctctgctgatgaagttagtgcctttgttgcttctcttggggagattcctgatgatgaacggcaggtccattttgaggtgcccttgaaccctagtgatgcagagataagtgctatgcttgatttgctggctgagggttcttccgacgctgctcctgctggggcgttggtagtggcgcccctcccagaagctgatacaactttggatactcagaagcctgttagtactcgcccgaggcgcccttgccgagccaatcagcctgatccttctgctgatgagcagaagaagaaaagaagacgcctccggcgagtatccagtttggatcgggacgctggtacctcggttcctgctactgaagaagtgcctgcgactggatttactgatgctgaccccaatgggtgtacccaatccgttgctggtcccaatgtgggtgctccatctgttgctgatcccaatgggggtgctgcttgtgttgccaatgtggatgacgaggaggaagaaaatgaaattcctttgactcggaaaaacagtcggcagttcatcgccagcggtgaaagtagtggagttccctctcctgctttgtctgccctcattggtctgcaagaactgtccctggccaactttgatcagactcttgaggatatggtcccagaggacttgttatcggagccagtggatgatggtgcaatggaggtttgcgctgacgtgcctgatgctgggttgaggtcatcccgtgcctcgtcgaccttagagcgtgatctcgagggtcgggagactgacttggatcgtcctggtcctatggaagtagctgagggcccgtcaaccttagaggtggctactgcagagaacttggaccccaaggatggtgctgacacatgcccagcccccgaggatgtcgccggggatgacttggctcgggtggggagtgtaagccactgcccagcccccgagggtgctgccggggatgatccggctcaagtgggcagtgcaaactatgacccagcccccgagggtgcccgagcgcggtctccctcctgtacttccatggacgttcatgcgggatctcctccacactcgggctgtatggtggtagcccaagccttggaccagggagtcgctttagagggcagcgtccccgctgaccgagtgttgagctctgttgatggtatcgagctggttcctgctggtttgttgcaagctgcttcgggcggtggccttacacctggttatcaattgatctcttctaatttggggatcccttcgttcttttccaacctccaggctttggtggatgggatggctagccagctaaggttacagggtgcttctgtcccagaagtagcttcgtctcttgcatgttggaatccagtgtcacttcaacatcgcgtctctgaattggaggcaaccaacgctggaatgactcggcatatttcaactcttgaggaaaaacattcccgagatcaggctgaattggtccagcggtgtaccgattttgaggaaaagtactctcagagccaaactgaactgggtcaggtctccgctgccttggatgacgccaatgcactgagttcttctcttcatgctcagctcaattctgagaaggaagaaaaacgtatccttgctgcttctcgtgacagtcttgacagattgtatcgtgattctagcaacttgctgaccatcttggagaggagtcaccgctttactatggaagaattagacaatcaacgctgtaagctgcaggaatccgcggatgaagtgacccgtctcaaacagctgatatcagcgaaggacgctaccatcaaagaactccgagcttccaagaaatctattgtccaggagttagaaactgctcgactggctgccaaggttgccgaagaaacttctgttactctcagagcccagcgcgacagagccatggacaaggctattcgggcggggcgaatcttgatgaggagacccggcgtggttgttcctgaagatataagggctgatgtgaatactgcccctgattcctcgagtcgtccttcctcgtcgatcgctcctgagaaaaatatcaccaagtag

SEQ ID NO: 129965 - DNA, 800 bp, Zea mays
  unsure (1)..(800): unsure at all n locations
  Clone ID: MRT4577_4C.1
gggggggggggggggttctgggactatgttcagcataagaggcacgtgacatatcacaggtgttgctaagggtgcatgatagaggtgcgagtgtttctggtgaactgacaaaaagagagagggtgcggggctacagtttgtcaaattggcagaggatgtgtcccgttccggccatgtggtgcttctgccgctgtggcctttgaagtggagctgtatcctgcagtctgttgtgtcccacattctggctgggcgtgcggcggatgtagaggacttgcgacgtgctaggggccacgggagctatgtagtccgccattgtgtagaggcgggcggggcttgcgtggtggtctcaggagtggtggcggtgagcggggttcgcgggcgttggagggattcgtgctgcggggtggacggggtgggggaggtcctggggctgcgggaggtggaggcgtgggggggggtgaggtgcggagggggcggcggggggggcggagggggggaggggcccaagagggatgtaggggggggaggtgcgggggcgccatgggggtggggggggggggggggggagtgggggggggggggagggggggaggcggggggggtggggagggggggccctgggagggggggcggggtgggagcggctgggggggcggtacctagtggggtgtgcggggaggtgcggggcgcggtggtgggaggagttgcaggggcggtgggggngagctgggtacccgcggaggaggggctcgggggggcaggggggctggggggcggagggggggggggggggggggggg

SEQ ID NO: 129966 - DNA, 1267 bp, Zea mays
  Clone ID: MRT4577_50000C.1
caattgtgtctatagagaactctggtgaaaaaggcgcaatggagaaagctgatatgtgtgtggcatcaacttctataacaaatactgatgatacttctctttgtattggaattcactctcatgatagtattgttgaatgccaggattatgccatgcaacatactctttattgtgagaagcaccttccaaggttccttaaacgtgccaggaatggtaagagtcgactcgtttctaaagatatcttcgtcaatctactgaagggatgcacatcaagaaaagataagatatgtctgcaccaagcatgtgaatttctttattggttcttgagaaacaacctttctcatcaacacactagtcttgctagtgaacatatgccccagatattggctgaagtgtctaaaaatccagatgttggagagtttttgttaaagttgatatctactgagagagagaaactagcaaatatctggggctttgatacaaatagatctaagcaaatatattctgaaaacaaagaagggtctctagtgttgcataaagagggaactaatctttcatctggtccgaagtgcaaaatctgtgctcaccagttctctgatgatgaagctcttggattacattggacaactgtccacaaaaaggaagcccggtggctgtttagaggttattcttgtgctgcatgcatggaatcatttaccaacaaaaaagtccttgaaagacatgtgcaggatgtacatggggctcaataccttcagtattcaattcttgtaatgtgaccaggaaggagagtctattcatcacttgcttgtttcttgtgtcctcgcgaggcaattttggtatcttctcctccagcgggtcggcctgtccgcactctcccccgggatggaagatatcaactttgaagcttggtggagtagatcggctgaggttactcctaaggaccttagagatggccttaactctttggtggttcttggggcttggactatctggaggcaccgtaatgactgtgttttcaatggtgctcagccttctatagctagattgcttacctcagccagtgatgagttcaatatgtggtgttttgcgggggccaaaggcttgacccgtctttcggacctagcttttgtgttcaaccccggttagaagggggttattattactagtgttgtttgtgtgtgtgtttgtgggagtggtgtttaggtcattgtaattattatcatccttcttttaatgaaatgatacgcagctctcctgcgtgttcgag

SEQ ID NO: 129967 - DNA, 623 bp, Zea mays
  Clone ID: MRT4577_50001C.1
ggccgcttttttttttttttttttcgttggcaaaccaataacattagatgctctctgttacaactgcaacgaaaggaaggtgcaccgacagtatccaaagttctacatctacgactacaacccaacagagcaggccttcaaggaagcttcagatgatacgcactcttcagttactgaatcaaattggcttacaccttgtcttgcaggtaagcagagtaaaagacgcccaaggcaccaagagaaagggctagaagaaggccagatggcaccagcttccggctgttatacaacctgataccaaacacgcaggcaaatagaaaggcagatccaaatccaacagcatcacctgctgccatcgtctcaggcgactgcatcagataataggcagcgcccatgagcgcagctccagccagccccccgtagatggagcctttactccccgacctcgcatatgcgaaggcgccgccgcccaggaggaggacgccgtaggtggctgaggcggccggggcaatctcggacaccgcgtcgcagcggaacagggcgtgacggcgggggtggaggcgcagacggataacggggaggcgaggcggccccggacccggccggcctcgaggtacccaatg

SEQ ID NO: 129968 - DNA, 311 bp, Zea mays
  Clone ID: MRT4577_50002C.1
cattatattgtatttgcacccaaaagaaagaatgggtcaactataggtgcgtgtattttttgttctagccccacacaaaagcgtcaatacatggccatttcctactatccaaggcacaccatcggaaccttgttattgtccggtacagtaagacccctgctcaccccaagtggaaaccaaggactgatcctaccaatcttatggaaccggcacctgggaacttatagaatccacacgtgaagacattacgtaggccacccatcgcaccgcctgaacttaattggcccggaactcaatgagccggttgacca

SEQ ID NO: 129969 - DNA, 166 bp, Zea mays
  Clone ID: MRT4577_50003C.1
atagtaacatacatataaacagaatagacgaaaaaaaaaagggctgctgctctttaggtccctagagtccctccgggtgccttcaacggcgtagctgttatattgggacacctagatttaattcacggtgcggctattcacaacgggctgattggaaaaaccctgt

SEQ ID NO: 129970 - DNA, 278 bp, Zea mays
  unsure (1)..(278): unsure at all n locations
  Clone ID: MRT4577_50004C.1
aacgccacttgttctccctcctctctgcctgaccagctaggatcagcggaagcagcaatggtgatggcgtcgtcgagcgggctgaggagctgcagcgccgtgggcgtgcccagcctgctggcgccgtcgtcccggtccggccgcctggcgccgatctgcgccaacgccaccacactgtggccgtgtcaccatgtcacggtgatgcggatacacaggggagccgcgacatatgnacaggtgaaacggggtccttttgctttgcaactgtaactgttgaa

SEQ ID NO: 129971 - DNA, 2164 bp, Zea mays
  unsure (1)..(2164): unsure at all n locations
  Clone ID: MRT4577_50005C.1
gtacccccggagctcggccgggntcacgccttcgcttcttcgcttcgccccaccgccgtccgccagttcagctcaccctcgccgccggtagtccgcgactccacccaagtttcccctcctccgctgcctgcttccagcttctccccaacttcatttcagctcttgtgggtcggttcgggtcgggccagcccgggccggtagtgagcgcgccacccgacccgtttcgcggttgctccggtcccttttcctctcctattttctcttctctctctcccgtcgtccagagacccagaaggagagggagacagagccacagaggcaggggagaggaggagcagcgtggcgacgcccaaatcgagcgacctgatcgaggcccctcgcccctactcgctgaatcccaatccgagcccgccaattgggcgcccccccccgcccacgcaaaggacagatagaagaaaattattggcgctctgacaaatccaactgaggttttcttggactacagatgaagcgggctcgaagggcgtatgtgcaagagatgactgatgagggatgctagtgaaattgatgaacttgttacgggcgtgctggcgaccgtcatcgaaccggcatgcccgaacaggctcagatgttaccggtaggcaggatggacttctatggtacaaggacgccgggcaacatgtcaatggggagttctccatggctgttgttcaggcaaataacttacttgaggaccagtgtcagatcgagtcgggcccactgagttttctagattctggaccatatggcactttcgttggtgtttacgatgggcatggtggtccagagacggcctgctatatcaatgatcatcttttccagaatctgaaaagatttgcatctgagcagaatgcaatgtctgctgatgtactgaagaaggcatatgaagctacagaagatggattcttctccattgttaccaaacaatggcatgctttatgttgccaatgttggggattcccgtgtcgttttaggaaaacatgttaaggccactggagaagttttggctgtccaactgtcagcagaacataatgttagtattgcgtccatgagaaaagaactgcagtcaatgcacccagaagataggcacattgttgttctcaagcacaatgtttggcgtgttaaaggactaattcaggtttgtagatcaattggtgatgcatatctcaaaaagcaagagttcaacagggaacccctatatgcaaaatttcgcctccgtgaaccttttcacaagccaatactaagttcagaaccatcaatcagtgtgcaaccactacaaccacacgaccagtttctcatatttgcatctgatggactttgggagcagttaaccaaccaagaggcagttgatattgttcgaagtagcccccgcagtggctgtgctaggaggctgataagagcggcactgcaagaggcagccaagaaaagagagatgaggtactcggacctcaagaagattgaccgcggtgttcgccgccacttccacgacgacataacagtcatagtagtgttccttgactccggcctcgtaagccaggcgagcacacaccgaggtccaactctttccttgcgaggcggtggcggcagcgctggcctgcgcagcaacacacttgcacctacgtgactataaagtgcctggtggagtggaggctactgactgaaggtggttttctttccttgtgtcgaatgtgttatatatgtacttgtaccagccaagatcattcatccccccccctaaaatggtgtaaagaagtaggagaggcgccgaagttcctcaccagcgtatctgaatgccctcaatggtgtcaagttgtggactcaagtggatagcttcgctgaatcttctgatgatgctctgtggaaagctcgaatcctttccacctgaaaaagcaagtaatatgtcttccagtgctggaattaacccctagtgcatatatatatgtatgaaataataataagggcaaaaggaggagtaacttatttaactaatgctgtgaggtgtatttatgttttgtatgtgtactgcttttgactgctactgcatctactgttgttaattgaccactggtgaagtgaaatcactggtttcgtcttgctgtctcaaaaaaaaaaaactcgaaaaggg

SEQ ID NO: 129972 - DNA, 2133 bp, Zea mays
  Clone ID: MRT4577_50006C.1
gggtacccttcgaagtccggcccggggtccgtgatcccgtcagaagacgggcacatgggggttctccggtacagggttcggcgtgcaaaacgactggaccctcgcaagagcccaccgtgagggcgtagacccagaaggagagggagacagaggagaggaggagcagcgtggcgacgcccaaatcgagcgacctgatcgaggcccctcgccccaactcgctgaatcccaatccgagcccgccaattgggcgccccgcccacgccaaggctgaaagtcagtggagttctcagttctcaccaacattcagaaaactgttggctcgctgacaagtccaactgtgtttttcttggactacagatgaagcgagctcgaaggcgtatgtgcaagagatgactgatgagggatgctagtgacattgatgaacttgttacgggcgtgctggcgaccgtcatcgaaccggcatgcccgaacaggctcagatgttaccggtaggcaggatggacttctatggtacaaggacgccgggcagcatgtcaacggggagttttccatggctgttgttcaggccaataacttacttgaggaccagtgtcagattgagtcgggcccactgagttttctagattccggaccatatggcacttttgttggcgtttacgatggacatggtggtccagagacggcctgctatatcaatgatcatctcttccagaatctgaaaaggtttgcatctgagcagaatacaatgtctgctgatgtactgaagaaggcgtatgaagctacagaagatggattcttttctgttgttaccaaacaatggcctgtaaagcctcagatagcagctgtcggctcatgctgcctggtcggtgtaatttgtggtggcatgctttatgttgccaatgttggggattcccgtgttgttttaggaagacatgttaaggctactggagaagttttggctgtccaactgtcagcagagcataatgtaagtattgagtcagtgagaaaagaactgcagtcaatgcacccagaagataggcacattgttgttctcaagcacaatgtttggcgtgtaaaaggactaattcaggtttgtagatcaatcggtgatgcttatctcaagaagcaagagttcaatagggaacccctatatgtgaaatttcggcttcgtgaaccttttcacaagccgatactaagttcagaaccatcaatcaatgtgcaaccactacaaccacacgaccagtttctcatatttgcatctgatggactttgggagcacttaaccaaccaagaagctgttgatattgttcacagtagcccccgcagtggctgtgctaggaggctgataagagcggcgctgcaagtggcagccaagaaaagggagatgaggtactcagacctcaagaagatcgaccgcggtgttcgccgccacttccacgacgacataacagtcatagtagtgttccttgattccagcctcgtgagcaaggcgagcacgcaccgaggccccactctttccctgcgaggcggcggtgccagcgctggtctgcgcagcaacacgcttgcaccaacgtcaatgtgactatgaggaggctacaaccctgactggaggacgttttctttcctcgtgtcgaatgtgttatatatgtacttgtaccggccaaggtcatccatctcccctcaatggtgtaaagaactaggagaggcgtggaagctcctctccagcgtctttgaatcccctcaatggtgtcaaggtgtggactcaagtcaatagcttcgctgttctgatgatgctctgtggaaactcgaatccttccacctgaaaaccaagtagtatgtcttctagtgctggaattaaccctagtgcatatatacatatgaaataaaaaaaagccaaaaggaggagtaacttatttaactgaaaaaaaaaaaaaaaagcgtctatttgtgttatatatgtatgattttctgccactgtcatccatctcccctcaatggtgtaaagaactaggagaggcgtggaagctcctctccagcgtctttcatctactgttgttaattgaccactggtgcatataaatctatggtttcgtcttgcaaataaaaaaagaaaaggaggagtaacttatttaa

SEQ ID NO: 129973 - DNA, 276 bp, Zea mays
  Clone ID: MRT4577_50007C.1
tccagggccgtgagtagagcggtggtggtgtcgtcggaggcattggcagctcgagactgagttcaagaatcagcatgattcttcagacgctcatcaggttcgcctctgtcagtcgttcagccgtctcagtccatttgcggaggaacattggtgttacagcagtggcatttaataaggaacttgatcctattcagaaactctttgtggacaagattatagaatacaaatctaagcgacagacatctggaggacctgttgatgctagtgcagagtatc

SEQ ID NO: 129974 - DNA, 343 bp, Zea mays
  Clone ID: MRT4577_50008C.1
gggagaaacataacctttaattcagcccaacccttagcggggcttaaaaggggtcaaggggggggggggggctgtttttccacccccaaaaggcacttttgcaatgcacgaaatttagggggaaggacttacatgccccatatttaggaatttttccaaaaccaatgtcctaagtccccgggggaatttccggcccaagcttgtgtttgacgtatgcctttgcaagggcgttcccatgcataagaactgaaaccttgtttcaaagctgggtttgaaagatggggacatggcccaggcgcttgaccatgttggccacggggcccacgggggggaggaagaaaac

SEQ ID NO: 129975 - DNA, 227 bp, Zea mays
  Clone ID: MRT4577_50009C.1
atacatctagaccgcccgccctttttttttttttatatttttttttattttttttttttacattttgtttttttttttttataaaaaaatatcccatcattattataaggggaccatttttatcatacttagcaaatgggaaggttgaaacatcttttgataaaccaaccaactgcaaaattgggtaacacaaaacaaaagaggtcccactgttaccggacccgtgg

SEQ ID NO: 129976 - DNA, 243 bp, Zea mays
  Clone ID: MRT4577_5000C.1
tccttaagcagtggtaacggcgcggggggtgctttctttcttttccttatgcctttttgatgtatggtttatttagcggtaggatgccagtctctttcctacaaggaccattgtctctcctctctctctctttctttttaaattttgtttatttataaaagttgtacttgctatcctggggtggtaacctctctgtttttattagaccagtttcaataaaaattcttaagaagtattgttttt

SEQ ID NO: 129977 - DNA, 389 bp, Zea mays
  Clone ID: MRT4577_50010C.1
gtccgccgacgcgtgcgcttatatatcgacagccgccggcctaccattgtctttttttaatcagcgttccctcacagggaggggaggtcaaactcgctcatgcatccatcccaatcattccctgtgatgcgtaggcaattactagcgaggcgaactctaccgcatcccccttcaggtgataaaagcgtgcgcataccactgcctgagtctactagttacctagcatctacgagcccgcaactattcaatattggtctgtgagaatactcttgaaaaccaacgacgacctgacacttatagcttcgatggatatgtctcaccagcgtaaccccgggccgtccctgcggtcacttcataagtagacgttccctctcataaagcccctctct

SEQ ID NO: 129978 - DNA, 315 bp, Zea mays
  Clone ID: MRT4577_50011C.1
cggacgcgtgggcggacgcgtgggctctaacgaagcgattgatagagtttgaaaatacggtttctgccagtttaccgattgaagaatttctagcaccagctgatgaatataatgaagcgtctgtttcaaaacattcgcctaagtctggggaaatcctttgcaaacacaagggtaaagattttgagcattttgcccatggactttgtgaaaaatgcttcaataagttcactaaactgtcgggtggactagaaggtggtgctaaccctccagcattccaacgagctgaaaacaaaagactttgagctgctaaaaggg

SEQ ID NO: 129979 - DNA, 262 bp, Zea mays
  unsure (1)..(262): unsure at all n locations
  Clone ID: MRT4577_50012C.1
ggggtgggaagcctgccggcgcgcgttgcgacacgcatatatgggggcagatcaccagtgtcttggagtcccaggccatcgcctaagtattttttttctcatatcgcctactatttctgtggttgccgggcctnntaccactggactctgtctgataaccgggaggccttgtccaggatctctttccgtccgcgcgttctgatcgtcgtctcctcgatcgacatgactcaccaccgtgctgggtttcaagatctccttgccc

SEQ ID NO: 129980 - DNA, 499 bp, Zea mays
  unsure (1)..(499): unsure at all n locations
  Clone ID: MRT4577_50013C.1
gggaccacccacgcgtcgcgtttcagcattcaaaaaacacaccaagctatagcgctttattcaacaacactaacaacaattggcgtaccatggtattagctcctccttgcgccttcttcgcccttttaagtgagcgcaactaaatgctgttcatttattccacagangctcaacttgctcctagttgcctatttattccacagttcctcccaaccagttactttctaatgggctgtcgaacaatcctagccgtgcaagctctacagtgctacaactatgcgcttgcggcgagctgtcttacaaccaaccaattgtccaattgcaacaacaattcttggcacatctaaacctacaaaccatcgcaacgcaacagcaacaacagtttctgccatcactgaaccacctagccgtggtgaaccctgtcgcctacttgcaacaacagctacttgcatccaacccacttgctcttgcgaacgtagcttcataccaacaacaacaa

SEQ ID NO: 129981 - DNA, 266 bp, Zea mays
  Clone ID: MRT4577_50014C.1
cttgatccctgatgggcgctcgcggggagcgagcagcgcaagagcgcacgataaaccaggtgttcgtcgctgcgtggacgcaggcatgtgctcgcgtgagtgactcccggcgctggagcccaccgactgggtccacacgcatgcatcgcctctgcaagagctggattggtctggccagaggcgcgcagtgggggagcccagaggctgctcgctctcctgtgcaggagggggcggggcagatggcgatgctaaggcaactgcggaca

SEQ ID NO: 129982 - DNA, 310 bp, Zea mays
  Clone ID: MRT4577_50015C.1
tgcacgtaccgatctctaattccacccacgacgtactcccacgcctcctcccactcttactcttacatttggttacttctcagctaccaacaatattgggtgagattattaggaaatggtctaggtcatacttctcacacaatctcacttgattttacaatactttttcttaacatactactggtctaaatactactctttatacaaaaactacatccttatctttaccataaaataagcatccctttattttaccttgtattgctatacctatctaaagcacatataccattttttacaacatcttcac

SEQ ID NO: 129983 - DNA, 381 bp, Zea mays
  Clone ID: MRT4577_50016C.1
ctactaccatttttttttgacacggagggggtcagttttcaggtgacacaatacaccagcctttagcaccacacgcaggactgtactgcagacccaattcggttcatctttatacaggagggatagaacgaatacatggaggcccttacagtgtcgggcaacacaacacaggatggaccccaaaggcctattatagaaaatactacatggcctacctatggacccagactctgggggggttttggtacttgagccggcccgccttgaacatgtgagctatctcctggaccaaagggtcgtcggtgttctgatcaatcagaaggggacagatggacagcaactccttggagatggatagtgccggacttcactggtgcttta

SEQ ID NO: 129984 - DNA, 705 bp, Zea mays
  Clone ID: MRT4577_50017C.1
gggcgggcaatacctctgttctcccctcagcacaaatcgattgccaagatgaatagaagtttgttaaatggtacacagttttccccccgaatatatcaatggtgtcaaagaatttatgagctttattaaaaaaaaattcggtgaggatgaagatattttgtgtccatgtagtagatgcatcaaccagaagtcctttcatcaagcccttgtggagaagcatatattaatgaatgggatggaaagtacatatattcaatggatacatcatggagagaactttgaggaagatgccgatcattcgatacatgggacatgtgtgattgaggatggcaactatggtgatgatcgttttgatgggatgttacaagacctatgcactgtagaagaccaagataaagaggatggtgaaaatgaggatggagacaatactaatgatgacaatgagtcattttatagtgtagtgctgaaagaggcgaaacatcttatttattctggttgtaccaaattttcaaggttgtcctttgttgtaaagctcactttaacatcctgtgaactacaaacacaaaccctagcaaccacattaggctatgttgatcattaaacaccagaatcaattagtcaaaggtccattttccttacagtgtttgtggtcgtgtgcgttgttagcgagcgcacacaacagggggtgcaacatgttggtgaaaa

SEQ ID NO: 129985 - DNA, 352 bp, Zea mays
  Clone ID: MRT4577_50018C.1
aaaaggccggcacccctccattggcataaaatttccttcaaaatgataaatgttgggaccaaaaaaacaagggtcacttctcaacccctcaaaaagaacccctgaacccaacaaaaaatattaaccttcacattgctcttgaatatcccccaacacccttatttttggaccccattctttttttccatttgacccgggcatttcaattttttttttggaaaattgggaatcttggtccccaaaaatttcttttgcccccctaaactaatacaatgaaaggtgaaactttaaaccctggaagttatgggggaatcacccccttcacctttggggctggttccccttggaaact

SEQ ID NO: 129986 - DNA, 855 bp, Zea mays
  Clone ID: MRT4577_50019C.1
cattgggtacctcgaggccggccgccacccagtgtgcggcggcatgcagctggagcctgggaagacctgggtgcttcaagtgcctggcaacacgcaaagtggccgcgtgtgggcgcgcacgggctgttcgttcgacggccccggaaagaaatcctgccagacgggtgactgcggcggcgtgctggcatgcactaccagcggccaaccgccgatgacgatggcagagttcaccctgagtgactccaacaacatggacgactacttcgacatcaccgtcgtcgacggctttaacttgcccatggactttctgccggtgccgtcgtccaaggggtcgtcggggtgcagcaggggtccacgctgcgccgccgacatcacgtcgcagtgccccgatgagctcaaggtgccagggggttgccgcagcgcgtgcaacggatcttcctgcgacgccagcacggaacagattaccagatcattttctgtccccccgtcgatcttgtgtcattgtctccacctccaacttcaccattgtctccgcctccaacttcacctactgcaacaaatggaacaagcagcatcacatcctcatcaaaatccaagaggccaagaatatttggttatgttctaggtggttcaataggtggcttcactttgatcgcatccttggtctttttcttcgtcctgcatagacgacgattgcatcgacgccaagagatgcaggaagaggaggaagcagagtttgggaggctaccagggatgcccagaccgttcacatttgagcagctacaggaagcaactgatcagttccgagagaaactgggggaaggaggattcggctccgttttcaaaggacgtttt

SEQ ID NO: 129987 - DNA, 220 bp, Zea mays
  unsure (1)..(220): unsure at all n locations
  Clone ID: MRT4577_5001C.1
atgcataattaacgtccctagattagaaaaacagggggggcatattacacaggggaagctggcccgccccccgacaaataaaattcaaatgccagcccggggaaccaatcttatttggtgggacccatgagataaaaatggttcgctgaaactggcccccgaggaaaaataaactatggacatcaaaattttnaaaaaaaagggggcggcgaaaatatcc

SEQ ID NO: 129988 - DNA, 266 bp, Zea mays
  Clone ID: MRT4577_50020C.1
gggcattccatcggaccagtagcgcctgatctttgttggctagcatcttgaagatggtcgtaccctcgacgagtacaacatccagaaggagagcaccctccacctggtgctccgcttgcgagggggtatgcataactttttgaagaccttgactggaaagaccatcaactctggggttgagagctacgacaccattgacaacgtgaaggcgaagatccaagacaaagagggcatacccccaaaacaacagtgtatgatcttccctg

SEQ ID NO: 129989 - DNA, 2180 bp, Zea mays
  Clone ID: MRT4577_50021C.1
gccggccgggtcgcccccacgcgtccgaggagtagtagcacttggacgcagcacctcctgctgctgttcttcctcgtcctcggcgtcgctaccaacagcagccattcttccaccatcaacatcaccaaccgatgctcctacacagtgtggccggccgccacaccagtgggcggcggcatgcagctggagcctgggaagacctgggtgcttcaagtgcctggcaacacgcaaagtggccgcgtgtgggcgcgcacgggctgttcgttcgacggccccggaaagaaatcctgccagacgggtgactgcggcggcgtgctggcatgcactaccagcggccaaccgccgatgacgatggcagagttcaccctgagtgactccaacaacatggacgactacttcgacatcaccgtcgtcgacggctttaacttgcccatggactttctgccggtgccgtcgtccaaggggtcgtcggggtgcagcaggggtccacgctgcgccgccgacatcacgtcgcagtgccccgatgagctcaaggtgccagggggttgccgcagcgcgtgcaacggatcttcctgcgacgccagcacggtaaacagcaacacggttttctacgctcggatgtgccccgacgcctatacctacgccactgataatggtcccgttacatattcgtgtccgtcaggaacagattaccagatcattttctgtccccccgtcgatcttgtgtcattgtctccacctccaacttcaccattgtctccgcctccaacttcacctactgcaacaaatggaacaagcagcatcacatcctcatcaaaatccaagaggccaagaatatttggttatgttctaggtggttcaataggtggcttcactttgatcgcatccttggtctttttcttcgtcctgcatagacgacgattgcatcgacgccaagagatgcaggaagaggaggaagcagagtttgggaggctaccagggatgcccagacggttcacatttgagcagctacaggaagcaactgatcagttcagagagaagctgggggaaggaggattcggctccgttttcaaaggacgttttggtgagcaagcaattgcggtgaaacgcttggatagagctggtcagggaaagagggaatttctggcggaggtccagaccatcggtagcattcaccatatcaatctggtgagggtaatcggtttctgcgcagagaaaactcacaggctcctggtttatgagtacatgcccaatggatccctggaccagtggatcttttgccggcaggggcagggcgatgacgacgctcctcgcctgcattggcaaacgcgacacaagattattgctcatgtagcaaagggcctcgcctatcttcacgaggagtgcatgaagagagttgctcacttggacgtgaaaccacagaacatcctcttagatgacaacttcgacgctaagctctctgattttggactctgcaagctcatcgaccgggataagagccaagtggttactagaatgagaggcacgcctggatatctagctccagaatggttgacgtcgcacatcactgaaaaggctgatgtatatagctttggcgtggttgtgatggagatcatcagtggaaggaagaacctggacacttctcggtctgaaaagagctttcatcttattaccttgctagaggagaagttgaggagtgatcgcttggtagatttgattgatatgtgcattactagtgacagtcaggcacaggagcaagaagcaattcagatgatgaagctcgcaatgtggtgtttgcagattgattgcaaacgaaggcccaaaatgtccgaggtcgtaaaagtcttggaaggctctatcagtgtcgaaactgacatagatcataactttgtcgtgacaaatccaccaagctttagcgctcctagaattgtggtcatgtcagctccacctctagcttcagaagtgtcaggcccaaggtgaaattccttgaggcagtttatttgtgtagagaatttagcagtcctctctaaaacaatatgttcagtgattggaattgtggatatcacaccattgtaaattgtctctagtgtacaacagaaattatgttgctcattcttatatagaaaaccaatagcatgtcctaaaatggtatatgaagcaactgaaagaaatgcacaaaa

SEQ ID NO: 129990 - DNA, 209 bp, Zea mays
  Clone ID: MRT4577_50022C.1
taacaaccaatgacagcacatcaagtactagaaataactttataaaaaatctggctagggagcataatccaagactcacgaactaaaaaaaaagccgcaatattactgcctcatctttttccagatcgatgtcaccttcagcagcaaatcagatcaatgcatgaaaagaatgtcagctaatacatatgacatactctaacaggccatta

SEQ ID NO: 129991 - DNA, 405 bp, Zea mays
  Clone ID: MRT4577_50023C.1
ccgccgggctacggttcacctatagaactactgcttcccacgctagctcgactgcatctactgtctccagtatttgtcagactcctgctgactagatgtttctctttcgtttgatctacagacaaaacaactagatttactgatggcggtccgacgacgcagcagaagcaacgcgagacatgtacgggcggaggaacgcaatgtgggtgcaccccaaggtctacggctacaacgccggcggataggagaagcccatccgactgcttcttcgaaggctccggctacgcctttgtgggatgctgcggagggctacactccaggcacttgctgaagctgtaagtggagaccatggagtggagccttgttaccacgatggggtaggggacgaacacgcggaacaggcac

SEQ ID NO: 129992 - DNA, 225 bp, Zea mays
  Clone ID: MRT4577_50024C.1
tctttttacacgcctacagtgctgcccacacattcaccttcggcagaagaataggccgatctccactaaacagcccgccgatagacgcccacctaccattacggtatgagatccgaactgccgaactggtcctacgcgacgggccgtacaccagaggcgtgctacaacaccaccacaagatggcgaaagacgctcgtccagtggcagcggcgtcgcatgaatgag

SEQ ID NO: 129993 - DNA, 255 bp, Zea mays
  Clone ID: MRT4577_50025C.1
gcctactcagcagcaatcactttttgtcctgtaaacctttttttgtttttgttttggtgcttcctctgcatgcactgcactgcactgcactgcacggccttctggtcctcaacgtgacaatgtggctgtgattatatgcgcgtgcggctgtgttttgctttgttcctcgagtgtgaccctatctgattaacatgcgctggaagcctcgtttaatcaaaaaaaaaaaaaaaaaaaaaaaaaaaaaaaaaaaaaaaa

SEQ ID NO: 129994 - DNA, 639 bp, Zea mays
  Clone ID: MRT4577_50026C.1
gccggccggtctccagacaaccctacaagcctccactagatcagctcacaccgatcaatcctgtaactctgccactgctcattttcgtgaacatgatgtgcatagttgcatacttccgactctcgtgaaccatcggctccgaagacaccgacctctgccttgacaaacttcgtatcgtccacatacctaccagaaccaaggagcatacactcatgtgaataaacttcgatgtacaatatcactggttcaaaccgcgagtatccgatccacgagatgtctcttcccaaggtcccacatactgcgctcaagcaaccctcgtacttacctcctgcctgcacacgcaaccctctcaagcaaccctcagacttatctcctgagtgcattccctagagatcatgcatacatatatatcacttccactcatcatatgctagatatccgatctatatatagacacgtatgatatgatcgccatcgacatgtactccaatctagacccttgagtagtacgagtggaaacctatctcaaaaatgcgcgcgccttctcaatatgagaaggtattgtacggaactatgctcaatagccaacaacacatctatcaaatatgacatcgtgtacaataatatcccgtcttcgac

SEQ ID NO: 129995 - DNA, 319 bp, Zea mays
  Clone ID: MRT4577_50027C.1
acatggccgcggcaggcatggcagcgaaggctgccgccgccaccaccatcgcccacgttgtcgtcgacgaggacgagctgttcgacctcgacatcgcactcctggacggccgcgaccacgaccaccgccgcggcggcggcggccgccgcagtagtcctgctgccggtgccgacgctgacgcggggcacgtcctgctggctaactgcctgctgccgctgcggtcggtgagcaacgcggtgccggtggtggcgacgagcggcaggctgtcgtcgtcgtccctcttcttcggttactacagctccagctccaggaggctctt

SEQ ID NO: 129996 - DNA, 118 bp, Zea mays
  unsure (1)..(118): unsure at all n locations
  Clone ID: MRT4577_50028C.1
ggaanttcccgggctcgactccacgccgtctcgggccgcctcgtctccctcactcgagaggcgtagtatgtcgcanngctgcagctcggtaaaggtcagatgtgtgactgtactcgtc

SEQ ID NO: 129997 - DNA, 566 bp, Zea mays
  Clone ID: MRT4577_50029C.1
tcgggaaaagaaagcacgagcgatggcccacagggacgtcgacttcgatgtccagactcaagaagggaagagtacccctcgagatatctccctccccgagccggcatgtacggagttgactcgaaaccccacgcgctgcgggagatcgccaaggtagaggatccgcctcgacaggtgctgccacaaggcgaaccgcaaggagttcactcaaggaccggctggagaggactgtggagtcggcttatgctcgaataggcatattcttgcgacatgtcgtatgacaaggctcatgcttcataccctatcataaaagcatcatcagtactgctcccggttagatactgtgcacactcaagctacgtgattgcaggagatgaacaatgtgagtcactagccttggtaggcatgaccaggattttagctctgatttccgcaaagtaatttgtttacgactcgcagctgataaagggcaactcccgtatctattcctctcttgaggccatgaggaagacctgcaactcttttgtacctggcgacgaatagtcttatgagaatcagcggctgac

SEQ ID NO: 129998 - DNA, 534 bp, Zea mays
  Clone ID: MRT4577_5002C.1
aaaaaaaaaggcccgaaaaagggaaaaacggggatttctaaaaaaagaataacccccacccggaggtaaacaggaaaacaaaaaaattaagagggggaacaagggtacaggggaacaggggcttttgggaaaagcccttttttaaaaaaaaggaaaatttggctgaaggaaaaaacccgccaaaagaatgggccgggaaaaaaaagggcctatggggggaaaagggcaaataacaaaaacagggggggggaaaaaaaaataccccgccgaaaacaacaactgggaaagggaaacccccccaaaggggaaaccccccccccggattaaaaaaaaaatttaaacggatcaaaaaaaaaacccaccctccaaacaaggataaagacactcccttaaaaaaaggggggaaatggaaaaacccccgaaaaggggggtccccgggaccaaaagggtgggacacccaaaagggggggcctgcgggttgaaaaaaaaaatccctccaaattaacttccagttggaattttggtggtaccaaa

SEQ ID NO: 129999 - DNA, 471 bp, Zea mays
  Clone ID: MRT4577_50030C.1
atattcggcacgaggcggagggggcgaggcggggggcccaccataaggatcaccccccaactaacccatgcgacaacccgccggcgcacgccacacgctccagatggcccaacaatccctctcgttctacacccgcatcccgcggactcacacaggaaaatggaacgaggcaccctgggggggaggtaccttatttcctttgagcagcacccctaggggcttccacgggaacaagccccgaggaataacagactactacaaggcgatcggcatcaacaagagcgccagccagagggcagataaaaaaggcctaataaggggactataagaaacgacacccaaacgcaaataaaggtgatgcatgatgcagaactcaagtgtcaagaggtgcaacaagcttatgagactttaaaggatgaacaaaaaagatcattatatgaacaagaagggcctgcacattattagaaaact

SEQ ID NO: 130000 - DNA, 481 bp, Zea mays
  unsure (1)..(481): unsure at all n locations
  Clone ID: MRT4577_50031C.1
ataatcaactttctgttctttaaatggtaggtttacacattctcctctccgtttgcttcctttgatcggcaagaagtgcgagtatagcacgacaccatggacccggtagccttgccatccagagggcacctctgaacagcagcaaagcggcacaggcgcagatgaaggtactgaaatccacttccggctgtgtagaacaagaccgcggccggtggctcaacgccggatatggcgaccatgccgagggcggaggcaaattccgttgtgatcttgtccaagacggactctgcgacctcaggcacagacttggctcccgcaagaacatgcggtgctcaaactcctcacccgggaggctgggggatagaccatgggctgaggcggggggcccccgcgacatcatgtgagtcagaaangggacacctttttatggacgcttttaaagggcagaaacgagacctcctcgaggaccttattgatggtg

SEQ ID NO: 130001 - DNA, 1088 bp, Zea mays
  Clone ID: MRT4577_50032C.1
gtgcggcgctcgaggcggccgggtggggctctctaaaccgctcctaatccccaccatcacgtgcaattaatcaaccctctcccctcaatccgcgttggaattacaagaaagacccttgcttccctttccccctcctctccgttcatggtgctggtggccgtcgaccggcaactccggcgcgggggcctctaatggcgcagtacaggcagcagtacggcgtcggcttttccgactcccgcggccatcagcaccaggcgctcccggactggcaccggccccaccacgcctccgccaagccctcctcccggatccgccgccccgggaagcccgcgccgcgccgccgatcgcctgccgctgccgttgccgccgcgctcctcctccttgccgccgtcttcctcctctcgcgccgcatttcacgcagttctgcagaggtcagccaagattcgagcgccggggaggcgttgccagagtggaaccagagcaaaagctggaagaagctcaagttcgggcaaggcggaggtgggccggagcgcgcgagactccaggtactgggaccgggacgataggcgccgcgacgaggactacactgaggacgagaaggagaagaactcaggtggaactggggcctccacagatgctggtggcagtggcgataaaggtaccacctctgaggcaggtggcgaggataaaggattgactctagagactggcagtggcgctaaggatgttccagaggcgtctgaaggtgggaaagcagggaccttgtacaatgagggtggcaggaaggagctggcgcagtatgaggctgcagccatgggagccacaggaacaggggtgaaggaggttgatccagacgatgagtatgatgatggcatcgatatgcaggatgatttggaggatgctcatctgcattcatctgatggtgggaggaagcttggtggtggcagccatgagagtgttgaggagaaggacgaggtcactactgagaggcgcacagaagcaggtggagggatcgctgataatcatgatattactagtccagacaaaaagaagtttcaggtactggagataagaagcatgtgtccaag

SEQ ID NO: 130002 - DNA, 137 bp, Zea mays
  Clone ID: MRT4577_50033C.1
ctttattctacatgatgctgatgagacatcgctctaactatgagccaacctggccaacaagttgtcctgtgtgtagagttcctgtactatagaagggatgagttcgtgctcaacgagctctcttggctgttaatatt

SEQ ID NO: 130003 - DNA, 1470 bp, Zea mays
  Clone ID: MRT4577_50034C.1
ttacaacaccctacttcatcacgacgccggtggtcatgacaatctacaagccagcgcggcggggggcgccgtacaagaaccgcaccgtccagcgcgcgaacccgcacgacgagttccgcatgatggcctgcttccacagcacgcgaaacatccccaccatcatcaacctgatggagtcctcgcgcggcacgcggaagcgtggcatcaccgtctacgccatgcacctcgtggagctctccgagagatcgtccgccatctgcatggtccacaaagctcgtcgcaacggcatgccgttctggaacaggcggcgcaacggcgacggcggcggcgaccagctcgttgtcgccttcgagacgtaccagcagctgagccgcgtgtctatccgggccatgacggccatctccgacctggaaacgatccacgaggacgtcgtcaccagcgcgcaccagaagcgagccgcgctcatcgtgctccccttccacaagctccaccagatcgacggccacatggagtcgcttggcgaccagtaccagcacatcaaccagcgcgtgctccaccacgctccctgctccgtaggcatcctcgtcgaccgcggcctcggcggtgtcgctcaggtggccgccagcgacgtgtcatacaccatcgttgtcatcttcttcggtggccgcgacgaccgcgaggccctggcctacggcatgcgcatggtcgagcacccaggcatcgggctgcacgtcctacgcttcttgctacagtccggcggcgccgccagcgacgacgacgcgtcgttccttgaagagttccgaaccaaggtggccaacgggaacgactctgtccgctatgaagacaggacagtgggagggaaagaggaagtcgttgaggcgatcaaggcaacagggcggtgcaacctgttcctcgtcggacagggcacgccctgcatgccgctggttgactggagcacggacagcccggagctcgggccggtgggtacttacctggcgctgccggaattctcgacggtggcatctgtgctggtcatgaaacagtacgatccgatggcgaagcacgacgacttcgtcgaggaggtggccgacatagcggtggacgttgacacgccgggccccagtaaccggggaaccaatactagcttccatgccggatgatacgtgctggtgttagatgtattattaacatgtcgagcagacaagactgattaacattatgtaatgtaatctcaaagtggtgtaaatggatggatcaaggtataggatcccctggagtgtccaaccggcaatccaaaccaattccttttttcgaattatcatgatgtaattcccaaatgtataaaattcagtttttagtttttccttaaaaaaaaaaaaaaaaaaaaaaaaaaaaaaataaaaaataaaaaataaaaaaaaagaaaaaaaaaataaaaaagcttaataaatatataaatataaaaaataa

SEQ ID NO: 130004 - DNA, 364 bp, Zea mays
  Clone ID: MRT4577_50035C.1
aataaaaacaaaaaaaactagaaaaaaaaaaaaaaaaaaaaaaaacacaaaaaaaaagggggggacaaatatacaaggcggggacggactcccgtcctgacggtgccttgcttccggctcgtgcctgcgaggccttgccttttatccaaggggaggttcgttgaatcgattgccacccactttacaacttcttgaccgggaaaacccttggtttaccactcttactcgcttgctaccacttacccttcttcctaacggtctttcacacaatctggctcgagccaagctcacttccctcctttttccccgcttatttcgccaatggcactccctttgctgcggttcctttagatcggagactggg

SEQ ID NO: 130005 - DNA, 263 bp, Zea mays
  unsure (1)..(263): unsure at all n locations
  Clone ID: MRT4577_50036C.1
ggttataccatgtcatttattactaaagttgatggtgaagcagcccaaggaatagctcattcatctgcggctatggtaatacattctgaaaatgggtatcaattacctgcatctacagcaactcaacaaccagtgccccagagggccactcaacagttccaagcacctcacaatccaaactttatgccaaatcggcatggattctcaccacatttcgggtctctaatgggtgtttcnccccaaaaaatcaaccactttttttt

SEQ ID NO: 130006 - DNA, 670 bp, Zea mays
  unsure (1)..(670): unsure at all n locations
  Clone ID: MRT4577_50037C.1
gaatagatagtattagaccacttctcacaagcccagtcatacataaaggaggattgatttcttataggcaaaaagaaaacacatctatatcggcgtcaagagttacccaagtccgaagtaatgcgtctttctatctagtccaacatgcttacccaagacccaacttcttcactacttgacctactttctataactcccagactctgcttattatgcccgaaggagcgtatttagactgaataagtaaataaggcgcggagcgatagaacatctctcagttcactaaggatgaaatactcttgctagctttcgatgaatgcctccagttttggagtagatataggcaaaatttagcaagtaacatggttgctgtcacaattccttaatcttctcggctggaatctacaatgggctacgtacgcccttgtttttgaatcacggaaatgcagaggttttcattagtgcttacctgcagtccaccctttctttgaaccttgtaaatgatcgaatttacagatatgaactgagtgccatttgatgagtaagatcgaacaagggagagggatatgaaaaggatgaagtaatgaaagaggaagtcattgctagtagtaacgacttgtcacgatccattgnntcatatagaatccatgtcctaggtctatcaaaaaca

SEQ ID NO: 130007 - DNA, 371 bp, Zea mays
  Clone ID: MRT4577_50038C.1
ggggttggtttttttttggtggggtgggttttttttttttttttttttttttattttttttttccggcacaagaaaaaaaaggatggggaaaaggaaaaaaaggggggggcgggaaaaaaaaattttttccccccccccgggggcccccccccgcaaattgggggccaaaagggcaaaacccccggccaaccccccttaaaacgggtaacaaaaaagggaaggggttccccggggcccgaaacggcactgaacggataccccggggaagagcccccccagggcatcggggggaaggccgaccaatcccgggggttttccccaaaccaggggggagggcacaaaaagggggcccttttaaaacccaataaag

SEQ ID NO: 130008 - DNA, 3480 bp, Zea mays
  Clone ID: MRT4577_50039C.1
atgccgccgcgcacaaggaaaaccgtgcgcaagtctaccggaccaattggcgtgcctcgccatcaactagctccaaggcatgaggacagtagtagtggtagcaatgatcccatcggagatctggaagctcaggtggagcaactgcgaacggaattatgtcatagaaacaatgtgtgggtcgaggatgacgagcttgccgaacgagatttggcactcgattgggctgttaactcacattccattgcttgggacaaggaggcaaaggctcgtgctcgtgtggccgagcttagcacggccgtcgacaacttgcagatcctgtcggaatgggagctggaccttctggtgcagcgggtgaagcccttggctgaagatccccttgaagcagatgagtggatccgggttatcgaacaaaagtttgggcttctccgatgcacggagactcagaagcccttatttgcggcgcagcagttacgaggccctgccagcacctggtggggaaattatgtggctatccagcctgctggtcatcaaattacttgggacaaatttaggttggcatttcgggagcactacattccagaaggggtgctccatatgaaacaggaagaatttatgaagcttaagcaaggtggcacagtatctcaacaagttcaaccatttgtcccacagaaaatggtcacctacctcgacctctcctacagtagagctgtcagcacggcgctggcagttgaagccaagtatgctggcccaggaaagtcaaagggctatggaggtgacaggcccaaccaggggcctgagaagcgacaaaggttggtgatccgaccttttaatcaaaattgttcttcaccacgtccaccctcctacccctttaaacaacctgtctttatctgtcctgccactacccccacctcaacaaatcagccgagtgcccctggtactcgtttccccgccctcccaagctcttcaacaggttgctttaattatgggaagtctggacattttatcaaggactgcccatatcccaagaagaacagatcaaatgatcagcagagttcagggagttccgctcaaggcaagggaaacccggcgaataatacatcgggcaaaaatatgaagaaaactgggcgaatttattatatgcaaatggccacgacgccggaaggagaaccggtcttgttgggtacgtttctcatggccaatcaccctgcagttattctttttgattctggcgcttcacacacattcataagcaagaagtttgtggagcaacattgcattccatacaatgaatcaagggaagggtttataattcattcgcctgggggacaaatattcactaaagaagtggatttccatgtgcccgtaacattggctgaacgggactttcccacaaatatgattgttctgaaaggccaagatatagatgtaattctgggcatgaattggttagcccaacataaagctatcctcaacactgatctgagatccatcaggttgagctatggccaagaagaggttctgttgtccattcccgtagctattccagctaaaccaattggcagagtatatgaagccatcataccagagatccaagatattccggtagtatgtgaattctcggacgtctttccggaagatctgcctggattgcctccagaaagagatgtagaatttgtgattgggttgaagcccgccatctttgtcaagaagaaggaccaaacacttcggatgtgcgtggattatagaccccttaatgaggtcacaatcaagaataagtaccctcttcctcggattgatatcttattcgatcaacttaccggagctcgggtattttccaagattgacctcaggttgggttaccatcagatccgtatccgacccgaagatatacccaagaccgcattcactacgcgatgtgatgaagcctttgagcagctgaaagtattattgaccactgctccggtattagctcaaccggacattgaaaagccctttgatgtgtattgtgatgcatcagatcataaaagtttgaagtacatctttacccagtcagaactgaatatgagacagaggagatggcttgagcttattaaggattatgaactggagattcactatcacccaggcaaggctaatgtagtggcagatgcgttaagtcgcaaggctttctatcattgtcttacaatgaagacttctgacattacgttatgccaagaaatggagaagttggacctgggaatgatacaacacgaaacttcaaatcacttgaagcttgagtctgtcctcctacaaaggataattgacgcacaaagaaaggatgaaggtatgaaacacattcatgagaaaatggaggccggtaaagccaactgcttcagaagagataatcaaggtgttgtatggtttaacaaccgcatagttgtgcctaaaaatgatgagatccgccagcaaattttagatgaagcacatcttagtcgctattttattcatcccggaagtactaagatgtatcatgatctaaagcagcattattggtggacgaaaatgaagattgaaattgcacgctatgtggcaaaatgcaacacttgccgacgtgtcaaggccatacatatgaagactgctggcccattacagtctttacctataccaacatggaaatgggaggatattagtatggactttattatggggttacccaggacagcaaaagggtatgattccgtctgggttatcattgatcgacttaccaagatcgcccactttctcccagtcaaagtaaagtatccagtaatcgcatatgcggaactgtacattgctcgcattctcagtctgcacggtgttccgaagaccatagtgtcggatcgtggacctcaattcttatccaaattcattgaagaacttcacaaatccttgggtgaaagatgtttcttcaggtctgatatggaaaaggaaacagaagaaaaggttcgacgaataattcataatttgaaagaagcccaagctcgccaaaagagttatgcagacaagcgacgtcaacccttgcactttaaagttgaagaccatgtttacctgaaagtttcaccaatgaagggtgtatcacgtttcggggtaaaggggaagctcgcaccccggtacattggtcattttcctatccttgaaagatatggaccagtggcatatcgactccagttacccgaaacattgtctgctgtacataatgtgttccacgtatctcaattgaagaagtgtcttcgggttccagatcgaactattgaagtaacagatgttgccttagaactagacttgacctattcaaaacatcctgttcaagttttggatcaaaaggatcggatttcccaaaggaaaactctcaagttttacaagatacagtggaaccaacacacggaagatgaagctacttgggaaactcaagactttttagataagaatttcccaggctttatagcttcatgtaaattgtaa

SEQ ID NO: 130009 - DNA, 363 bp, Zea mays
  Clone ID: MRT4577_5003C.1
gacccactcgtccactttgacatccaatactctctgactatcatttaatatttggtataccaattcttttttctgtagagtgtacacttagtaagacaacgtgaaccaaacacaccttctttctataccaattatccctatatcacatctaaatatcactcaaatcatcaataatgcaaatgcctattacattcaattaatccttaaggaaaacatatcacacacgatataaccgcttaccttaacgctccttgcctatccactgaacaacacacactcttgtttcaccctggtataccgagaactcctggatcacttgaccatgtccacttcaatacactaattcaataccacctattccac

SEQ ID NO: 130010 - DNA, 344 bp, Zea mays
  Clone ID: MRT4577_50040C.1
ggaccgggctaagggtttttgattaaatgggttaaaaaaagggtttgggctgccccgggcctaattttttgattcaacatttaaggcctaataatcagggggcaaagcttcgtttcttggaagcctgggaaaaataaaagcttggggtttaccaaaaaagaaaaaaaaaaccccgggtggttaaaaagcataaatcatcccttccccaggaaaaaggacccttgcttgggctaaatacccacggggttggggttggcccccccggttgcttggggttgggttggcggggcccccatgcccaatattacgggggacccattattatcaagaggggccccttcccc

SEQ ID NO: 130011 - DNA, 1056 bp, Zea mays
  Clone ID: MRT4577_50041C.1
cgagtacaagcttttttttttttttttttttttttttcttttttttttttttttttttttttttttgaacggcactaccggttgttttctggatcgtcaaccagggctttcggcgaacacaagagcctgccccggcccccccggcggggggggagggccagcacacgggggggccccaccagaggagccgggcccgaccccgggcagggcgaaggaaacaacgatgatatggcaccggcggcttagagggcccctgccatggctgtgggataacccacggtcaccacaaagggtggagctccataaacccggatccgcgtttgtacaagttcattattctgactggctgtaccaaggacccatgcagaggtggtccgtatttcttcatttgcattattaagctcttgaatcacaggaaggagccctccaagtttttcaagatcattagcattgtcaatgggctcaacaagaactaaaagttcctgcagtgcgcgttggcgatcctccagtgaaatggaagaattatttaagtcatcaattgcgattttcattaagtcagcgtctgatggcatctttaacttctccatcaactccttaatctcctgacgccgctcgagcagttcatctgcagataacttctgcacatcaaccgccccctctttcagcttctccggatcagaatttccgatcgcccactgcagcatgctgtcgagggagccgaagccacccgcgaactcattctcctccactaacccgcctccaccagcatccccctccgcgaccagttttccctcgtccttcccgaccgccaactgcttcccgcccccctccgccaccgccacagccacagttgccgccgccggcacgagcagcgggaggagaacggaaacggataggacagccgcgaggataagttggtgggtgggtcgcttcgacgggtgtgcccttcccttcgccatggctcgacagacggatacaggcttcgagaatcgaggacaggagcacgctgcagtcgcagtggagagggaaagggagctcgagatgggattttctccc

SEQ ID NO: 130012 - DNA, 323 bp, Zea mays
  Clone ID: MRT4577_50042C.1
gggtcaccatttaatccaagatgtttttaacttttatttgggaatcaacgctgtttacaacaaaatttggttccagctggtcattattctccaactccaaggggggaaacaaacccaccctggttttaggggttcaaattttttgagaaaatggttttttacaggggcaaacaaataaaatggggcaaaggtttgctaacatgttccaggggttaagcacaaccattcttaacccaacccaggtgcttttatgatcaagggattccacacctttagaataaacttttatgccctggggcatacataccccgccagtttgggac

SEQ ID NO: 130013 - DNA, 353 bp, Zea mays
  Clone ID: MRT4577_50043C.1
aaatgattatttgtttaaagggttgttggggtaaatgatgagggtaaattaaaataaaatataaaaaaaaaaaagggggaataaataataacagaggtagttagatgcataaacacttaacaaccaccaagtatgaaaatgtgggtggagtaaggggtaaacacaagaatcgttgcataaaaacccgcaagggcgaaacgtttaggtacgagcacaactgggacatgaaaagcagcaaatggtgcaccaaccgtgctagttcaagggatttgtttttaaaaaaacttcttgtggacaatggaggggcgcgtcttattatactccccctcaaaaacagcatgtgaccaagggcg

SEQ ID NO: 130014 - DNA, 886 bp, Zea mays
  Clone ID: MRT4577_50044C.1
atttcccgccctttttaccccccgcacattccagaagcttcttccctgccaccaccaccgccggcggcggcgaggatgggtacccgcgcccttccgctcccttgccaactcgagctcctcctcggcgaagaccgcggccggtggccgccggaggccaggttcatcgaggccgcccacctcggcgacgtccgccgcatcaaggagattgcgaaggagctggacgtgcgtgggcacgggatcccggtgacggtggccagcacgagctacatgggcatgaacgcactccacgccgccggcggccgcggcaggctgcccgcgtaccagtacctcgtcgaggaggtcaagatggacatcaacaagcccgacacctcccaggattattcacccgtggagcatgccgttacctatggcaaccttcctgccgtcaggtacctgcttgatcatggcgccgatctgcatcaacaacgttcaggaaacatcactcttcttcattcagctgcagctcgtgggcactctgaaatagtaaagtatcttctctctagaggagtggatattgatgcacaatcaattatagggacaccactcgcttttgctgctcagaaaggacatgctactgttgtgaagatacttttgcagcacaatgcagatcccaacaagggtactcttattcttggacctttagacatggcgttacacaaatctaatgtgtcttgtgcgaagctattgattcagggtggagctaatgtgagtggtgctggtccttgttataatcccttggtaacggctgcagagaagggcttaactgaagctatcaagtgcttgttagaagctggtgcaaatccaaatgttcttttgacaggtttggtagattgccaatagaattggc

SEQ ID NO: 130015 - DNA, 338 bp, Zea mays
  Clone ID: MRT4577_50045C.1
ggccggtaccggaccggccgggccgagccgacccacgctcccttcgagggacaggaagggcttgccgggacgggggatctcctagggctgggctgcatcaccaacctactcgttgctagccatggaagagggcacctactacgctgccggaccctggaactacagtcccgaccgcctgaccccgaggcgacccacctacgagcaacacgctgcacaggaacccgaacactgctgtggaagcataggctagaagaaccgattcaaatgcgagagccactgaccgtggctgatgcacacccaaacggacagctgacgactggggagctaggggacgaaac

SEQ ID NO: 130016 - DNA, 563 bp, Zea mays
  unsure (1)..(563): unsure at all n locations
  Clone ID: MRT4577_50046C.1
cattgggtacctcgnagccggccgggagtgttgacatcgcttccgctgcctagagttacttcggaataccacccccgtgacttcgcgattctgcgcgataaccgagagatgcctacccataccgaacattgatgtggttgtgaacgtgatggctactactccctccagcctctgctctactctcggcccagtgaacgtctctcggatgctccgaaccgtactcatcatgacgaacacaccagggagcgtctccgaagagagacatcctacactgtgtccagtctgaaagacaacataggaggctgccgagacgagtcatacggcattgagatccttcagatgcagcggatcgccctctaagttgagcgtactgcgtgacgaaaaacatgcatgtgactactcgaaacaactggcatgcatgactattcgccatcacggcgataaaagtcgaggactacctgttctgattctggaatcccgaccacaagccgccgtccaccatcgaggttctagttccactggagaagcgtagtcgccggcttggactatccctgcgcctacaa

SEQ ID NO: 130017 - DNA, 1044 bp, Zea mays
  Clone ID: MRT4577_50047C.1
atcataaagaacagatggtattatttcacatcgaatgactcattgtcctcgctagcactgtcaacataaaccaatgttattagagccaatttccgcgctgctgaagaatgaagactgagcttgcacatccagaagcatccatcacatgctttgttttcttcttcttacattttcaagtcctcccaactcactcccattccgaaggacgctaagttagtataccttaccaggcttcaacgtccttaattaagcccgaccaggatagcaatccgtcgattaaaccataccttacgtcagtaaataacgctcatagaataaaatacaacacgtctccgcacgtagaggagtagcacagcatattcgttgcttgctcttgacagtggtgtacggttcacaggcagccgccgagagtgagcgcggcctgcaggtccagccgccaaaggtagctgccggcggcgtccagacgccacacatcgcagggcgccaccacgggggaaccgacgcgccgggcgctccagtgccgggcgcggacgcggcacgtgaatcccgcgcaggtgccccacgccgggagggcaccgccgagcaccacgggcgccgccgcctcgtcgccgtcgtccgcggatgcagcgcggacaaacgcggcgttccacaacgtgacgcggccccactggtccgacacgaacgccggggcctcgtcgtggcccgtcgcggaggccggcgcctcgccgtcgcgccacgtcgcggtcacctcttccaccgtcaccaagtaagctgcagcagcagcggggcgcatcgcgcgcggagcggacggccgggccgccgtagccacctgagacggcacgagctgatccggccccactgtcgcaggacaagcagcggccttatcctccgccgccgtcacgggcatgaaagacagcgataaaaactggcgctgctgcggccggggtggcggcgacgagtccacgaatgacgtccccgacgaggacgaggacggcgacgaagacgacttctccttgtcgcagtgctcccggcagtcgcccacat

SEQ ID NO: 130018 - DNA, 753 bp, Zea mays
  Clone ID: MRT4577_50048C.1
ctgaaagccggccgggccgggaagctggccatcgagcagggggctcattcatccgcacagaccggcacccagctcaagtcacccccgaaacgcaagctaagcgcgcagccatggcggcggctccagagcggccgctggcggtggacttcgaggcgctgagctacatcagcagcctggtggaggcgttccaggcgttcgactccgacaacgacgggctggtgacggcgcccgagctccggggcctgctggcgtcgctgggcctggccaagtcggaggccgaggcgcgcgacatgctggcgcgcgccgacgccgaccgcgacggccgtctcagcgtcgaggagttcctggacgtgatgaacgccggggagctcggactgggcgcgctcggggcggtgctgcagtcggcgctccccacgctggaggccgcgggaggcgcgctggtcggcgcggacgagctcgcccgggcgctcggcgccctcggcagcgctagcgccgaggactgcgcggctattgttgagtgcctggacggcgacggcgacggcgccatcaccattgaggagttcaggctcatggccgacctgctctaggtctagcttggagctagcccaggctgcgcacgtacgcacgcgtggaacaccatgccaaaggtttgctgtgtagatcgaccatctactcagatcgacaataatcaaacaagagctacacggtttgtgtgtgtctaaaaaaaaaaaaaaaaggaacggggtgaacccc

SEQ ID NO: 130019 - DNA, 336 bp, Zea mays
  unsure (1)..(336): unsure at all n locations
  Clone ID: MRT4577_50049C.1
agctcggaattcggctcgagaaaaaaaaaaaaaaaaaaaaaaaataatanatataaaaaaaaaaaaaaaaaaaaaacgccgacgatttatttaaaaaaaccgggaattccctcctaacctgggccttcccccatacaaaatttccttatcccgaattatattctacccacccctccttatggccttcccattttcctctttgaaaagtgtatttaaacccccctccccacataaaacaagcacccaaccataaaaaaaaaaatttccccccccttttcaccaaactaacacccctctatttctttttgctaactccccgcttcccaataggaaaac

SEQ ID NO: 130020 - DNA, 284 bp, Zea mays
  Clone ID: MRT4577_5004C.1
gggggccaacaggaaaggacatgaatgggtactagcctttggggaaattaaccgaggctggaatttttttgggggatccgggaaccaggggtgggggttttaagaataaaaactgaaaaaataaagggggttgggtttcaaaaaaaaaatgggaaggatttctaaaattaacaccatacccttataaaatccaaacctacaggagccaaacagccttttgccattgaaaaggggtttgttcgccctgaaaaaaaccggtgaaaaaaaatttttttgccttggca

SEQ ID NO: 130021 - DNA, 411 bp, Zea mays
  Clone ID: MRT4577_50050C.1
tcttcccttctttttttattctccttttctttattttttttttttgtgttttttaaacaactttgcgattaccaacactgtaaaacctttagcttttacagaaaagagacccccaccacttgtataaactttaatccttaggccaacacactacaactaaaaacagaactcatagtgtccacagctatgtctgattgctaactcattcaaaatcacccatttagtcgctattccttttatcataaacaacatttgggattttgctcttctcattatcacttggcaattggccatcctgtttaaattatccttccccctaaaaaaaaacttctttcaccctttatcatacttaaaactctttaactccctctttcctctttaaacacaacaatttgcatcccaaacacaatc

SEQ ID NO: 130022 - DNA, 106 bp, Zea mays
  Clone ID: MRT4577_50051C.1
cccacgcgtttggcacggaatatcaccagggcgaccgcacaggatatcggcggctgtcggcaggctatacccagatcagggaatgcatgtgaactcaaactatggg

SEQ ID NO: 130023 - DNA, 247 bp, Zea mays
  Clone ID: MRT4577_50052C.1
ctgtactgaggtgtataccagttatgctgaagcttctgatgatgagttgtctgattcagaagtaaatggtactaatgagaaggatgtaagagattctgcgtatgaaacagattaagagacatgtgtggatgtcttggcagcattaattgtcagcggagaatttcagggtacagtagcatctgtgacagggtccagcaaagttgtggctcgtggctcaaatgctgcacctagagtttcaaaactcgag

SEQ ID NO: 130024 - DNA, 708 bp, Zea mays
  Clone ID: MRT4577_50053C.1
cacgacgcgtaccaggtcgtgtaccggatcaacgtcggtgggcccgccatcggcccggacgcgtgggcgctgggccggcggtgggagaccgacgccgcgtacgtgcagtccaaggaggcggtgaaggacgtgtcggtgcccaccagcaccatcaggttccccgacgggacgtcccggctggtggcgccggcgctggtgtacgccagcgctgccaggatggcggacgccgacgtggggagccccaacttcaacctgacgtggaaggtggacgtggacccgtccttcagctacctggtccgcctcttcttcgccgacatcgtgagcaaggccaccaacgacctctacttcgacgtgtacatcggcgggcgcaaggccgtgtccgggctggacctgtcgacggtggccggcggcgagctggcggcgccctactacaaggacttcgtggtgaactcgtcgttgctggaggacggcaagctgagcgtccaggtcgggcccatggggcaggacacggggcggatcgacgcgctgctcaacggcatggaggtgctgaagatgagcaactccgtgggcagcctggacggcgagtttggcgtggacgggcagaaggccgacgacgggagcggtgggcgcaaggcggtggcggccgtcgggttcgccatgatgttcggcgcgttcgcggggctgggcgccatggtggtgaagtggtac

SEQ ID NO: 130025 - DNA, 620 bp, Zea mays
  Clone ID: MRT4577_50054C.1
acatttgctgagttaccttgcctccctcgctcatcttcgtatgcacctcagatccgcatcgcgatatgtagactcatactggagcgacgaaaatgtgggctgcttagcatcgcttgctcactgattcggaccgtgtgtgccattgtctatctgtgtggacgcattcatcgctgaccatgatgactctgtaggaagcacccccacgactgattctgcgacggagaggcggaaagccacaaacgccacgaccccgaactgtgctcacactgatgaatcgacctaatgacgtgagaccccatcgagacacacacgaacttacttcctgaacgctactgaggaggaatgctactcgcctacctgtagttctgcgactgtagcgacacaccatgaacacatatgaccgtttaccacggacttatacattgtgcgatcaaaaagaaatacgatccgcatctattcgtgacacttccttgatctctgaccgaacactccaaactgtcacctgtgtgcatacaacgacgtacatgcatcaccgacgacatcgcccaccatgccacgaaacaactgggttgttctcatactacatgctcgtgttacgcatcctctacctctgtaacgac

SEQ ID NO: 130026 - DNA, 519 bp, Zea mays
  Clone ID: MRT4577_50055C.1
gcacgaggctgtcagagacacgacacctcacgtccgctgccacctctctccttcgccggtcgccgctccagctgaacttgaaggagaccgacggatcgatggcggccgccgcggcggtatacaggcgggtgctgaaggcggtgcagaagcacgtcggcgggggcgccaccaagcagcatttccgcgacttcgtggcggccgagttccgcgcccccgtcggctcgaaggccgacgctagggccaggctgcggctcgccggagattacgcctacctccttaccagcgtccagcaccacaaggacctgctgttgtcgtacaatatagctgtggaccgatccgacgaaatgaagaagatattgaacaaatccgctgccagtgtaggcctccagctccctgatgtctaccagccatgagggcttcttttcctcacgtatgtgtgatccatgatactgccatttagctatggaatttcattttgtgtcctacattccatttgtcttgtttccaattctactcttc

SEQ ID NO: 130027 - DNA, 364 bp, Zea mays
  Clone ID: MRT4577_50056C.1
gggaaaaaacgattggaacttttttacttggaaggggggaacaaaagcccatggcaggttcaaatttgtcaagggctaaagggggatatgctttgaaaaccgccgggtcgggtttgatgttacaaaaaaggcctagggggggggattgggggggatttaaaaagggaaaaattggtcccccaatacaacattgggggaaccccaatcagcttgttccctccaaaatgaacaaaaaataatggcccccatgctcaagggggggaaaaacactgaaaacaaaaccctggaaaaaccaacggcctgtgtttttccacggcgcaaggggaaaacctggtcaggcaaaactgggacctgaaatttttta

SEQ ID NO: 130028 - DNA, 786 bp, Zea mays
  unsure (1)..(786): unsure at all n locations
  Clone ID: MRT4577_50057C.1
ccggccggacgcaacaatcaacacttcttccttattataattccttccgacttccngaaccactttcgaccacacatatacatttccaagccacattacaaacttcaaaatggatgactgggataccgcaaccaagatcggcagccgcgctcgtggccctggcaatgctcagcgagagaccgttgtccgaggaaaggctgctctcaacgctgcccaacgggctggaggtctcactaccgagaagaagtactcttccgccaacgccggttccgcacctgagggtcagcgtatgaccaaggttgaccgttccgacgacatcatcaagcccaacaccatcggcaagactgttggcgacgtcatcgcaaagacccgacagcagattgagcccaagatgacccagaaggacctcgctacccgctgcaacaccacccaggctgtcgtcgctgaattcgagcgaggtagcgctgcacctgaccaaaaggtgctcggtgctatggagcgcgtgctcaatgtcaagctccgaggcactgacattggtgctcccaagttccctaacaagaagaaatgatcaattcatgcctgtttagagggaaagatctgtaacaaggcttcagagccgagtcgagcgttagcgaatgatgatatcttggctggganatacgggagtttcgtgtgggccgtcacggtgcgtttatgacaatgggtacatgagcttctaccgtttttttatgatggggcttcaggattcacggcgatnganagaatggactcctcagattatgggcg

SEQ ID NO: 130029 - DNA, 387 bp, Zea mays
  unsure (1)..(387): unsure at all n locations
  Clone ID: MRT4577_50058C.1
aaaaaaaagaacaccaagggcccaacccaaaaagggnggaaaagaaaaaacacccacaagggggcgaagagacgngnccaccngcaagggcaagggccaaacaccgaaagcaaggggacccaaanccccaaggaaacaccgggcagccccaaacaacgaaacccnnggcagggggacaagaggcgagagggcacccggccagaacaaggccccaccaggggaggccgacgggggccaagcccaagcacagaggaggngagcacgggcaagaacgccaggccaggggnaagcgcgccaaaaagcaaggagaaggggggcccccaccaaagacagccgggacccggaaaccacgcaccccgaaaggaacccgggaaagaaccaaggggg

SEQ ID NO: 130030 - DNA, 467 bp, Zea mays
  Clone ID: MRT4577_50059C.1
aagaagacaatgtccacatccgatagaagaacactttatccaagtattaagaactctcttaagacgcggaacttgggatccggtaacagcgtgattacctccgctttttccaaccatgtccactgctttatctggatctcgcttgtataacacaacctccttcgattcgcataaactttccatggaatcatccaacgcgacaatgaggtacttttgaataccaactctctttacactagcaatctgcaactccaacattggtttcacatttgaatttgcaagaaccacaatgatctctttattgacagctactttctctaaaagcttatcttatctcgggttaacagactcatcaggaacaacagttggattagttctcacactcttgacagtaccaaaagggccctgcctttattttctgatcccaaaactaagacttcgttccttgcattatctgttttctgttc

SEQ ID NO: 130031 - DNA, 412 bp, Zea mays
  Clone ID: MRT4577_5005C.1
aaaccaagggcaaggttggccaaaaaaaatatattttttaaaaaaacccggaaaaaaaaaagagggggggggaaagggccaaagttggcccggcccaggggaataaagggggggtcaaaggggaaaaagccgcaccttacctttggggggggggccatttggggagggcccacggtttagggcggggggggggaaaaaacatcccctggaattccgggggggggacaacctggaaaccaaagggcgggggtttggtgagctcggggttccgggacccccgcgggaaaacttattgttccttttaggaggggggggggggtttgtaaaaccacttcggggggagggggacctcccacctgggggggcacgcgtgtaaatcccggaggggggggggggccggtttgaaaagccc

SEQ ID NO: 130032 - DNA, 258 bp, Zea mays
  Clone ID: MRT4577_50060C.1
cgctctaaaccgacccagaccccaaccgggagggcgaccagttggtcgtgggggcccatcgctgccctaaagaacaagacgatctacaagggaaagaagggcgggaagaaaaagaccgtaccccctttctctaagaacgagcgctacgacatcaaggcaccgccggaagacagcgtgcgcaacatacgcaagactctcggattcagaacacacggaaccagacttgctcctgagggactgcaacacagagaccctgag

SEQ ID NO: 130033 - DNA, 299 bp, Zea mays
  Clone ID: MRT4577_50061C.1
tcggacgcgtggggcagcagcaccagtccaccaggccggtgccgcccaaaatctccgcgtcccggacatggggcgaacgaaggaggtggccacgactgcgaaggacggatccaggcaagaagagcaagacaactacgcccgtgctgaaagcaagggcgacagtagccaatagtattagagaggacaaaacacgatgaatcaaacgccaagatgcaacagaggcagagacaaaggaacaataagattgagacgctggagaaactgacaacgcagacgacggaacaccagttgaagcagga

SEQ ID NO: 130034 - DNA, 362 bp, Zea mays
  Clone ID: MRT4577_50062C.1
ccattgcacctgcctgctcgagtcgctttcaactcatggccatggagtccgcctcagcctctgtcttccactcggttgctcctctgctggctacgcagagccttcactagccatggccgcgccctctctggtaccgagctcgcccataccgagctccctcagcgtcccgtccatggtcctcctccactcgccctggccatgcttgcctgccgcgccacactgagtttctggagtctggcacggtgaactggggagagaagcagccaagcagctccctcacgccgcggcttcctccttcagctcggcgctcatctccctctctgctcggaccgtgcccagctccgcgcgtcgcagttcgcccc

SEQ ID NO: 130035 - DNA, 283 bp, Zea mays
  Clone ID: MRT4577_50063C.1
gcgggcgatccgaaggagctattaaggcttagctgctacctaggctggggcaggagcctataactttgggatgcaagagaattacaaaacttatgcttctccggtataccaaacaacaaaaagcatatttaccagagataactctgaagctggggcagatgatttagattgcaccttcacaactttgctatgtcttctaggtgcttcctactgactctgcttagaacactaaaccacgatgggatagccaagagcaaagatgatgattgcatcaaagagacga

SEQ ID NO: 130036 - DNA, 243 bp, Zea mays
  Clone ID: MRT4577_50064C.1
tcgcgtacgcgtgggctctacaagatctaagggggtttccctacggttgggtatgaggggaggagtgtttccgcgggtactctttattcggaactgtttccttgcccatcttgcctttcttttccatgattgttgctacaatcttggggttggtcattgtagttcacgtttctctcttgttgtagctgtctttagaatttctgcctttgtatctggttagttttaaaaatatattgatggtgg

SEQ ID NO: 130037 - DNA, 418 bp, Zea mays
  Clone ID: MRT4577_50065C.1
cggacgcgtgggcggacgcgtgggttgccaattggagatatacggatgatgaggtactcctcaaagattggtctgaggtcagatatagatccttctgccatttgaatggtagctcctgtaaggaaaactctagcaggcactgatggcactgaaccaaacatcatctttgaggagtaccttgccaattggagatatacggatgatgaggtttatgtttttgatggaggaaatgacagcacttcaaatggttttgtcgttaaatctattatgtcaactggccagtattttgaggtggcagaattgtatacagtaacattcctctgtattgtctctcaagatagtgaaactgctatctcatgggcagaaaaggctcatctaactgagcaaagccggcaggacctactaaaaaagcttcatg

SEQ ID NO: 130038 - DNA, 231 bp, Zea mays
  Clone ID: MRT4577_50066C.1
cgaggctccggaaaagcttggaaagctctgggttcaaaatggccatcgctgcgatcaccggcatactgcgacgacagctcatccttgacctcggcattggtctcggtaaataataccccgcgaataactgcaaagctgtaatacagctaggacgacttggaccaatttacttacgactcattaggagctggatttatcatgggaaactggttctggtacggctaccacatg

SEQ ID NO: 130039 - DNA, 1110 bp, Zea mays
  unsure (1)..(1110): unsure at all n locations
  Clone ID: MRT4577_50067C.1
attgggtacctcgaggccggccgggatagccacgcgcccacgcgccccaagttcacgccggacctgctcctctccgacggcggcatcggcttcgtgctccgctacttccccaaggcgttcaagccccgcgcccgcccaggccacgaggtggacgaccgacctcgccaacctcatcaagctctacgcggactggcactcccgcctgatcccctactactccttcgaacagttcgtgcgcaaagtcgagaaatcgggacgatggtgggcctctctgaaggggagaaacacttcatccgcggcggcattgcacaagaccttcgcactgatggacgtaggcggctgcagttccggtccctctccgtccaaaccggagtcattccacaggcgaatggctcagcgcgtgttaggttgggggccactgaaataatcgctagtgtcaaggctgaattaggaaaaccaagcattcttcaccctgacaaaggaaaagttgccatttttgtcgactgtagtccaaccgctgagcctctgtttgagggtagaggctctgaagaattgtctgctgagctctctgtttccctgcaaagatgcttgttgggtggtaaaagtggtgctggtgctgcaattgatctgtcatccctaattgttgttgatggaaaggtctgctgngatctgtacattgatgggcttgtggtcagttctgatggtaatttgctagatgcgctagctgttgcgataaaggttgcttttgagtgatacaggtataccaaaagttaatgtttctgttagtgctgcatctgatgaggaacctgaagttgatgtaagtgatgaggaatttctgcagttcgacacatccggtgtgcctgttattattacattaaccaaggtgggtcggcactacatcgttgatgccacctcagaggaagaatcccagatgagttctgcagtgtcggtgtcagtcaacaggcatggccagatatgcgggcttaccaagaggggaggggcagggctggatccaagcgtcatcttcgacatgatagcttattttgctgttaagtgccaacgtacttcatgcaaaaaaaaaacaaaaaaaaaaaaaaaaaacccgcggcc

SEQ ID NO: 130040 - DNA, 385 bp, Zea mays
  Clone ID: MRT4577_50068C.1
acgatccaggacacggacggcattcctccagaccagcatcgtctgatctttgctggcaagcagggggaggatggttgcaccctcgcggactacaacatccagaacgagagtacccttcacctagatctccgtctcaggggtagtatgcagatctttgcgaagaccctgactggaaaaaccatcaccctgcaggttgagagctcggacaccatcaacaatgttaaggctaatatccaggacaatgaggtcatccccccgaaccagcagcgtctgatcttcgacagcaaacagatggaggatggcaccaccttagcagactacaacatccacaaggagagcactctccaccttgcgctccagctccttggtgaccactaagtcatgg

SEQ ID NO: 130041 - DNA, 486 bp, Zea mays
  Clone ID: MRT4577_5006C.1
gtaacctatcgagaagagcggcgaagcgcacggactcgaccaggcggatgaggatgtgtgtcgatcccaatgtctatctcacgcgactcgatgctcaagaggcgtgccaccggtggaacgcagaatgcctgtaggtgcaagcgatagcatgagcttggtcgtcaggcggccaacaccaagctgcctagcaataagacagtgaggagggtccgcggtctcggaggtaacgtgaagtgtaggcttcttcgcctatgatactggaaactactcatggggaagcgaagctgttacccgcaagacccgtatcctcgacgtgtgtctacgatgcatcatacaatgaacttgggatgacacatacccttgggaatactgccattgtgcaagatgatgctgccccattcaagcagtggcacctcactcactatggaggtgacatgtggtacaggaaaatcatccctgctgcaaagaatgattatgctgatggac

SEQ ID NO: 130042 - DNA, 113 bp, Zea mays
  Clone ID: MRT4577_50071C.1
tgctaaatcttcccgagcaaacagcctttggtcatttcactcgaccttgcttcacagcgggagccttcttgagcaggaacgagcgccgtaaacacgaagcccgcacaaataat

SEQ ID NO: 130043 - DNA, 543 bp, Zea mays
  Clone ID: MRT4577_50072C.1
gcaacgtttgggtatatggccttctggccagttgccatcagctgcattgctgctgcagaagggcacttcatggactaccggatggcttatgtggcagcacttctagtgagcatggcatggacaatgcaggtgctgagatacattgtctatgtggcagtggcaaaactggcacatggacgtctcacctatgggattcacgtcctgggcggtgctgtggaagcattctgtgacacgatatttggaccagcctttggggacatatgcatgggtgcaatggctgtgccggtgaactcagcggtgcggggattggctcgagcaatgaaaacggcggctgggggcaacgacgagttcattttgtcaggacagggctgctgctttgctgtatcagagaagatgctgggacgtgctaaccgttggggttttgtgcacgtgggggcgcgggggaaggcattctgtgtggcttcgcgggatgtgtggtcgctttttgttctccgtgggattgcagagcttgttgattcagacctcactggttcgttttgcttc

SEQ ID NO: 130044 - DNA, 1798 bp, Zea mays
  unsure (1)..(1798): unsure at all n locations
  Clone ID: MRT4577_50073C.1
agctcggatcctctagcttcgacgggngcggacgggcgcaaatatacttgttgataacaaaggttgcattaagctagcagattttggggcatctaagcaagtagaaaagttggcaactgcaactgctgccaagacgatgaaaggtaccccatattggatggcaccagaagtcattgttggaagcggtcacaattgttctgctgatatctggagtgttggttgcacggtaattgaaatggcgataggcaaacccccatggagccatgaatatcaagaggtttctctactttattatgttgggacgacaaaatcacacccacctataccagaacatctctccacagaagccaaggattttctgttaaaatgcttacagaaggaaccagaaatgagatctgttgcatcagacttgttgcagcacccatttgttacacgagtattggaagatttttgtcagcttaatcatgctggacccaaggaaacctccaaaaatgagcttccttcctatgtagtgcctactgttgactcggacttgagtcgccctggcaagctacgcaatctgaattctaacaagttatcagacaccaggccattatgggatcagcgatgtaatgatgatgatatttgtgagtttgctgacgaagataatgtcccaatggttggatctagcttcaatcctatgtctgaaccatctgatgaatgggaaaacaaacttgacataagcccagaacaacaatttagtcagtcaagggagtttggtggactagccaaacttgcagaaagtcagatgtctgaaaacgattttactttcccttgtgagggaagctgtgaagaggatgatgaatttacagaatcaaaaataaaggaatttctggatgaaaaggccacagatctaaagaaactacaaacacctttatatgagttttacaacacagtgaatgctggagtttctcaaggagttagtgatgtttgccgagcaaacaatgtaactaatccccagttaccccctcgagcaactaagatggtgggaggtgcagctttagagcccatttgtgttaatctgaaaaatgtcaatcccaagagttgcacaaggcgcttctcaagaggcagcgtggagagcaatcatgtcttgagagaaatagcttcacctgaactcaacatactcgaggacaaggtccatgatgatagtgaagatagtccaagcttgagcttttcggaaatacagaggaagtggaaggaagagttggaccaggaacttaaaagagagcgagaaatgaggtcgggtggctatggtaaagcaccatcaccgtcctcaacgagccggagattgactggaaaacgagatcgcagtcctgtgtattgagtagagaatcagaatacaacacagcaggactcgtatatttgactaaccgcacagtgtcatcgattggtggccattgctagtacagtgcagtgccaaccttcgtatgacctgacagaacctgcttgacgaccaaatccttttggtccttgtaaggtaaattaggttgagcgagccacttgtaagcgcactgtgcatcggaggctatcatgatctgcgatgcctgccttcgcagccctttattgccagcatgaaatcattggggtggcgatttttatgcaatgttcaagcttcatgcaattttggatgacaataggtgcatgttgtacaattgtcttctctttatttttcaaatgtttgtaagtttacctgatgaccgagaatccataattcgttgaaccaaaagtatggaagtgttcgtctcgaagattaaccaat

SEQ ID NO: 130045 - DNA, 309 bp, Zea mays
  Clone ID: MRT4577_50074C.1
ctggtcgttatgctcaccagcaaagccagatcgctccgctgcttatcaattgacttccgccacactgacaaggatgcataagcatacatctggctggctctcacccgctaggtagggcaccccaagcacgtactcacacacccatgcatacacgcgaggtctatttatctagctcccacccgatcgcgctggggatctggcaacatagcccgagtatccgcaccgcgtaggacagcacccggtacttctatcactcactctcgcagcccgggcccaacaacacgtaccgccccaaaagctaacccgcag

SEQ ID NO: 130046 - DNA, 476 bp, Zea mays
  unsure (1)..(476): unsure at all n locations
  Clone ID: MRT4577_50075C.1
tcgtctcgtcccacgtcgtctcgnngttcgtcctatgtagttctctcagnttgatgtcgccctggtgatccagtggaggagtcctcctctcggggnntttatgatcatactccactactccggcgtccgcactccatcgctggtccagtcccttctctcgtcgtctttccctcttactggcttcgtatgtctnnntctcatgaaccctactctgctccccatcattatgcctacgcnncccttcttcttcccactttcctcctccttcctcttttaccctttccatttctagtaagcatctactcgtgcctccgtctttctcttccgatgtcagttcttctgcctnntcgtcgtcgccgttttcaagtcgttcgcctaaataccttctttagcttgcatgccacttncctactgctgctagcaaaagacctttattactagtgtcaattaagttacgaaaaaaataataaatataa

SEQ ID NO: 130047 - DNA, 580 bp, Zea mays
  unsure (1)..(580): unsure at all n locations
  Clone ID: MRT4577_50076C.1
ttttttttttttttcggcttcttcatggatagttttcattaataactattttgcagagacattccagtctatctggcaatacctaactcccaaaccattgatcaatcgccaattataacagttctttacatgttatcccgtgtgctggtaccagccttgtgagtctcctcggcagccttcttggttctgctcttggaggttcttgatgtccttggcaggatcagcgtccgatctgtccgccttgacggcctccntcgctgtctgaggcgagctctggcttccagtggccactgccctccttctgcttcctgagggagtcttgcttgtgcttgtcgtagtcgacgtcggtttgagtggatgattccttgagacctagacgtgtcgatgtagtaaagagacctcgtccgaggatgatcttgctggtgtgcgcagtgcgcagggccatcatggatcgagctgacatcatcttgttgatatgaggtttatgtgatgattcttggggaagaaatggagagacagccgtgaaggattcgatatagagatgaaagaggaagagaaaagagcccgactacgtagtcgg

SEQ ID NO: 130048 - DNA, 824 bp, Zea mays
  Clone ID: MRT4577_50077C.1
ctcgagccgggccgggccggagcaaatcaagtgctaattaccttgtactgatactggagcataggtacggtagcacgcacgatgtcgcttctcctgggcatgctcctcgcgatgcacctgttccaacggcgcgacgccgccgcggcagagagggtcccggcggtgatcgtgttcggcgactcgaccgcggacacgggcaacaacaacttcatccagacactcctccggggcaactacacgccttacggccgggacttcgccggcggggctgccaccgggcgcttctccaacggccgcctcgccgcagacttcgtctcccaggggctcggcctgcctccctctgtgccagcgtacctcgaccctggccacagcatccaccagctcgcgtcgggtgtcagcttcgcctcgactggcagtgggctcgacgatataacggggcaaatcttttcagcagtgactttgacgcagcagatagagcacttcaaggagtacaaagagaagctccggcgtgggatgggggccgccgccgcgaaccacatcgtcggtcgtgcactctacctcttcagcgtgggcgccagcgacttcctgggcaactacctcctgtcccccatcaggcgctaccgcttcaccctgccagagtacgaggcgtacctcgccggcgccgcccaggcggcggtgcgcgccgtgtacgcgctcggcgcgacccatttctctccctacccctccgcatatcccccttaatcccctttccccccatacccccccctccttttttttttttttttcccccctctttttccccccgcccccccccaaacttccta

SEQ ID NO: 130049 - DNA, 536 bp, Zea mays
  unsure (1)..(536): unsure at all n locations
  Clone ID: MRT4577_50078C.1
ggcccgggcccgggattctctctcatcaccatctaagaatctctctttctctctgtgcaaccgactacttgcttagatcaggcgctgcttcgaccccctcgtgctcgtcctgggacttgcacttgaaacccaccagcctgaacctggaggcaaatggcgatgcgaaaccgccaccgaaaaataccatttatacatcgtctcgtgctgactcggaatcgccccagaatagtggggtctgtgcgtacaatgccgactgcatcattatggaatgacagatgggcagtgtcgttggcctggagactgctcgcgatgcgctntccctggatgttatttgatcatctatcaactgggacatgccgaatgtaagcccaaatgactgccagcctgagagatgtatattagggagcttgtgggagcttcttacttcagatgtccacatataacgctgacctgtagagtcctaaccgttgaaactcgtgtgctgctaatcatacaagtctatgtatccgataaggactcttgccgtagactgtgca

SEQ ID NO: 130050 - DNA, 411 bp, Zea mays
  Clone ID: MRT4577_50079C.1
aatggctggaccgacgcgctcattttttcgcgggcgaccatgctgcaaaggatggggtgaccttgcgagcatatcgatctgaaaacacatataccatgggataaggaaacagtgcacgactaggagaagagaaccgagaagctcctcgtgtgcaccttcgactcgctcgatagccacgaggctgcagacaccgggggcttcagcgcggagatcgtcaactacattgtcatgcgctgcttacagaggttcgacgcacccgtgaagagagtctccactatcgacacccctctccctctaaaggactagccatgttacatgcccaccaataacagggttgttgatgcgatgatagccgccatagattacttaaacatgatgcttgatcaaggcagagtaccctagttacatgtg

SEQ ID NO: 130051 - DNA, 562 bp, Zea mays
  unsure (1)..(562): unsure at all n locations
  Clone ID: MRT4577_5007C.1
aattcggcacgaggccgagcgtgagggcgagaggcgtcgctagctggctctcacggccggcaaatctgcgatcaactgcagactctgctctagcactctgcaggctctgaaactctgcgtctcatggccaagattagttcaccgtatcgatcactgctgacctttcgaccttgaatgcagacgctagctgtcgtgcaatgtgtgcgtgtatctccaataaatcctaaacttcgcgtgaacttcgactccgccctgatggaatattaggtactcagcagctatcgcgttctctatctcatttttatttgaaactttataaatctactactttatatatgacctgctacgaacagttttacaatcatcggcggaccaaattcaaccgaggttcgccggattcatcgccccattccgctctgggctaaggttccaccagcacaaccctatggcagaagcagtgctccttgctgtcactaagattggttccgttcttggagatgaacctgccaagaccattantaacaagctgtctganaaaatcaagctctgagggaactcccac

SEQ ID NO: 130052 - DNA, 666 bp, Zea mays
  Clone ID: MRT4577_50080C.1
atgtcgggaggtcacgccaagaaggagatggtgaccggcgagaagcccgccacaagccatgggaaggctccattcggggagtccggcaacaaggtgaagggatccccttcacacgacaagtcgcgtcagagcggtgaaaagaaaaagaagatgaagaagaaaatcatcgagcaaggcgcctcctccacacccgatgtgcaacccgtggcatttaaggcaactgaggagaataaagaagactctacacctagtagggtccccatcgacgcctccaagctcgacaacgaggaaatgacgctcatcatcaagagctttcgccaaatccttaagcaaaggagggggaaggactacaagccccgctccaagaaagtttgctacaactgtggtaagtccggtcattttattgcaaaatgtccattgtctagtgatagtgacaggggcgacaacaagaatggaagagaaaagaagaggtactacaagaagaagggcggcgatgcccatgtttgccaggagtgggactccgacgagagctccaccgactcctcctccgacaaggatgccgccaacatcgccgtcaccaaaggcttcctcttccccaacgtcggccacaagtgcctcatggcaaaggacggcaagaagaagaaggttgtcggggaccataattag

SEQ ID NO: 130053 - DNA, 291 bp, Zea mays
  Clone ID: MRT4577_50081C.1
tttttgggcgccgccaaaaccgtctccccttccgcggcttctgtgcccaaggacaggccatcagtttggaggtggtcatggcggaccatgcttaccaacccactgtgcttaataagctagagggacaggtgcacctgagctccagcttctctgaaggtgtgcagagctgtaacatctggcctactgtctcaccttatgaacggagattcgtcacgtggtactacatgaccaagagcctttagggccgttcattggctgttagcgacagcatctaagatagagtgatgccga

SEQ ID NO: 130054 - DNA, 146 bp, Zea mays
  Clone ID: MRT4577_50082C.1
gcgatcatattgacacctatggcgagaaggggtgggttgagattaacaagcactacgccctgttccatgagaggggtctgagcaaagtgccaaggggtccctcgaaagacaagaagcgctacaaaaagtgattcgaggggtggctc

SEQ ID NO: 130055 - DNA, 1455 bp, Zea mays
  Clone ID: MRT4577_50083C.1
atgaagaaagtggtctactacgagaccgactcttcatcgccatccacctccggttccgacacgccgtccgtcacttctaagcgccatgagcgcaagaagtttagtaagattcccctatgctaccctcgtatctcaaaacgtactcctttactttccgtcccattaggcaaaccacctatgtttgatggtgaagattataatatgtggagtgataaaatgaggcaccatctaacctcactccacactagcatttgggatgttgttgagattggagtacatgtaccatcgccgggggatgaagactatgactcggacgaagttgcccaaatccggcacttcaactcccaagccaccactatactccttgtctctctaagtcgagaagagtataataaggtgcaagggttgaaaagtgccaaagagatttgggacgtgctcaaatccgcgcacgaaggagacgaggtaaccaagatcaccaagagggaaacgatcgagggggagctcggtcgcttcatgcttcaccaaggggaggagccacaagcaatgtacaaccggctcaagacattggtgaaccaagtgcgcaacctcaggagcaccaagtgggatgaccatgaaatggttaaggctcctagaaaatcatcgagcaaggcgcctcctccacacccgatgtgcaacccgttgcattcaaggcaacagaggagaagaaagaagactctacaccaagtagggtccccatcgacgcctccaagctcgacaatgaggagatggcgctcatcatcaaaagcttttgctaaatcctcaagcaaaggagggggaaagactacaagtcccgctccaagaaagtttgctacaaatgtgggggaagaagaaggagaagaagagatattacaagaagaagaaggcgatgcccatgtttgccgggagtgggactccgacgagagctccactgactcctcctccgacgaagacgcagccaacatcgccgtcaacaagggacttctcttccccaacgtcggccacaagtgcctcatggcaaaggacggcaagaaaaagaaggtaatatcaagatcctccactaagtatgcaacctctagtgatgaggaaaattctagtgacgatgaggataacttgcttactctttttgccaatcttaacatgcaacaaaaagagaaattgaatgaattaattagtgccattcatgagaaggatgaactcttggatagccaagaggacttccttattaaagaaaacaaaaagcatgttaaggtgaaaaatgcttatgctctagcggtagaaaaatgtgaaaaattaactagtgagctaagcacttgccatgacactatttccaaccttagaattgagaatgctaatttgattgctaaggttgagaagtcaaacatttgtgatgattcaattgccaatcttagaaatgataattctagtttaattgcttag

SEQ ID NO: 130056 - DNA, 2063 bp, Zea mays
  Clone ID: MRT4577_50084C.1
atgtcgggaggtcacgccaagaaggagatggtgaccggcgagaagcccgccacaagccatgggaaggctccattcggggagtccggcaacaaggtgaagggatccccttcacacgacaagtcgcgtcagagcggtgaaaagaaaaagaagatgaagaaggtagtctactacaagaccgactcttcatcgccatccacctctggctccgacacgccgtccatcacttataagcgccatgagcgcaagaagtttagtaagatccccttacgctatcctcacatttcaaaacacacccctttactttccgtcccactaggcaaaccactgatttttgacggtgaagattattgtatgtggagtgataaaatgaggcaccatctaacctcactccacgctagcatttgggacattgttgagtttggtgcacatgaaccatccgtgggggatgaaggctatgactcggacgaagtagcccaaatccagcacttcaactcacaagccaccactatactcctcgcctctctaagtcgagaggagtataacaaggtgcaagggttgaagagcaccaaagagatttgggatgtactcaagaccgcgcacgaaggagatgaggtgaccaagatcatcaagagggaaatgattgaggcggagctcggtcacttcatgcttcaccaaggggaggatccacaagccatgtacaaccgactcaagaccttggtgaaccaagtgcgcaacctcgggagcactaaatgggatgaccatgaaatggtcaaggttattcttaggacactcgtatttcttaatcctactcaagttcaattaaatcgtgatccaagatacaaactaatgtctcccgaggaagtaataggaaaatttgtgagctttgagttgatgatcaaatgctccaagaaaatcatcgagcaaggcgcctcctccacacccgatgtgcaacccgtggcatttaaggcaactgaggagaataaagaagactctacacctagtagggtccccatcgacgcctccaagctcgacaacgaggaaatgacgctcatcatcaagagctttcgccaaatccttaagcaaaggagggggaaggactacaagccccgctccaagaaagtttgctacaactgtggtaagtccggtcattttattgcaaaatgtccattgtctagtgatagtgacaggggcgacaacaagaatggaagagaaaagaagaggtactacaagaagaagggcggcgatgcccatgtttgccaggagtgggactccgacgagagctccaccgactcctcctccgacaaggatgccgccaacatcgccgtcaccaaaggcttcctcttccccaacgtcggccacaagtgtctcatggctaaggacggcaagaagaagaaggtacattctagagatacccccaaatacactacatctgatgatgagcgtagctctaatgataataatgatgatttaatttctctctttgccaaccttaccatggaccaaaagaaaaaattaaatgaattaatagaaaccattaacgagaaggatgatctcttggaatgccaagaggacttgctcgttaaggaaaataaaaaatttgttaagttgaaaaatgcttatgctctagaagtagaaaagtgtgaaaacttatctaaagagcttagcatttgcaatgattcaatttcctgtcttatagatgagaatgctagtttaaatgctaagatagaagaattgaatgtttgcaaaccctttccatctattgttgaacatgtcactatttgtactagatgtagagatattaatgttgtagctattgatgatcaccttgccatgattaaagaacaaaatgatcacatagctaaattaaatgctaaaattgtcgagcatggactagaaaatgaaaatttcaaatttgctcaaagcatgctttataatgggagacaccctggcattaaggatggtattggtttccaacaagggagccaaagcaacaccaaacttaatgccccaaagaacaaattgtctaattttgttaagggtaaggctcccatggttcaggatag

SEQ ID NO: 130057 - DNA, 1218 bp, Zea mays
  Clone ID: MRT4577_50085C.1
atgtcgggaggtcacgccaagaaggagatggtgaccggcgagaagcccgccacaagccatgggaaggctccattcggggagtccggcaacaaggtgaagggatccccttcacacgacaagtcgcgtcagagcggtgaaaagaaaaagaagatgaagaaggtagtctactacaagaccgactcttcatcgccatccacctctggctccgacacgccgtccatcacttataagcgccatgagcgcaagaagtttagctatgactcggacgaagtagcccaaatccagcacttcaactcacaagccaccactatactcctcgcctctctaagtcgagaggagtataacaaggtgcaagggttgaagagcaccaaagagatttgggatgtactcaagaccgcgcacgaaggagatgaggtgaccaagatcatcaagagggaaatgattgaggcggagctcggtcacttcatgcttcaccaaggggaggatccacaagccatgtacaaccgactcaagaccttggtgaaccaagtgcgcaacctcgggagcactaaatgggatgaccatgaaatggtcaaggttattcttaggacactcgtatttcttaatcctactcaagttcaattaaatcgtgatccaagatacaaactaatgtctcccgaggaagtaataggaaaatttgtgagctttgagttgatgatcaaatgctccaagaaaatcatcgagcaaggcgcctcctccacacccgatgtgcaacccgtggcatttaaggcaactgaggagaataaagaagactctacacctagtagggtccccatcgacgcctccaagctcgacaacgaggaaatgacgctcatcatcaagagctttcgccaaatccttaagcaaaggagggggaaggactacaagccccgctccaagaaagtttgctacaactgtggtaagtccggtcattttattgcaaaatgtccattgtctagtgatagtgacaggggcgacaacaagaatggaagagaaaagaagaggtactacaagaagaagggcggcgatgcccatgtttgccaggagtgggactccgacgagagctccaccgactcctcctccgacaaggatgccgccaacatcgccgtcaccaaaggcttcctcttccccaacgtcggccacaagtgcctcatggcaaaggacggcaagaagaagaaggttgtcggggaccataattag

SEQ ID NO: 130058 - DNA, 490 bp, Zea mays
  Clone ID: MRT4577_50086C.1
ggtaccctcgggttcggccgggaggccacttacctgcagtcaccactcccaagccgtacccacagtcctacgagcagtcgcacgcaagtgtcaagagacgaaacggtcgacatggctcgcacgcaatctgccgtagcggtcgccgtggtggccgcggtgctgctgctggcagcggcggcgacgacctcggaggccgccatcacctgcgggcaggtgagctccgccatcgcgcggtgggtgtcctacgcccgcggcacggggtgcgggccctacgcgttctgctgtagcggtgttaggaacctttagagcggttccaggaccgacgacctcagggacgctggctgtatctgccttgggtgcgtacaaggggaggtttgtgggccctgcggggggggaggaggagtttgatgcttcatatgaggggtacattcttgtcgcaggcgagactgtcggtgtggtgttgacatactcgtgccgggctggggcttgc

SEQ ID NO: 130059 - DNA, 2355 bp, Zea mays
  Clone ID: MRT4577_50087C.1
atgtcgggagatcacgccaagaaggagatggtgaccagcgagaagcccaccacaagtcatgggaaggctccatccggggagtccgacaacaaggtgaagggatccccttcacacgacaagtcgcgtcggagtggtgagaagaaaaagaagatgaagaaagtggtctactacgagaccgactcttcatcgccatccacctctggctccgacacaccgtccgtcacttctaagcgccatgagcgcaagaagtttagcaaaccacccatgtttgatggtgaagattataatatgtggagtgacaaaatgaggcaccatctaacctcactccacactagtatttgggatgttgttgagattggagtacaggtgcaagggttgaagagtgccaaagagatttgggacgtggtcaaaaccgcgcacgaaggagacgaggtgaccaagatcaccaagagggagacaatcgagggggagctcggtcgcttcatgcttcaccaaggggaggagccacaagcaatgtacaatcggctcaagacattagtgaaccaagtgcgcaacctcgggagcaccaagtgggatgaccatgaaatggtcaaggttattcttagatcactcatttttcttaatcccactcaagttcatttaattcgtgatgatccaagatataaactaatgtatcccgatgaagtgataggaaaatttgtgagctttgaattgatgatcaaaggctccaagaaaatcatcgagcaaggcgcctcctccacacccgatgtgcaacccgttgcattcaaggcaacggaggagaagaaagaagactctacaccaagtagggtccccatcgacgcctccaagctcgacaatgaggagatgacactcatcatcaagagcttccgccaaatcctcaagcaaaggagggggaaagactacaagtcctgctccaagaaggtttgctacaaatatggtaagcccggtcattttatcgctaaatgtcctttgtctagtgatagttacagggataacgacaagagggggaagaagaaggagaagaagagatattacaagaagaagggcggcgatgcccatgtttgccgggagtgggactccggcgagagctccaccgactcttcctccaacgaggacgccgccaacatcgccgtcaacaagggacttctcttccccaacgtcggccacaagttcctcatggcaaaggacggcaagaaaaagaaggtaaaatcaagatcctccactaaatatgcaatctctagtgatgaggataattctagtgatgatgaggataacttgctcactctttttgccaatcttaacatgcaacaaaaggagaaattaaatgaattaattagtgctattcatgagaaggatgaactcttggatagccaagaggacttccttattaaggaaaacaaaaagcatgttaaggttaaaaatgcttatgctctagaggttgagaaatcaaatgtttgtgatgattcaattgttaatcttagaaatgaaaatactagtttaattgctaagattgataaatcgaatgcatccctttctagccttaggaatgagaatgaaaaattaattgctaaggctaaagacttagatgtttgcaatgtttctattaccaatcttagagatgagaatgctattttacatgctaagattgttgaattaaatgattgcaagccctctacatctacgattgatcatgcttctatttgcactagatgtagagatgttaacattgatgctattcatgatcactttgctatgattaaacaacaaaatgatcatatagctaaattagatgctaaaattgccgagcatgaactagaaaatgagaaatttaaatttgctcgtagcatgctttatagtgggagatgccctggcattaaggatggcattggcttccaacagggagacaatgtcaagcttaatgcccctcctaaaagattgtctaattttgttaagggcaaggctcccatgcctcaggataacgagggttatattttatatcctactggttatcctgaggataagattaggagaattcatgcaaagaagactcattctcatcatgcttttatttataagaatgaggcttctagctctaggcgttctacacatgttaaaatgcctaagaagaaaacacctattgcatcaaatgaacctaatgtttcatttaagacttttgatgcatcatatgttttaactaacaaatcaggcaaagtagttgccaaatatgttgggggcaaacacaaggggtcaaagacttgtgtttgggtacccaaggtgcttgtttctaatgtcaaaggacccaagaccgtttgggtacttaagaacaaggcctaa

SEQ ID NO: 130060 - DNA, 238 bp, Zea mays
  Clone ID: MRT4577_50088C.1
gaaactagcactgaagagcgagattgttcgcttcagattaaaaatggctgtttagactggtatagttataatttattgagacaaactatcacagagagtggcctgctcgctgatgctccatccacatgttgattttggttttgggtcgtcaaagcttggcccgctcatcctcaactttgcattctgaacctatgttctcttcctccaaccacagaaatgcatctctgtatgtatcgat

SEQ ID NO: 130061 - DNA, 412 bp, Zea mays
  Clone ID: MRT4577_50089C.1
agcttctgatagcagcaacgacatcaaccttcgtctaagccagattcaactagctgcatgcgtgcatacttacactgatacgtgggctgtaaagcgccgtgaactcccatcctatggctgacagagccagactacaaggtcgcctgagaccgacattaacccatggcgcacaatccggaggacgcgaccaagaccaagccctcaaacccattgccatagacgaaacccaacaatacctagccacccaagggcagcacctgagtacccagcgtccttgcaccaacacggcaaaagcccctactacaatgcggtcgtctgcccttccaaggagccccggacgcgcccgccagtcatgcgtgctacaggcgactgaactgccaagggccctgatacacgcacgactgacacgcgt

SEQ ID NO: 130062 - DNA, 841 bp, Zea mays
  unsure (1)..(841): unsure at all n locations
  Clone ID: MRT4577_5008C.1
ctgcgggtcctatatgcatgtcccaatcccatctccatgtaatggtcttcttcccttcccatccatcgtccgtgagctccgagcgtgagggcgagaggcgtcgctagctggctctcacggccggcaaatctgcgatcaactgcaggtgtgtacttgcctgcaactcatggagattcagcatgcatcgcacagtttgcttgtttattcttctctaaaaattggtcgtcatgggcctggtcaactcgtcctgcagactctgctctagcactctgcaggctctgaaactctgcgtctcatggccaagattagttcaccgtatcgatcactgctgacctttcgaccttgaatgcagacgctagctgtcgtgcaagtaagtaggttgacttgccagaggttcaggttctggctctccagtcgagcctaacctttatgtttacttgattctgtagtgtgtgcgtgtatctccaataaatcctaaacttcgcgtgaaattcgactccgcctgatggaatattgggtactcagcagctatcgtatcgcgttctctatctcatttatatttgaaactttataaatctactactttatatatgacctgctacgaacagttttacaatcatccgcggaccaaattcaaccgtggtagtcacatctctcatgagtcatatcctccaactattcctccttactccttatgtatattttctaatatattttactctatctactaaaagattcttctctacatacgcactacactataactcagttaattaatatttattattatttttcttgaaattttcaaaaatataccaatgttggngtatcataatacaca

SEQ ID NO: 130063 - DNA, 231 bp, Zea mays
  Clone ID: MRT4577_50090C.1
ctatggagtgattagactgcgtatatggcatagctgttctggtaaatgtatcgtacatccacaacatacaccgagataaggaaagcctggggctaatgagtgactctacattatggtgctatgccgttcagcgaacctgctgcactgatataatggcacgccgggagaggcggtgcgatggcgccaggggtttttttacatgaacgcacagtgattgccttacgctggctg

SEQ ID NO: 130064 - DNA, 186 bp, Zea mays
  Clone ID: MRT4577_50091C.1
ggctcaggcgatctcaagcgacactgcagaggcggggcgaagcttgccggctgcaaatcataagcttcagtcggcggcttcggctgctgaagcgcagtgtagcaagtctgcagcggacagttgaaacgctgaacgaaggacttacgcgcactgtcggaagcacaatcggcagctgccaaggaattc

SEQ ID NO: 130065 - DNA, 373 bp, Zea mays
  Clone ID: MRT4577_50092C.1
cggccgcccttttttttttttttttttttttttgggttgggtttttttttttttttttttttttttttttttttttttttcggggccggcatggaaaaaaactgaactattaagcttcaaacgattccccaatttttgggccggcatgtaaataaactgaattacagtccatgttttttattatggcccctttacccaaatggaacccgaacgggaaaccggatctgtcagtagtcaatactaaattgcccccagcccaaaggagggcgtcaaccttgtccttgaggggcgccttgttgtccccgagggggggggggggggggccatcctcccaacggatcaacgttggcacccccttgagcccaaacctggg

SEQ ID NO: 130066 - DNA, 132 bp, Zea mays
  Clone ID: MRT4577_50093C.1
gaaaagatttgactgtaggaattttcataaaaaagggcatatgttttgataaaacctacaaaatggcaaattgcatatccacagttgagaacaggtcctttcttattaattgagactcccataataaaattt

SEQ ID NO: 130067 - DNA, 510 bp, Zea mays
  unsure (1)..(510): unsure at all n locations
  Clone ID: MRT4577_50094C.1
aagcagcgccaacaacgcagagnacnnnnnnggggnnnnnnntggtattnnnanggggggaagggaccgcngagagcgacncnaanacangacggggcaaggagagggcanaaacacncaacaaaaannacagggcncggcnggccaccaaccggaaccaanncnaaggacagccaggccagacaaaacnagacgagagacagacaccanaccannaccancaacaggccgggggggggcaganaggcccanngcaaagaaggcagccacgggttttttcaaaaaaaaaaacaaaacgggcaagcagaagaacccgagacccgancggacggcgagcgagcncgggaccaaccaggaccaccagncggcccccatgccaacccgggactcagcgaccaccaaacggaaggggcccaagaacccggacagaaaccaggggcacggcgacccgaacgaaggaagaacggaggaacaccggancgacgaccgggagaaaccgacgggcgcagg

SEQ ID NO: 130068 - DNA, 781 bp, Zea mays
  unsure (1)..(781): unsure at all n locations
  Clone ID: MRT4577_50095C.1
ccggccggggcgagaagatgtcgacgagatgcacgctctgttccacgagctgaagagcggcatgcgcctgtccagcgtgctcttcccctacgcccccacgccgacgaaccgccggcgcgacagggcgcgcgccaagctgttaaagatattcagcgaggtcgtgcggtcccggaggaggcggggcgaggaggagaaggagaaggaggaggacgtgctgcagagcctgatcgattccaggtacaaggacgggcgggcctcgaccgaggaggaggtcaccggcatgatcatcctcctggtcttcggcgggatggacacgagcacgctcgccagcacctggaccggcgcgcgcctgctcagcaccccggcggccatggcagccgcggtcgaggagcagaggcgcatcctcacggaccacggggaccgcgtcggctacagtgaattcatgcagatgaccaccctccactggagcatcaaggaggcgctgaggatgcaccctccgtcagcggtgttcttccgcaaggcgcggaggagcttcggcgtacggacgagagacggccgcgagtacgaggtcccgggtgggcatacggtggcgagccccgtgctgttcaacagccacctgcctagcgtgtacaaggaccccgacgtgtacgacccgacccggtttgggcctgngagggaggaggacaggggcggcggtaagttcacctacgagggcgttagctgcgggcggcacagctgcgtcggcgaggcgtacgcgtatctgcagatcanggtgatgctc

SEQ ID NO: 130069 - DNA, 234 bp, Zea mays
  Clone ID: MRT4577_50096C.1
ctccaagctcagctgagctccacttcagctctaatcacaggcgtgatcagagcgcgagagctatctagatggccgtgaaaatgccgatcaataggatcgccctgtgtagccacctatgaggtgtaccacccgggcgccctcaaggcggcgttcgctgagttcatctccaccctcatcttcgtcttcgccggccacggctctggcatggccttcagcaagctgaccggcggtggt

SEQ ID NO: 130070 - DNA, 382 bp, Zea mays
  Clone ID: MRT4577_50097C.1
tctgcattgagcatcaggagcaaataaatttagatggaacatctgaagctgccccaactcttgtaggacatattcaccttgacaaggggcatttagaaaggataaacattagtactcaagacattctccaaaaatgtcaagaagtttctgggagatttggaaagaagaaaggacacctttgccacatctttaaaaaaattacttttgctacttgtgattgttcattcactcagatgccaatcgatggaaagctacataaggttccatgtgtgcagtttgctttttctgatgacattgtactatccgagtctattgagagagcagtgaatgtgatagctgactctgtctgctcagtgcttttagatacaattattaaaaggtg

SEQ ID NO: 130071 - DNA, 387 bp, Zea mays
  unsure (1)..(387): unsure at all n locations
  Clone ID: MRT4577_50098C.1
agcttggatcctctagatttgccgccctgtgtgttttttttttaaaaaaatttttttttttaatcatttttccttttggaaaaaacaagcccaccaatttcttgtaataacagttaatccgccaacagaggagataccaaggagatgagagtggcggcaacaggcgttattcattcccttctcagggggggggtaacaaancccttcatcacaaaagtaaaaaactgtcttttagggggggggcagggggaacattattttttaaaaaaaaaaggacccagctgccggcagcaaagggaatgccctgaaaaaactcgatggggggctcctcggggcccgtgcggatggaacccgggacaaaaacaagcctgcccccctggggccccc

SEQ ID NO: 130072 - DNA, 358 bp, Zea mays
  Clone ID: MRT4577_50099C.1
aattcggcacgaggcaagaatactggagatggctacctgaacttatgctgagaatcaagaatgtttgagtgcggtggagcatgattctctattttatgttgtgacagttgtcaattatggtgaagcaaagttttccttagtaactcgacttttggtcgatatattgtattgctaccataaacttgttaaaaaattttacatgttgttaagaaatggattgtgttcatcaaaaaaaaaaaaaaaaaaaaaaaaaaaaaaaaaaaaaaaaaaaaaaaaaaaaaaaaaaaaaaaaaaaaaaaaaaaaaaaaaaaaaaaaaaaaaaaaaaaaaaaaaaaaaaaaaaaaaaaaaaaccctggg

SEQ ID NO: 130073 - DNA, 724 bp, Zea mays
  Clone ID: MRT4577_5009C.1
tcgaggccggccgggccgggatcctcacgtgtccttgctcgcacagaacagacagcagcgtccacagccatatgtagactaggagagatactgcccgattcactacggccgagagaagagacagctcatgtccgaagaatatgaccgccacttcttcgaacaacgcgataaatgcgacgatcaaccccgcgaggactatcatcaattggaacagcgatgggcaagccgctcgccaccgacgaggagcacaaggagttcgccaacctccgccacgactttcaatgacggcaaccacccacgctccagaccgaggtcttccacgacgcccactccattgtctgcgagaactacgaaaaaggaattgacatccgaagaggcgcatatgtacaaaaacgcttttgaaagcattgacatcccgaactacgtcgacgcagtttctcccctccacgagccccagtttgatgctgagattgctgaattccacgaggatgataaagagcatcagaaggacctccacctcttcgagtgagcgcttgactcgaaacggaggacgtgcggaataagttcatcacaatgacagcagatgattactgtgagaagcaccctggactgagggagaagtttgacgatgaaatccgtagcgatccctcgccgatattggagagatgctatgtaactcttatgatgccatttccatgtgcgggaagaaacaataattttcctg

SEQ ID NO: 130074 - DNA, 175 bp, Zea mays
  Clone ID: MRT4577_500C.1
gcacctcggctacattcttttcgcctataccggcactcttgggtgcgtgtgcttcatactcacccgggccagagcaggtcacgccccaacacgacgcaccaccggcggtgccaaacctctaggactgcatcgccacaccacgcacgcccagtctggcgcccgacacccgcatgct

SEQ ID NO: 130075 - DNA, 461 bp, Zea mays
  Clone ID: MRT4577_50100C.1
gagatatgagcaaactctatctgcagtacacagaggcggaaccgtagtgatacaatgatagatcacctgacatgcaactcctgagggatcaacatcgaccatggagcacatacccacacaccacggacgatagacctgatgaaaccaaagatccctatacaggggatacaagggagggacaataatcttgaagaggggcgcatacaagggctagacctaataccgtataatctctatgctgatgaaccagggctgcgacattattggagctaactgcacctgcattcagttcatttaccttgagaagaggctggactagaacgaattacgccagcacaccttcgcgtggtgctatgcaagtcaaactggtatcgaacaccaacatttattaggcatgcatgtgcaccctcgctatagcttggcattgcgctaagaaagtcaaaaaaaaacaaaaagggcga

SEQ ID NO: 130076 - DNA, 918 bp, Zea mays
  Clone ID: MRT4577_50101C.1
atggctcgtcttagacacactgcacggaagtcagtcattcctttcttgcattcttgtctcgcggagcgtccgcttcaccgtccggtgactggtcagtctagccatttggagaggctgcactaccgcctgcacgaggagcaggagcatcgacgacaggagttggagcagcagggctcttcttcctcgcttcagcaggaggcaccccctgcaccaccactaggtgtcccgaccgctggagtagctgttggaggagaccctgacgacggaggtgacgacagcagctcgagccacagcaccgacctttcagaggagcaggagccggagggatgggttgctcgacccatcactcgtgacgccgctcgcgggtgtcacttccatgatgcgctcgacaccttgctacgccaggcacttgaccgacgtacttggtctatcgagtatcgctgtgttgtcttccagcacagtcgcggggtttacccggaccgctgggaggcgacttgcttggtgcgccgtctggagaacagtctccagggtgcggaggtctgctcagagcattactctatttctgagcaggactcagctgaggcggccatgcaagatgtcgcgcggcatgcgctttcgcactactgctcagtgctcggaggtgtggttgtctcacctgtcagtgaggacaatcctaggttgagcagcatagtcaacctagccaccatgctaaacacggagctggaccatgccttggatgagctgagtagggttcgtgctgagatcgcccagttgcgggctgagcgcgtggagtgccgtcacctagaggatggttctcccgccctcgtagggactcagtacccgtaccgctcacgtcagcgtggacaccatgcttatggtaaccccgactgcaggaccaggataaatttagaaccatag

SEQ ID NO: 130077 - DNA, 921 bp, Zea mays
  Clone ID: MRT4577_50102C.1
gtcaaaagcaataacagaagatgagcttatctacattcgggcacaatacaacttgttagaaccaaacagtgcagatggtcgaatatgtatcgataacttcaggatggtaagcacttgtattatgatgcactgaaattcttcccatgagctcaatctttcctttcccccctttaaatatgcaggctcttttacagaactgtactgatgctatgaaagaatctagaacacttgagatcttacacgcggtacgaaacatggactagtatatagccaaccttatctcctccccttttgtacgtgtatactagtttttagttcagcgtttcattttgcctgtgtaaccacctttagctggagccgctcgcatataggagaatggactttgaggagttccgcgcagctacaataagcccttaccagcttgaggctgtgcctcggtgggaagaaatcgccagtactgcatttgggtactttgagcatgaaggaaaccgtgctatcacaatcgaggagctagctcaggagatgaatctttccgcggcggcgtattccgtcgtccgtgactggatcagaccatcggacggcaagcttagcttcctaggctacaccaagttcttgcatgggttgacgatgcgaagtggcaacgcaagacggcaccattgaccctcttgctgcccccggtagttgcttgagttggttccattggttttgttgatgtggagttggagagagagagagagaggggtgttttgtctctcttcttctgttggcttagcttcttgtagaatgcttgtagagagaaagggggaaaagggggaaaaaaggaaaccaaaagtgatagctcaaaattgagttgtagaagaaaaggtcatgttttgctcgtttggttctggtacattgtacagttagtcagtcagttgggcc

SEQ ID NO: 130078 - DNA, 215 bp, Zea mays
  Clone ID: MRT4577_50103C.1
gagctctctagtcggcggccgcccttggtctttctccgtgccaactgctaaatctgtcgtttgctaatcaccaacaggctcgcgagcgagatgtacaccacggttcccggcacctgctcgttcagccagtctaggctaccctacccgagctgcttgaacagggcgttggtttcggctcctttactggcgccgtcggccgctgccgccatgtccat

SEQ ID NO: 130079 - DNA, 1439 bp, Zea mays
  Clone ID: MRT4577_50104C.1
cgtcgactggctctgccgggacggcggaacgatgctttttgactgtctctctctcctcacctcaagtccccgaaccagtagtgcaccaagaaccactccatccatctccatgggagactccggaggaagaagaggaccacctcttcctcggctgctagatctcatcccggacgggaaagaacggaaggggagggaagcgcaagacgcgggaaggtcgaagaacagcggcggcttcgggggcgaggaggacgcgaagctggagctcaagctcgggcctccgggtctcactctcgtagaagaaggaacgacagctaccgtgccaagagatggaggcgtactacagcgagagacgacgaccaccccgaccctctcgctcgggtgcttcccacgtaacccctccaagcctgcggtagacgcagctacagctgggacgaagagggggttcttcgacaccgccgtcgaggccaagacagaaggccgcgacgagcggatggagcagcaggccggagctggatgtgggaacgagctagcactggacgagaagacggcagccgcggccgcgagtgagagacagaaagggtcctgctgcccgccgacgccacagcacgcccctcctgctgcgaccgtgcacagcggagcacacgtcctgcagctgggaagaaggcctcccacgcgtccgcccacgcgtccgcccacgcgtccgcggacgcgtgggcttgctcatcatcatcatggaagctcctccaaacaacccaccgagccacagaacagcgaagctagcaggaaggagaagcctgcctgcaagaagaaccctctcgtaaaaatcaacatggacgggatccccatcggaaggaaagtagaccttgcagcctacgacagctacgagaggctatcactgggcgtcaaagagcttttccacggttttcttcaagctcaaaaggatatgtctccaactgctggaaagatattctctcaattgttggatggatctggcgaatataccctggtctacgaagacaacgaaggagacaggatgctggtaggggacgtgccgtggaatgtgtttgtgtcaactgctaaaaggctgagggttttgaggagctcggagcttgccaaaggtttggtaggcacaaggccacctcagattgcggtagctccgagaagaggaccaccagattgctgaaagcctgaaacagcgacaaaattctgatcatttggaatatgcatgccgaggtcctggatattttgtaaattaggctaccaataccatgcgactcgttgctgtagagtaataatgtcctgatgtaattcaacatgggcattaattggacttataagagaaatttcgcagatgcaagatctaccaatgtaaaattacccgttctgtgcgacagataaaaaaaaaaaaaaaaaaaaaaaaaaaaaaaaactcgaggggg

SEQ ID NO: 130080 - DNA, 178 bp, Zea mays
  unsure (1)..(178): unsure at all n locations
  Clone ID: MRT4577_50105C.1
ccacgcatacaaccttctcctcgaagctggagctccttttcacccacctacccaccgcccccggggtcgtttatttgctatgagattactccccccaaaactcctcctncttcaccacttccatgcccaaagtcaatcgcttcttcctctcactgtaacgcccctaactcaacaatct

SEQ ID NO: 130081 - DNA, 212 bp, Zea mays
  Clone ID: MRT4577_50106C.1
cgctccgcgccgacaaatctcgcccgcggaagagaaagaactggtggcgtgctggcctttggcaccttccagaagattcctctatctgcctccgctccgctcatggcgtccggggcgaagaacaaggtgcccaaccttggggccttttctgggaaggcccttctcttaagccccccgcggggcccgccttgcggcggccgattattgagctc

SEQ ID NO: 130082 - DNA, 289 bp, Zea mays
  unsure (1)..(289): unsure at all n locations
  Clone ID: MRT4577_50107C.1
ctcttcttagcatatgtttcaatattccaagggccatgtngcttaattagttctggtttcctctgtcctcttgagttctatcagagatgggagtgcagggatcaccagctctttcgttcggccacagtggccaggagttgacattcccgtggatcatgaagtatntgcagctccaaagggttataatgcacctcaacaagtgcacatcacgcaaggtgactatgatgganaagcagtaatagtctcatgggtgaccccagatgaaccanggactcgccatgtgcaatat

SEQ ID NO: 130083 - DNA, 362 bp, Zea mays
  Clone ID: MRT4577_50108C.1
gggggcggggccctaaaaaaaaggggccttttacttgagcttaaatatgaagcatggcctcccaaactttacaaagccccccgggtttatctccccttccatcgaattgaagcaacatgaacttccctggccccgggctttaaaaagttcctgttcctgcccccaggggggaatggcgacaggaacaacactttccatcgatcaggggacctggttgttgcgccccccggggccgggcccgggggggagtttaccccctgggggggggggtgggtattccccgttttaacagttctgggccggggggataatgtctgggggaaatttgccgtttcttcaaacaacggggtttttttgggggg

SEQ ID NO: 130084 - DNA, 196 bp, Zea mays
  Clone ID: MRT4577_50109C.1
gtcactcgtttggaaccgcctgggggtacacatggcaggcatggactacactccgtcctttcagtgcccaaaaggcacactcgttagcggcactcgatctaccaaataccccgtggaaactcttgaggctcgggacacaaccaccgaggaggagctcctcaccaacaccgagatgattgtcgacataagcggcttt

SEQ ID NO: 130085 - DNA, 389 bp, Zea mays
  Clone ID: MRT4577_5010C.1
ccagggtccttcttcccggttcctggttgccgcctcggaacgcatcgctttgcacttgcagagccccagttccttcccctacaggaggaggacacccggttcgtcgtggtaaccttctacaaattcttgcccctagacgacccccacgccgagttcggcagacacctcatcttcctccagtactatcgtgtttctgtcgggactcgggaagctcaagagagcgaccaccgcactggaggccgaagggaagggacgagatcgttgaattccagtgagaccgctaagattggtcgcctgaagcgagaaagattaccgaagatgataaggctgctacttctgctgagcaccgaatagggcccctaagctcaattaaaggatcctctcttctc

SEQ ID NO: 130086 - DNA, 227 bp, Zea mays
  Clone ID: MRT4577_50110C.1
gaaaaaggaaaggaaaggacgaaggatcggttgcgaagtctatggcgtcgacggcggggtagctggcgcggccggcggcgcagaaaggagcggtgcccctgttctaccgaagggccctcaaggacaccctaaattggcccgtcaaccgcaactttttttaccagaacccgtcgaatttccggaacaagttcaaggccaaccgacccgtgaataacctgaacttggtc

SEQ ID NO: 130087 - DNA, 453 bp, Zea mays
  unsure (1)..(453): unsure at all n locations
  Clone ID: MRT4577_50111C.1
atccaggacaaggagggcatcccttcggaccatcagcggctcatttttgccggggggcatctggaggacggtcgcacgctggccgactacaacacncagaatgagagcaccctccacttgacgccgcgnccaaagggaggcatgcagatcttcgtgaagacactgactggcaagacgaacacacttgaggtggaattctcatacaccatatataacgttaaggtcaatatccatgacaaggagggcattccaccggaccagcagcggctgatcttcgccggcaagcagctggaggatggtcgcaccttggctgactacaacatccagaaggagagcaccctccacctggtgctccgtctcaggggtggtatgcagatttttgcgaagacattgactgtcaagaccatcaccttggaggtggagtcgtctgacacaatcgataatgtcaaagcc

SEQ ID NO: 130088 - DNA, 1823 bp, Zea mays
  Clone ID: MRT4577_50112C.1
cattgggtacctcgaggccggccgggctggttttctctgcgcggggaagaatggcgtcgtggttggagcagctgcagcgcgagctcgccgcccgcggcctcacagtcgcctccatccccggcaagggaaggggtctcatcgctacttgcaccttcttcccaggggatgtcattctcaatcaggaaccttacgcttctacacctaacaagattttagttggatcgagctgtgaccactgtttcacctctggcaacctgaggaagtgctctatgtgtcgagttatgtggtactgcagcagcaactgtcagaaagaagaatggaaactacatcagcttgagtgtagagcaatggcagcacttacagaggatagaaagaagatgcttactcctacaattcggttgatggttcggctggcactcaaaaggaaattacaaaatgagaaggtcattccatcctcaagtatagataactacaatctggttgatggcttggagtctcatatatcgaaggttgatgaaaatcaacttgtgctctatgctcagatggccaatcttgtgagcctgattcttccttttattgagcttgaccttaaggaaattgcacaaactttttctaagtttgcctgcaatgcgcataccatatgtgaccctgaacttaggcctcttgggactggactgtaccctgtcatatccattattaaccacagttgtgtaccaaatgcagttttgatatttgatggtaggacagcatatgttcgtgcattgcaaccgataaataaagatgaagaggtatctataagctacattgagactgcggcagtcaccaagaagagaaacaatgatctgaaacagtacttcttcacctgcacatgtccacgctgtgtaaagggttttgatgaggatgcactacttgaggggttcaggtgcaagaaccaagcatgtgatggctttctgctgcccaactcaggtaaaaaggcttatacatgccaaaaatgtggtgcttctagagatgtggaagagataaaaaatatgagaagcgaaatactacagttatcggataaagcatcttcatttctttcatcaggaaataaggctgaagcaggttctatctacaagataatcgaacagttagagagaaatctgtaccatgctttctcaactactttgctgcacacgtgcgaaacactattgaagatatatctggaattacaagattggtggactgcgttgacatactgtagattgacaattcctgtttatgaaagagtttatccaccttttcatccgatgattggattacaattctatacttgtggaaagcttgaatggttgcttgagttcacagaggatgcactaaaatctttaaccagagcagcagatatacttaaagtaacacatggcgtaaaatcccagttcatgaaagagctctttggcaagttagaggaagcaagagctgaagtttcgtttagactatcctccagacatggacatgatgagtaattttcataactgcaggccagttatgatggaaaataatatattgaaattatgcttctactgttgggatcatatttcaaggtacaataaaaaatgtggagactttgtaggcaaagaattagcactgttgtaaaacgattatgtgccgacacaaaataggccctaatttgttgtataaaaaatacaatttggaatttaatggtatatcatgtggtaggttgaactccaaaaaaaggtattgaacacaattttgaatttaaaagaaaaaaaaaaaaaaaaaaaaaaaaaggcgccgctcgcgatctagaactaggttctagatcgcga

SEQ ID NO: 130089 - DNA, 709 bp, Zea mays
  Clone ID: MRT4577_50113C.1
ttcggtcggtggcaagggcgacaacagcaagggtgatgtcggtggcaagggcaagggcagcggtaagagcggcggtgccgacggtaagggcaagggcggtggccagagcgacggagcctacggtaagggcagtgctagcaaaggtggaggtagtggctaggtcggcaacgacgacgacaaggccagcgacgacggcgatgggaggcgagggcggcgacaatggtgggggcgacgacgacaagggtggtcgtggcgccaccaacttaagtagtttagtttactttagtattagtggtagtggtagtggaagtagaagtagaagtggaagtggaatggtaggatagagtaagaagaatgatggaagtattttgtgtggggggtcaggtcataatggattgacccttggtgtaaagatgttgaatataagtaatgaaatccttcgtttgtgctctgtttaacttctttgagttcttcatttccagttttgtctgctaacttgcgtgttgagaacgaatgtaattgtgtatgttgtatgagtgaacctctctaactgaacgtccttatccagatgagtgatattttcccaggtgacgtgacgttaattttggggagtttgtctatgtgagttgtttgttcccgctccgaaccctaactaagtttgccctcatttctaactttccaattcttggttctggttcctgctggttcc

SEQ ID NO: 130090 - DNA, 397 bp, Zea mays
  Clone ID: MRT4577_50114C.1
gccgtcgccacagcaacccttgcaccctcaatcccccacggcgaccatggccgcatcgcgggagtccctctccctggggggcacgatgccccgacataacggcaaggcgacggcgatcccgacctcgatcgacaactcgacttttatcgtttcatcctctcgtgacaagtccacactggcgtgctacctgaccaactgagtacactgcaccactgaatccggcgttaccgccgactacgggattaccttgcgccgtctcaccggccaatcgcactttgtccatgacgtcatgattagttccgacggtcagatcgcactctctgactcctgggacggtgagatccggctttgggacctttgcacctgtctaacgacctgacgattcgtcggtcacgag

SEQ ID NO: 130091 - DNA, 365 bp, Zea mays
  unsure (1)..(365): unsure at all n locations
  Clone ID: MRT4577_50115C.1
nccnnnccntnnnttnnttttnctnnttctctttttcttttttttccttttttcnnttttttttttcttttttcccgttcactagtgatttgcgtaaccggctcttttcattaaacaaaccttgattgggggtggggaaaaaattctaattttcttttttaaaactacggccccctcaagttaatgtggaccaccggcattaccctgtctttgaccttcttgttttcggtggttttataactcaattcttttgcgaaaaaccgggttggaacactaccccgtttacttgcgaaatttctatccgtttttagaaaacgagatttgggaaattttctttattacccttaacttgtttccccactttt

SEQ ID NO: 130092 - DNA, 301 bp, Zea mays
  unsure (1)..(301): unsure at all n locations
  Clone ID: MRT4577_50116C.1
cnctttgcctcgctgccgtcccgcccgtcgtcgcaactcncctncaggggttgcngcgtcgacgcntgcgccgccaggatcacgtgctccctgcaggacgtcnccagcaggtgcgtcgacgccgcgaactcnccggcttcgcgctcnccacctcggcgctcctcgtctcgngcgcgagcgcttatgncactcccaagaggctgacntacgacganatccagatcaaaacgtacatggaggtgaatggcactggcanggggaacnagtgcncgnncatcgncgtcggcgttnagtcgtnngg

SEQ ID NO: 130093 - DNA, 510 bp, Zea mays
  Clone ID: MRT4577_50117C.1
ggaaaaaaagggccttttgggcccccccggggggatccccccgggggtttttttttttccggggggcccgggccgggtttctcagggctccccatccagaaccccagggcccccccgggggttttttccccgcagcttctccccaaaaaagcctccccggcccaaaaccatttcgggcgggcccgggtcctgacgggcaagcgggccttccttgacaaggtatttctgcccggggaagcccccccccttgaaatcccttttaagaagggccctcaccccatccgaatcccggaggtggccataaattggggccccaaaaatggggggggccatggcatggtttggcatgtaccccccggggggaccctttggggcgggctgggggaaccacccatcccccccgtttccagcaaggggcccgttaaaacatgcatttgggacgggttgagcatccatgattgcccctcgggctttattcccaacaattcccccttttttcattttggcaac

SEQ ID NO: 130094 - DNA, 361 bp, Zea mays
  Clone ID: MRT4577_50118C.1
cgcctcgacaccgtcgagctgccgcacccgccgcggacgacgcttcttcccgagcgaccccatcaggtccccggcgccgcctccctctccagcgcgcggcggggtatcccgtccctcaggatggacccgcgccggcgacgccgggagcagctggccaggagccgctgcgcggcagacgccgcgtcggagacgtacgcgtccgcgctgtagaacgagggcggggagacgtcaggaactagcagaggtgcacggaccacgagaaggtgcaggaaaggtccgccgcgcccgccggctgcgaggaccccgccgaccccgccaacgcgcgtgaagatagaggcgccctcgtcgccgtgatcgtaat

SEQ ID NO: 130095 - DNA, 498 bp, Zea mays
  Clone ID: MRT4577_50119C.1
catccctcttccacttggattagagccatacctatgaacacgtggaatcaaaccaggccaagatttagtaaataaccaggatccactccattctggtgtggaacgattcctaagctggaaccaattttgggctaagtcttctatactagcaactaatattgctccaaatagtcatgttgatcatcaaacgtcaaaatccatactaaatctctactaactattaagtctctattggagactgcccccgcctccctccacccgctgcaaaaaccgccgcagtccgttcgcccgtgaccccgccgaaatccctcctcctccgtgagccggtcgccgtggctcaccatcacctggcgcagctcctccggggggatggacccgctgcaggcgtcgtcaaacacgttgaagcactcggcgaggcgtgcctccgactgcttggcgcccatcttgcgcgccgccacggccaggaacgccgcgaggtcaatgtcgccggcgcccgtg

SEQ ID NO: 130096 - DNA, 827 bp, Zea mays
  unsure (1)..(827): unsure at all n locations
  Clone ID: MRT4577_5011C.1
ctcgaggccggccggngatcaataccaactccatcaacatgaagttctctctcgctgtcattgccactatggccgcctccaccatggcctctcccacctggggcaagcactggtctgagaagtggggtgagaagtggggcaacaacaaggaccagatctccaagaagtcccccttcgatttcacctccacctacaagatcgaagccacccccgaccaagtcgtcgacgccaacaacacctacaccggcggcctcaagggcgcctacggcatctacaagttcggcatcaacagcaaagagaacgtcatctgctataacatcaccctcaccggcttccagggcgagtaccagttcccagccatcagcgccacccacatccacgaagccgtcaagggcaaggccggtcccccgcgcatcgctttccccaaccccgtggaggtctgccctggcgtccgtcgcagcgtcggctgcatcactggcaccaaggacggtttcgtcactggtgttaagaacgccgctactggtcaggaccagggctttggcttcaacgttaagaagattgaggacaaccccaagggcttcttcgctgatgtccactcttccaaggctgttcctggtgccgtccgtggtcagcttgcatagatggatgcaatcgatgaagatgagtaatggtggaacgtcggatgcaggcgtgcataggggcgattgcatggcttggtctaggggagattatttcgtattcttttactcacagaaacctaatctgtaatcgttaattggagatatcaaacacactttagcaagaaaaaaaaaaaaaaaaaagcggcc

SEQ ID NO: 130097 - DNA, 1524 bp, Zea mays
  Clone ID: MRT4577_50120C.1
gcaggtgatccccgattcgctgccttatccgctgaccgcggctactgccgcaccggccggggagcaagcctgccgtcccgcgagagcgctcaaccagccaagccggcgtcagaggcgagcagagaaatggcgggagcgaacttcctctccaccgcggcgctcgtcgcccgcggcgtcgctgcctgctcttctatttcaactccgacacggaggcacccgcaaatccgggtgtgctgccgggctgacgctgaggccttggaggcctatgcccatgaagagcgcctgcgattccgtcggagagatttcatcggcacctgcgtcggcaccgctgttgctttggaaatgatcgacggctctacgagtttctctggagtggctactgcagctgatctcattgagcgtagacaaaggtcggagttccaatcaaaaatcaaagacaccctttacgtagccataaaggctaagccagagctcgttccatcgttgttgaccatggcactgaatgatgccatgacatacgacaagaccacaaaaactggaggcgcaaatggatctatcaggctagaaacaagcagacctgagaacagtgggctctcttccgcgttggatttgctgactgaagccaaaaaggagatcgattccttttccaagggaggtcccatttcgtttgcagatctgatccagtttgcagcacaatcagcactgaagagatcgtttcttgacgctgccattgccaaatgtggtggaaatgaagagaagggaagaacactgtactctgcatatggttcaaatgggcagtggggtctgttcgatagaacgttcgggagagcagacgcacaggaagcagatccagagggaagagtgcctgactggagcaaggcttctgtgcaggagatgaaggataggttcgtcgctgttgggttgggtcctcgccagcttgctgttatgtcagcgttccttggacctgaccaggctgctacggagggacgactgatagctgatccggattgccgtccatgggtggagaagtaccagcggagccgcgagaccgtctcccggactgactatgaggttgacctgataaccacactcacaaagctgagctcccttggccagaagataaactacgaagcctacacataccctaagcagaagattgacctgggaaaactgaaactgtaagagatgattgccgggcacctgcatcggccgtatccaggaatcgggagctaattgtatggtaggctctgtctgctagagtgatttgattcggcgctgacgtccaagtattggctacttactggtcagctgtcagacattcttcccacggcaattaggatggtccctgtacatggttaaattggttctcccatttcgttttgtgtgaacttgaagaggcaaacgcttgtgagaagtgaggtgttgtgtcaatccccttacgtatacgagacgactgaagaattagtagaaaagaagtgcaagtgtcaaaaaaaaaaaaaagaaaaaaaaaaaactcgggcccgg

SEQ ID NO: 130098 - DNA, 332 bp, Zea mays
  Clone ID: MRT4577_50121C.1
ggggggggggttttaattttatccacgccttttttttttttgggggggccctaaatccccgggtacaataaaaaaaacttttcaaaaacaaacacgggggaaacaattcaggccttatacgggaggggtctcttaccatcccggggcaaccacccaaaagcaaagcgggcgcccatcgacgcttattttttctaaccgtgcttacatatacccggggggcggatatctccctccacccggggaccatgttcccccccccacccttttccggggggtgatcccccactcccgacccccggttaaaaaacccccttccttctctttttgggggg

SEQ ID NO: 130099 - DNA, 1173 bp, Zea mays
  Clone ID: MRT4577_50122C.1
atggcgggagcgaacttcctctccaccgcggcgctcgtcgcccgcggcgtcgctgcctgctcttctatttcaactccgacacggaggcacccgcaagttccatttcaaacccgagggaaccgcgtgattcttggtttgcctctgcagatccgggtgtgctgccgggctgacgttgaggctatggaggcctatgcccatgaagagcgccttcgattccgtcggagagatttcatcggcacctgcgtcggcaccgctattggtttggaaatgatcgacggctctacgagtttctctggagtggctactgcagctgatctcattgagcgtagacaaaggtcggagttccaatcaaaaatcaaagacaccctttacgtagccataaaggctaagccagagctcgttccatcgttgttgaccatggcactgaatgatgccatgacatacgacaagggaaggaaatggtcagctgaagataatctaacaagtgacaagtttctcgaccttgaccatccgttgctccagcatttgatacttagttttttgaaacaaagcccagaaacaagcagacctgagaacagtgggctctcttccgcgttggatttgctgactgaagccaaaaaggagatcgattccttttccaagggaggtcccatttcgtttgcagatctgatccagtttgcagcacaatcagcactgaagagatcgtttcttgacgctgccattgccaaatgtggtggaaatgaagagaagggaagaacactgtactctgcatatggttcaaatgggcagtggggtctgttcgatagaacgttcgggagagcagacgcacaggaagcagatccagagggaagagtgcctgactggagcaaggcttctgtgcaggagatgaaggataggttcgtcgctgttgggttgggtcctcgccagcttgctgttatgtcagcgttccttggacctgaccaggctgctacggagggacgactgatagctgatccggattgccgtccatgggtggagaagtaccagcggagccgcgagaccgtctcccggactgactatgaggttgacctgataactacactcacaaagctgagctcccttggccagaagataaactacgaagcctacacataccctaagcagaagattgacctgggaaaactgaaactgtaa

SEQ ID NO: 130100 - DNA, 426 bp, Zea mays
  Clone ID: MRT4577_50123C.1
gctccatatctctctctcttgctctgcttgttcttgctttaggttgcaggcttgcagcccctggatggctggatggtgcatcagaagcagcttgcagtttgttgctttataaaggaggacgaggtacgactagcatcattgaatttttttggggggaagggggtaataattgagggcttgtctctgtgaggaatctggaggtgaagaactttgtctggagttttcagtggatatctatcaagttgcttatctatctcccatccctgggctctggcccatgcacatataaatgataaatcttttatcactccacttgccatggacgacccccatggcgatggcgatttgatttcctggatcacccgccccatctcacttctcgacgtgcgcgcgccgctgttcctcttcctttttttcccaaaagaa

SEQ ID NO: 130101 - DNA, 371 bp, Zea mays
  Clone ID: MRT4577_50124C.1
ctaatacgacgtcctatagggcagcgctgctgccgctgcaggaccttttggtgagccaccctggatcgttgattgttcggtgctgcaaactggctcagtaggtgcgatgttaacacagttcttcctgcggcagaccaggaggggggtatgccatcctttgtgtgcggaacgctggcaaaaactggcgcaatcgtgttgcgcgtttgcacagtcaatgagccacgccggtggggcgaaccctggcctctactgttgccagcaggtgattgcgtacaccacagttggtctggcaaacgggagttgttacacactggcactatgggcacggggtctaccggcgcttaggaaagcatgcgtggcgaaccctgtcg

SEQ ID NO: 130102 - DNA, 721 bp, Zea mays
  Clone ID: MRT4577_50125C.1
cggacgcgtgggcggacgcgtgggcggacgcgtgggcggacgcgtgggcttggctagtgtaataatgttcaaggattgggatcgtcaaaatccaacgcaaattgtaacggagatgtgtggcttcgttacaatcctttccgggacttttcttcttcacaagacaaaggatatggtggatggggtgtcccaccaaatttaccaattcggcttcctaaacatgcggatgaggatggctatgcagacgacgtaattcctctcagatctgctgctgacggtattccactcaggtcgccaagggctacagattcatttcgctcgtcgtgatgtcctgagatttgcaagtgcactgaatcatgtagattccaggctcatacccagcagccgtcagtctatatacatgggaagcggaaaatatccccccattcactcggttggagaccacaacgtaggtttaactgtaggattcaacaggtaacaactcggctaaccccccaaccctaatttgagtcattggtacagaattttgacgattatatcagttgtatacttatccgggtaacatcatcaccaagatgaccaagaatatatgttttgggctatatgtatatcgcggtgagccatataggttattatgttatattgaattgttgtattctttcaacacaaacactctgaatacaggaagagttgaacaagcaaaaaaaaaaaaaaaaaagcggcc

SEQ ID NO: 130103 - DNA, 381 bp, Zea mays
  Clone ID: MRT4577_50126C.1
gcggcgacccggcggcgtgcacgggtacggacataaagcgtaccaaggaggagctgaggggcttcttgagagacatacacacatccattgccgagtgctcgcctgaagcttccaagaggacgaggtaacagccggctcatccgtgctaagacgtccgcaggagggacgagcagtcacacagcggaggagatagcggctccaacgactggtgaaacggaccgaggaatgtgaacagtctagaggacatgaacgcgactggattgagagagacgtcaacggccacattgatgaggggctactcctagccaactacgggcgggctcattgatcggacgacagttgctactactaaataaactatcatgatgctgctcaatttcg

SEQ ID NO: 130104 - DNA, 623 bp, Zea mays
  Clone ID: MRT4577_50127C.1
tacgaaagagagtgttccgctgcaagctctttctcctcacatgactgtatagctctccacgtgtttcttccccatcatgcgccgtcgggtaggacggtccgcgccacaccctacggctgcggcgtgcgcctaccgccgaatgagcgtggtggatgcacaaaaacagggcgtacccagagatctactacgacgcgtagctgttcagcaacggcgtaattggtgttgctgacatgatttaccatgggacagtagacgggggacctgtgtacctcgaaaaacgcctacgacatgcgggatactacagcgctcgtgaccgtcgacagacagagcgagcaatgactctagaagaggcgcgatatcgtgggggactgacccgctgagcattgtacggatatgttcccccacgctcacgctgagatagagctcgaaggggacaactgactgatggatctcctggttcatgccgtctgagttgtcaccggcagagctgacgtttgacactgatgagagggattggcactctctaagatcacattgttcgccagatgtccgtgctatgatcgaaggggtaaccgcaccatagtactactacgcgaagagagggtgcttgatgatgatggatc

SEQ ID NO: 130105 - DNA, 992 bp, Zea mays
  Clone ID: MRT4577_50128C.1
ttgggtacctcgaggccggccgggaaggttttccaacgggttgaccgccggacacattacgctgctagcatccctgcatagcaacgatacttctccgtgaaatagtttgccagtgtacgattcgtgcaactgcaacacttgctggtgatggctatagtcattgcgaagcttccgcagctgcgccatgtcaaattaacaatgccagggaatgctggaaagataccaagaatggtcggacatactctgcctgtaatgatgatggctgcaaatgcccagatggattcaagggtgacggtaggcacaaatgtgaagatattgatgagtgtaaggaaaggactgcgtgtcaatgcaaagaatgcaaatgcaaaaacacatggggaagctatgagtgtggctgcagtggaggcttgctttacatgaaggagcatgatacatgcatcagcaaaagtggagcatcagaagcaggctggggcttcttgtgggtcatcttctttggccttgttgcagcaggaattgcaggatatgcagtgtacaagtacaggatccggaggtacatggactccgagatccgtgccatcatggctcagtacatgcccctggacaaccaaggagacgtccagagccattctcatcacattgagatgtgaggacaggaggatgcagacttgacgaggggggaccgggacttgatgtagcctatatatacacttgaattagatgtctataactgtaacgatcttatgtttagcatgcttagtccttgaacaatctgtatccctgtggtttctgtgttaaggctgacaccgtcttgtttagtaataattgccatcttttctttcggtgccaataaagtaggtggcaagacggggatgagtggtgttgagttatgtttgtggtcaagaaatctgggcgcccagcgtaacagaaaattgtgcctggtgtcaattgtttgatccatgatgtgtgtgtagatcatttatgtttgaaccgaa

SEQ ID NO: 130106 - DNA, 312 bp, Zea mays
  unsure (1)..(312): unsure at all n locations
  Clone ID: MRT4577_50129C.1
attggttggggtttttttttttttttgttttttttttttttttttaaaaacaggcctccccacgcaaaatttcacccccgggggtaaatgtcctttttncccccccccaacaggatttggaaagaaacccagaaaccttttggtgcagggcctgtgttaagggaaaaaaaaacccccaggtctggggggggtccccctcaaaccatattttttggaaaatggcccaaaggattcacattttanncnaaaaggcttcctaaatagtgccccccggggggcaaccaagggcccgattacctttcccttgggggg

SEQ ID NO: 130107 - DNA, 365 bp, Zea mays
  Clone ID: MRT4577_5012C.1
ccacccaaaaactttatttttgaattccacctaataagcaatctaaaagagggcccccccaatgatgttttgttggtaggaggccgttcggtctgtcaaagcaagttggacaaagggcaacaattgttgtatttgaaaaagggttgcggggttagccccaaactgttggtaaaaaggcaccaactgttgctgtttcaaaaaggaaccccggtttgctgcacctacctggctaaatggtaaaagtatttgctgctgcaaataaccaggggggttcagggcggccaattggttaaatgaaaaaagttgttgttgctgaaagtaggcaatacctagctggctaaatggaaaaagttgttgctgaaaaa

SEQ ID NO: 130108 - DNA, 2047 bp, Zea mays
  Clone ID: MRT4577_50130C.1
gtttgtgttctttctattcttgttcagtagttgtagttacaaataaagattctgaacattttccttttttgctctctgttcaaaacaaccttctttttgtttcacgtataaaaatattggtagcatggttagacagttgaactgcataagatcatataattgtatatgagcattgcagttctgatggttctttgttttccctttcaatcttctaaaaaaatgcttgttttgtttttccttttggccaaccaattgtagtgtcgagtgtgtgtgactaccaattcccatttttaccatgtttcagcttggggtagtcctaggcaaaattgtcaaggactgtgtgtcaatgcacactaaaataatgcaaaaacacatggtggaagctatgagtgtggctgcagtggatgcttgctttacatgaaggagcatgatacatgcatcagcaaaagtggagcatcagaagcaggctggggcttcttgtgggtcatcttctttggccttgttgcagctggaattgcaggatatgcattgtacaagtacaggatccggatgtacatggactccgagatccgtgccatcatggctcagtacatgcccctggacaacttaaggagtcagatagagccattcatgagtgcttggagaaaaatgacaggaggatgcaaacttgacgtgctagaaccgggacttattggtttttatatgtctatacatataatacgtgttcagtttatacacaggattcattagagagtttgcgagtgtctaattctgatttgtgaaggtacatacaaagcattaggagattcatcttctagcattttctttgatcaggtgttaataaagccttatggattataatgtgtatttttagcttctggatctgcacgatgtgaaattaacaattgaggatgttggaaagatagcaagaatagtggggcatactctacttgtctttaagtgttagttgaggttttgttgtccttaaaactgccctattatcaggaggatcttgtccaactttttattaaggagttctttaaaatctgatattttgtttatgggtctgttatatgctggatgatggttgtaaatatctagatggattcaagggtggcagtaggcacagatgtgaaggtaaggcacatttccgaggcctgtctttctagaagtgcttgcatgtcctccgcaacttctgatgtaatgttcttcagagttgtgtttctctcttgagccatattatatgtaaaacatttcccttttgtgaatgtaaatgtgaaacatgttgtgacataaaaaaaaaaatgtaaggaaaggattgtgtcaatgcaaagaatccaaatgcaaaaacacatggggaagctatgagtatggctgcagtgaaggcttgctttacatgaaggagcatgatacatgcataagcaaaagtggagcatcataatctggctggggcttcttgtgggtcatcttcttcagtcttgtcgcaacaggaattacaggatatgcatcgtacaagtacagggctcggaggtacatggattcagagatatgtgccatcatggctcactacatgccctgtacaaccaaggagagatccaaattcattctcatcacattgagatgtgaggtagtaggacacagactttgatgaagggagactaggacttgatctatatctatttctgaagtaatagatcacttgcatcagttctattgtattctatttttatgtatgttttttatacacactgtatgcttttcgtacgatgcaagtgcatcggtccctatttcacacacacactctctcttgacgatcttatgtttagcatgcttagtccttgaacaatctgtatccgtgggtttctgtgttaaggctgacaccgtcttgtttagtaataattgccatcttttcttaaggtgccaataaagaagatggtttttcgggaatgagtggtgttatgtttgtggtcaagaaatttgagcgcccagcgtaacaggaaattgtgcctggtgtcaattatttgatccatgatgtgtttgtagctcc

SEQ ID NO: 130109 - DNA, 253 bp, Zea mays
  Clone ID: MRT4577_50131C.1
ttgaatttctagactgcggtcatgatgacggctggcggtgacaacgcagaggcccttgggacccataccaaacccataatgatggctcattagaagattgtactttagcccgctgataaggtccatccttcggctgacatgggcatccagacgattttctttagcctattttacttggctatgttggacacgagttctatgcgcatagggaaggacatgtcctactattgaggcagcctgattaaacgcttgc

SEQ ID NO: 130110 - DNA, 707 bp, Zea mays
  Clone ID: MRT4577_50132C.1
tctactggtagagataccaaaatatttgcatatcaggctatcggtttgcttgcatctcgcatgccaaatttattcaggcatgatattttcttaaagctttcttggctctttttttcatttgtgctatataaggaataatatttctacctcaattatattgcagtgataaaactgacatggctatacgactttttactgctttgagataggaggatcaatctcttcgtttgacaattcaagaggcagctacttcccttgctacatcatataaggtatatctggagagcatgttgctttctacaaagtgtgcttcacaaagatgattttaaattgtaattaatttatcatttgtgcagtactttttttgtctgaatggttggtgcaacttgtaaatgctagcttattgttattggttgatgcaaagaagtccatatttaaaccttttggaggattatcagttaagtttattctcttttttcttggccttgataccagcgtgcttccacgatagtactgaaggatcttgagtcacttcttctggaaaattgtgaagcggtaatgtttttaacatcataggttcttaatttcattatgtgctaatcctttgttctcaacattatatatggtttcatcgttggtgatagttttgatgcaatacatcaattttagtatgagggtccacgatcaaaacccaagtccttgcttta

SEQ ID NO: 130111 - DNA, 153 bp, Zea mays
  unsure (1)..(153): unsure at all n locations
  Clone ID: MRT4577_50133C.1
aactanacncgcttatagggcttgtcagccatgggggggggggcgccgcgntctagcactcctcaagtcctgccttcgcgggcntcccggnctcccggaccgccacgcggnaccacnnaccggcgtccctacgtggtgagccaccctggcccg

SEQ ID NO: 130112 - DNA, 1094 bp, Zea mays
  Clone ID: MRT4577_50134C.1
cattgggtacctcgaggccggccggggagagccggccagagcgtcaagtctggttcgccgcacggcgtcgcgacgccgacggtcatgtcggggaagacgacgccgacgaaggcgacgctgagccggccatgcgttctggtcataggtaatttaactgattaataatgcataccggccgcgactgtcttttgaaagtaatgctagctgccgttgtggtgtgtgggcagtgatggcgggcgtggagaggttcgcgaacaagggggtggggtcgaacctggtgacgtacctcaccagcgtcgtgggcatgagcacggcggcggcggccaagagcgtcatcgcctggaacggcgtcagcttcatgctgccgctcgtcagcgccgtcctggctgactccgcccactgggaccgctactgcaccatcgccgcctcctccttgctctacgtcttgggaatggtagcgctcacgacatgggcgctgctggggacacggatgccgcgctccacgctcttcttcccgctctacctcatgtccatcgggcaaggcggataccagccttcgctgcaagcgttcggcgccgaccagctgagcatcggggacgacgacgacgacggtgacggcgacaccgagcccggcgcgtcgtcgacgccggaggagaaggccaaggtgaagagcatgttcttccggtggtggtacttcggcatgtgcagcggcagcctgctggggaactccaccatgtcgtacgtccaggacaacctgggctggggcctcggtttcgccatcccctgcgccgtcatggctctgtccgtcgcggcctttttctgctgcacccctctgtacaagcggcaccggcaggtgcagcagccgaagggcaccggtattaggccgtccccgagtagcgtcttcaacttcaagtcggttctcggcgctagccgaaagatcagtctgccgccgtcgagatcatcagacgacaatggcgacgccatttctgagcttgagttgcaagagaagccactgaaaactgatgaagcatcagagtcctcccctgacgaggctgccgctgctcccggcgtggccaaggtcatactcggcctcc

SEQ ID NO: 130113 - DNA, 352 bp, Zea mays
  Clone ID: MRT4577_50135C.1
tcgtttgcacacgctttattggaactctagaacgggaactttgagataaagttcggtcttaaagacccgtacatgaacaaagctatccagatggctgcttctactggctggaaaggtgctgggattcaattgccataccgactgtgcaagggctccatgaagacccatgtcagacttaccaggtagctgtggaaaaaattgatgctaaaggatgtagtaattgatgctacatggaggattgtgaggtcacccaacaagggttcaactgtgctgcgcccttgaaccaacactctaactgctgtttactatggccatctggcggatgttgttctacccagctaagaattggggg

SEQ ID NO: 130114 - DNA, 301 bp, Zea mays
  Clone ID: MRT4577_50136C.1
agcagtggtaacaacgcagagtacttttttttttttttttttttttttttttttgcaaagttagaaacggtctcaagcaagtgaacgcacgcatgccccagcttactggccggtagcagcgagcatacatatccggagttccggacgcccgcggccacctcagatcaacatgggcttgcttccctacgtgccaactacacttgttagactaattaaacagtagagctactaccccgcgtactctgcgttgttaccactgcttgggggcgcgtcttttctctctggctcgcgctcccctgtt

SEQ ID NO: 130115 - DNA, 300 bp, Zea mays
  Clone ID: MRT4577_50137C.1
ggacgagctgaccctggctaagactgacctggagatgcaggttgcgctgacttgaatgaagaactggcttacctgaagaagaaccacgaagaggagatgaaggaattcagcaaccaggcagtaggccaagtcaatgtggagatggacgccacccctggcattgatctgacccgtgtgctggctgagatgagggaacagtatgaagccctggcagagaagaatcggagggatgccgaggcatggttccaggccaagagtgcagagctgaacaaggaagtatcctccaatgctgccatgatt

SEQ ID NO: 130116 - DNA, 361 bp, Zea mays
  unsure (1)..(361): unsure at all n locations
  Clone ID: MRT4577_50138C.1
ggaggtaaagaaggagagggagaaggggggggggcacaaaaagaaggggaggggaagaaaagagatgcggaagagggcgggaaagtggaaagaggaagaagaggcagtgggaggacaagggggaaagggaagcgagaacctagggaggatggagagagcggagagagaagaacaatacctngttgtatgctgaagagggcaaagatgagaagtaaactagaacggaaggtagaaaaatgaagcaatactggggatgaacgaaggcaggaaagattgagtatactaaaaataggagggagaggtgagaggaagaatggggtgggactatatggaaaaaaaaaaaaaaaagggggggggggga

SEQ ID NO: 130117 - DNA, 330 bp, Zea mays
  unsure (1)..(330): unsure at all n locations
  Clone ID: MRT4577_50139C.1
ccctactagtagctagccggtgggtcgtgtagtcatcagccttctgatcgtcacccatggccactgccgaggtccagaccccgaccgttgtggcgaccgaggaagcgccggtggtggagaccccttttccggcgggtctgttgggggaggaggctgnccncgncgtcgaggtcaaggtggaggagccagttgttttggnggagaccgagtcagttgtcgtcgttgagcccgaggtggnctttgtggaggtggaggaagagatgctaaaggatgtggagtttgagcggttggttggtggagaggtgaaggaggaagtgggtgtgttttttt

SEQ ID NO: 130118 - DNA, 3012 bp, Zea mays
  Clone ID: MRT4577_5013C.1
cattgggccgggctgctagtcgccctattctactccactctgttttctggaggctgctaaactaaacccttcttctccccactccgccctcggacccgccgccgccgccgcttgccgggtctatagccatgtcaccagcggttgcctctgcctcatctggcgaccgcatacgaacctacgaagacttcgtgcgggtacacgcgtacctgctggccgcggcgggcatcccgccgtcgctgcaccggaggctgtaccgcaagctcgcggacgaggtcttcgacggcggggaggtctttgccgtagagccgtgcgaggacgggaggcagcggcgcctcgtgctcaccgccgatcagtctctaggaaaagagtccgatgtcttcctcgtcgaccatgcgtggtccttccgcctccctgatgcgctcaagcagttgcgggaagtaccaggattggctgaaaggatggcagcattgatgtgtgtcgatttggaccgcaagattgaagaagatgagcaggatgatgacgagagtgggagcttggagcatgtatcgcaagtagtcgagaaagaaagggctagagttcaggagagaagtgattctacagcttggctggaacttgaagaacttggaattgatgatgacatgctagtagccttggatctatctgcaaattttccgaatctagtagctctgaacctatggggaaacaagctgcgggatccagagaaagttatgcaagaaatcaggaagtgcacaaagctaaaggcactttggttgaacgagaatcctgttcttggcaaaagtattgacaaagctgttctcgatggcctctctggattggaaatatacaattcacattttacaagtaaagccggagagtgggcactaggtttttgcgcagacattgttggagtagataatccctgttcttctgtggaaagcacattgtttgggagcattgggactattgacctttctgatagatgcattcacaagctaccagaggtgttctctcctagtaaattgccatctctgtcaaaattgaacgttcgtggtaatcctctggatcaaatttctggcgatgatctcttaaagctatttggtggattcactcagttacaagagttggaggttgacattcctggccctctgggaaacagtgcaatctccattcttgagtctcttcctaatttatctttgctaaatggcgtggattcctcaagcataatagagagtgggaagcatatagttgactctgcacttgaaccacggcttccagaatggtcacctgaagaaccccttgctgaaagagttattggcgcaatgtggttgtatcttatgacataccggcttgctgatgatgaaaagattgacgaaacacctgtttggtatgtcatggacgagttgggctcagccatgcgccacagtgataatgcaaacttcagaatagctccattcttgttcatgccagaagggaaactgcacactgctataagttacacaattctgtggcccactcatgatgttcatactggagaagagtgtacccgggatttcttgtttggtattggtgaggacaaacagcgttcagctaggcttacagcttggttccgcacacctgagaactactttattcaggaattcaggaggtaccaggaacagcttcaatcaaatagcatttgttcttcgacaaaaatagaagagacacagacaccctcaaccaaaagtgtacgcccaagggatggtcgcgtccttcgagtatatactgacatacctcatgtagaggagtttttaacacggccagaatttgttctcacgactgatccaaaggaagctgacatcatctgggtaagcatgcaagtagattcagaagtaaagaatgctgtagggctcacagaccaacaatacacaaaccaatttccttttgaagcttgcctggtcatgaagcaccaccttgcggagaccatccacaaggcttggggctcacctgaatggcttcaacctacatataacctggaaacccatttgtctccactcattggtgattattgtgtgaggaaacgagatggcatggacaatttatggatcatgaagccttggaacatggcgagaacaatcgataccacagttactggtgatttgtctgctatcatcagacttatggagacaggccccaagatatgccaaaaatatattgaacgccctgcacttttccaaggaaggaagtttgatcttcggtacattgttttggtccgtagtatccgccctttggaaatatttctgtctgatgttttctgggttaggttagcaaacaatcagtacactttggagaagactagcttttttgagtacgagacccatttcactgtgatgaattatatcggaaggatgaatcatatgaacacgccagagttcgtcaaggggttcgagaaggagcaccaagttaaatggctggacattcatgaaagcgtacgatctaccatacgccatatctttgaggcagccgcagctgtccatcctgagatgcagaacccattctccagggccatctacggtgtagatattatgcttgacaacagattcaaaccaaaggttttagaggtgacatactgtccagactgcgggagggcatgcaagtatgacacgcaagctctggtaggaagccaggataccatcagaggccgtgatttttttaactcggtgtttggctgcctctttcttgacgagcaaacgcatgtattgcccttataggcatccgccccagaggcggctgctgtaacatcaggttttatcataataataacgtgacatatgtataaccttcttgtctgttggctgttgcctctttttggccagtggtgcattctcgtcgtcgtttgcccagcgctcccgcagtacctttttaaaaatgccatttttttagaacaatccttctaccgctccctaaacccttgcgtcttggttgtaccatttgcacattatttaaggcttgtttggttcaaaaaaaaaaaaaaaa

SEQ ID NO: 130119 - DNA, 766 bp, Zea mays
  unsure (1)..(766): unsure at all n locations
  Clone ID: MRT4577_50140C.1
ccacgggctggcctccacgccggcgccaatctccacgacgacgtgccggccggccgtcttggcgacggccgcggcctccgagacgaggggaggcgcgccggtgaggtccagcgggatcgagacgagcacggtgggtctgggatgtgaggccgtcaccgggcaggtcacggaggtcaacaaggacaccttctggcccatcgtcgaggccgccggcgacaaggtcgtcgtcctcgacatgtacaccgaatggtgcgggccttgcaaagtgatggctccgaaattccaggagatgtctgagaagaacctggatgttgtgttcctgaagctcgactgcaaccaggacaacaagccgcttgcgaaggagctgggcataaaggttgtgccaacgttcaagatcctcaagggtgggaaggtcgtgaaggaggtgaccggcgccaagatcgacgagctagcgcaagccatcgacacagtcaagtcagactgacaaagaaagcaggtgatgcaactagctagtgtagacgatgaatgaatgagtccccggccggccttttgtgggacagcaaggctgctagatacgtacgtacgtactcatcaacaattaatgatggatgatggcaatggcaaatatacagtcaatgattcatatatgcatgcatggactgctatgctagctagcagccctttgtaaatatagtgtttaaggaaatgattcatatattcagcccttaaggacttggatgtcaanaatacatnaaaaatgaactaa

SEQ ID NO: 130120 - DNA, 390 bp, Zea mays
  unsure (1)..(390): unsure at all n locations
  Clone ID: MRT4577_50141C.1
tttctgtagaccgagacctctnagggggagctgttttcaaaagggggaggggcgattcgctttgctcgcatggtggatcatgtcgctgtcgatgttggggagctcgttttcgtcccgagtctgttaggcatcagtgctattgtccggcggcaatgatgaaaccatcgcgctttctgggatggtggattgccgcatttgccaatacttggtcctcgttattaacctctatagcccctgtgctttcttctactgtcccatatattcctcatggattgttttcaactctccttcattttgaaatgatatataatttctttatatttttcatttacttcttccaatcctggttactctgtcctaaccccatttacatccatcattattctttcc

SEQ ID NO: 130121 - DNA, 1348 bp, Zea mays
  Clone ID: MRT4577_50142C.1
tccgggaaccctcgagtccggccgggccgcgttaccgtaccctcagctagcgctggtcagctacctccatccaccagaccagaccagaccaatggccctgcgcctaccaatctcatcgtcccacgggctggcctccacgccggcgccaatctccacgacgacgtgccggccggccgtcttggcgacggccgcggcccagaagaggagcctgctgctggcgacggcctccgagacgaggggagtcgcgccggtgaggtccagcgggatcgagacgagcacggtgggtctgggatgtgaggccgtcaccgggcaggtcacggaggtcaacaaggacaccttctggcccatcgtcgaggccgccggcgacaaggtcgtcgtcctcgacatgtacaccgaatggtgcgggccttgcaaagtgatggctccgaaattccaggagatgtctgagaagaacctggatgttgtgttcctgaagctcgactgcaaccaggacaacaagccgcttgcgaaggagctgggcataaaggttgtgccaacgttcaagatcctcaagggtgggaaggtcgtgaaggaggtgaccggcgccaagatcgacgagctagcgcaagccatcgacacagtcaagtcagactgacaaagaaagcaagtgatgcaactagctagtgtagacgatgaatgaatgagtccctggccggcaaggctgctagatacgtacgtacgtacgtactcatcaacaattaatgatggatgatggcaatggcaaatatacagtcaatgattcatatatgcatgcatggactgctatgctagctagcagccctttgtaaatatattgtttaaggaaatgattcatatattcagcccttaaaaacttggatgtcaaagccaacaaaaaaaaaaaaaaaaaaaaaaaaaaaaaaaaagcagccatttatcttttgcgtggattccccctaaagccctagtaaccaaacttgtgcctaagagggagggtgatgtgtttatattgaatgaatctacataagatagcatgccgtctctggcactggcaatgaacggtggtgtttagttcatgtaagcgcacaaatgtgtgtcttaatttttagtctgtagatctcggcgttagtgccacacttttttatgtcgcagtaaagagagattgcaagcatccaaaaaaatgggtctgagtttagggttgggtcaaacatgcaggagttggggttatgttaaaatatgttatgcatgaataaaaatgaattctggtgattctatttccatccccgtccatcatgagtgtccatgtgagttttcccccataaatacatgtatgtatgtatgtaagaagaat

SEQ ID NO: 130122 - DNA, 448 bp, Zea mays
  unsure (1)..(448): unsure at all n locations
  Clone ID: MRT4577_50143C.1
tctaatcttgtcccttgtaaaaaaaaaactgcatcgtcaacaacaagctggaagcaagawagaaagaaagaaagaaaaggcaaaataatggaagcaagaaccaaccaataacagtcacgcaattcaagaagcagcaagcaagcaagctagnggcagangaggcctccccaatctcaaggggtggggggggaaaaaaactaaaagaagcaggaaaaactagtgtrgtgtagtgtagctcatcagcgcccaagcragrtctggggccacgtacgtgactacgtgcgcggtagcgcagaccrgatcggatcagggcgtcctgttggggggctggaaggcgtaggtgtgtcccttgctgtrgctgctcagcgcgttggccttgtcgcagttgtcgtagccggcctcgtccacctgcaccacgtccgaccgcccgttctggtactcgaagatg

SEQ ID NO: 130123 - DNA, 1089 bp, Zea mays
  Clone ID: MRT4577_50144C.1
gagtattgcgaccagaccagaccaatggccctgcgcctaccaatctcatcgtcccacgggctggcctccacgccggcgccaatctccacgacgacgtgccggccggccgtcttggcgacggccgcggcccagaagaggagcctgctgctggcgacggcctccgagacgaggggagtcgcgccggtgaggtccagcgggatcgagacgagcacggtgggtctgggatgtgaggccgtcaccgggcaggtcacggaggtcaacaaggacaccttctggcccatcgtcgaggccgccggcgacaaggtcgtcgtcctcgacatgtacaccgaatggtgcgggccttgcaaagtgatggctcccaagttccaggagatgtccgagaagaacctggacgtcgtgttcctcaagctggactgcaaccaggacaacaagcctctcgcgaaggagctgggcataaaggttgtgccgacgttcaagatcctcaagggcgggaaggtcgtgaaggaggtcaccggcgccaagatcgacgagctagcggaagccatcgagatagccaacaagaagtcaggctgacaaaggaatagcaagatcgacgtgcagtgcaagcaaggatgaatggatgatcgatgaactagctagtgaagactgcgaatgaatgcgccccggccgcgcatttgtgggaccggcaacatgcatgcagaaaacaagctattctagttcttctgcttaggccgtccgcaattgctatctcaaatagctagctgatgtggagctgagagaagaatacaaatagtaatttatctcatcactagtatttgatctcacacgtccagtttctttcttggaatacgcgaaatcttctatctatttgctagtcgctagctattctcgtttttactagattttctatccacgtaggaaaagagagtgaatctagctagtgaaatagcgcttatgatttattactcatcaacatgcatgcgcgtgcgtgatgttaatcattcatatggtggagtgctgctagctagctcgctcgttataaattgcacctagtatttgatccagaaaaaaaaaaaaaaaaaagcggcc

SEQ ID NO: 130124 - DNA, 562 bp, Zea mays
  Clone ID: MRT4577_50145C.1
gggaccctcgaggccggccgggccgggaggctccagctagctgcaagctcatccgtctctgtcgatcagcaagaggccggggtcagaggaatggcggcgacgtcgcggctggcgctggccctcctgctggccgccttggtggcggcgtggcagccgccgccgctctgctcctcaacaggatgctctgatctgatctgtctgctttgctctacgtatgtagtcacgtggctccagatcttgcttgggcgctgatgagctacactacactacactagttttttttctgcttcttttagcttttttccccctcaccccttgagattggggaggcctcttctgcttctagcatgcttgcttgctgcttcttgaattgcgtgactgttattggttggttcttgctcccattattttgcccttttttttctttctttctttcttgcttccagcttgttgttgatgcagtttttttttcaagagacaagattagtataatgtcaagtgtgaatgaagagctctatttattatctaaagaaaaaaaaaaaaaaaaaaggcccctagggcc

SEQ ID NO: 130125 - DNA, 180 bp, Zea mays
  unsure (1)..(180): unsure at all n locations
  Clone ID: MRT4577_50146C.1
ccgggttctacccacgcgttttctgtcccggcgccgcggcacgtcgccgcagctggccctgggacctcgtcggcttcctggcttggtgccaacggggcaagcaagcctcttggccccgtcgtcnagaaccgacacccnngccttcgtncnntttgcccaaaacaagggtgcgtnntcact

SEQ ID NO: 130126 - DNA, 234 bp, Zea mays
  Clone ID: MRT4577_5014C.1
ttggtgtttttttttttttctttgggggtttattttccaccttctcttcgtcttattttgaccccggggtgacccccccccacaaaaaattgtgacatatgaagctcaagtctcaacacaaaaaaccaaggcaccagggaaatgccccatggccctgtttacaggcccgttttctactatagttgggggggaccaaaaatgcccaaccatcccgggcatttttgctcaccagac

SEQ ID NO: 130127 - DNA, 171 bp, Zea mays
  Clone ID: MRT4577_50150C.1
cttgcagacgaacactgccttatgaggtttcctgttcctcatggccacggcgccccatccctctcctgctcctcttgctgctccacttctcctctgtcctcgacgtatcagctccttcagcctcacaacatggctggtacccgacagggggacggcgagcaatgctgtacg

SEQ ID NO: 130128 - DNA, 713 bp, Zea mays
  Clone ID: MRT4577_50151C.1
taagccaacgtggtggcatcatcaaggtccatatggtcctcaactctacatcaccagggaggattgcagatcacggctctagtatttctgagcctttgcttaaagataccataccggccacagcaaatggacacggcgttgactgcagccagcagcaacaggtggttgcctctgaagaaacggtcgttgtactggttaacaataacgaccatttcaccagtttgaagcccgctgagtcaggcgtcacatcacaagaaggttcagacagcaacgcggcatcatcggaaactccacaacggccgcccccgccggcagacgaagccccgaaccagaacggcaccggaaaggataagcagaaagaaccggtctcagcgggctgctcgtcgtcgcgccagctcttccctcctgggaggatcatccacatggttgcgctgccgccgcagcagccggacccaaactccggcgacggcacgagcagcggtgagatcgttggcatatacgagacgccgaggggtttgtacgggaagatacggctcgcgcccaacatgattaaagaacattacatgcctagctatatacgtacgatggaatcgttgttggaacagctccagaaggacgacgatgatggcagtgtatgtacatgtaccgcaccaagtgacctgtgaattcttgtggagaactcgggcagtgattattccaattctttcttaacc

SEQ ID NO: 130129 - DNA, 492 bp, Zea mays
  Clone ID: MRT4577_50152C.1
ttgctggcctacatcttcccagggcattctcatgtggaatgactctctcacgctcagccttgactcttgacaagcacccacgcatactagaatgaccgcttgggcatcccggcagcctctactctcgaacctctcaatcactcgcgtagaaatacctccaatccttgacaccacgcaggccagcggaggccgacttgacagagtctacatgaccaacgaccacattgttgatgtgagtcttgtccttacccatggcatgaaggaaaatgtatcactgcatcgtcgggcagttgagaggagagttcgagcaactctgattacgggtgatctgaggatacggagactgcacgccgtctactaccaggctgctacaccagactgcatcaggtgtcttggagagtacctgtcagtgcgatcgatagaacgggcaaatataagcacacaggctgcaggtactagcggatccgcgctggcaaccgggcttgcagaacc

SEQ ID NO: 130130 - DNA, 300 bp, Zea mays
  Clone ID: MRT4577_50153C.1
ccccaagggaacccaatgccttacgcgatgcccggccgtattcaattgtaaagcatgctactagcaaatatacatttctcattggctcacccgggctccaaaatatcagcatcttgtatggctataccaacattacgttgtttaagcaaacgccttggagcataaatagcgttaacatcaacatgcatacgtctagtacaacatagggacttcgctcaacggcagatggcgacggtctgcaacaattaagtgcaacaatcttagcatgcataatctcatatggatatctaacagttgaaa

SEQ ID NO: 130131 - DNA, 337 bp, Zea mays
  Clone ID: MRT4577_50154C.1
ggttcgaacccgccgcgaggcaccccagcgaggggagcgtttgaggggcaccccaccggcaatccgccctagggcaggcacaggcggcacccagggtcgcgatggacaagctcaagagctttgtggctaaggaggccgaaggcgcggaccgctgcctcataaagggagacgggctggaggttccaacagaggtgcggccaaccctggacccatggcagaccgcggaacaagcacctccacctctgccaaatgatgcggtagcaggcgggaccggcaggaaaaagacccggacctgcatcgcaggcccatgccaaggtgggcccaccaacagtgcccc

SEQ ID NO: 130132 - DNA, 1589 bp, Zea mays
  Clone ID: MRT4577_50155C.1
gccgactctgagctccagctggcgcgggcccggtgcgtcgcgctgcaggaccacctcgccgcttcgccggacctgccacgccatcccgcgctccgctccctccttcgcctcgtcaacgccgagctgcgcttcctctcctcgctccgcctcgccccggccacgccgctctcctccaacctgccccacctcgtggcgctccacctcgtcctcacccaccctgccatacggagcccgtcccggctctcgccgctccccggcgtagatttctcctgcgccttccgcggccggcccgcgtgggtgctcgtgtccgcgagcaaccccgccaggctcgcctgggccccgcccgggggtctccgtgcccgcttcgcggcggcgctagaagccgcgcgcggtgccccgcccgctacgcggcccgagaagctgcttgtagtcttctcccgcggtgtcggcgtggatatcgcgcgggggctaaccgaggggttcgaggccgtggaggctgacttgctcgaggagttcattggcgactccgaggaggagaatgagcacgggtgggttgtcatcagcttggactcgagtgaggagctcaggaatttcagggcgttcgagattgatgtcgtggagggtgctagtgaggttttgcttccatcagacgtcgcggtggacgaggtaagtgctgatgaggaagagcttttgggtttctggggatcctttgctgcctttatggagaagatgtggaaagtatcgagggagctggtgaatctggacaccacggcactggtcgctatagtgtcagggatcagcaatggcggggtagggaagctgatggctgcacctgaggcagagaccagagcaaggttcaagtgcaactacaagttcgtcatggatcaggcacaatacgaactgcagtttccaatactcatagagttacggaaagcagtggaggggaagcaatgtatcatatgtgaaactgtcaacttggaattcaaagaaattgtttctatgtgtggtgggcctgaggagaacaccagagcaagacatttgttgaaacaacttaccattgtcccagacaatccttcagcacgaatgatggatcttccaaccacaaggaagctcgcgatgaaaaataaaattgtttttggcacaggtgaccattggcgggcccctactttgactgctaacatgggttttgtaagagctgtttcccagtctggtatgtccttgctaaccatcgagcaccgacctcgggcgctgattggtctgtgacagttagtatgccataactattctataggtgttttgagatcctaacgtttgtaattctgccccttctgaacattaaacaatatgaagttctggtaattgtagttgtcctactcctagaactatggtgtagtgtaggatgtcctagtttactccagtgtctagtactgcgagctttgtccatgactgtgtaactggtccagatccactggagtttattcgagcgagaatgcttactatctgtacttgtatccttgacgtcaaagtcaagcaaagcatatgtacaatatgaatgaacgcatcagcatgaatgactcgttggcagcgtg

SEQ ID NO: 130133 - DNA, 1102 bp, Zea mays
  Clone ID: MRT4577_50156C.1
ggccgctttttttttttttttttgcagcggaaataaattctttattacaaaatgattacaagttacaacatttacaagttataaccatattacaatatatcatcggagtgattataagagaatttgattcaaaaatattacaatttgaatgtataaaacatttataagttttaaaatacatgctagcttaagtgacagtcctcaataaagaagctaaagatgggatatacttatataagaaggccgagcccaccggcacttagcaccatccacaacagaacaaacttataacctgaaaaacaacagggaataaaaccctgggataacactacgttagtgttgttagagacgtccggtgggtgcgcttcaatatcctggcactcgatcagatcacccatccttaggttcatccatcagcattactctgagattaatccaactctcgtcctctacagcacgtgagcaattaacgtacctggccgatcggatttgagttgtgtatgtgctgtccatggacttgggattttcgtcgaacactcgatgcccgaagcacgacatcgacaacgagcggagtttgtgacgtcgcgcaggggctgtgcagatcgagttggagctcgctgcagtatttcatcgaacacgtcgagggcgcgacacgaaggagtgtcgtggctgctgctgctccatggactagggcgagagcaagcaccagggaggcgcacgatgtataggaagcagcatcccggcgccctgaggagacccagcgaggcgaggttgcaggggcgagccccatgtcgacgccatggagaacgagaagagtggctcgtgagagagagatgggacagggagccgagatgttgaggagatggggcgctgacttgctgtaggcaggagaggtcgccgtccatggctggaaagagagatggagactgggccaaatccagggaggagaggggctaggagtagcggcgagcgtggggagctcgacactggtacagcaggcgacgcttgaggaagacttgtgctcggccatgagaacgagcaaaggcaagggaattccaagtgatagtgttgtacgaaggggataaggctgagcccggccaag

SEQ ID NO: 130134 - DNA, 496 bp, Zea mays
  Clone ID: MRT4577_50157C.1
ggtacacgctcttgccattatgtagtgcagcagatacattggtgtgctctgttcaatgttggagcctgctggtgatagatcggtggcgtcactaattacaaatctggctggatgtcattcacgggatggggacacctgcctggtggcgcccgcgctgcgttccccaggtggtccatgttacagcgccttctactaacacgcatatgccttttctctgaatcctgctcgggcctcggaagggcacagcctatgcaacactgatcatctttcatgtgggcttaacacttgatgcaatgtattgtattctgttaatactgtgctgatctccttatgatctgccaggatgctaatgaccactgccctaacccttgcgctctatgattagctgagaatgcctcttgctgttgaaatagcctgactattctactttcttctttcctggcgcacagccagccccccacaggagcttctctgaggaagttgctgcacttggccg

SEQ ID NO: 130135 - DNA, 1083 bp, Zea mays
  Clone ID: MRT4577_50158C.1
ttttttttttttttttgcagcggaaataaattctttattacaaaatgattacaagttacatcaggattttattatacatcatcggagtgattacaaaagaaaatgattcagaaagattacaatttgaatgtataaaacatttataagttttaaaatatatgctagcttaagtgacaatcctcaataaagaagttaaagatgggatatacttatataagaaggccgagcccaccggcacttagcagcatccacaacagaacaaaattataacctgggataaacactatgttagtgttgttaattgacgaccacttggtaagtatcttccatcctgacacttggttgattcatccattttagcttcgtccatcagcatcacttggagatcaattccactcgtcttccatagcacgtgatcaattaacgtacctggccgatcggatttgagttgtgcatgtgctgtccatggacttgggattttcgtcgaacacgcgatgcccgaagcacgacatcgacaacgagcggagtttgtgacgtcgccgcaggggctgtgcagatcgagttggagctcgctgcagtatttcatcgaacacgtcgagggcgcgacacgaaggagtgtcgtggctgctgctgctccatggcctagggcgagagcaagcactaggaagtcgcatgatgtataggaagcaacaccccggcgccctgaggagacccagcgaggcgaggttgcaggggcgagccccatgtcgacgccatggagaacgaggagagtggctcgtgagagagagatgggacagggagccgagatgttaaggagatggggcgctgacctgctgtaggcaggagaggcccccttccatggttgaagctggagctagggtgagctcccgtggagatgagggtgctagggaggggcggcatccatggctggaaagagagatggaggctgggcgaaatccaaggaggagaggggctaggagtagcggcgggcgtggggagctcgacactggtacagcaggcgacacttgaggaagaggtgtgctcggccatgagaacgagcagaggcaaggaaaatcctcccgg

SEQ ID NO: 130136 - DNA, 124 bp, Zea mays
  Clone ID: MRT4577_50159C.1
gctcaaatagtaatcgcagtcagccggcgacgcaagcacgatgtcacgctataactgcgcgatcaccgttttctctcccgacggccatctcttccaggtggagtaagctctcgaggctgttcgt

SEQ ID NO: 130137 - DNA, 526 bp, Zea mays
  Clone ID: MRT4577_5015C.1
ctcaaaaagtggcgagttttggcaaaaaaaaaaaaaaaaaaaaaaaaaaaaaaaaaaaaaaaaaaaaaaaaaaaaaaaaaaaaaaaaaaaaaaaaaaaaaaaaaaaaaaaaaaaaaaaaaaaaaaaaaaaaaaaaaaaaaaaaaaaaaaaaaaaaaaaaaaaaaaaaagggggggcccgtttttaagggtccaaattttccttcccggggcttgcaactttttattttttttttggggcccccaaatttaatttcctggcccgggttttaacaccggggggctgggaaaacccttgggttccccaaatttattccctttgaaaaaattccctttttccccggttgggttattaccaaaagggccccccccgttcccctttccaaacatttccccaccctaatgggaaattggacccccccttttaccggcccttaaaccccggggggtggggggtttccccccaggttaccctttacttttccaagccccttagcccccgttcttttggtttttttcctttctttt

SEQ ID NO: 130138 - DNA, 119 bp, Zea mays
  Clone ID: MRT4577_50160C.1
cttggtgtgggttctttaagtacagctttatgtgtctgcagctcgagccgagcaaattaaactggcagatattgagagcttggctcgagccgaaaacacatagagctggacttttggcg

SEQ ID NO: 130139 - DNA, 649 bp, Zea mays
  Clone ID: MRT4577_50161C.1
gaatatggatttgtttctcatgtgtacgtgacagccatggattttataataatatgcacgcgcatcatgcgcaaataactaataataactagcacaaaactctatgctactactacatacatatatgaacaacagatcgtagacatccattggcagcaagaaagaaaccaaggtacctagttcaaagagagcttagctaggaatacaatggagggcgctcttgcgagcgcagcaaccggagccctgcagtccgttgtggcgaagctgcaagctctgctccgcgatgagtacaggcgcctcacgggaatgcgcggcaagatggagtggctcactggcgagctggttgccatgaaggccttcctcaccgacatgtccagggacgagactcctcctgatgaacaacgcaagctgtggatgaaggacgtgcgggagctctcctacgacatcgaagacagcctcgacgacttcttcgtgcagcatgccgccaagccagacggcatcatggagaagatggcgagcctgctggagaggaccaagagtcgccaccggataggcaaggagttcgacgccatcaagaggaaagtcatggaggcggacgcaaggcgtaagagttacagtaccgaccgtccggtggccaaagccagatcat

SEQ ID NO: 130140 - DNA, 623 bp, Zea mays
  unsure (1)..(623): unsure at all n locations
  Clone ID: MRT4577_50162C.1
gggaccctcgggccggccgagatcggcacatgcacatatcgaggcgatgctctgatgtcgttctctatttctatagctatgtcgtcgccgtcccagactacactggatgctgctaggactgtatgcagcctctagatggctaggatcaagccacgcagactatatactagtaagacaggctatgctacgtgctcatcggtttattacgtctagataaataatgtatgtatatacgagatgaacatatgtggtcgatctccaccgatacacaccgggacctatccatgcgtgaggtgtcgacgctgcgcggacgtactagcaagggtagcacggcggatcaacactagcggggcggcgggggattcatcggtgaccaccatgaggtgataccgacgtccggcgactgcttcgccgtgggggacgacaacctaccggctacatggactcgagagggaacgagggccttggttaccgcgacggaggcgtccctggggtcgtggaggtagacaccacggagctcgttggcgaggtctcgtgcacccctcctncgtgcgacctgctggcagtggcagtattctggcgccgaccatcactcgggggcggcagtagcacaagagaagccg

SEQ ID NO: 130141 - DNA, 894 bp, Zea mays
  Clone ID: MRT4577_50163C.1
atgaggagtccaggtctgagatattggacaaccaaggcacgtagtgtggcagcagtcagtatatgctacggagttggtggtggtgttgtgtcgcttcagcagagctgctccggctggacttctttctccgcttgcgtggtctctccctataaatctcgtggtatactacctatgtcgcttccagatgcccaggtcttcgtcgtgtccttctccggcaacgaacagtggagacaatcaatagaaaatcttgagatctttttggtggataatttacatgggtattgttatgagtcatcgcaacgcacagttcttgcgttcgagcagttcgtcgatgaacgaagggagaggaggaacggcgtcgagcagggagtggtcaacggcgaggcacggatggtccaggacgcgaccgaggcgagggcacacagccgagacgaggccgaggcaggggcacgagcgtggcggcggacggtccggcggcagcggtggtggtcgagcgagagagaaggggagagagggagaaggagagggcgagctcgacacgggaggggagaactcggtagtggtcggttttatagaggggagagggagagtcggggagggagagggcggtggccattcatggctgcggcagttacctccattgatggagggaggggaagtggggggagaggaagggtcgtcgccggaggtttcgtgcgaggggaggcgaggggtcagcgcgatcgagagggcacggacggtccggccagacgctaccgcgggtgcgcgcgatggcgtgtggtcgaggatgggagcggctggaagagaggagggggagtggcagctgggcctatatgggctgaatcggccgattcggctagggtttccaaaaaaattcttttttataacccataa

SEQ ID NO: 130142 - DNA, 392 bp, Zea mays
  Clone ID: MRT4577_50164C.1
agcgtggtgacctcggagccgacgacgctgagccgcagcggccgcagcgcgtgcctgacgtccgcgaacacgtctgcgccgtcgtcgcagctgagcgtcgccctgacgaggacgccgcctccggccgacggcggcgccgcgccgccatggaccagctcgacgacgacgtcgtccgcgtcggccgggacggcggcgcagcggtctcggatgtgcgccgcggtggacttaagcttcttcacgtgggttatcacctccgccagcaccgcggccttgtccattagagccagatattgttgggcctttcctcgactgggtttcggcccagtttcaacgctgagtcggtgaccaagtttgctgcactgccaagccgcgtcatcctcgccggcagtgga

SEQ ID NO: 130143 - DNA, 205 bp, Zea mays
  unsure (1)..(205): unsure at all n locations
  Clone ID: MRT4577_50165C.1
tcccgcgngacagccgccaactctctaccgtccgagaccccngcaccagcgcggcgacggcggcggcggcgtccttggctgtcgggccgatccgcggatctcctgggttcgacgggtcggccgatccgaccgtcggccctttctctctgacggcttggtttggccttccggccccgcccgcgttctccgtgcgcctcctgggggg

SEQ ID NO: 130144 - DNA, 1768 bp, Zea mays
  unsure (1)..(1768): unsure at all n locations
  Clone ID: MRT4577_50166C.1
agcgcgtgcctgacgtccgcgaacacgtctgcgccgtcgtcgcagctgagcgtcgccctgacgaggacgccgcctccggccgacggcggcgccgcgccgccatggaccagctcgacgacgacgtcgtccgcgtcggccgggacggcggcgcagcggtctcggatgtgcgccgcggtggacttgagcttcttcacgtgggttatcacctcagccaacaccgcggccttgtccatcttgtcggagcagggcaccatggtccggagcgtggcgaggtgcgcgttgatcctctccctccggcgccgctccgcctcgctgtggctcttgagcgccatcgccgccttgtcatcctggaggtggtctcccttactcctcgtcgcctcctccgcggaggccgcggcgtcgaccagcggcacgctgccgtctaagatggcaggcgacgtcgacgacgctcccgctcccagctggctagcgagcagctcgtagtcaccaccatgtccatggctaccgccgtagaacccgtcgaggagcccggcgtcggcgaaggggacggagcccatgtcgtccatttcgtcgtggaaagcttcgaggccgacggggacgatccacgaggcacaagaacataacagcgcagcagctgccaactagtgcttcgtgggagcactgtatatataacgaattactcggcaggtgccaagcacgcaagagctgttgccttttccgatggaaacaggggctcagggcagggacagggcagctcttgcatccagcaagttgcggcggacgcgtgggcggacgcgtgggtccggaatgtttctttcacacacgagacgagaggatcggaggcagccaggaagcagtgaagcacgcggcagcagcagtaccaaggccctggttcccaagaacacggaccagacaggagcccttgcttctcccaaggggattgaggcaccggcaccggcggacaggctcgcgacgagatcacacaaaacgcagagccatgccgttctagggagggagactgactgacagaacaggcagggtccaaggagcaggaggggcacggggagcggagcggagaaagaaagaaagaaagtcagagtagagagacaggggggaggggagcacgagaccagctgttctatcgaggatttgaggcgctcaggtgcctggaggccggtttggagggcaggaccagaaggggagcctcactcgccgcagcatcctccgctccgagctcgtcttgctgccgaacctcgccgtgacgcgcctctgatccatcggttgctggcttcggtgagcttgctgcgtcctcccggagcttctagtggagggaatgggaatgtttcatctttatgaaggggatcatcttctgatgcacgcagaggtaggcgaataggcgatatgtgatctttccctttccctcgcctcacggtagcttggcctttggttggttttgtggctgtcaggaactagtgcttctgccttctgcgatggcgagactaaggcaaggctgagctctcgtcagatcgaggcaggaggaggaagaggaagaggaagacgaccagctctagcaacagctctgctcttcgtgagtggaaaagggtttgagagcgagggagaatatatgtatgtgtcttccaacccggccggcttcttgtctgacttgagattgttttccctgcgattgacgtagagggataaggactactgctcgttgcacattntctatgttgcttgctgggtttaaaaaaaaaaaaaaaaagcggcc

SEQ ID NO: 130145 - DNA, 360 bp, Zea mays
  unsure (1)..(360): unsure at all n locations
  Clone ID: MRT4577_50167C.1
cggncgcgtgggcggncgcgtggggcggcggtgtcgagtacacgagcctccgggatgtgctcgccgaggccggtcccgggagcggcggcggcagcttctgggacacggccggccccacgatcgacttcgacgcgtccaacatcaacatccgcaaccaactgctgaagcacgccgcgtcggcgtacctccagtcggcgatcgtcgtcccgccgcgggaccgtgggtgcctcagcagattgtggacgtggctgctgtaccgccggcggtgccgcatcctgctgcgcccgtgtccggaatgctgcagcgccggggaccccacgcgcctctgcgccgcgttcgtcggaggctcggcgcgccggc

SEQ ID NO: 130146 - DNA, 431 bp, Zea mays
  Clone ID: MRT4577_50168C.1
ggggggtggtgggggctttttttttttttttttttgctttccccatttgcccaggggtggggtttttataattaaaccaaattccaaaattttttttttttccaaccgttaaaaatttaaaaaaaaacaaaaattcttttatcccaaatgtacaaaaaagggggggggggtccttttttttttttttcccagggaccaaaaaaaacaaaaatggtgggggggtaccaaaacccttaccccccgaagattggtccaggggccttttggcccagcgccccagggggaccaaccacattccttttcccttgggcctccccccgcccggccccttcttatgaatcaaaaactggggccttgccccccccgaaacccggccgaaaaaaaaccccagggcccggacagccaaaaaccccggccgcccccccaatggg

SEQ ID NO: 130147 - DNA, 267 bp, Zea mays
  unsure (1)..(267): unsure at all n locations
  Clone ID: MRT4577_50169C.1
ctnctttatacgggctatttctgctaccttggggacatttcttggatagtgaacaatccacttatctgccgaattcctgggctcatatgataaaagcatgccttttcaaaggtcaccaggtgaccattgataaacaagtgaatagggataatttagcacccttacaccttgtaatctcaaaaacacaatgttgtgccgctcgtaaataacgactactactacgaacgccttttttcagctgttatgcaatgcaaacacgatagcagt

SEQ ID NO: 130148 - DNA, 348 bp, Zea mays
  Clone ID: MRT4577_5016C.1
cattattgtaagaatccatcaatgaagcagatatagagggtaggacggtatgagataagcgtttaaccgtatcatcttatgggataaggcgtgaaacatgctagggaaggagctagagccagagtgattatagtaacagcgattacgtgatcataccgatcgatgacgatagttgacttggattggaccgatcctagggacttggagcgggtgaccgacaatttaaatgtctgccctatcaattcgccacgggcggatggggagctaccaaggccgaggacggtaaatgataagcgatctcccacggtggaaggcgagcctgacgaacataggagccattcaaggatt

SEQ ID NO: 130149 - DNA, 728 bp, Zea mays
  Clone ID: MRT4577_50170C.1
gactccccgcgctgcgaggtcgtctgcggcaacttcctctccatgccgttcccggacgcctccttcgacggcgcctactccatcgaggccacctgccacgcgcccaggctgcaggacgtgtacggcgaggtctaccgcgtgctcaaaccggggggactctacgtctcctacgagtgggtcaccaccccgctgtaccgcgccgaggacccggaccacgtcgagtgcatccacggcatcgagcgcggcgacgcgctccctgggctccgccgccaggacgagatcgcgtccatcgccaaggaggtcggattcgaggtgctcaaggagcaggacctggcgctgccccccgcgctgccctggtggacgcgcctcaagatgggccgcatcgcctactggcgcaactccctcgtcgtccgcgtgctcaccatgctccgggtcgcgcccaagggcgtctccgaggtgcacgagatgctctacgagaccgcgcagcacctcacccgcggcggcgagaccggcatcttcacgccccccaccgaggaggccaactagtgtaagactacacaccgccaccaatcagttactactcgcccaccgcaagggggagaaaatggggagggaggaaaaagatgcaagcagcagcagcaccagaggtaagaagagcaggctaatcggcgacttgaaaaaggtacaaattgatctattagagaagaaatactactaggaacgatgct

SEQ ID NO: 130150 - DNA, 1212 bp, Zea mays
  Clone ID: MRT4577_50171C.1
cattgggtacctcgaggccggcctcgactccccccgctgcgaggtcgtctgcggcaacttcctctccatgcccttcccggacgcgtccttcgacggcgcctactccatcgaggccacctgccacgcgcccaggctgcaggacgtctacggcgaggtctaccgcgtgctcaagccggggcgcctctacgtctcctacgagtgggtcaccaccccgctgtaccacgccgaggacccgggccacgtcgagtgcgtccacggcatcgagcgcggcgacgcgctcccggggctccgccgccaggacgagatcgcggccatcgccaaggaggccggcttcgaggtgctcaaggagcaggacctggcgctgccccccgcgctgccctggtggacgcgcctcaagatgggccgcatcgcctactggcgcaactccatcgtcgtccgcgtgctcaccctgctccggatcgcgcccaagggcgtctccgaggtgcacgagatgctgtacgagaccgcgcagcacctcacccgcggcggcgagaccggcatcttcacgcccatgcacatggtgctcctccgcaagccgcccgccgccgcatccaccgaggaggaggccaaatagtgttaagagaaataacctggcagaagcagcagcagaggtaagaagagcgagctactcggcgacttgaacaagtgaaaacttcatctgttagagaagaagaagaatactactaggaaccatgcttgtctcgtttactctttttttttccttgtccccattcttcttcgtagctttcacttttatttttttttgtttttctggtggacggattattccgttggggacgaggtcgggatttaaatttgcttgatcgtggagatccatctataatctatcatcatcataagccatgttttgtctgctaagagtacattggaattgaactctctaaacctaattgttattacctgcttgctttttattttataggcaccaggcttgtctggtttcccctttttttttcttgtccccattcttcttggtagctttcacttttatttttttttttgtttttctggtggccggattattccgttgggcacgccaaggtcgggatttaaatttgtttcctcgcttgcttgatcgtggggatccatctataatctatcttcgtcgctcctaaaaaaaaaaaaaaaaaaaaaaaaaaaaataaatgaatt

SEQ ID NO: 130151 - DNA, 174 bp, Zea mays
  Clone ID: MRT4577_50172C.1
ctcctcatctccaccctctcttcacattttatataccaagccagccctacctcaccggaccgtattttatacatggggggcggcttcttactcacattgccatctcacgccactctattccgtcctctactaccacggttccaactaccttgctcacctgtacactatctcttt

SEQ ID NO: 130152 - DNA, 1733 bp, Zea mays
  Clone ID: MRT4577_50173C.1
aaaaaatcaccttgctcacgcgcgctctgccccgcttgctatatcctcctagagcccagccaaatcccccgacgtcctcctgttcatctcctcttctccctctcctcctcctcctcctcctcgtcccccttcctcgggttggaaattggaatggaggcggcgacgatggcgtggacggcggcggtggtcggggcggggctggtgtactggttcgtgtgggtgatgggcgcggcggaggtgaagggcaagcgggcggtggatctcaagatgggatccatcacgcgggacaaggtgcaggacaagtacacccagtactggtccttcttccgccgccccaaggagacggccaccacggcggcgtcggcggagaaggtgccggccttcgtggacaccttctacaacctggtgaccgacatctacgagtggggctggggccagtcgttccacttctcgccgtccctgcccggccgctcccaccgcgacgccacgcgcgtccacgaggagcgcgtggccgacctcctcggcgcccggccgggccaccgcctcctcgacgtgggctgcggcgtcggcgggcccatgcgcgccatcgccgcgcactcggggtccgacgtcgtcggcatcaccatcaacgagtaccaggtgaagcgcgcccgcgcgcacaaccgcaaggccggcctcgactccccgcgctgcgaggtcgtctgcggcaacttcctctccatgccgttcccggacgcctccttcgacggcgcctactccatcgaggccacctgccacgcgcccaggctgcaggacgtgtacggcgaggtctaccgcgtgctcaagccggggggactctacgtctcctacgagtgggtcaccaccccgctgtaccgcgccgaggacccggaccacgtcgagtgcatccacggcatcgagcgcggcgacgcgctcccggggctccgccgccaggacgagatcgcgtccatcgccaaggaggtcggattcgaggtgctcaaggagcaggacctggcgctgccccccgcgctgccctggtggacgcgcctcaagatgggccgcatcgcctactggcgcaactccctcgtcgtccgcgtgctcaccatgctccgggtcgcgcccaagggcgtctccgaggtgcacgagatgctctacgagaccgcgcagcacctcacccgcggcggcgagaccggcatcttcacgcccatgcacatggtgctcctccgcaagcccgccgccgccgcctccaccgaggaggccaactagtgtaagactacacaccgccaccaatcagttactactcgcccaccgcaagggggagaaaatggggagggaggaaaaagatgcaagcagcagcagcaccagaggtaagaagagcaggctaatcggcgacttgaagaagttacaaattgatctattagagaagaagaagaatactactaggaacgatgcttctctcgtttactcttttccctgtccctgttcgtagctttgagttttaattttttgtttttttggtggacggattgttccgggggggtcgaggttgggatctaaatttattttctcggtggagatccatctatctatcatcagcagcagcaggagccatgttttctctccaacaatacattggaattgaattcctaacgggcagattggatccttagaattgtgaatcctaacgggcaggatttaattctataatataatttagacaaagatcctttaactgg

SEQ ID NO: 130153 - DNA, 195 bp, Zea mays
  Clone ID: MRT4577_50174C.1
aaaagactccctctctgccgggattaggtttttgcggggtgacagttctctcgggtgagcgaacggcggcgacggttttctcgggtgtgcgagcggcggcggtggcgtgccgaggcgggtgatcggccgcgacgctcctatgacgggcgggcaagcaccgacggtgttcccaaacgggactagtggtggcggtgc

SEQ ID NO: 130154 - DNA, 306 bp, Zea mays
  Clone ID: MRT4577_50175C.1
agaaagaaactggtttaaaccttcagattttaagccatctaggcgtagggccccggacaattgccatgaactaaattcttcaagtgacaagaatgaagtagaatgaggctagaaatagctcaaccagccaacataggctgctgagagcaacatacaacaccgggggggatttgcctataacacgatttcacgctagctgctatgctagggacgatctaccattctgtctagagctacatcactcgggttgtgtgggcagctaactcagccctgagatgctcagcgtatagcgccagcgacttgtgg

SEQ ID NO: 130155 - DNA, 403 bp, Zea mays
  Clone ID: MRT4577_50176C.1
atcacaattcatcctgtctcgagtccctttcaccgccggtacaaaagagctcggcgattcccactggtacccagagaatatgtccaacgggataccatgagaacaccgacttattcctctccgagaggacgaaatctgccccctccgagataaccactagtactaaagaagttggcacggtgctagttggctgctccgcgaacttgtacactctctgcgatcttcgatgctgagcaaagccacaagttgaattccactcttcaccaagtgatgacattacaggaggtgctgactgatactgccagcaccgagatgaactaatccatctctctttatcttgatcacacaatgcgtactctatgtacttgtcgcaaactatgctattacacctggcctcgaaaaa

SEQ ID NO: 130156 - DNA, 209 bp, Zea mays
  Clone ID: MRT4577_50177C.1
ccggcgaagattgcaccaagaaaatccatgggggggggggggggcaggggcaattaataggcgtcaatcgtcatagcagcagccaccgaccgcctcatcctagcaagccgccgacactgctctatcatgctcgacggctgccagacaccagccgcctggcacctactgcatagccagagatgggctcatcccgcgggaggggggggggg

SEQ ID NO: 130157 - DNA, 576 bp, Zea mays
  Clone ID: MRT4577_50178C.1
tggcctgacaagaagaaatttattgctcgctcaaaatcgaaatggcaggagctctgcctaatcattaaaaggagatagttcagaaaatacactgtacaagtccgaggaccgagataagacagcctagcaaacacaacatgaggaccgctcccaacagacccgcacaaatccgcgaaaccactgcagcaaccctaatactggaggaacatggctctcttcaaagtgcacacgtcctctttaatcttcaaggctaattggatagaggtaccatggatcaaccttgattgcagctagtctatcaggtctgccagcgcttcatcagaagtttgatctaccagcaccttttgtcctgcacacagactgccctcactactggcgattccgtcttcctgatgagacagaagaagagttttcaactagacttgccaataatttggagaatcttgtcctcaaagaaggacctgaaacaattgctgctttcattgctgaacctgtgatgggcgctggtggtgttatccttcctccaagacctatttgagaagattaggcagttctgaagagtatgacatcttgtta

SEQ ID NO: 130158 - DNA, 477 bp, Zea mays
  Clone ID: MRT4577_50179C.1
atggccgacagggtgaccgtcgtttcgccgcgcgatccgtggcctctctccaccgtcacggtggatgatctggaggccctcgtcgccgatggtttgctccgtcccctctccggtgatccgcagccggagtgggtggtccatgcgagcgaggccgtctcgactccgccgccggggtatgtggttagtttcgtctccttccacgagcgggggttcggagtgccagcgagccgtttcatgcgggcgctcctgcactattacggggtggagctgcacaacttcaaccccaactccattgcacaagcggccatcttcgaggcggtttgcgagggttttctgggggttgacccccactgggatctgtggacccatctcttctccgtggagcttttcgccttgacgacgggggaaaagaaggtctgcatggtggtgcgggccggtggctgcaccctccagttgaggcaggggcgcgcgcagtag

SEQ ID NO: 130159 - DNA, 349 bp, Zea mays
  Clone ID: MRT4577_5017C.1
gtcgaaccaaactaagaacatgcatattccaacaccgacaacaaaattctagggctttcttatgcttgtccttctttctgcatgtgctactaacgataccatggccccacaatgataacagtctcatatcactatccttcttcttccatacctctcaccatcaatgaccgaaatttgtgaatacgcaattgaacaacactaaacgattcaaaatgcaatggaaataaaaagactaccatcatcagccttgctgctgcaacacccgcgagacttattacaataattccacttgctttatgtgctggcacatgatattaaggtacaagaacaacaactacttgaactcagc

SEQ ID NO: 130160 - DNA, 507 bp, Zea mays
  unsure (1)..(507): unsure at all n locations
  Clone ID: MRT4577_50180C.1
ggcgttgtcgtcggcgcctggccctgccggcngccggtctgctgggcggcttgcccctggtgcccgccgtgcccttgggcgcgtccccctccctcttctcttttcctctcnngggcccgcccccctgtggggcgggggggggctnttcccgncctctcnctggccccgtgcgccagctcctcccgttcgtctcggctcgctctccgccgcgctttccggctgcgcctccgtcggccttggcccgctgttcccgggctccttcttgggggtgggcccgtgcgcgccgtnttcgtggctgtccgccgtcgcccgtctgcgtggtggggctcgcgccctccttctgcgtccggttgtcgttcccggctgcggtgggtcgcgccccgggtgttgccggctggggcgcgctgtgtcttgcctgtcgcttccggttccctcctgtcgtctcggttggtggggccctgttggggtgcggggccgttttgttggggtgccccgggcccgggaacg

SEQ ID NO: 130161 - DNA, 524 bp, Zea mays
  unsure (1)..(524): unsure at all n locations
  Clone ID: MRT4577_50181C.1
aacactgctaatctagacctgtaacaggaccactgagcgggggtataaataaggcaaacatagagtgcccaacgcctagagataatgacacaagagccctcagacacctaggcaatacacaaagtattcccatataataggactacaagctgcaattacaacgatacctatacaaggtaggaccgcaagacaaaggcaacaacacgaggaccgctacaatggcacagataacacgtggaccttattactgaacgaggcccggaagacgaaagacttccaccaaggccttcnacaaagggccgaatggaccaaacggggctcctacccgttgttgatgtataacaccatccactgggggggaggcctcgagagaaggaacacgtccttgcctaggccctaacaatgattagatgatgacattatcacaagtttgatcacctaagaacaattgatccttaagccagcgcacctaactcacatagaaaaccccgtcaaatagcgaactctggacaagctactacacc

SEQ ID NO: 130162 - DNA, 246 bp, Zea mays
  Clone ID: MRT4577_50182C.1
ataaaaaaaacaaaaaaaaaaaacaaaaaaaaagggacggcataactataaaaaaaagagacctaaattcaattaactgcccaatatttcacaccttcgggaccgggaaaaccaagtctttacccaccttaaaaaacttgcaaaacagccaaaatttcgccagttgccaaaataaaaaaaaggggaaaaccgatcgtttctcccaagagttgcacatccaaaatgccaatgggaccccccctgaaa

SEQ ID NO: 130163 - DNA, 343 bp, Zea mays
  Clone ID: MRT4577_50183C.1
cacagagcaatgtttctcaaaaccgcccataccatttttttttgaaagggtggaataattcacttcacccttttgcaggggtttatttacctgttcaaaaactgcatgtcccaggcttgcaaaaacatgaacttcatcctttgattccaaaaatgggcttgcttttttcccaaacaagttcaaaccctaaaaaaacctgcctgccccccattttttctccccttttataaaaaggcccccccccgtttttttttttttggcccgttttaattcaaaaatgaacttgcggcccataaattttccaaaacgggtgttgtaattttggaatttgagagcccttccc

SEQ ID NO: 130164 - DNA, 346 bp, Zea mays
  Clone ID: MRT4577_50184C.1
attcggctcgagccgacagacagattctttatgatcaccaccaatggcaccaccgtgtatgcagccgacaccagaatcgccggagtgctcaggctgaccatggcggttaacaaagctcatgccgaggttccaggccacgcctttgagggcgtattgcagggcactgacgcttgcataaaactccggtgatgctctatcttccggctgcccgtggtctagttgatcgcctccacattcagctgtacggctaggggagtttgatgctgcctgttctgaactactaccctcgaggcgctgatatctctatgcagagcgaggaggacagattgatgagcaaaggccttac

SEQ ID NO: 130165 - DNA, 121 bp, Zea mays
  Clone ID: MRT4577_50185C.1
gtactagatagatagaatgcgctactgtgggcccaagggggcccacccgcatgtgcgacaacatacgctgcattgtactgtctcctaagtctgatcgcgagaccatctagtgacaacgata

SEQ ID NO: 130166 - DNA, 269 bp, Zea mays
  Clone ID: MRT4577_50186C.1
cagggatgaaggcctccctgtctaaaatccctccttcatcccccgctggtggcagaatctgttaccagaggacagagcctttggctcttctaatcagagcgcaagctgggagcacaggcactgcaggagagaatgcccagtgaccagtcactgaccctgtgcagaacctcctggaagcgagctttgctgcgagagcgggtagctagcctgagagggaccctctaagtgacctcaaaggtgattgtgccaggctctgcgcctgccccaca

SEQ ID NO: 130167 - DNA, 186 bp, Zea mays
  Clone ID: MRT4577_50187C.1
tttattatttgctttgccctggacatgaacgccggcgatcctttactgcagttgctccgcatggtctggacgtagaccgctcgcgttaccgtgtcggggtcatgggaaaccagcgagcactcttctcacggattctgttccaggcgtgatagtcgagcccagtgaggaccagttgcctgcttgcga

SEQ ID NO: 130168 - DNA, 238 bp, Zea mays
  Clone ID: MRT4577_50188C.1
cttttaaaccgattagcaacatgctgagcacgttaagccaccaacagatggcgctaaaagatgacaccccattgtgctatattggcctttctgcatgaaacgttcccgatgccatgcatcactggtgctaccactcacgtataacttggaacagttctccgtacctataacgatgagtgtctgttgtttatgctaacgcaattgtttgaccctcttggttccacccggcaagaagctc

SEQ ID NO: 130169 - DNA, 1543 bp, Zea mays
  unsure (1)..(1543): unsure at all n locations
  Clone ID: MRT4577_50189C.1
ggtaccctcgcggtctggccggggtggtcttccgaagcctggccgccgccgccgtcactgttccagggtgctgcgggaactcaaatccctggccacgggcacggccgccactcagcagtacacaggagtagagtagtctggagtcaggacccaggagacgatgcaggacaatgacgcgcatagagaatgtacagtgcactacatatactaaggcatacgttcctttgagctctggcgcttactcaaggaaaaaaccaacttgccacaagtattgtgcatcggtggagcttacttggaaaccatgccgactagttggatatcgggattttcgactgaaagagctagcttgccaacaattggcccatggagtggatgaacaatatcctgtgaaaagtagcactgtggagcaaactcaggaccgccagccctgtctgccacaaggtgatgcttacttcgctggcctgtcgaagaaagaaatcgagagaaggcggaagattggcgctgccaacaaggggaaggttccctggacaaaaggcaggaaatggagtgaagagcacaagaaggtcatcaggcaacggactgctgaagctctgagagatcccaaggtgatgtcatatcaggaagaaaatgttagggcaccgtcagctacatagacaaacaagcaaagacaagataagtgcggcgctgaggacggtctgggagaggcggatcgtttctgtccgatccagacagaaggttctgcagatctggtccaacagtatagctgaagcagcaaagaacggtggtcacggccaagatatgcttggctgggacagctacgagaggatgaagtcagagatggtatctacgttcctgtggatcaaggagaggggacgtatggtgaagaagcttgaaagggccgtggcaaaaatagctgccaagaggcttcaagtggtacggagaagggaagaacaggccacaaggatgaagaagctgaaacctgacaagacgttgctgcaaaacgcggaccgtcaaccagcaagagtggtagtatctgcaaggccaaagcttaaggagaggctagctaagtggcacggtcgaaagaaagagctcgagacagtgataagttcacgggcaaggaaaagaggattgcgaaatccaccacgaaggcaaatggcagcagaaagcctcgaggctctgtcaacttcggctgcaggagcaccataggaaggatgggcatgtaccctagctactgagcagctgggagctcgtagtcgccttatagagaagcagaagcccatgcctaatgaccaattcattaggcaggcacggggttttttgtttgcgttgctgaaactacgtgtagtaatttttgttttatagccttattaggctttctgtcaaaggaacatgtttatgctccctccaatgaaactacgtgtaacatgatttatgggtacaaaaaataaatgtactagaaaaatacagttaaaaaacatttgaatcccactactcgtacggggggaaaaggggatatttttaaaaaaaaacaannnnnnngagg

SEQ ID NO: 130170 - DNA, 392 bp, Zea mays
  Clone ID: MRT4577_5018C.1
ggtgtgtggtggagggttaaaaaaaggacctaagggggcccctggggtccccccttccacccccagtccaaattttttacgaacaccccaccccacacttctggattttgtcccccccctttttttataactttttctaaaagcccgggggcggtgggggggggctttctacagccttcccagccgtttccccggctttggttcccggggggtttgccggggccgcggttaccggccctttgtttggggggacctcctggcccccgggggtttggggcccttgcggggggacaaccccggggggggcacccttccccggttttgccctgttttttgccagaacctttaaaaactggccgggggcggaaccgcccccgaccggtttgtggggg

SEQ ID NO: 130171 - DNA, 580 bp, Zea mays
  Clone ID: MRT4577_50190C.1
gccccactcatacacatcaccacaacctatgtgagaacgaccactagtaggcccaggccttaaacatgtgatttggcgtgagataggtggtggaacttttttaaccctagctgagttgaatccaggacatgagtgctactcaagccaccgtctcaactggaggccttttcgctgctggaatagatgtaaaaaaccaaatcctaaattatatttttgtgtttttggccaataaggcagctttcttgtattggtccatttggggcctaactcttccttcttaatataatgatgcgcagctcttctacccgttcgagaaaaaaaattatgtgacagttccctcaaatcaaaagtgggggccttgatttgagttttttttttgctggagttgctctgatagtaaatgattgctttgcatgaatctagtcgaatccatgcgtttgtcctccaaagctgatcacgggtctagttaacagtcatattgatgatcaaaagtttcatgggcagaatttggggaaaatgtttatattatttcaatcatttggtcataaattttactggtagtggaaaaatgatttattaa

SEQ ID NO: 130172 - DNA, 301 bp, Zea mays
  Clone ID: MRT4577_50191C.1
ggctaaaattgggtactttattcaaatgaagttacacaagaacggatctatgcccaatttgaaaggcaaaagcagaaccgaggggtagattttttgggtggaccttgctgcatcagaaaaataaacaaaagatgttggataaatgaccctttgtgcaaactatgcttggtccaataggaaacacccaagcttttatgcacaaactgtttttacaccagagaagtttggtaaatgatcctaccatggtttgacttaagacaattgcaaaatttagacatttcaagatcgatctacagatttt

SEQ ID NO: 130173 - DNA, 288 bp, Zea mays
  unsure (1)..(288): unsure at all n locations
  Clone ID: MRT4577_50192C.1
gagggggagggggcagagcaccnttnngtgggggggtggtggtgtgggaagagtgcccagcctgcggtgcatttagccccccccccaaaagcatgctaacagaggggggtgggggcgcgagggagncntngggggggggctccactgtgggggcagcttttgaagggcgccttttatttgggaaaaaaacaatctttttttacaagagccccctggccccgtaaacaaccttgaggggggcggaaggggaccgggggcctaatcctccgcatggattgggcccccatg

SEQ ID NO: 130174 - DNA, 170 bp, Zea mays
  Clone ID: MRT4577_50193C.1
acgtcgatgcacacatactaagctttgtattcggttttagccagtttacaccaccatccaaacggtgattgtgcaggtcttttggacgttctaccacaaccagtctggcgtgctgatccaggttaacaagtgtgagcgctctaggaccaaagacaacaaccttcacggta

SEQ ID NO: 130175 - DNA, 424 bp, Zea mays
  Clone ID: MRT4577_50194C.1
gaccgacgcgtccaaacacacctcacgtccaactcacacaacaaattgtcacgactcctcatccagctggaagaattcatcaccgcggctcatttgctcgaacaacccacaatcacacgggggtccgcagtcaagaccgatcagttaaggccacacactgaagtggatccattaacatccaccgcttatttacaccattagcattgtccaccagtcgccgatatctctcatattatccatgctgccatcttgacaccggatgagttgttgtcattctacgcgcacactgcgcccaacgcaggtatccgcatacaactgcaacaattgcctaaattcaggaaccgtacattcgaattttcatcaacattctcactgtataccatcaatgtgagttgcttcatttaaaatgcctaataattaaaat

SEQ ID NO: 130176 - DNA, 567 bp, Zea mays
  Clone ID: MRT4577_50195C.1
gcaatacataattttcagttaaagaatactcatttagcaagatgctggttcagattctgtggaaacaactgacaaagcatcattttctacacatgtagttcatcataaatcatcaaaaactaagggccagcttcagaaggatttgcttggtataaaaaggaaggctcttgtccttagaaggggagggaaaaacactgaagctgaggaggaacttgagaaggctaaggtgttggagcagcaacttgcagatatggaagaatcaaataacttgagtgctagtcaaggtgttactactgctggtggggacgaaatattgctagtgcatgcatctgaatctggtatgtcagtggttactctgtgtggttctccaagtaaaccgcagattgagacaaccaatcctaatcaaggtgatgtgggagaagaaagtagagttggaaggtctccagccttgtcgcagccagcttttactgatccgctgggatctgaaaaaggtcacattcaccttctcgaagtgctcaacaagacccatggatggtgtgggtgactccattactcctgctgtggaac

SEQ ID NO: 130177 - DNA, 3893 bp, Zea mays
  Clone ID: MRT4577_50196C.1
aattcggcacgagggcctactacccattcgcaaatcgcaacctcaaggttcgagaccttgactcgcggacgcgttttctgttcgccgagcgctgcagccgtcgagcgggagtgcgggccgcgttactgcgttagccgccccccgccgtcgcctgcctcagcggatccacgctcggcaggttactgacgccgcccgcctaacttccaccggtctggtggagtggtggggagatctatctgccttggatcgattattctctactacttggtagaagagagtttatccacacaggcagctatgttggaaaagattgggttgccgccgaagccgtccatgcgaggcgccacctgggtggtggacgcatcccactgtcagggttgttctgttcagttctcgttgtttactaggaagcaccattgccaaagatgtgggggcttgttctgcagcagctgcacccagcagaggatggttttacgtggacagggtgattcacctgttagaatttgtgatccttgcaaaaagcttgaggaagaagcacgccatgagttgagatatgggcacaaaaatagagctacaagagctaccacaaaatctgcttcgaaaccagaggatgaaattctaagtgaaattcttggaggtggagagcgtatccaatctctggattctttgcttcctgggagaaccacaagcagtgccagtacctccagacgaacttcttctaacctcagtacggacgcaaaaggagatgaaagcctttctgctgaagcacacaattatgaacttaacaataccgcatctattttcaccccagaggagttgcgccaacatgctgtagaagagaagaaaaggtacaaaactttaaaatcagaaggtaaaccagaggaagcactgcgggctttcaagcatggtaaagaacttgagaagcaagctgcagccctggaattagaattgagaaggactaggagaatggctacaaaagcgactaacatctcttctgctgttggtacttcgatgactgctggttctgatgaggttgaaacaaaaaggtcttcaactgggaaaaagattaagaaagaaaagaatgatcttgcctctgagctcagagatctaggctggtcagatgcagaccttcgtgatgaaacaaaggctgcccctatgagtctggagggagagttgacacagattcttagagaggtggcccctaaaccattggagggcaagagaacaggtggtatcgataaatctcaggttaatgctctgaagaggcaagctttactgctaaagcgggaaggtaggcttgctgaagcaaaggaagagctcaagaaggctaaaattttggaaaaacaacttgaggaacaggagattctaggtgaagcagaaaactcagatgatgatttggctgctattattcggaacatggacgacgataagaatgatgacatatttatagatgattcaaagttcccagctttcaactttgaacaaattatggttgcctctaatgatcttgccactgatggtcactttgacgttacagatgatgacatgaatgacccagatatggctgctgctctaaaatcatttggctggagtgaggaggatgacaaacagttggaaaatctcgaacctgtttcttcaaatcaagaggggctaaaggagcaagtactttctctaaaaagagaggctgttgcaaacagaaggtctggtaatgttgtagaagccatgtcattgcttaaaaaggcaaagctactagagaaggatctcaaaactgaagagccagactcaaaggttccttctctagaaaggcagaaaactacacatgcagaagatgccacttatgcagggacgaatgtccgacctataccaacaccaaaaagtaagcttgcaattcagcgagaactgttggctctgaagaagaaggcactagctttgaggagggaagggaaggtggatgagtctgaggaagagctgagaaagggtagtgttcttgaaaagcagcttgaagagcttgaaaattcttccaaaccacctgtagcaaaggaaaccaggagctttccatctaatcccccgtacaaagttgaacccccaaatatcaatcttgctgatgaggtatatgaacctgaggttacagacaaggatatgcaggatccagcattgctgtcggtgctgaaaaatatgggatgggaagatgctggttcagattctgtggaaacaactgacaaagcatcattttctgcacatgtagttcatcataaatcatcaaaaactaagggccagcttcagaaggaattgcttggtataaaaaggaaggctcttgccctcagaaggggagggaaaaacactgaagctgaggaggaacttgagaaggctaaggtgttggagcagcaacttgcagagatggaagaatcaaataacttgagtgctagtcaaggtgttactactgctggcggggacgaaatattgctagtgcatgcatctgaatctggtacgccagtggttactctgtgtggttctccaagtaaaccgcagattgagacaaccaatcctaatcaaggtgatgtgggagaagaaagtagagctggaaggtctccagccttgtcgcagccagcttttactgatccgttgggatctgaaaaagggtcacattcaccttctgtagtacatgatcgtaatgagcatcagaaaacacaaggagatgatactcttaaagatgagatattacttcataagagaaaagcagttgcctttaagagagaagggaagatggcagaagctagagaagaattgaaactggcaaaacaattagaaaagcaccttgaaggtgctcaacaagacaccatggatggtgtgggtgactccattactcctgctgtggaacagaacagtttggtccaacaacctgctagctccagcaatcacactgacgacataacttctccccctcctgcacaagcgagcaagcggacgcaacctcagaaagcaatgtccagccgggatcgtctcaaaatccagcgtgaatccctggctcataagcgcaacgccctcaagttgcggagagaaggaaagactgcagaagcagatgcagaatttgaactggccaaggagctagagagccaactggaagagtcagacaaccaaagctcgagctccgggggaaagtcaagtgaaccaaacgacacgagcgtcgagaatctccttgatcctcagatcatgtctgccctaagatccattggttggagtgacatggatttatccatgcaatcctctagtgcacaacctctgaaacctgtgcagtcctcaagttctcaacctccgcaaaaagtggaagccaagtcatctgttgccgcgaccagcaaacctcagagcgagagaagtcaacttgaagaacagatcaaggcggagaaactgaaagcgcttaacttgaagcgggaagggaaacaagcagaggccctggaggcccttcgctcggcaaagcgactggagaagaagttgaactcagcttaagccaatcacaccctcccagattgctcttgttcttttgtcaattgttcgttttggttacctgacatcccaagcgttccagctagaacagagaatcatatcgagtcctatggccctgattggcacagcttgtgagctttgagcaccataaacttatgtcctgtttgtgttcgagctatgagcagtccctttcatgtatgtataaataaaatctgatggacggagattattttcaaaaaaaaaaaaaaaaaaaaaaaaaaaaaaaaaaaaaaaaaaaaaaaaaaaaaaaaaaaaaaaaggaagaaaaaaaaaaaaaaaacaaaaaaaagggggggcccctttaaaggaaccaaattttcttacccgggcctggaaaggattaactttttttt

SEQ ID NO: 130178 - DNA, 264 bp, Zea mays
  Clone ID: MRT4577_50197C.1
ctcgattagtcggtctggtcaatgaataattgtgattagtcgactagtcggtcccatgggactaggtttgactatagtatttgtaattgtaaacattatgagtgtgaccatatgataaggctagtccagaagaattgtctgttatattctgaaatacatgaagcaactatttatgttgtaaacccaatttctttggtttgatataccttggtaattctatggtatttacttataaagttatggctcatatgtattgcactattt

SEQ ID NO: 130179 - DNA, 198 bp, Zea mays
  Clone ID: MRT4577_50198C.1
gtctaaccccccgctacaataaagggggtggtcactatgtgtgaaaggcggctctacttacctggtagcatagcatatattccacactaccactttaaaaaacacttgacacaccctacaactatatctaactgtgctgaaacaaggccgtactgaaacttgatccatacccacttaccggatttttttaagatagca

SEQ ID NO: 130180 - DNA, 535 bp, Zea mays
  Clone ID: MRT4577_50199C.1
agcagtggtaacaacgcagagtactttctttttttttttttttttttttttttttttgcttttttttttttttttttttttttttttttttttttttttttttttccttgaacgaggtaaattggtttttctccaaaaatgcaagacccacacatccaaccctgccagggcaaaaagcttaggtcccaaaaggccaaaaagcaccaaaccctgcaacggaaaaaaaagctttggggggccaacccgccggtgccatgtttccaatcagccccccccaacggtcaaaccggggggaagagatggcttaaacttgttggccttcctcccccccaagacccaaagcgggtccaaggccttggagcagcgcaccttgaacttgacaacatccttgctcccctggccccggcccctggcgcggtcccacgggttaagggcgaatttccggaatctccctccccctgccggccgcccgcgcctgcccttgagggcccccctccccccccttcggggccgtgccccccccgtcccccccccc

SEQ ID NO: 130181 - DNA, 306 bp, Zea mays
  Clone ID: MRT4577_5019C.1
ttaggcttttatctccaactccgaattgtctacgggggggttgctaaaatagtttgggcggatccaaaaaatgcacttatcagcacttttgctgtcgccatcactggagctataacaactccccttgatgtcatgaatacaagattgattgttcaaggacatgtgaaccaatacactgtaattgtaagctgtgctcagacaatcctaatagagtaatgtcctaaggcattcttgaagggcatttacccgcgagtgctgtggattgctatcttcgcgaccatcttctttggcatgctgtagaaaacc

SEQ ID NO: 130182 - DNA, 1342 bp, Zea mays
  unsure (1)..(1342): unsure at all n locations
  Clone ID: MRT4577_501C.1
aattcggcacgaggttcagtattcagagttagacaatcacacttttccaaaggtatccaatatacaaatgcattagcctatgtgcgagtaaatgatccagtatatatagtcagacacatgaaaaaagccactttaaaaatcataagatttagccttattataagatagtatggcttatctgcatcttccagtataaaaatcatgtcactttaaatcattgcattgcagttcattataggatacatttcatctagagccttattatggagacatgccactgctgaatgtttagcttcaagttgttctctagagccttatatggagactgactgtttggcctgcaaaacatttctctgcagttttaacaatatatttagcattcatggttagtgtacaaagttactactatacacttgtgaagtggaacttgatgatatcttcattttttgactttntgtgctttaggctcctcttcttggaatgactgcaagagttagatctgcacatgtatatctttgtttaattatcgtctccgtattgtaagattaatttgagcttccattctacttttgctccacatatgaaacattaaaagatactctaattatgctatttaactccaagggtggaggtggaatgggtgattataaccacctgcaggttgtgtacatatctttagtacatatccattatgctatttaactccgaaaggagacaatatgcatcagtttcaacaactttgttgtttccttttcatgctgtcttatgggatggcattttctgctcaatttgtctgttgctgatttcagtcgggtaatgttctttctgcacaatgacttttgcttgcaaagtcgagtttggcattatgctttgtgtagatgtatctgagaattgcatgactgcatacccttaacatgaaatttcattttttagagattagattagattagatatgtcgctgatggaagtccaactaatggcgaactgaagaccgccgaccttgtgtctacacccgcacattctgttgcatctatacctccttctacaccagcacttcatgttgctcctgcacttttgtctacccctgtcagatgctcatctctatttatcacgccaccatactgttcctcaggtatgcaagcaatttttatttttgatctttctccttgttagcttgattgatctttctccaatacttatttgtgggcttggttaatctaggttccatttagttgttgaattagttctaaaatcatagtggaaccaaaatagtgtgtggatatttgcaaacgagtttctcttgaagtcatggtgtgaggaaaaagttgattgactggcatga

SEQ ID NO: 130183 - DNA, 384 bp, Zea mays
  Clone ID: MRT4577_50200C.1
actatagaaagataatactgcaacaaaaaaggctagttaagttttagattttgtttcatgacatagatcatacaataggatgttcaggttggccatttttcatatataaaaaaggcacatgttaaattggccgcatacaaattgtaattgagggcacattttgattactgatagttctttcttttccttcttttttacttgaggttacgaagggtgcagggtgttctgcatgacagtatgtatttgctcattattatcaattcctctatattgagaaaatatgaaagaacatggaacttgaaactgttgtctggtggctgattttcattttctaaggctggtacatagctctattttgacttcatacaccaaggtttttaaaca

SEQ ID NO: 130184 - DNA, 608 bp, Zea mays
  Clone ID: MRT4577_50201C.1
aaaggcacctgtgttgctgtcaactatatccagtgttaggtgcaaagatgaggacctaatgctcaacaaatgctatacttataacaccctcagttattggtaacgccagttgtttagctatgcgtccgtatgagcacacttactgcaaatatatgcattcctgcttccaaatatacatgatgcaaaaaaagctaacttcacttattgctttgcacacataacattcccttagcctgaaaacttctaaacaactcatgaatttattatgatggtgaaaaggttaccctctgttagcttaaataaaattatcaccgagctctgctagatggctcatttcattggtccaatcattcatgtttcatatgtcatctacctaccatagtattgcgctgagctggttgcttggagaagttggatattatataataggatctactaagaaatcactgtcagggatgactaagaatagtgtcttacgtcttatgctggctggcttccattattttacacattatctcttctaggattcgtagtacctagagacctagtgggacatatactagcattcttgcaagcacttagtgagggctttgaattataatatgcac

SEQ ID NO: 130185 - DNA, 319 bp, Zea mays
  Clone ID: MRT4577_50202C.1
tgaggcgtcggctgctcgctcatagcggccagctggtgctgcaggaccctgacttggatgagatgagcaccaacgcccacgccttcaccatcatcaacatctgccccgttaaaacaagggggcggccgactccccggagggcgggggcacgcacttgaacgccggccaaaccttggacctgcaacatgacctgctagtaccaaccccctgcacgtgtgtgatcacctcactccgatgatcattgatctgatacagtatctatctgccttacaggcgactgctgaacaatcactagcctgcacgctgttggtgcaatcca

SEQ ID NO: 130186 - DNA, 255 bp, Zea mays
  Clone ID: MRT4577_50203C.1
tcctccacccacccctcccaccgcctccgcctctctctctctctttcgtttgttcgtctcggcttccggtcgccgattcttctctgcgcaaaagattcctaggaggtggagcccgtacctcgatataggcaacgctcgcatgcatggaaatagaaagatgatggaaaccgaacggagatgtagatggtgtcacagacctaattcaggatgctcagaggtgaatggttggggcgagttgacttaaactccatcatc

SEQ ID NO: 130187 - DNA, 2714 bp, Zea mays
  Clone ID: MRT4577_50204C.1
accctgcctgtcgccgaatacccgcgcgctgcaaaggcacaccaaagccaaggggccagttccgtccaagggcagcaccgtaaatccccggcgcacctttcgataaatgcgctcttgcttcggtgccttcgccctccgcaccacgcaaaccgagctcgagaacaccaccacgaacaagaaagaaacacggccgccgcgggtcggggcggggcttcttctccttttccaactcgctgcccgttgcgtgattccgccgcgtcgcgtcgcgtgtgcatttgcgcgcgcgcgcaggagccgccgctccgatcgccctgaaaaaggtgccaattgttactgattccagataggtgttcctgcgctggcactaactgcgccgcgaccttcctcagcaatcttatgctcatgtctcactctcaacagatggcggatagtaggaagcctcctggcctcaggttactcggaggcgccggctcactgagaacgtaccagacactagtcctggtcctcacgttcttggcatacacatgcttccacatgactcggaagatcccaagcatagtcaagagcgctctggacccgcagacgaaggtggggttctcgcactggggacggttgcactccagcagaaacgctctcaccaccggctgattgctcgcattgggtacctcgaggccggccgggatccgcaccacgcaaaccgagctcgagaacaccaccacgaacaagaaagaaacacggccgcggcggggcggggcggggcggcttctccttttccaactcgctgcccgttgcgtgattccgccgcgtcgcgtcgcgtgtgcatttgcgcgcgcgcgcaggagccgccgctccgatcgccctgaaaaaggtgccaattgttactgattccagataggtgttcctgcgctggcactaactgcgccgcgaccttcctcagcaatcttatgctcatgtctcactctcaacagatggcgaatagtaggaagcctcctggcctcaggttactcggaggcgccggctcactgagaacgtaccagacactagtcctggtcctcacgttcttggcatacacatgcttccacatgactcggaagatcccaagcatagtcaagagcgctctggacccgcagacgaaggtggggttctcgcactggggacggttgcacgccagcagaaacgctctcaccaccggctggctgccgttcaacaccgccgacggctccgcgctgctcggcgagatagacgtcgcgttcctcgccgcgtactccgtcgggatgttcttcgccggccacatcggcgaccgcatggatctgagggtcttcctgacggtcggcatggccggcaccgccgtgttcacgacgctcttcggcgctggatactggctgaacgtccacagcttctactatttcttggttattcagatggtttctggcctgtttcagtcagttggctggccttcggttgttgcggttgtcggcaactggttcgggaagagcaagagaggattgatcatggggatatggaacgcacacacctctgtcgggaatatagcaggctcgctgctcgccgcgttcctcctgaagttcgggtggggctggtcgtttgccgtccccagccttatcatggcgctcgttgggttgatggtgtatgttttcctgccggttagtcctgaggccatggagattgacagtgacggcggtgagcttaactgcgaggacgctgtgaaggagcctctcttggaaccaggccaagaagtgaaacatagtgcagtggggttcttagagcatcggtttcttcttcttgctgtggttctatattaactgtacgtgttcctgtgtttcagctatcggtggagattgtcggactccgcagccggggtgctgtcgacgctgttcgacgtgggcggcgtcgtgggcggcatcctcgcgggccacatctccgaccacctggacgcgcgggcgctgacggccgcgagcttcaccttctcggcgataccggcgctcttcttctaccgcgtctacgggaacgtctcgctggcctggaacatcgccctcatgttcgtcacggggatgctggtgaacggcccctacgcgctgatcacgacggccgtgtccgcggacctcggcacgcacagctcgctcaacggcaactcccgcgcgctggccaccgtcacggcgatcatcgacggcacggggtccatcggcgccgccgtcggcccgctcctcacgggctacatctccgccaggagctggagcgccgtgttcacgatgctgatggcgtcggcgctcgtcgcggggctgctgctgtccaggctcgtggcggcgtggtcgccagccggaggacgcccgcccgcccctgctgatagcgacctgcccgtgtcctccatggacgaaccgtagatcgcttctagctgcgccccggctgtggtctcctggtgacatggaatggtggcgggagagtagatcacctgtgattttaggcctggtgggactgtggcagcaggtgcgcagtgcgcttctgtcccggaactgtgggatcttgctcctaccgtgccgtgcttcaccgcttgtggttcgtcatggtatatactagtaaattgctcgcgccccggcgcgagtctttgatagatgtgtttgtacagttaaaatagcattgctttacacatataggaccatcaaatatatatagatatatacacataagaatggcagaat

SEQ ID NO: 130188 - DNA, 278 bp, Zea mays
  unsure (1)..(278): unsure at all n locations
  Clone ID: MRT4577_50205C.1
attaacaaaatatagaagttgaattaaaatggaacttgttcttacaataaaatcaagaagagagggaaactgaaaaggcaccacaaactgaggccagctaccccaagacaaacacgattagattgcactagtcaccacaagtatagatgaaaaaaagaagaaaaacaaaaagtatttagatgaaattgaaatgnntggagctgtcgacggtgtngaatgaacagtacnnntattggggagggtttgaaattgaattagtactgccagaaagggggggg

SEQ ID NO: 130189 - DNA, 2050 bp, Zea mays
  Clone ID: MRT4577_50206C.1
cccacgcgtccgctagttctagatcgtgtggcggccgctcgcgatctacaactagcacgttcttggcatacacatgcttacacatgactcggaagatcccaagcatagtcaagagcgctctggacccgcagacgaaggtggggttctcgcactggggacggcagcacgccagcagaaacgctctcaccaccggctggctgtcgttcaacaccgacgacggctccgcgctgaattcggcacctccgcctttctttccttcctccctcggggctccgcgcgcgcagcagccaggaacagctccgctgcctgctcccttggggaaaaaaaaaacttcaagaacagcggcggtcggctcttctccaatcctgcttcaaggctgcaccgaccggctctatttgagctatatctctgcaggaaagctcagttcagatccattcacttcactcatgggctcatcctcgggccatcagagaagcaaaacgcgcagcaggaacaggaagcccttgggaattcagctcttcgagcggctaccacgccaccaggaaaaccacgagcatcgtcaagagcgtcctcgacccaaagacgaagacgaacctaggcacgtcgtcggcgcattactggccccctagccacctcttctatctccagaacctcaaaggtgcggacagcaacagcacggctctctccagcggcggcggcggctgggctccgttcaacgcggcggaagacggcacggcgttgctgggcgagatcgacctggcgttcctcggcgcgtacgcggccggcatgttcttcgcgggccacctgggcgacagggtggacctgagggtcctcctcaccgtaggcatggtggggaccgggctcttcaccgccgccttcggcgcgggctactggctcgacgtgcacagcttctactacttcctggccgtgcagatggtggccggcctgttccagtcgtccgggtggccgtcggtggtggcggtggtcggcaactggttcgggaagagcaagagggggctcatcatgggggtgtggaacgcccacacctccgtggggaacatttccggctcgctggtcgccgctgccatgttgaggtacgggtggtgctggagctttgtggtgcccggtgtcgtcatcgcgctggtcgggctcgccgtgttcctgctctcgcctgttgcgcctgatgtgattggagtccaggaggatctctgtttgaaggacgctccattgcttgaacgacgacgcgcagatgtagaggaaaaggcggttgggtttattgaggcgtggaggatccctggtgttgcccctttcgccctctgccttttcttctgcaagcttgtggcgtatacgttcctgtactggcttcccttctatatcagccacacagctatcggtggagaatacttgtcggactccgcagccggggtactgtcgacgctgttcgacgtgggcggcgtcgtgggcggcatcctcgccggccacatctcgaccacctacgcccgggcgctgacggccgcgagcttcaccttctcggcgataccggcgctcttcttacgcgtctagacgtctcgctggcctggcatcgccctcatacgtcatgctgaacgctgatcgagcgacctgctgcccgtgtcctcctcctccatggacgaaccgtagatcgctttctagctgcgccccggctgtggtctcctggtgacccagaatggtggcgggaaagtagatcacctgtgattttaggcctggtgggactgtggcagcaggtgcgcagtgcgcttctgtcccggaactgtgggatcttgctcctgccgtgccgtgcttcaccgcttctggttcgtcatggtatacatgtatatggaatgtcttctggttgccgacgaaaaaaaaaaaaaaaaaaaaaaaacccaaaataaaaagtagtaaattgctcgcgccccggcgcgagtctttgatagatgtgtttgtccagttaaaatagcgttgctttacccatataggaccctccccatatatagatatatccccataaaaaaagcagaattatctgtcc

SEQ ID NO: 130190 - DNA, 1377 bp, Zea mays
  Clone ID: MRT4577_50207C.1
cattgggtacctcgaggccggccagaaagctggcctcctccgcctttctttccttcctccctcggggctccgcgcgcgcagcagccaggaacatctccgctgcctgcccccttcaagaacagcggcggtcggctcttctccaatcctgcttcaaggctgcaccgaccggctctatttgagctatatctctgcaggaaagctcagttcagatccattcacttcactcatgggctcatcctcgggccatcagagaagcaaaacgcgcagcaggaacaggaagcccttgggaattcagctcttggagcgggtccgtggcagtggcagccccatctccttcagatcatgccaggctctcgtgctagtgctcacgttcctatcctacgccagctaccacgccaccaggaaaaccacgagcgtcgtcaagagcgtcctcgacccaaagacgaagacgaacctaggcacgtcgtcggcgcattactggccccccagccacctcttctatctccataatctcaaagatgcggacaacagcagcgccggcggctctctctccagcggcggcggcggcggctgggttccgttcaacgaggcggaagacggcacggtggttgctgggcgagatcgacctggcgttcctcggcgcgtacctgttccagtcgtccgggtggccgtcggtggtcgcggtggtcggcaactggttcgggaagagcaagagggggctcatcatgggggtgtggaacgcccacacctccgtggggaacatttccggctcgctgatcgccgctgccatgttgaggtacgggtggtgctggagcttcgcggtgcccggtggcgtcatcgcgctggtcgggctcgccgtgttcctgctcttgcctgttgcgcctgatgtgattggagtccaggaccaggaggatctctgtttggaggacgatgagaagaagccgagcgacatggacgctccattgctgcaacgacgacgatcagatgtagaggaagaggcggttgggtttattgaggcgtggaggatccctggtgttgcccctttcgccctctgccttttcttctgcaagcttgtggcgtatacgttcctgtattggcttcccttctatatcagccacacagctatcggtggagaatacttgtcggactccgcagccggggtgctgtcgacgctgttcgacgtgggcggcgtcgtgggcggcatcctcgcgggccacatctccgaccacctggacgcgcgggcgctgacggccgcgagcttcaccttctcggcgataccggcgctcttcttctaccgcgtctacgggaacgtctcgctggcctggaacatcgccctcatgttcgtcacggggatgctggtgaacggcccctacgcgc

SEQ ID NO: 130191 - DNA, 3375 bp, Zea mays
  Clone ID: MRT4577_50208C.1
gggaccctgctccgtagccgaatacccgcgcgctgcaaaggcacaccaaagccaaggggccagttccgtccaagggcagcaccgtaaatccccggcgcacctttcgataaatgcgctcttgcttcggtgccttcgccctccgcaccacgcaaaccgagctcgagaacaccaccacgaacaagaaagaaacacggccgccgcgggtcggggcggcgcttcttctccttttccaactcgctgcccgttgcgtgattccgccgcgtcgcgtcgcgtgtgcatttgcgcgcgcgcgcaggagccgccgctccgatcgccctgaaaaaagtgccaattgttactgatttctgataggtgttcctgcgctggcactaactgcgccgcgaccttcctcagcaatcttatgctcatgtctcactctcaacagatggcggatagtaggaagcctcctggcctcaggttactcggaggcgacggctacctgagaacgtaccacacactagccctggtcctcaagttcttggcatacacatgctttccaaatgactcggaagaacccaaccatagtacaagagcgctctggaccccgaagaggaaggtggggttctcgcactggggaagggttgcactccaaccacaaacggctctcaccaccggcttgcattgggtacctcgaggccggccggacgttgctgtcgccaaaccgagctcgagaacaccaccacgaacaagaaagaaacacggccgcggcggggcggggcggggcttcttctccttttccaactcgctgcccgttgcgtgattccgccgcgtcgcgtcgcgtgtgcatttgcgcgcgcgcgcaggagccgccgctccgatcgccctgaaaaaggtgccaattgttactgattccagataggtgttcctgcgctggaactaactgcgccgcgaccttcttcagcaatcttatgctcatgtctcactctcaacagatggctaatagtaggaagcctcctggcctcaggttactcggaggcgccggctcactgacaacgtaccagacactagtcctggtcctcacgttcttggcatacacatgcttccacatgactcggaagatcccaagcatagtcaagagcgctctggacccgcagacgaaggtggggttctcgcactggggacggttgcacgccagcagaaacgctctcaccaccggctggctgccgttcaacaccgccgacggctccgcgctgcctcctccgcctttctttccttcctccctcggggctccgcgcgcgcagcagccaggaacatctccgctgcctgcccccttcaagaacagcggcggtcggctcttctccaatcctgcttcaaggctgcagtgctgcaccgaccggcaaccgctacggcaattagtttcgtaacctcgggtcgccgccggccttcttctggcctgagctatatctcgctgcaggaaagctcagttcggatccattcactcatgggctcatcctcaagccatcagagaagcaaaacgcgcagcaggaacaggaagcccttgggaattcagctcttggagcgggtccgtggcagccccatctccttcagatcatgccaggctctcgtgctagtgctcacgttcctatcctacgccagctaccacgccaccaggaaaaccacgagcgtcgtcaagagcgtcctcgacccaaagacgaagacgaacctaggcacgtcgtcggcgcattactggccccccagccacctcttctatctccataatctcaaagatgcggacaacaaccgtcgccgcggacctcggctccgcccgctcggccacctcggcgccaggagccggagcgccgtgttgacgatgctgatggcgtcgcggtcgtcgcggggctgctgctgtccggctcgtggcggcggaggtggtcgccaagatggagtcccggagacgcccgcccctgctgcgagcgacctgctccggtgcctcctcctccatggacggagcggggtactggcttaacgtccacagcttctactacttcttgggacttcagatggtgtcgggcctgttatcagtcggttggctggccttcggttgtcgcggttgtcggcaactggttcgggaagagcaagagaggattgatcatggggatatggaacgcacacacctcggtcgggaatatagcaggctcgctgctcgccgcgttcctcctgaagttcgggtggggctggtcgtttgccgtccccagccttatcatggcgctcgttgggttgatggtgtatgttttcctgccggttagtcctgaggccatggagattgacagtgacggcggtgagcttaactgcgagaaggacgctgtgaaggagcctctcttggaaccaggccaagaagtgaaacatagtgcagtggggttcttagaggcatggaggattcctggggttgcgccgtttgctctgtgcctcttcttctccaaactggtcgcgtataccttcctgtactggctacccttctacatcagccatacacgcatcggtggcgagtacctctccgacgccacggccgggagcctatcgacgatcttcgacgtcggcggcgtgttgggaggagtcctcgcgggccacatctccgaccgcctgaacgcgcgggcgatcacggccgcgagcttcacgtactgcgcgatacccgcgctcttcctgtaccgcgcgtacgggagcatgtcgatggcgtggaacgtctccctcatgttcgtcacggggatgttcgtgaacgggccctacgcgctgatcacgacggcggtgtcggccgacctcggcacgcacagctcgctcaacggcaactcccgggcgctggccaccgtgacggcgatcatcgacggcacggggtctatcggcgccgccgtcggcccgctcctcacgggctacatctccgccaggagctggagcgccgtgttcacgatgctgatggcgtcggcgctcgtcgcggggctgctgctgtccaggctcgtggcggcggaggtggtcgccaagatggagtcccggaggacgcccgcccctgctgatagcgacctgcccgtgtcctccatggacgaaccgtagatcgcttctagctgcgccccggctgtggtctcctggtgacatggaatggtggcgggagagtagatcacctgtgattttaggcctggtgggactgtgggagcaggtgcgcagtgcgcttctgtcccggaactgtgggatcttgctcctgccgtgccgtgcttcaccgcttctggttcgtcatggtatatatgtatatggaatgtcttctggttgccgacgaagatgaatgcggttggctcgaagatgaatgcggttggctactcacgctggaaaaaaaaaaaaaaaaggccccta

SEQ ID NO: 130192 - DNA, 123 bp, Zea mays
  Clone ID: MRT4577_50209C.1
caaaccgctcgagccccatccagcgagcttggcttacacccagggaaactagggcggtcttgttgattaacggaggaggaacaatggggccagtcgagcgatgactgagcagcagaagacatt

SEQ ID NO: 130193 - DNA, 584 bp, Zea mays
  Clone ID: MRT4577_5020C.1
tcgtagcggccgcccgggcaggttaaaaaaaaaaaaaaaaaaaaaaaacaaaaataaaaatatatttttttttatatattttttttaatatatatattaaatatttttttttttttttttttttttttttttttttttttttttttttttttttttttaaaatttttttttttttttttttgggcctccacccctttgggggggttttttgctttttttttagaggcccgattcccccctttattcattttaaggaaaccttctttgccccttattttaccacctttcaatttgggaaaccctttttttcccccacttttttgggaaaacccgggtgtcccctttattaattggctttaaaaccataccccttttcccaattggttttttaaaagaggggccccccctgaatgtggcttttgaaaactttttggaaccctaatttaaaataggccccccttttatttcccctttaaacccccgtttattttggttcccccctaaggccccttttttttttttttttccttttttccccgcccttttggattttttccccctttttccacaaaagggggggtttt

SEQ ID NO: 130194 - DNA, 376 bp, Zea mays
  Clone ID: MRT4577_50210C.1
ccttatacatcatctgtctggtacaaaacgccctgccccattcctaacatcggaacgtatgtatataaagggagcagacggatacgatctccgacataacccaggagattaaataaacgactgctgctaccatggacccggaagatccagactctcacccaccgaatcacataattttacaaaccaaatcctacgatcccatacatgcgcttgataatacatccactctaatgatacacctataatctcgagacaatttgctttgaactcacatctccttcactgctgacatgaagcttgacaccttgttacacccaggccaggcactgctgctttaccggatccacatggatgaagatgattcttggcaacaatg

SEQ ID NO: 130195 - DNA, 326 bp, Zea mays
  unsure (1)..(326): unsure at all n locations
  Clone ID: MRT4577_50211C.1
gaaactcttngattatccaatattgaggagggaggaaattctaaactgggctaaaaccgggggcgaccaagcgggaggggggaacgcatccttcttcaaacaactcactggcgccaatcaccagctcaacaccgcaggctgggacatatctatccacacgctctgcgtgtatgccgtcactgcacaagggcaccacgacggaggcataccggcaccaggtccggtacttcgcaggctctccagacatggactatattggtaaatgaactatgcacaagcattcgtccaaggagatgttttatgcgtctatcaaggacattgtccct

SEQ ID NO: 130196 - DNA, 282 bp, Zea mays
  Clone ID: MRT4577_50212C.1
gcccccaaaaaggaaccctaaatgccgtttgccaaagcacactgaacacatgaacaaaagagggtttgattcctaggaaaaggaacggtcattacagtgggcacaaacagaccccagttggcaataatccccttccttagggaatgaaaactaacattttttcttactggggccgccatggcagggctgctactttttttatgggggctcccagccagtttataccagctttttaagcccataacttgggggcccttaaaaaaacaaaccaccgtaattttt

SEQ ID NO: 130197 - DNA, 401 bp, Zea mays
  Clone ID: MRT4577_50213C.1
ccgtgatccacaacctcgcaagccaagatacaggacgagcgaccatgtcctcctccttcgactccatcacggccgtcgtaggagatgacgacgagctaccgccagccccgttcgacactgccgtcgacgggaccgcagcggagtacggcggcgagcagcagggcttcggcatgcgccgcggtcaccgttttgccgcgtcctactcgtccttcggcaccgccgtctcggaggacgatctgggcggcgccggcggagaaggcggcggcgggtacggaggcttcggcatcccgccgtactccaacggcggccccgcgtacgggtacgccgacaacgacgcgaacgggggggggcatgtcatgggcgccaagacgtgatggatggcgcggcgcacgcgcagggga

SEQ ID NO: 130198 - DNA, 182 bp, Zea mays
  Clone ID: MRT4577_50214C.1
agggcacaccaatgcttatctatatcacgaagaaaggtaacgggggatcacaacaaggtagaaacaagaaaaccatgaggaatgagattcacccctgcttctctgtgaggagaaaggagatatagatctcagatcatatttatcaaagcgccactgtaaacatataaggaaccttatatgct

SEQ ID NO: 130199 - DNA, 219 bp, Zea mays
  Clone ID: MRT4577_50215C.1
atggctcgatgtcgagcagttggccgactgtgcggggagaggcgcccggtcaagatacaggaggagcggcgaccccgcgagtacgaccgggagcacagctattccggatgggccaaggtgttggagaacaccttaagggatgaggaggagctccgtgccattcttggtgatagcatcggcaacatggagctcatgaggaaacggtggcgacacgtctga

SEQ ID NO: 130200 - DNA, 536 bp, Zea mays
  unsure (1)..(536): unsure at all n locations
  Clone ID: MRT4577_50216C.1
agcagtggtaacaacgcagagtactttttttttttttttttttttttttttttttattttttttttttttttttttttttttttttttttttttttttttttttttttttnnnnnnaaaaaganggttaaaaaaaaattaatggcccaatataaaaccaaacaagttttgaacccccccggaatccccgggaagaaataaaaaaaagggaagaaaaccagatggggaagaaagggggcccaaaggaatcccacgggaacccctccccccctaatacaaatggctgcccggggctgggaccccccccccccccaccgganccccccctaagcccatcaacccgtttgagacccccgcgtcccctgcggtgttcccccctgcttaagggcgaattttggaaatttccctcccactggccgcccctcnngcctgccttttgggggcccctttcgcccttttntggggngttttcccctcncctggcccccgttttccaccttcttgcctgggaaacccccgggggtcccccccttaatt

SEQ ID NO: 130201 - DNA, 397 bp, Zea mays
  Clone ID: MRT4577_50217C.1
gttctgctggtctttgatcatgactcgtggatgacgatctgaactctgacggtaccagggcacaagtttctttctgaaaaaaaaaattctcccattcgaactgtcttgtaaggctgagcaaaccatagtttctggactaactatgattgttacatgaattttattgccttcatgttagaacttagaatgcagcgtctatgaaacgactggtaatatgtggcctatcccatttcagaaacatttatgtaagttagtatgtgtcactttgaattaggagggtgaaatctgccatgataaccgaaaactgtaacccaagacaagagctttagtttgaagccagcaacaaaatcatagtaggatatgtgagatgtcatgcatttgactatgcctgacatct

SEQ ID NO: 130202 - DNA, 269 bp, Zea mays
  Clone ID: MRT4577_50218C.1
tacatcggccgggccggcgggctcgattacaaaactataaagcggcggccatcaatccggtaaacactaacctgtgtgaagacggaggagtcccaaatgacaccacctggttgaactgggtacaggccaccactcggtcatagctacgttgcttttttatcctgggggggggggggttgctctcattgcgacgccgctttcaccgcgtggtggcctgttgcccgttctccctggggcgggcttctgtggactcctctggcttcagactc

SEQ ID NO: 130203 - DNA, 385 bp, Zea mays
  Clone ID: MRT4577_50219C.1
cgcagtccggtccggcttcccgtcgcccagctcgtcccaccgcatcgaaaaggaacttccggcgagaagaaggtcagaaaggtggacatgcttgacgctgaccatcctcgtcgagaaggtcaaggacagcttatttgtggcaacgactcagttagtctctcgtccgctcctataaccaaaatgccatggagagaagaagattaggaagtttggtggatctatgtgagcgacagggggatcagagacaggggaacagagttcttatcgttgagttggattatcgttggttgcatttctcagggaacttgtatcggtaggatgtgttgtggaccatatctatcctacatttatcgatctgtaagaatatgaagctgttatcatttct

SEQ ID NO: 130204 - DNA, 370 bp, Zea mays
  Clone ID: MRT4577_5021C.1
agaaaaggtagtatattgagttggagcaataatgcttcatattattggcgtcttgcttaatcgatctgtccaaaaaattggattgtttgccacaactacaatacgcatcaaggtattgccttagaacaaaaagtaggtgttattattctggaagcttagggagataggtttatcaagatcaagcacatcttcacaatttgtaaattttctagaagctgaaatattttgagaatgtagatcaatgattcttggaataaaccagaatggatacaaattgatgtactgttctctgagtttggtcggttgttttacactgcatgcatgagatttatatttacagtgcatcatcattatcattgtactgagatcc

SEQ ID NO: 130205 - DNA, 136 bp, Zea mays
  Clone ID: MRT4577_50220C.1
ttctttttcggcgatctttttttttatctcttgacttgcctttccccaccttcctgagcacagacaaagacgataaggtgacgagctgtggaaaacgacagaggtggttttccagctactactagggaaaactact

SEQ ID NO: 130206 - DNA, 1703 bp, Zea mays
  Clone ID: MRT4577_50221C.1
tgctgacatttgcaaccttcttgagagcaaaaaggtctcaaagtctcttgagagtgactttagcaataaaatgaaccagctgttgctaatagttctgcaaaaacaaaggcaacaacagatgatggatggttttggaggatactatgatgaatgcatgtactggagacaaaatgatgaaattcatgatgctcataaggaggcatctgctccatgttcatcagctcctgtctcacatcttggtgctcatcagcaagagtgttggcagcactcttcatatggaagtcaacatcacgataaccaaaatttacttgaaatggaagtcagggtaaggggtgaaatgtcccagattcaacatgaaatatatgaactgcagaagttggtggaaagttgtattgcatcccaagtaaagatgcagcactccattaaagaagaggtgtgcagtgcacttcgtgaggcaggcttgatgccaaaccaacccgacacaacagcagcaaaagggggtaattgctgcattccggaaacaatgggtgatattgagaatcataataatccaattcaattcaatgaccgcccctggatagagtcccctaactcgtggagatcactatgtgttgtcacgcaatcagactgtcatgctctgtcacacaatgctgacatttgcaaccttcttgagagaaaaaaggtctcaaagtctcttgagagtgacttcagcaataaaatgaaccagctgttgctaacagctctgcaaaaacaaaggcaacaacggatgatggatgactttggaggatactatgatgaacgcatgtactggagacaaaatgatgaaattcgtgatgctgataaggaggcatctgctccatgttcattagcccctgtcgcacatcttggagctcatcagcaagagagttggcagcattcttcatttggaagtcaacatcaacaccacgataaccaaaatttacttgaaatggaagtcagggtaaggggtgaaatgtcccagattcatcaggaaatatatcaactgcggaagttggtggaaagttgcattgcatcccaagtaaagatgcagcactccattaaagaagaggtgtgcagtgcacttcgtgaggcaggcttgatgcgaagccaacccgacacagcagcagcaaaaaggggtaactgctgcatctgccatcgaatgcaagttgactctctactttacaggtgtgggcatgtgtgcacctgttttgactgcgccgatcagctgaaatcgagcggcatgagctgcccaatctgtcaatctcctattgatgatgttgttctggcgcggttgaatttttgagcttagaatttaggaaaggccaagagaaaaagagccggcactcccagatttagacgtggagtttgcgaagccctggttttgaggcggcttcttacctttttgcttaaccaccactaaagaaatacgagctagttcttggagaaaatgtaaatatgtttttttggcgcaagagcggtgtgcttgtatcgcactaaaggaaaacagagttctaattaaaatgctggttgtattccccgtatgtaccacatcacttgttcacggagagaatgtaatggttctggttctatttgcgcgataggtttgaactcacagcattgatactcttcactcaggcctatttgaacaaattcaacgccaactaataatatgtttggtttgagga

SEQ ID NO: 130207 - DNA, 2011 bp, Zea mays
  unsure (1)..(2011): unsure at all n locations
  Clone ID: MRT4577_50222C.1
aagaccccctaacattccagctcccgcgccgctctaccgtcgtcgcttgagctctctcgctggcggaccgcccccctcatccctgcggtcacgcgcgacctccatgacctccaccgctgcagaaggtgcaggaagcggtagcttgaaccctccgcattcgaaccctagcggcgatggcggccctaggatccggtcgccgccggggaaagggaataagcccgtcgctctcgccgacatcactaacactgggaagcccaacgccgccagatccatcaccgtccccgacctcgttaaggagaacaccaagttgctgactctgctcaacgagaagacaaagattattgacctcagcagggttgagatatacaagctccgtcttgccctgcaagcatcaaagcaacagaatctacaccttacacaaaccaattcgcagatgcttgcggaaataaacacagggaaagatcgaattaagatgctgcagcatgagctttcttgtacaacagcactgcttaaagtaaaggattcagagcttggcacgaggaaaactgagataaatgagctaccacaaaaaacagatctgaaggtatgggacacatttaataaccagttaaagattaaagatggaaccatttgcagatttaatctacttgtttcctataatgttattcaggagataccagaagcatgttccagtgaaactgaagttcagtctcataaaattggtgataaggccttcaacagtaaacaaaaccatttgacaggaagccaatcatctttgtcattcaataccgttgacacccccgagccaccagaagacaacactgtcaagcggtgctcaaaaaaacggtcatccatagaggatgtaaatgccaaactagacacgattaccagtgagccattgcgacatgaagaaaagagaaaatctcgaaggaaaatatctgcaagactgaattcagtatcttctgagcacacagatatcgttgttgagactgagcacaaagatgttattgtttctttggccggttccacttcaaatgtctcaatggagcagcggacaaatcaagagcaggatggtgattgtttctcaaggaaatccaatgaaaatcagatattagggaggaggtctctaagacgagctgctgaaaaggtcgtctcttacaaggagatgcccttgaatgttaagatgcgacgaccttaactgccaggaggatgaccatggtgacatgttgtagcttgctgtcctgactagccttaagcaggtatccttctgtttttttgtgtgctccagaatcagtgattgcttgcacatctcgttctacttcaaacgaaccaccaaacagtggcgaagctagagcaaacttgaaggttgtacaattgttttgtgggtgcatagacatcatgtgatcgttgtgtatgtaagatgaaagtttgttctttataattagttctgcactttttagactccaacagcgaactcgttaaatataggggttggtcagctcctttctcttttcaacaagagactgtaaaaagtctgtaatacctaaaattctattttaggaaatgtcttcctaaaaaagtgttccaaaccatttgacaggaagccaatcatctttgtcattcaataccgttgacacccccgagccaccagaagacaacactgtcaagcggtgctcaaaaaaacggtcatccatagaggatgtaaatgccaaactagacacgattaccagtgagccattgcgacaaaaaaaaaaaaaaaaaaaaaaaaaaaaaaaaaaaaaccaaaaaaaaaaaaaaaaaaaaaaaaaaaaaaaaaaaaaaaaaaaaaaaaaaaaaaaaaaaaaaaaaaaaaaaaaaaaaaaaaaaaaaaaaagggggggggcgtttttaggggggttnnaaggtttttattttttgntgtgtgtttggggtnntnttttaaaatttttttttttttttggggggggggtgntttttttttttttttttgaaagggtttgttgggtggggg

SEQ ID NO: 130208 - DNA, 273 bp, Zea mays
  Clone ID: MRT4577_50223C.1
aaaagctaaatataacatacgggtagatctaaatctaacatactaaaataactgcttggacgtttgtatataataactggttgaattaacccttggagatgctcgtttgcatataatacctccttgcgtattattcgttggagatgctcttaaacttttcgcacagccttccacaaaagtcgttgccgatatttcttcccaacgtaagcagtagcaattcaaagggttccaagccccgatgacctcgcgcccaaaaaccaatccaaataaaaa

SEQ ID NO: 130209 - DNA, 714 bp, Zea mays
  unsure (1)..(714): unsure at all n locations
  Clone ID: MRT4577_50224C.1
ggccggggtgcgatttcggagaagcggtgaatttcagccactctctagtttcgttctctctgtcttccgaaagtgaagtgcaggaccggaaaacacagcgatttggcagggtaaaaagctccaacagccacagccgtgatcattatatcctatctatctacgctccaggctttgaggtgggtattcgaccgccaagcgccaactgcttagctcactcgtacatcgccacatcggtgaagtggtgtcgtggtgaccatggcgcctggcctcctcgctgccgccgccgtgctggccggngtggcggcgtccctcgcggcccacgtcgcgctcaactgccccgtgcagccggggcgctgtacacggccacgagggacggctggctgcagcggatgatgcaccccaacaacggctcctgggagcggtggcgcttcgtcggcggcacgggcctgctcggggtcgcgccgtccgccgacggcaccatgctcgtctgcgacgccgacaaggggcttttgagggtcggtgacgagggagtgacccttcttgcttcggaggtcgagggctccccgatcaggttcgcggacgcggcgatcgaggcatccgacggcacggtctacttcagtgacgccagcaccaggttcggcttcgaccggtggttccaccacttcctagagttccactccaccggccgcctgctacagtacgacccgggcaggg

SEQ ID NO: 130210 - DNA, 560 bp, Zea mays
  Clone ID: MRT4577_50225C.1
ccgccggccaatgcttactcactcgtacatcgcccatcggtgaagtggtgtcgtggtgaccatgacgcctggcctcctcgccgccgccgccgccgccgtgctggtcgcggtggcggcgtcgctcgcggcccacgtcacgctcaactgccccgtgcagccggtgccgtcgcatcgcccgccgcccactccgccgcccaacaacctactccaggttaacgaaccgtcccgcgaaaacctttgatcgttcttgccattacgtttccgttcgcgcgcgcgtgcgtgagtgagtgacgctgggggcgtgcgtgcggaaacaaattaatttgttacgcgcgcgccgccgcgcgtgcagaggctggagaagctcggggaaggggcgctggacgcgccggaggacgtgtacgtggacgcggcggcgggcggggcgctgtacacggcaacgagggacggctggctgcagcggatgatgaacaacggctcctgggagcggtggcgcttcgtcggcggcacgggcctgctcggggtcgcgccgtccgccgacggcaccatgctcgtctgcg

SEQ ID NO: 130211 - DNA, 259 bp, Zea mays
  Clone ID: MRT4577_50226C.1
ctcgctggtcgacgcaagtctctatactgagtcgtattatccagtcgaggagctcgagggcaccaatcatagtcggcgtgaactccagcgtcgtcgggctcaagcccgccgcggcagtgccgcatgccgccgccgcctcatcgccggcgaagcgggtgcagctggccgctcccgacggccgccgcgccgctctgctcggcctggcggccgtcttctccgtcactggcacgacctggtctgccaacggcacgatcttcga

SEQ ID NO: 130212 - DNA, 1539 bp, Zea mays
  Clone ID: MRT4577_50227C.1
ggtaccctcgagggccggccgggagggaaaagcgcaccgccctagccgtgggcattatatcctatctatctacgctccaggctttgaggtgggtattcgaccgccaagcgccaactgcttagctcactcgtacatcgccacatcggtgaagtggtgtcgtggtgaccatggcgcctggcctcctcgctgccgccgccgtgctggccgcggtggcggcgtccctcgcggcccacgtcgcgctcaactgccccgtgcagccggtgccgtcgcatcgcccgccgcccactccgccgcccaacaacctactacagaggctggagaagctcggggaaggggcgctggacgcgccggaggacgtgtacgtggacgcggcggcgggcggggcgctgtacacggccacgagggacggctggctgcagcggatgatgcaccccaacaacggctcctgggagcggtggcgcttcgtcggcggcacgggccctgctcggggtcgcgccgtccgccgacggcaccatgctcgtctgcgacgccgacaaggggcttttgagggtcggtgacgagggagtgacccttcttgcttcggaggtcgagggctccccgatcaggttcgcggacgcggcgatcgaggcatccgacggcacggtctacttcagtgacgccagcaccaggttcggcttcgatttgtggttccacgacttcctagagttcagctccaccggccgcctgctccggtacgacccgcgcagcggcgagacgtccgtcgtgctcgaccgactcggcttcgccaacggcgttgcgctgccgagggacgaggccttcgtcgtcgtctgcgagaccatgaggttcaggtgcatcaaagtgtggctgaaaggggataaggccggcgaggcagagacgttcgtcgaccttccggggtggccggacaacatccgtctcgggtcagacggtcacttctggattgccgtcctccagctgaggtcgccatggctggacttcatcacccgctggaccttcacgaagagagtggtggcctcgttccccgcgctcagcgagtggagcaagggggcggcgaagggagccatggtcgctcaggtgtccgaggacggcaccatcctccgcgtgctcgacgactcccaggggaaggtgatcaacttcgtcacgtcggtgacggagttcaacggggacatcttcctcggcagcctcgcgaccaacttcgtcggcaaactatctctggcgcgggtggcacaggaacaggagcagggagcagtatcttcgtagacgtttgggttcttcatgtcagtttagccctgtttgtttatcctttatattatataatccagtttaaataagttaatatacaaacatacaaaacaggttattagatgtattatataatctagatacctagattatgataatacataaacagataattatgtgcttattatataatccataagctagattatataattttgaaaggaaaaaaaacccttaatcaagggaacatatacccatttgagttcttcatgtgagttt

SEQ ID NO: 130213 - DNA, 400 bp, Zea mays
  unsure (1)..(400): unsure at all n locations
  Clone ID: MRT4577_50228C.1
agtataacggctacgtcaacacaattcttcaattgcaaacaccactatgggtantgctgcagcatggatcattttgggagtatgtgtggtgcgaagccgtacactgatggtaggtattgtgctgctgtcaagattgccaccacactttgagtagctttgttcgagatccatcataactcacattggttcgttggttgttggctcctccttggattatggtattgaaccaatgttgcaagattgcttaggtgaattgtattgtggcttcatatctgccttaagatcaatgacatacatactgatgctgtctataccatggcagactaccttggttgttatcaaatcgtgattggagaaataggccttaccaatagggctcgcactggtggccttaggaaat

SEQ ID NO: 130214 - DNA, 396 bp, Zea mays
  unsure (1)..(396): unsure at all n locations
  Clone ID: MRT4577_50229C.1
gcggggaaatggaaaggaataatatatagggaaaaaggatgtttggaaaaaaaaaaaaaaaaaaaaaaaaaaaaaaaaaaaaaaaaaaaaaaaaaaaaaaaaaaattaaaaaaaaaaaaaaaaaaaaaaaaaaaaatttaaaaaaaaaaaaaaaaaaaaaaaaaaaagttcccttccctgccggccccccggccaagaacccggttttttccacaattccccccataaattacataaatggccatcaaacccccttttgtccaaccctttaggctacaaaaagcccttgggggaaactttttaaaacacccctttgcccaatacaaaaacaatccttggcacatttaaccttacaaaccattgnaacaaaattaaaaaaaaattttttcccccctt

SEQ ID NO: 130215 - DNA, 497 bp, Zea mays
  Clone ID: MRT4577_5022C.1
aaaaaaaaaacataatttgattaattgggggggggggcgccccagtttggccatttcacttggggggcaaggcaacagaaaaggcccctttggggcaaaacactacaaaaatgttttgttggtggtgcagcccccgggggaaatttacatttcgccaagacgggaaaaacggtttttttcctttcccccccgggggcaaggggtttaaaggaaaagattcccccctggtttcaaaatcttttctttggtaaaaactcccgcaaaggaagctgggtttccacaggcaaatagggaccccatagttcgcaatcttcgggggggggggggaaaaaacttttttttcctttttcacctgggagggtgggccaaatatttttgattgaaacccaaaagcctgggctctgggaagctgattgaaaatgcttttgaaacccaccggttgcttttaaatatcacttattggggtcaacccactttgaatggcacccccttcttcc

SEQ ID NO: 130216 - DNA, 1578 bp, Zea mays
  unsure (1)..(1578): unsure at all n locations
  Clone ID: MRT4577_50230C.1
cggccgggacgctggcacgctgcagtttagcgttcagcttcagcagcgccatgccattgcccagcgactctggttctggtgcgcgcgccatgtcgaagcagttcaaggtcctgcttcctacttccttccacaagcttcgcatctccgacgagctcgccggttgcttcgacgccggcgagggcgaaggggcgcccgagccgacggccctcgtggtcagtccgttcgggaaggtgtggcgtgtggaggtggtccgggacggccacggtgcgtcgctcgggcgcgggtgggcggagttcttggccgcgcacggcgtcggcatcggctggttcgtcgtgctccgttatgagggcggcggcgcgctcaccgtcaaggtgttcgacaccagcttgtgcattaaggagttcggcgctccggctgcagttatgccatccaaaagctgcaaaagtattttctgtaagccacaattcatcaggatttttcattcgaatctctcggaaaagatgatgttgcctgctaggtttgtgaaagattacgtcagtgaggcgcgtctaaacagccggatagccatcattttcagccccattgccaaattttggcgtgttgagcttaagaacgatcaatcaggcatcttcttcacaggtggctggtcacagtttctagacttccatggaataaaaaatggtgaagttttgctcttgaaatacgaagggaacatggttttcaaattcaaagcatttggacttagtggatgccagaaagatttcaagaaccagaatgctgggattcaactaaatactaaaaaacaacaggaaacacctcccatcaggaaacgtaaaagcaatgatgagaagtcaagcagtgaagaaaacaagaggctaaaaactccagtgacttctccatcaccttctgatccgtcactggaaaaaccctatcagattgggacatcatcttggataaagaaaaggatcaacacctatgcacttgagcaatttcttgcgttatcagtgaagttctgcaactcgattgggttccggatggcttgcacaatcacccttaagacagcaacgaacagcaccagatcatggcaggtgcgtggtactgcatacaagtggcatcgctacatcatcggagtgggctggaagagcttctgccaggataacagactcaaggcaggcgacctgtgcgccttcaacatcatcgagaccacgctgtggcatgttactatcacgcgctcagcattagcagcagatacttttaataagcaaaaaaagccaccttgttcatccagtagggacaagaagggcagttcaagcagagaaggagcaaagaggccgaaaccttccatggcacatttcagcaaggttcaggttccgccatcgtaccgcaagacgatgtgcctacgacgttggaccgccgccctggatacggaagcagatgaatgccagcacaataagaaatcgtctttgtctggcaccggncttctgcaatcagattgagttgcggcgacgctgcgagatcgtgctcaagacctcgatcaacagcatcattcttggcgggttggtggtctctcgcagaaga

SEQ ID NO: 130217 - DNA, 539 bp, Zea mays
  Clone ID: MRT4577_50231C.1
gcagccgaactgataatctccttcctaaatcattcgttattcagaaggcggcgcagactcgactactcgaggaattaaacacagttattaaaaaaactgctatacactgatgaaaattaacaaatttaaaaaaagtcaaagtacaggtggctaggtcctctacacgtatatatgtgattgattgtgatgtaactacgaggattgaggatgtctccgtttcacagcctgagatccaagtccatcttctggctctgctccgggctcggcggctcagcctgcgtcctcgtccggaagctccctggccacgtcgagctgaccggctcctcgcagagttgcgccggcgcccactgggcggcagccgtggcggagacgtcgccgtcgtggaacctgggggccgtgctcgtggtggcggcggcgagctcctggctggcgtccttgtggatggccgcgctggccgggctgacccgcagcgcggcgcgcaccagggcggcgtgcgcctcgagcggcaggcccgctatggccatccgctgcgcgtggtg

SEQ ID NO: 130218 - DNA, 322 bp, Zea mays
  Clone ID: MRT4577_50232C.1
gtcaagggtcttttgacaacattaccggggcgcgggggtgacatcacattcattacgatatcaaacgcacaactgccatgctaacttattcaccctaaacaagctgccggagtcaaagggaatgaccactactcgatggcaggcacacactcggagaggctggacatgtactatcacttgaaagccacatgatttgtctgccgcaacatatgagatgaaatagctttgaggaaatatactcccctcacataaaagagctatatcgttcagagcgctctaaacctaaccaacatccaaaaataactcctaatgagttgctatc

SEQ ID NO: 130219 - DNA, 364 bp, Zea mays
  Clone ID: MRT4577_50233C.1
caggacaccacccagggccagggccacatgtgctattttaacttcaacgacatcagggaagaatgattgacatggatgccgttgtgaccacgatcgacaactcccgccctgacaagaagctactgggcgacctccgcgtgggtgcgtagtacagatctggcatcggccctggtgtccactacatcgcactccctaggattccctccaggggagggagcgcacaccgagttgtgaaaaagctcggggtgctggacaccaacataacctgggtgaaccctagactgtggtttcaagacacgcaagctcacggaggttaagcccggcctgaccaacattgtttgggacagcaagcttatcctcaccc

SEQ ID NO: 130220 - DNA, 370 bp, Zea mays
  Clone ID: MRT4577_50234C.1
agcagtggtaacaacgcagagtacttttttttttttttttttttttttttttttttttttttttttggatttctcaactgtattctactcgcaaacagtttaaatatacatactcatgtgctgctgccgctgctaccgactagtcggttcatccactataggagtaataggactaggacctgtatatatatccacagactctagcgaacgttcttcactcccatcccatattcccatccggaaaacaaagcagcaccagcacaacagatcgatagcaagagctgccgctgcaactcctactgtttcttccggccgggcactaccggtcagaacaatggatacccgcgtactctgcgttgttaccactgct

SEQ ID NO: 130221 - DNA, 375 bp, Zea mays
  Clone ID: MRT4577_50235C.1
ctcccagaaggggtctgacggaaaaggcccaaactttttttccccacacctttttttaaaccaaaaacgggaaaaaaaaaaccattttccaagcaaccatgtctaaaccccccggggaccaaacccccggaaaagttttcccgggcacctttgttccgggcaccggggacacctcccggaagggcaaatccccggggggttttttcgggcgcggggggtttcggcacgggggttttcaaccccccctaaggggagtccctttgggtccccgccaaaagggggttcaccccggccgggcttacccttccttaagggggggcgtcctgggggccccccacgggaagggggaaacccccggggcgaaaattggggggg

SEQ ID NO: 130222 - DNA, 1418 bp, Zea mays
  Clone ID: MRT4577_50236C.1
ctgtcagtccggtggtgcaaacatctatagtaactacaatacgacgtcttcctctccgcagaggcgaccaatacatcatctattcatcttgctctcctctgtccaaaaaggaggcgccgcgctcctcttcttctacgccgttcactctctctctagtctctcccttcccttctccacgcttccgctcccactcgtgagactctacctagccctagcgccagcaccacccgcccaaactcccggagagagagagagagaggaggaggccttcgccgccgctgttaccgtcggccgaggcgccaggatgttcgggtaccagaagggcctcgacgtcgaggcggggacatccggagccgccgccactggcggcgcgcgccagctctacccggggatgcaggagagccccgagctgcgctgggcgctcatccgcaagatctacgtcattctctccctccagctgctcctcaccgccgtcgtcgccgcagtcgtcgtcaaggtccgcgccatcccgcacttcttcaccaccaccagcgccggcctcggcctctacatcttcctcatcatcctcccctttatcgtgctgtgcccgctgtacttctaccacgagaagcacccagtcaacctgatcctgctcggcctcttcaccgttgccatcagctttgctgtgggcatgacatgtgccttcaccagtggcaaggtcattctggagtctgcaattctgacaacagtggtcgtgctcagccttaccgcatacactttctgggccgtgaataggggcaaagacttcagcttcctgggtcctttcctgttcgccgccatcatagtgctgcttgtgttcgcactcatccagatcctgttcccactgggcaagctctcccagatgatctacggcgggctggcgtcgctcatcttcagcgggtacatcgtctacgacacaaacaacatcatcaggcgctacacgtacgaccagtacgtctgggccgcagtctccctgtacctggacgttatcaacctcttcctgtccctgatgaccctcttcagggcagccgactaggcgctctgctctcatcctgtctatctacgagtcggtgcctgaatgctcccgtggttaagctccggtacccagaattccagttccaagaatagagttgtatatagctacctgcgttgcctttctactagtatggtcttattcggcttggctcggttcgatcagagtcttgatacgtagttggatcgcgaacaaatgaacctgcatgggattatggagagccatctgctttatgatcctcatttgcctgcccaccacgttgtatcagctgaaagctgaaaacaacatgtgggctgttgtctgccaagaatagaattgtgaaccactggagaaccttataaaacgggccacctaccgcccgccctat

SEQ ID NO: 130223 - DNA, 602 bp, Zea mays
  Clone ID: MRT4577_50237C.1
attgggaccctccgagccggccgggccgggaccttccccgcacaccgggtgcgatccggcgacatcgcttcaagcagagaaccctaaccgccctcatggacggattgcagatctcccagacaatgatgctcacccgaccggaacggcgaacgcaacaaggacgggagcggacacataaaggacataccctgctccaactgcgccaagtggtgccccaaggataaagttatcaagcgcatcttgcagaggaacattgttgagcaggctgctgtgatagacgagagggaggcttgcgcgcatgatggatatggtcttcccaaattgtacacataggatcatcactgagtctcatgctgaatccatgcgcacattgctcgaggccgctctcacgagaacaggaagaaacgcgagtccccacaacgcttcacgcgacgggaggatggaccaaggtcagtacaggaaccagcgcgcccaactgctgctgccacaacagctccccctgctggcgctccgcgtacctaagttcaggaatgcgatgcccctcttagctctcacacctatgtgataatgccacttatccagttttgaaaaccaatgtactg

SEQ ID NO: 130224 - DNA, 339 bp, Zea mays
  Clone ID: MRT4577_50238C.1
gaccggccggaatcctgggcgacccacctctactcacacagacacaaagcggccgctgggagcctgagctgaccagcggaggcgcggaggagaagcagcagcgcaccggaggagggagagcgaaatgcgccgcgcgcgccgtgctcgcgccgccggtgcgcgccggcggcgccggccgccgcgagcgcactgacggcttctcccgaacggcaacttcgaggaaggcccgcccaagccggcgccggcgaacggcacggcggcgccgggcgcccacgccatcccgcggagggagacgcccggcctcgtggagcacatcgagccggggcacaagcaggggga

SEQ ID NO: 130225 - DNA, 522 bp, Zea mays
  Clone ID: MRT4577_50239C.1
aaagtaaaaaacaaacaaacaatgcagagactgatcagttgcaatgtacagaagaataaaatattaaattaaaaaactagctgatctaggcggggtgggacagctcaaaagaacaattatattattttataaacacgctacactaaactctaaccttgccctttatcaaattactgtacatgatgagcaacactgctgggctaccactacagtacatttgctaggccagggcagcacttgactttcccgtcgcctgttttcttggacaggtcatgtgaatagaacctaacctacatggcatcgaccttgcctaggtaaaatgtacccggctgcagtaggctcgggtctctgctctgctcgaattcctttgctccgcatcggagttccatcacattaagtgtatcaactaatttatcaggcaaagcctaatgtcatgactgaagctaatctgcgacatcacaaactgaaccaatgcttgataggctgagaggatgctgaccattgcttagcctaaatgaaaac

SEQ ID NO: 130226 - DNA, 423 bp, Zea mays
  Clone ID: MRT4577_5023C.1
cgtggaccctgacgcgaacaagcggcctaagatggggcatgtgatccacatgctcgaaatggacgacctccagttccgagataggtacagctccaagctaggtggaggaagggagcctcagcaagcgcgagcaccagcgtcggtacagatgagatgattgtcattagagagtagcgatattaaccatgttatttttttcccgtcagtaaatacattctttcccaactcgttccatcgattctcaatggtcttcgattgtattatatatgtggagcaaccatcattctgtgacgatacttgaatcacacacacacaaatgtagtggtaggatggtgctgtgtgacttaacatgcccaggccgaaaacctacagtttgtttacatggacgacagagaagagaagtcgccttcgttttcaacggct

SEQ ID NO: 130227 - DNA, 297 bp, Zea mays
  Clone ID: MRT4577_50240C.1
ctactaattttcagtgtccttaagggttctgtagtgttatcaaagcaaaaagaaaatgctgcataaaaataccaaacttcagcaactgttaatactcagatcatatacctcttaataaatagcatcttatgctaattagccctgctaaactatgtacgaggaaactgttcaagtattggatttgaaagtaagtgacttatgtttaacagaactaatgatgtattgaaacactgtattatgagaagctaaattatacatcattgtaactatgtagaaagtgtagactaatgtataatc

SEQ ID NO: 130228 - DNA, 207 bp, Zea mays
  unsure (1)..(207): unsure at all n locations
  Clone ID: MRT4577_50241C.1
gtcgcagctgcggacgactgaaccaccgacagacaacatggccgnctncgnctncaccgtcttcgggcttggcggggccttccttggcaggcggccggggttcttcaacagctttaccccgggcaacccggtgttggcgaggaaccccctgttgaggaaggaccttgagagggatgggagggtcacctgcatgaccttttcccggga

SEQ ID NO: 130229 - DNA, 341 bp, Zea mays
  Clone ID: MRT4577_50242C.1
agctcttttttatttttgtttttcctctgtttttatttttttttttttttttttgaattttttcttttttttatatcttaagagggcaccacctttgaggggttgttggtagaacgctgccgggttctgtcaacgcggggtgcaagaatggaagcggggcgggcagttgtaagagggtgccaccgttacagcgcaccgtgctgatataactgacacaactgtggggggccccccaggaaccagggacaacaccaggtagcaggctgcatggcaccaaaaaaagaaggacgttatcagcattgacaccccacagctgccagtatattaaaagtcaaacactg

SEQ ID NO: 130230 - DNA, 450 bp, Zea mays
  Clone ID: MRT4577_50243C.1
cttctcctctctttcttctctctccgagcaagggaagggaagagggaaaaaaaaaaaactcgcaaagctcacgcgcacacggcagaacccaatcgcagcccacgccccctgacccgaccggatcgagcctcggccgagggcatgggcggagcaggcgacggcgagggggccgggagcgagtccccgccctcgggcgcgcgggcgacgctcaacatccggtgcgccaacggcgccaagttcaccctgcaggcggacctgggcgagacggtcggggcgttcaaggaggtcgtggccgggagctgcgacgtgccggcgccgcagcagcgcctgatctacaagggccggatcctcaaggacgagcaaaccctaaaaagctacggtgttgagacagatcacaccattcacttggagcgaggagttgcccaaccagcagcatcaggagcacctgct

SEQ ID NO: 130231 - DNA, 152 bp, Zea mays
  Clone ID: MRT4577_50244C.1
gaataaccgggtcgaccgacgcattcgtacttgagaaagtagaaatttgaactcccataccaaccaacagattacgctcatttttccggcgcaaatgttcaaccacccaaccttaacggcctaacatcctcccgctaaagcacgcccccaac

SEQ ID NO: 130232 - DNA, 292 bp, Zea mays
  Clone ID: MRT4577_50245C.1
gttaatgtgtatttttgtaatgacggggaccaaccgggcgaagagaatgtaacttaagtgctataataccctgtccatcggaacataaaacaccacaaccgggcgcaaactgggccaaggaacctatagggggacaacgggacacggggccaactagaacagggtaagggcggcaacctcggattttgtttgggcacgagataggcgcttccacatgcaagcagttgctgctgctgtcatagctgcccacttggaaggagaggacgcgcccctgcagtttaatgtggcgtga

SEQ ID NO: 130233 - DNA, 400 bp, Zea mays
  Clone ID: MRT4577_50246C.1
cgggaccatagcggggttttttttgtttataaatttggttacataccctttgaagtaaattcgtgattcaaccccatcacttgtatcttcaccgggggaaaaaagtttttttaaatgggaaaaaacctcgttacaaaacatggggaaaaaaaacctggggaaaacccccaaaccaaggccagggcttgggggggatacgcccccattttattaaaaaaaactttaacaaaaaaaggggccacaaatactgtacccggaaaccaaagggccccccggggaaaaaaatatatctcgcccccgccaaaaaaattaggaacctcccaaaggaaacccggggggggtgggagaacccctaaaacggggccccccaggaacagaaaaaaccccgccctcgggggtt

SEQ ID NO: 130234 - DNA, 357 bp, Zea mays
  Clone ID: MRT4577_50247C.1
cggacgcgtgcgcagacatgcacacagacgcttggacgtcgcacgggccctgcacacatgcacacctagcgtcggctccaatggcgcactaccagtaggtggactactgctcgcacgctgtgacgtcgtgggactgggccgccttcggccgccactgatgcagcctccaacactacttgatcacggacaaggtataggacgcagactcgatctgacgcacctggtgcaaccaccaacactactaccatgtgtcaccacagcagcacacctatacgtaggcgctccagatcaaggtcgaagaggacatcaacacctcggccggcaaggtccaggagcgcaaggagagcttgctcgcca

SEQ ID NO: 130235 - DNA, 207 bp, Zea mays
  Clone ID: MRT4577_50248C.1
ctagctattcggctcgagcccatctcaagtacttgttgaaccccaagatcaaggaggccatcacgcgggaagttcaccgagtacctgcggcgcgccgaggagatccgggccgtcctcgacgagggcggcgcggtgccgggggccatcggatgagacgtagtcgtcctcacgcgcaggaagaccaagggccaggacggctacggtggc

SEQ ID NO: 130236 - DNA, 384 bp, Zea mays
  Clone ID: MRT4577_50249C.1
cagcggcttttcctttattttctttttaatgaagagcacggggatgcatcgggaagatcaaggggaggccccgggtccacgcatgcaaaatcatgcatagccacgggacaggtatcataaagggcacatctgttatcaagaagtcaaaccatatttgccatcgggggaacccgtataaaaattgacgggccaaccgttccatgcttgtgatgtgataagatcagactgcttgtggtctgacggtcgttgcttcctaccgaaccaccaggcccaaagttgagagatggattcgagcacagtaggcgatgacggttcatacagtcacagagcgacaaacacatagggaagggcataaatggtgaggaagtctgcaacaaggtacca

SEQ ID NO: 130237 - DNA, 385 bp, Zea mays
  Clone ID: MRT4577_5024C.1
ccccgcacacacgctcgcgggacgcattgatgagcaaataccgatcagccctttgccgacaaaaaaagggggcacaggaaatcaacggccacggccattacaccagggacgaccctatccgtcatgcaaaaccgcgctgttcagtgacgagctggcaccggcatactaactagccctaaaccacacacacccaggagccgggactcatgcgacacccgccgaaccgaatacgtgaccaaagtgacccaggacatcgtgggccccaaggagaggctggagtgcaagcacttcggcaccggcaagcttgagcgctccatcgacggggtgaccgacgggaacggcacgtacacgatcgagcttaaggacaggcaacaggaggacatct

SEQ ID NO: 130238 - DNA, 450 bp, Zea mays
  unsure (1)..(450): unsure at all n locations
  Clone ID: MRT4577_50250C.1
ccggccggggtgattgccgcgtccgccaatggcgccggcgcccggggccgcgaggaccgggacgagacctcgcggcgcgctatctcaccattgtcgaactacgtgtaccgccggcgggcagcgcccgccggccttgtcatgtgctcgccgcccgcgtgcgcacgccggtcgtctctcttcacagcgcgctcgctgcctgcgcgcaggggcggacccancaggggggttcgggtgggccctggcacaccctaagccaggcccatcggagaccccacccgttcgtccgtcgagcgctgaaggcagtttcaaccaggggcggacccacaggggggtccgggtgggccctggcacaccctaagccagggccatcggagaccccacccgntcgtccgtcgagcgctgaaggcagtttcaacttcccgatccttcagcttccagtttctagaacca

SEQ ID NO: 130239 - DNA, 224 bp, Zea mays
  Clone ID: MRT4577_50251C.1
agaagagaaacttaagattttttttggtaattttgacgcacacactggaaaaaagtaacttacatgatacaccaaaatagtcgggcgccccaatgaattagcaacgacaggtacttattggcgacgacgatttacatgtatgcatgtatggggcgcagccccaactcgttttacttgttttttttgggggttttgatgaccaaaaaaaaggggagggcgacaac

SEQ ID NO: 130240 - DNA, 227 bp, Zea mays
  Clone ID: MRT4577_50252C.1
cccacacctcagattctcaccaatatagctaggttcagttctttttatgcgctgacagtatttgtgaattgtcctagattcatgatgcttagctcttagctgagtgtatgacatgctaacaatttatcttgatctgtcagaattcgatacaaaggaggcttgtgagcgtgcatatttcaaggtcagtacctcagattaccatgtggatgtgtatttacagtggtaca

SEQ ID NO: 130241 - DNA, 1298 bp, Zea mays
  Clone ID: MRT4577_50253C.1
aagaccggtacccaattctcttcgattcggaacatgttcatggtttacttcaagtttgaccaagagcaatccgcccgctgctcttattgtaaatgtaaagacgattcaaaacgacacacacaaatcagaacttttgttcccaaatcctctgattcactcattcattcagtgaccggattgatcttcatggcgtccatgatgttctttccttggagcttactagacagcaccaggcggacgtagtcctcgacgccaatgctcctgtacctcgctggctcatcaccatcgaccatcgtctcctcaagcggcgcgtaagtgtcgccgaacctggcggagtggaaggctgcgacggacacccggtggtgggtggggctaaccagcgcccggtgctcgatgctcttgtacctgccgttggtgagcacctcgacgacgtcgccgacgttggccaccagcgctccggggatggggtcgacgctgatccacgcgccgcgcctcctgatctgcagccccgggacggcgctgacctggagcagcagcgtgaggccggcggcgtccgagtgcggcgacaggcccagcaccctgcccctgccgtgcgggcacgccgggtagtagttgacgcgcacggcctgcgcgtcggcgaccctggccagcctcgcggcgtccgccacgcccaggttcgcggccatggacgccagcaggcgggcggccacgcgctgcacctcggcagagtagcgcgccagcgagtccccgaacgtggccgggcgcgccggccagaagcgcggggcccggtactcgggcggctgcgtggacaggaaaagcatgtcggcccagtccagcttctggtcctcggagaccacgaaggcctgcccgtacccctcgatcccgccgggctcctgcgccaccgcgcgcttgtcggcgagcgggaggcggaagaaggcctgcaggtctgccttcacgtccgcgaccaccgcgtcgggcaccccgtggttgatcacctggaagaagccccactcctcgcaggccgccttcagtttggcggactcctcgtctccgtgcgacgacgggtccaggagcctcgcgaggtcaactaccggcaccgaggaggccgcgtcgccgttggcgtctgcgccgtcgacgtcgtcgcggaggtagcggcttagcacgggcggcgtgagttcgtcgccggggcgcgcggccaggtcctgcacgttgggcaccggcagcgagccgcccaggttgcgcggcttggcgtccatatgggagttggtggtgttggaactggaactggatatggtccc

SEQ ID NO: 130242 - DNA, 475 bp, Zea mays
  Clone ID: MRT4577_50254C.1
ccggccgctcgtccccagcagctgctcgctcatgccatctccgtcttccttccatcgcgccgcacgccccgacgcctgctgcaccgcgtctgcacttccgctggccaccgcgcacagaagttccgatcccgactcgaactcgacgactctcagtcccagttcctctcgtccaagaccgcaacctgccaacctccaagaccccggccgccgtgggctttgccccgccgtcacgcctgggattttggcacatattcctgctccgaccaatttcgcacctcgctgtccatggagccgtttgtcacaagttcgcacgcccagcttcctgttttccctcttccttccgcgctcagacatcgccggtgaacactacagaaaattggttaaagaacgtggataaaaaatttaatgtaatcagccgtcaaacttaccgtaagaatatagtttactgacgaaaaaaaaaaaaaaaaaagcggcc

SEQ ID NO: 130243 - DNA, 145 bp, Zea mays
  Clone ID: MRT4577_50255C.1
cccacgcgtgcgtccacgcgtgcacccacgcgttcgaccacgcgtgcggcgagcgccggggttggggttattatgttattttagctgggacttacttagtcaaccttatagtatggttaaagtgttcacattacacgtttggcaa

SEQ ID NO: 130244 - DNA, 3138 bp, Zea mays
  Clone ID: MRT4577_50256C.1
aaacaatggaaaagcaatagtagcattcagtactaaaaagtgtcctctaacaaaacatccaagcacattaaccatgcgttcagagcatgcaatgtttttctatttggcaatgtttttctcaggagcaaccgacgaagaggggcgacttgaggaatcaggagcaacattcacgtcagccactatgtcatcaggaacaaccacgccaggtctcctcatcaagatccgtcccgcgtgaatagttttatccatagctttatcgcgctgggccctcagggtagcagaagtttcttcagcaaccttgacagccaaccgagcgttttctagctcctgagcgacggatttcttggaagcacgcagatccttgatgacagcatctttggtcgacaccaactgcctgaggcgaatcacatcgtccaaggattcttgcagcttataacgatgattgtctaactcctccctggtgaagtgatgactcctctccaagatggacaacgaattgctggcgtcgcggtatagcttgtcaaggttgtcacgagaagtagcgagggcacacttttcttccttttcagagttgagttgagcatggagagtagagttcagcgtgttaacatcattcaaagaagcagaaacccgggccagttcagtctgaccttgagaatatttttcttcaagatcagagcaccgccgggccagttcagtctgaccttgagaatatttttcttcaagatcagagtactgccgagccatatcggcatttgccacctccaaatcagatacacgccgctgaagcagcactggattccaacgcgccagagacaaagccccttctgggacagaggcgccctgcaacttcagccgactagacatctcatcgaccaacgcctggaggttggagaagaatgagggaacccccaagtcgtgagaggtcaactgatggctcggcgaaggatcaccgaccggaacaactcgcaacgaatcagcaggaaccaattcagtgtcatcagcagaagccagaactctgtcatcaggtgcgctggcctctaaagcaactccttgaccgaaggcttgggctaccgccatgcaaccagagtgtggaggagaagaccctacgtgaacatccatggaagtgtgggagggagaacccactcggacaccctcgggggctgggtcacagctcgcgctacccattcgagccggatcatctccggcaacacccttgggggctgggtcacagctcgtgctacccatccgagccggatcatctccggcaacaccctcgggggctgggtaagcgttagcgccatccatgggggccgagttctctgcaacagccacctctaaggctgaaggaccctcagtcacttccatgggagcaatgcaatccagaccagcctcttgaccctcaagaccgcgctctaaggtcgatgaggcgcgagacgctgcccgggatgaccccaacccggcatcgagcacatcagcacaaacaaccatcgcgtcaccatctgccggctctgacaacagatcttctggaaccatgtcttcaagagtttgatcaaagttcgccagagacaattcttgcagaccaatgagggcagacaaagcaggagaaggaacaccgctactttccccactagctatgtaacgtcggctgttcttccgaattacagggatttcatcatcttcttcatcatcttcatcaacaacacggacatcacacccattggggtcagcagcagtcgggtcacacccattggggtcagcctcagtaaattcaggcactggcacttcctcagcaacaggaacagaaggaccggcaccccgatccaagctagacactcgatgaagacgtctcttcttcttcttctgcccctcagcaggagaagtgggttggtcggctcggcgagaacatttcgggcgaacatcgtcagacctctgagcgtccaaagctttgccggcctcaaggatgggtgccaccaccagtgtttcagcaagagcggcatcagaagaatcctcagctaacatatccagcatggcacttatctctacgtcacttggattcaacgacacctcaaaatgaacctgcctctcgtcgtcaggaatttctccgagcgaggcaaccaaagcactaacttctttgggagagggtcgcactctaaggcccaaaccgctatcaccagcaggaggatttgacacgaaactggtaaaggcctgggaaggaggtagattccaggccgagtatgcaacaggagcgccgatgttcgacaccttgcctctgagtatcatctcgagtcggctcaccaagtccacaacaggaattcttctgttggttacccgggttgaatcagccaagcctcggtacagataggccggatacgctctgtctttcaacggctgaatgttcttgaaaacaaagtcagcaaccacagcttctgcagtcagacccctttctttcaacaatccaacctcagctagcagagcccctgcctcagccacctcctggtctgtgggggattcggtccagctcggagtgcggacatccggctgtctccctgaccgtggggggagggaattcccatgattctccacgatgaaccattccaggcgccatcccttgatgctatccttgagtgggatgtcgaggtagtcagtcttcctcccacggcgcatctccaagctcgtgccccccaccagctggtgctgccctccggccatcccaggccgacagtggtacaaatacttccaaaggccaaagtgcggcaagacaccaagaaaggcttcgcataaatgaacaaagacagaaacttgaagaatggaattggggttcagatgggtcagattcaagcgatagaaatcaaggagaccacggaagaaaggagaaatgggaagagcaagtccgcggataagaaaaggaatgtaaatgatggattcgtggttgtcttctgttggaacagtgaccccacggcagatccaccataaacagagctccttcggaggaagaactccgatggaaacaagatgaagaaggtcggatttagagacaacagacatatggttacctgcgaaaggcaactgagtgttgggatcgatggggggaatgattgcgacagacgaactcgaagctttccgcttgggcgccat

SEQ ID NO: 130245 - DNA, 1292 bp, Zea mays
  Clone ID: MRT4577_50257C.1
caaaaccatcacactacatttacttctacaaatgtagacactgttgaattctaaacaatgggaaaacaatagtagcattcaatactaaaaggtgtcctctaacaaaacatccgagcacattaaccacgtgttcaaagcatgcaatgttttctatttggcaatgttcttctcaggagcaaccgacgaagaggggcgacttgaggaatcgggagcggcgttcacatctgccattatatcatcaggaacaaccacactaggtctcctcatcaggatccgccccgtgcgaatagctttatccatagctttatcgcgctgggccctcagagtagcagaagtctcttcagcaaccttgacagccaaccgagcggtttctagctcctgggcgacggatttcttggaagcacacagatccttgatgacaacatctttggttgacaccaactgcctgaggcgaatcacatcgtccaatgattcttgcagcttataacgatgattatctaactcctccctggtgaagcgatgactcctctccaagatggtcaatgagttgctggcgtcacggtatagcttatcaaggttgtcacgagaagtagcaagggcacgtttttcttccttttcagagttgagctgagcatggagagtagagttcagcgtgttaacatcgttcagagaagcagaaacccgggccagttcagtctgaccttgagaatatttttcttcaagatcagagcaccgccgggccagttcagtctgaccttgagaatatttttcttcaagatcagagtactgctgagccatatcggcatttgccacctccaaatcagatacacgccgctgaagcggcactggattccaatgcgccagagacaaagctccttctggaacagaggcaccctgcaacctcagccgactagacatctcatcaaccaacacctttgtttatagatgagttagtctcaggcccgcagatgctaaagtagagacgagaccctgcctgagactccaaaggtggtgttgtcttctcttcagggacttccacttcttcttcgcgttctgagatgattatggaacaagcttcatataggccagcaactccctagaatgttctggctatggtgggtaaagaattgtgagcatggtcaccactggcacttgattctctggacagagcagacttggtggctgtgggagagggtcatcactagcagggatacaagaaccccaacacccatgcagtggtatgcgagtagagctcgaggtagagagcccggccggcctcgaggtacccaatg

SEQ ID NO: 130246 - DNA, 329 bp, Zea mays
  Clone ID: MRT4577_50258C.1
tcctccatatcgcgttcctacgaagaagaaggacaagcaccttctcgatcggctcatcgtccgctgggaacgctcttctctttgcagcagtagggctccttctattctatgtacattgcgaggtcatagagactgacatgattgactgcccgaggacgccttagctcccccgatagagagaagatacatgagagatgtgatccatgccactacttaggcctcaagtaccattgtattaacatgcagctagaatgtagcactgaacaagggaaggcctgggaagtgatcacggaaggtgcctgatcgtgcaattacatagaacgtgggag

SEQ ID NO: 130247 - DNA, 446 bp, Zea mays
  Clone ID: MRT4577_50259C.1
gtccctatcatgtgaagcctatagctggctttgacaacccacaacgcactgaaaccatctggaccgctgcactcagctacatagtaccgtcgatagttacaggaacttcgcggtgcgaaaaggtgtacccgatcctaatcgctacgcacatgggcacgatcaagaacttggtcaacgggatgggaaggatcagcaggattgtggactcggtggaactgactagcgaggaggtaaatctctgtgagtcgactactacacgatcgtaaccgcaggtcacctgacctcaaggtccatgatctacaccgtccagcgtcatggggaggacagtgacatagagctcagagacaccatgaccctggttttcagggacaagacagacactgaactgaccatcatgaacccagagtaaataagctgatcgagagccttgttgtgactatgttaga

SEQ ID NO: 130248 - DNA, 499 bp, Zea mays
  Clone ID: MRT4577_5025C.1
accacaactagaatgacactgattacgcgctggcaaagcacgcatatggagtaatgatattacattccttcccctcctgaactagcatgcctctactataaactaagagcgacggtacacataccacctactcactgacgggggtcaactaaaacggacggcacacctatcactcactacctaccatacgcaaactcaaacgtctgtgacaccatcacaacatgaacaacaacacgcaagcgcatgtatatatccacaccgaccaattaacaaccgctacctactggccatccatctttccctatatagaggcggatgataccgtgctctaatcatggacatcactcgtacccgggggaaaagttgatcctccaccattccaaaaagcatacgaccctgccctataaagccaaaatgctgccgtgcctaaagactctgctaaacaacattactgggcctgccctcactgtccactatcacgacgacgacacctgtcacc

SEQ ID NO: 130249 - DNA, 272 bp, Zea mays
  Clone ID: MRT4577_50260C.1
aaaaaatagaaaaaaaaaaaaataaaaaaaataaacaaaaaaaaaatacaaaacaatataaaggggcgatcatactatagtgcttagtctaactctagtttcacttgcactcttatttacccccaacaaatgttagtgggcctcccagttacattgcgtatgatttcttggggccccccgctggggttaccctttttttttatcccctctctgctcacttcttttttgggcgtttgtttccccctagttaatggtaactcccccggcttttc

SEQ ID NO: 130250 - DNA, 651 bp, Zea mays
  Clone ID: MRT4577_50261C.1
atccgacggcgccgacataccatatcatcacatacgagccacgcgtcctctcgcagtcgccgcaatcggacagcaccttcttcatgatcaagcctgacggagtccagaggggactcattggtgagatcatcagccgttttgagaaaaagggcttctacctcaaagccttgaagcttgtgaacgtggacaggtcgtttgctgagatgcactacgacgatctcagctccaaagccttcttccaagggctcgtggactacatcatctctaggacctgtgcagctcatgggtcgtgtggagggcaatgagcgtcggtacacttgctgtcccctacgatcgttgtggccatcatgcaccctgtcttctgagcccgtctccatccgtgtcgactttgatgtcgacattgtcaggaatgatattcatggaactgacatcattgccagtgatattaaggacattgccctgcgcgtccctgacggccctgttgattggcacagcagccaccacccctgcatctacgacaactagacttggtaagtctcacatcgaaccttcgagagcctgaggaagcatgtcacgatttgcgctctattgatgttttcaagaagagtatgcatctggatcttgaaacctgatatctatgtgccagatttc

SEQ ID NO: 130251 - DNA, 255 bp, Zea mays
  Clone ID: MRT4577_50262C.1
agggaccattatttataaatatttttatcatttctaatttaaaaaccttaaaaagtctaccccaaaactcttaccctttaaacaaccaaccacctttcttttcaaagacaagaaacataatacctttaaagtcccaacacacatccttaaattaaaaattgccaacctatttcttagttaacacccaaatacctactattacattccggtaacatggtcaatcacacaaatatttcaacacttacaaaactaacc

SEQ ID NO: 130252 - DNA, 361 bp, Zea mays
  Clone ID: MRT4577_50263C.1
aattcggcacgaggggtagcgctgccacaaccctcagaccgtatccgcgactggcatcactcccgcgcctactgccagcggctaaagatggatggcagtctacttcgccaagctggagccaatgcaccatgtgagcctggaatcggtttatacggcaaggagccaaggacctgtacgaaccaaactgagggacaccaaagatggaaagtcgatgacacaggttccttgcacagttctatcgacccgatctgccgatgcccctaaaattgcatccacaaaaagagcggaagctgtgacacacatcataaactaccagggcatcctgctgtgggaacaggtaccacagaccacgaagggaaag

SEQ ID NO: 130253 - DNA, 341 bp, Zea mays
  Clone ID: MRT4577_50264C.1
cgccagtcaaggagcggccggccttgtcgagtccatctacgccacgctcccgctggcgcaggcagacctcgtgctctccaacaagctccacctcggccagttcgtccacgtggaccgccgcgctggagaccgggctgaagaagagcaaggcgtcttccatgggggacgggcggaagcaaagcagctgctgttgcccgcagtcgttgatgctgcgggtgatcaactgggtggagatggagcagagcagcggcgacagcagcggcaggaagactgcccacccaagagctgcggccgttgcgcggaagctcagaatcaaggccaaaaacccctcctgatgcgct

SEQ ID NO: 130254 - DNA, 493 bp, Zea mays
  Clone ID: MRT4577_50265C.1
aatcggttttttttttttttttttagcaagacaagaagattgtactatatgtttagcgttgttgtccgtcatgatttcgacaaaaaagtacgagcaggtgttgtgtgtcagcaatcaaccttctaatataaacagagtaggtggcgagatatacggaggtggagagtgtgcacctccatacgtcagcgtccatataaaaggcaagtgcacgtcaattgatgaatctgcaagcttttcacaaagcactggtgtgcagggccatacgactgccggattcggcgtaatttactggttcgggcctcgggggatggcttcaaccggagcagctccaccgcgctctaaaatttcacctgcatatagacacaatctaaatttgttcctctctctctcgctacattgaatcgagctagcctaggaatgacatgcagccaaaatttaatacgccttacctgaaataaaaagaacatagaggcagcagcatcagtggcagtgc

SEQ ID NO: 130255 - DNA, 1854 bp, Zea mays
  unsure (1)..(1854): unsure at all n locations
  Clone ID: MRT4577_50266C.1
ccccagtcaccgagcaaggtctccgacgcgtcgcactccatctacgccacgctcccgctggcgcaggcagacctcgtgctacaagcccagctccacctcggccagttcgtccacgtggaccgccttgacccggcctcccccgtccccgtcatcgtcggcgccaggccgcgcggaagcaaagcaccgctcgtcgtcggcacgcccgacccggcagcgagggccaagcccgccgcgccgcgcagggggtcctggggccccgagcagaatgccgncatcaagcctaccacgctcaacttcgacgccgagaggacgacgccggtcaaggagcggccggccttgtcgactccggtcaaggaccgcgctggtggcgcgacgcctgccagggagcgcggggctgcggcgacgcctggtagggagcggaccgccgcggcgtcgccggcgctgagctctgcgtcgttgaggaagagcagcagcgtgctgcccaggctgaccaggagcaagagctttgtcgcggacagggatcagcagcatcccaggatccccaagagcccattccccactgagaagagctcggtgagctgcacagcctcgagggcgacgaggagggtggccaaggaggaagagccctcctcgcctccttctgatgatgagctcggaagctcggccacatccaccaagaagcgatcggcgacagctgctcgcgtgccagtgccggggaagctcagtctactcgggaaggacgcaatggagcagagagagcaggcgcagaaggttgccctggaggcactgcgcaacgcatcagccaccgacaacgtggctaggatctacaagttgttctcggaagtgagcaagacggcgaggccggaagcgccggccacctgttttgacagcttcctcagctttcaccaagaggccgtgcaggccgtcaccgacattgaggcgatccaggcggccacctcgatggccgcggccgtggcgagtgacgagcagcagctcgaagatgcgccgccggtcctgcaggagatagcacagaacaggacggtggtgcgtcggagaggcatcggcttggggagcgtgtccaagtcagtgtcgttcgcgcccggcacgttggacccgaagcaggacgatggaggcggcaaggccatccggagctcgagtgccagcaggaagtgcctcgccacggacaagatcggcgaagacggtggcgacgagaagagatcatcttcttctggtccttcctctgccaccaccaccactgcgcactctgctctaggctcctcgctgaagctggctaagaagatacaggccgaagcagggagctggttcatggacttcttggaggccgcgctcgagaccgggctgaagaagagcaaggcgtcttccatgggggacgggcggaagcaaagcagctgctgttgcccgcagtcgttgatgctgcgggtgatcaactgggtggagatggaacagagcggcggcgacagcagcggcaggaagactgcccacccaagagctgcggccgttgcgcggaagctcagaatcaaggccaaaaacccctcctgatgcgctgctgccctctgattcttgtgagaagctagtttgtctctgattctctagttctagcgatgtgacaaaggtacccagatagaatccgtagaataagaaagtgattgcctccattgttcttgtcacggcatagcagattgtttcaagtgttcttgaagtaggatgacctgttcccttatcactaatcttaaacagcactacagcagcagaacaatggaggtgttgtaccgtagttacgatattcagtgtttgaattcgctgccaaaaaaaaaaaaaaaaaaaaacacacgc

SEQ ID NO: 130256 - DNA, 217 bp, Zea mays
  Clone ID: MRT4577_50267C.1
caagttcggagattcatcgcaagcgtcgtagtactgactcgacgtgatgagggaaagcgtggtacgccgtgcaggtgaccggtccggtaattgcccggggtgcgacccgacgctgtccgagcggacgcgtggggcccacgcgtccgcccacgcgtccgcccacgcgtccgccgccgtgcaggagcggagtctgcgccggttctctgtccggcgtccg

SEQ ID NO: 130257 - DNA, 295 bp, Zea mays
  Clone ID: MRT4577_50268C.1
cctcctttttttttttgggggttttttaagatttttttggaagaaaccaaccgagcccaacctgtccaccgtagacaaggacgctcggtccaaaaaggtggaaccaaaaacggccccccccacggggacgcccccactgcacgcgagacactgtccccaagaggaacccaccacggccataaagagcgcggccctaacaacctaacaaaaaagcaggcggcgaacatttcaccaataacgaacggaccgtctgtcctaggaagcaccttcagggggtccctgggcgcacggccca

SEQ ID NO: 130258 - DNA, 119 bp, Zea mays
  unsure (1)..(119): unsure at all n locations
  Clone ID: MRT4577_50269C.1
cttaataaccctcanaatncgggtgttggtcttttgcagggaggggggttaaaaacaggttcagcagctctcgaagaaaacgaagaaaggccccaagggggagcttggaactggaacaa

SEQ ID NO: 130259 - DNA, 2055 bp, Zea mays
  Clone ID: MRT4577_5026C.1
tctgcacacctctcctccgtccgcccctctcatcagtcgcatgcatatgtaagccgcaagcccgcagcagcaccacaggcacacgaagccgccgcagcaggaggaggcaggggaatcccaagcggaagggtctcctcgctctcctatctccgttccatcagctgcggcgggcggcgatgggggcgcggaggaggctgctggcggacacgccgccggagcatcgccacaggcagggcgcgccggcgtcggactggagcgcggggtacctcaacgggtggctgtcgcagccgacgcccatcttcggcctccgcctctgggttctcatcggcatcgccgtcggcgccgccatcgtgctcgtgctcctcctcatcttcgtctgcctctcccgccgccgccgccgccgccgcctcgccgccaacccctactaccccgccgacaccaagctgctcaagaagcacctgcagcagcaggccacgcccacgcccacgcccaccaaggacatccaggagatcgtccgccgccagcaggagcccgcggtgcagctcgccaaggccgtgccgcagccgcagccgcagccgcagactccgccgccgccgccgcctccgcagcacaggccaccggcgcggaagacgcccggcagcggcgtgtcggccacgactagcggcgggagcgagcgggacggcgccacgcctaggagcaccggcagcggcgcgggggtgccggaggtctcgcacctcgggtggggccactggttcacgctccgtgagctggaggaggccaccggcgggctcgccgaggagaatgtgatcggcgagggcgggtacgggatcgtgtacaagggcaccttgcacgactccactttggtcgccgtcaagaacctgctcaataatagggggcaggccgagaaggagttcaaggtggaggtggaagcaatcggtcgtgttcggcacaaaaatctcgtcaggttgctcggctactgcgtagagggtgcttacaggatgcttgtgtacgagtatgtggacaatggtaatcttgaccagtggcttcatggtgatgttggagaagtaagcccactaacatgggacgtcaggatgaacattatgcttggaaccgctaaagggttggcttatctccacgaggggctggaaccgaaggtggtccaccgcgacatcaaggctagcaacatccttcttgaccagcagtggaacgccaaagtatcggatttcgggctcgcaaagctgttgtgctcggagagaagctacgttacgacccgtgtcatgggaaccttcggttacgtggcgcctgagtacgccagcaccggcatgctgaacgagaggagcgatgtgtatagcttcggcgtgctgataatggagatcatcaccggcagatgtcctgtggattacacaagggcggctggagaggtgcagctggtggagtggctcaagaacatggtggccgagaggaaagcggaggaggtagtggacagtaagatggccgagaggcctcctcccaagacgctgaagcgggcgctcctggtggcgctccgctgcgtggaccctgacgcgaacaagcggcctaagatggggcatgtgatccacatgctcgaaatggacgatctccagttccgagacgataagaggcccggggccgggagagatggtcgtcgtccccagggtccggataggtacagctccaagctaggtggaggaagggagcctcagcaagcgcgagcaccagcgtcggtacagatgagatgattgtcattagagagtagcgatattaaccatgttatttttttcccgtcagtaaatacattctttcccgaaaaaaaaaaaaaaaactcaatggtcttcgattgtattatatatatagatgaaacccacatacagtcacaatgacacgcgagtgtaggggaaaagataggcatgatgttgtgactgactaacatgcccaggccaggccaaaaccctgcagattttcaatgcaaggaatccagcaaacgcgagtatagtacggggtttttttctcgggggctaaaaaaaaaaaaaaaaaaaa

SEQ ID NO: 130260 - DNA, 437 bp, Zea mays
  Clone ID: MRT4577_50270C.1
ggggggggggggggggcaatcagggggggggggtgggggggggggggtgggggctctgactaatctctcgatacggccgatctattcatatggccggcagcacacagcatacatatagttggcctacgccacaaaggctaggctaggctaggctaggctggtacacctccctcgcgcgcgcgagggcgatgagagcgatactatccttgtgcgtcaagttaatgtttccgagtagaaagcgctcgactgtcgcaaccgtcgtcttcctctggaggatcgtacggcctcctcctcctcctcactggccttcctcgtcctggtggtggcttcctcactggcgattgcattagttccaccagttctaccaattacgacctctgtattactgctacttttcgtcttagtcttggcagcaccagccccggcgtccttcgtat

SEQ ID NO: 130261 - DNA, 609 bp, Zea mays
  Clone ID: MRT4577_50271C.1
agataagtaccattcaatatctcataaaaagtattgtcaaatacctcatacataagtgtactctaaatccaaactaaaatagtaactgcaaaaacttggccatcaaatgtttgtgctaacattgagcctaactaagtatatatttatttaagtctccacacttgccgccaccaaaatttgacttcaattccatcgtttccacacattaagactgttcctgaaattttttgcattgaagtaactaatcacaatcccaaagttcattcgtgcaactccaagaagactcggcatcttcatcttcaatgagttgagaaacggtagctcgctgcaggtaccatgctgtaaggaccacaacatcatgctgatttaccgaaaagcccaaatggaatagagaaaattcattgtatattaatcctctgtagattgaaaaaaccgccatcaccataattacataacgcccaccaaacatcatctccattatgtctccaagtttctgtgataaaaaaggatgtaatggcagctttattgtgaacaaaactaagttctctcatatcccagatacttaagtaaaaagcttttggggaatacagctaaacgatccaactccaa

SEQ ID NO: 130262 - DNA, 622 bp, Zea mays
  Clone ID: MRT4577_50272C.1
ggccggggctgttcatttgtcctgcagcacgagcgcgacgactctcattccctttactcgaccaactttaccgcagagtctctctcctctctgccttctctctgcgatgtatctcgcgccaacaggccgaggggccagatgataaaagaaccctgcacgctgtttgccagaccgcatcccgttgccgtactactcggagatggacgacatcgagctcgacgaggtccagttccacgtgcacaaaataccaccagctccaggagcgcatgtggaaactaaacctacacagtattactcgtggcccagtataacgacgccgtttgcctgcacatgaactctgctgtcaccttctttcgtcttttgatatgccactgctgtttgtgcgtggtgaaaagtttaataaagccatatttcactgcaacaacatcgtatggattcggtgaaccaggagctgccacactatactagaacaggctcgatgtactcacactgcatctacctgtcgatatcttgtacaaggaaggctcgctgcgggacttcactcttcctcgcttcattacattgactgcatctgtgcggcgctactatgagtataaagacctactggttgataacatggaac

SEQ ID NO: 130263 - DNA, 538 bp, Zea mays
  Clone ID: MRT4577_50273C.1
aggagaggaaatgtactttgtttaaccttacccactccaactttgcggggggattggaccatcactacaaccctggaacacagcaatgcacgtgccatccgtgaattatgcctcgctgcgacgggtgaccgcccactgaccacacccggccatttggatacccacccgccacacatgcctacgaggggcgcagtcctgcatacaacggccacactttaccatcaacacctggctggtgaccactaactatattaccctgtgacatagggagctgacccattattgtgaccgtccagggcctggaccagcccctctatattgtactgactacggccaccatgtggagatacgctgccatcatatggttctttttagcctcctcactgtccttgtggtacttgccgaacacgaacgtgtagttgaagcaacctatacgccatggacacgtcgacctatccgtccaagaacttagccatgtcagctacattctctctgcccatggacacccgtcatgtaccaccacatcgggctatagccc

SEQ ID NO: 130264 - DNA, 411 bp, Zea mays
  Clone ID: MRT4577_50274C.1
ccggccgggacaccaccaaaaaaccgccctagcttgctcctcgattcatcaattgcaagaggagcaagataccaccactgtagcaccacatgcaggtacgaagaaggcgacgaacatggcgaggctggccttggtagcggtgctggctctgtgcctcctgctacctcccccacctcggcgcctccttcgatcccatcacatgccgcacccccgctttctcggaggcatggtcctcggcgtgctctgtcactgtgaagcataccatcctcattcccctggtcgacttccttgtcggacaactcaactttacaggtccttgcgagggccacgtggccatccagtaggatgtcaatctgctggcctccaccgacctaagccgctacaaggaccctgtccattggatcaacattc

SEQ ID NO: 130265 - DNA, 492 bp, Zea mays
  Clone ID: MRT4577_50275C.1
gtctgtgtatactgtgtaaaggtcctaaaggaatgagaagatgctcatattcaaagccaaaaatgggaaaaattaggataataaaataaaataaaaaatatataaaaaaaaaaataataataaataccaatgtgattttttgttatggggcttgggggggtgagagtaaaattattaattagagaggggggtccttttattggggttctattttctttcctgttttttggggcatatatttttttttttcgttgtccttaattcattttgcggggggtttgtttttggtgtcgtttttgtggaaaggggggtgtttcctggttttttcggtgtgtgggaattttgctttttacaggtgggttttatgacttaaggggtggctggggtgtttggttttgttattgggggtgattctcttggggggtagggggcgggctttttgggggtatttaaagtggggggggtgggggtttttctcatgaggatggggtt

SEQ ID NO: 130266 - DNA, 413 bp, Zea mays
  Clone ID: MRT4577_50276C.1
tcccacccgcccgctggagccacatttttttttaaatccaaaaacaattggatttggactattggctctggccaacacatgacagaagcaatctttggagaccccgttgtgtggctgatgggggttccacatcgggataaacggaatacacagttagcagagctcttaggggtgagttctcttaaagcaggtcaaatttactctaccccttgggttttcggtggaggctacctgagacatataattcaagacattgcagtctctggaaatattttaggacttacagctccaggttcattctttattgacaatatccagcttgctaccgtgcatgttaccaaccttcactgggtaatctcatcggtgtattcaagacaaattcagacagtagcatcattgtgggggcttttcag

SEQ ID NO: 130267 - DNA, 475 bp, Zea mays
  unsure (1)..(475): unsure at all n locations
  Clone ID: MRT4577_50277C.1
gggggggggggggggtttttaaaaaaaaatttgggggggttttttttttttttttttttttttttttagggcagaaacaaaattacctggctgggctaaaattggttaaaaaacagttgtgggtcccccacccatatccaattaatttcgtgggggggggggggggaaacaaacaaccaacacaaacaantttcattcctaaaggggaaaccctancttcaacttcaacaggggccctggcccccaccaggtcaccccttgcgtactccctggccccctccttttcgaccatctttatcaccaagttttggggggccccaaccagccccaaccggatctccttaatgcacttatcaacgagggctacccgtttctcaacgggcatttcccggcgggacaatttgtcccttaaagacaggcagaaataccatccctacccaaaaacccccctttggatctttggccagggcccaat

SEQ ID NO: 130268 - DNA, 438 bp, Zea mays
  Clone ID: MRT4577_50278C.1
cccgacatcgtcctcagacaccttagccgtcatttgtgaggtagcccgctgcgagaccatgctcacctgcccattgtgggtcaagtaaagactaggtgcatacacgtgagataaccgtcacgttccataagggactccaatgatgcactcgtttattaagatcaggccccattgctatcatggagatctggatgtttgcacagatgggaatgtgaacctctgacatcaagattgatgtggaaactcaactcgcgcatctgtcagcagtggtatccgtaatgggtacacctgtgtccgcagtaatatcgctcgctggaggaacgagtgccggagacgactctgaagagctttactatgttggtagcgctgctgagatcacccccagaatgactgaatggtttggtcaccaatgactgtgatgacgtcaactataactgc

SEQ ID NO: 130269 - DNA, 565 bp, Zea mays
  Clone ID: MRT4577_50279C.1
atcttctagcatacaaccctagctcctgtatctctatctctcacgtagatcattggatatatcacctagactgaattgatgaccctatggaccgcttggtctcttccaggatgccttgttcatcgccctcacgtctttcacatacgcctcatcctgcgccaaccatgttgagccaactaccgtctagcgccaccacaaccgcatctcctccaagccaaacggcccgaacggaacgacaacaaaggtcgaggatacagaggtagtgcctaagaacgagtgctatgaggtagacctcgatctataccagaatgctccaaagatgcaagattacccatacctgatagttgcgacgcacaatgtacctcatgcatgtgtgcatgtcaccacccagaactacatggacgacactgatgactccaaccacagcgagacactgcacatacttctgatctgcggaggcaagcacagaccgtatatggagctgactacgtcgacaacactgcccactagcgtgacaccctgatcgaggtctactacttgtatagatgacgccgacgccatggac

SEQ ID NO: 130270 - DNA, 123 bp, Zea mays
  unsure (1)..(123): unsure at all n locations
  Clone ID: MRT4577_5027C.1
gttgtatcgataagaacaaacgcnccggtggaggtccaagcttattatgctgtgcaaaaagatgctataaaaaggatcatactttactctgtggagaatatcattatatatcaagccgaaaca

SEQ ID NO: 130271 - DNA, 1021 bp, Zea mays
  Clone ID: MRT4577_50280C.1
aatgtaaatagtgtatataaacatatacatgatgatcaatgtgaacaaaacctcaatgccctgttttcagtttaagtttgactttatacaatctggtcccttttgggttggatagactcgtgcgctcgtggcagtagcacaaatccgctcgtaactccaaactcctttccacatcagccggccttccttctccatgcttctgctggcttggttccccgtgacgacttgccagccgcgctagatacacactcttcatcacccggagtcccggacggacgcacacgcatcgcttgcttgtcgttctccactcctcttcccccgctgctcgcctctcgattccgcctcatcgcgtccgcgaactccatgtccactgcgaccgcgaccctggccgccgcgcgatccccggctgtcgcgcttctcagcctgcgccgccgcgcacccgcggctgcccccattcgcttccccggtctccgcgtcggctctggttgccgtcacatagctatggcttccgcggcgcactcccgcgcccccaccgacccgcttcccaagggtgctgatttatttttccgggcagtaatctcgaacatggaaaaggtttatttgagcaggaatcctacagccaaaaccattctggagcttgtcaatggttatggtataaactcactttctgactttttcactgattttggttatttacctcgcgaagaactcagatttccagctaaaaagcttagggcactatggttttccccgcccactaatgatggctactctggaactggtacatatggacctttgccaaggatattcatttcagaacttcttgtggatgagttgactactcaaagccaggaaattatacataaatacattaaaacttctggcaatggaaataatcatgctgctattgccagtacatctggggagctaacatgggagaagcccatttattccagattcccagatttgtctagggaaagtgaatatgctgcatggactcttgttaatggctatgcactaa

SEQ ID NO: 130272 - DNA, 703 bp, Zea mays
  Clone ID: MRT4577_50281C.1
cgggctcagcctgcgccgccgcgcacccgcggctgcccccattcgcttccccggtctccgcgtcggctctggttgccgtacatagctatggcttccgcggcgcacgcccgcgcccccaccgacccgcttcccaagggagccctgggctgacgaaatctcaactgatggaatctcctgcagcaccgctccccccagccctccttgctcctccacagccggttggttgatcagcgacctcttgccaagatactccacctgaccctgaatgtccttcaacgcccccgcaatcagggtgctgatttatttttccgggcagtaatctcgaacatggaaaaggtttatttgagcaggaatcctacagccaaaaccattctggagcttgtacgatcttatgatggtgatcatatttgctatgatcactttgctttccggacatttggggtgatcactagcatatattcagttattgtgctgcatagtgtgaaatcttgatatattgattactaactcagatttccagctaaaaagcttagggcactatggttttccccgcccactaatgatggctactctggaactggtacatatggacctttgccaaggatattcatttcagaacttcttgtggatgagttgactactcaaagccaggaaaattatcataaatacattaaaacttctggcatggaaataatcatgctgc

SEQ ID NO: 130273 - DNA, 1938 bp, Zea mays
  unsure (1)..(1938): unsure at all n locations
  Clone ID: MRT4577_50282C.1
gcctcatcgcgtccgcgaactccatgtccactgcgaccgcgaccctggccgccgcgcgatccccggctgtcgcgcttctcagcctgcgccgccgctcacccgcggctgcccccattcgcttccccggtctccgcgtcggctctggttgccgtcacatagctatggcttccgcggcgcacgcccgcgcccccaccgacccgcttcccaagggagccctgggctgacgaaatctcaactgatggaatctcctgcagcaccgctccccccagccctccttgctcctccacagccggttggttgatcagcgacctcttgccaagatactccacctgaccctgaatgtccttcaacgcccccgcaatcaggttcatcttcgcttccacctccggcttccacttctgaatttctccttgctcagcaatcacacccttcatcgtcgactccatacttccaatcgagctctgcaccaactccatacgcctgtgagtctctcgattcccttcctcaatcttcgccagtaactgcgccatcggatcatccgctcgcgtcggcgccatctctctgatcttcgtctggaacctcgtccggtgcntcgtggggaggatccaggttagctccgaataccaactgttagacaagagtatttcaccgggtgctgatttatttttccgggcagtaatctcgaacatggaaaaggtttatttgagcaggaatcctacagccaaaaccattctggagcttgtacgatcttatgatggtgatcatatttgctatgatcactttgctttccggacatttggggtcaatggttatggtataaactcactttctgactttttcactgattttggttatttacctcgcgaagaactcagatttccagctaaaaagcttagggcactatggttttccccgcccactaatgatggctactctggaactggtacatatggacctttgccaaggatattcatttcagaacttcttgtggatgagttgactactcaaagccaggaaattatacataaatacattaaaacttctggcaatggaaataatcatgctgctattgcaagtacatctggggagctaacatgggagaagcccatttattcagatttccagattttgtctagggaaagtgaatatgctgcatggactcttgttaatggctatgcactaaatcatgccacaattgccacccatcgcctagaatcagatatcagaagtattaataagtttaacaaatttgtagaggacaatggcttcaagttaaattcagaaggagggattctgaaagtgagtcctgatggtctccttcaacaaagttcaacagtagctgactcatcattgtttacgtttgctgatggaataactgaatctattcctcgatcatacattgaatttgctgaacgtctcctgttaccacagttcaaagatttacaagatgaagaggtgaaagaataccacaggcgtgatggttttgaggtgggcaatgcggacaagatattcgaaagtacatcgaaggatcagctgacgcggagatctgcatgaacagtgaactctagatctgcatatgaccccgtgaactctctagatctgcaaacaacccagtgtgcctcttggaagtgtgttggtgactgtgaaatgattgtacctacttgggtgaaataaagcatgggagtcaataaaaagtaactgtttctttattctacatctgttgaatccggacaagatattcgaaagtacatcgaagggtcagctgacgcggagatctgcatgaacagtgaactctagatctgcatatgaccccgtgaactctctagatctgcaaacaacccagtgtgcctcttggaagtgtgttggtgactgtgaaatgattgtacctagttgggtgaaataaagcatgggagtcaataaaaagtaactgtttctttt

SEQ ID NO: 130274 - DNA, 195 bp, Zea mays
  Clone ID: MRT4577_50283C.1
tgggccttcatttttccaaccaatgccacaaccttgcaaccagggcaaggggccttgggagggccttaaccagaaggacccgttcccaaggttcaagggttaaaaagtcgttcaagaaaaaaagggtcttgagggtcatttttaaaaaggaatgcaacacaacccgaagaacaactttcctggttaaacttatta

SEQ ID NO: 130275 - DNA, 512 bp, Zea mays
  Clone ID: MRT4577_50284C.1
cttatataccaacctttcagctctttgaacactttaacaaaaacaaactcaccactctaaatccaaaatgaagtcaaccaactcctcaactagtttattgctttgcttatttattgtactgttcgcagtacttgtcaactcagcaaacgttggaatccctattccacttcctccttgtgacagctctaaccactcaaatgcttgtgtctgggacagcgtcaacaagaactctgacaccgttcgacttgttctcattgacgtcgttggttcagttcttgacaaaaacttattagaccttgttgccaaagttcaactcttaggcatcaacgttctcgccaaaatcaaagtccgccaagcccaaagatctttaattgatgttaaagccgacattgaccttgctctgaagttataccacattgacggtgttttctatgacgagggtgccttagtgtgctctccttattttgacgacctctacgcacacgttaaattgaagttaggaggtttagtca

SEQ ID NO: 130276 - DNA, 412 bp, Zea mays
  Clone ID: MRT4577_50285C.1
tttgggccctcaagactcctgtatgcacggggacactgaagtgcggcctgaggtcgaggcacagcgaacgcgttggctgttcaatgttcatgtatacgactgtcgcttaatcttgcaaatcggcaaatgcattttgttgagttaaataaaaacgtgtagcggccgaatctttccatgtggccgctcctgatgccgacgtggtgtggtggcaaatggcatggcaggtacaaggactgttcctcggttcgcggcgtgggggtcactgacgcggccaccattgtgctgttttatacagggagtgtgtatcttaacaatttttttttaaattgctctcgattttacattatatggtattgggaatgccgtgttctaattataatgtttttttctttctttttataatttttttttt

SEQ ID NO: 130277 - DNA, 189 bp, Zea mays
  Clone ID: MRT4577_50286C.1
gtcatttctgagggaatgcatagtctgtatgtggtttcgtacgtgtgtgttgggacggggacttgcacattacatcacatcattcattgcgttcatatacattcatttagacattcataggatcatcatcatcatatcatagagcacagacatttgcttcggttttaatgacaaggctttggcgaatac

SEQ ID NO: 130278 - DNA, 486 bp, Zea mays
  unsure (1)..(486): unsure at all n locations
  Clone ID: MRT4577_50287C.1
ggtcgacgtgaggtgagacgctattgccgtcgagccagagctgaaggtggtggttcaggcgacggttgtgcgggttgctgaactcgttgtacatatgtgcaactcatttgaagtggctcggtttagggtttagggtttccaccatagatgcttggtttgtgattcgatttgatatgattggcgacgtcgttctttgatacaaccccattattctttcctttactgcctcgttttagagggtttgctagtttgcctgtcataaacaacaacaatgagattatcaagttgcactgatccattttcctttgattccaccccataatggttcttgtgattcgtttcctacatggggttcaaatctcggcccaagttctacttgtcgtgtttagggtcaggcatcagtttcaacaagtatatgtggaccccgcntatttgttcctcggatatgtgctattgtttggtgtttgtgccttattcaatttataa

SEQ ID NO: 130279 - DNA, 572 bp, Zea mays
  Clone ID: MRT4577_50288C.1
caccagaaccaaccccggggaggggggggatcttttttagtttggcccaacctttagcggattttacaaacgggggattttttttacgggaaggaaattaattcccaggatggccctaccaaaaccttaaaaaacccttttaccaaaccaccaccgggggaaacattaacaacaattaaggggttgcttcccccctgggggtctcaggttaccgccgaaaaccaaaaaaggggccgtttccccccactttttttaacaggccgttttttaagcggcccataaagtaaccgggcgggagggaaaaaacccttttaaaaacggccggggttgtttttttccccagcccgacgcgaaaataataatttttggagaaaaacaaaaggggggcccccatcacctaatataattggccaaaaaaaacccgggaaggcctttttttacccaacggagaaaggccagcctaccggggggacaaaaacctgggggggcaaaaccaaaggggggctaatcccatgaaaagctggggcccaaaaaaacggcacccaattcttcccataaaaaaggggaacttt

SEQ ID NO: 130280 - DNA, 197 bp, Zea mays
  Clone ID: MRT4577_50289C.1
ggcgtgaaagaaaaactccggtatgtcgaatggcggcggcggagaagcccgcggcggtgcggcgagcggaggagctggtggagagggagatgggcgggcgccacacctcccacgactcctcacacgctcttatagttcgagaccttgcgctttacctctcacccgatgagtgtctcttctgtccataccgacttctt

SEQ ID NO: 130281 - DNA, 393 bp, Zea mays
  Clone ID: MRT4577_5028C.1
agatcaagctcacatccattgcgcgcgcgcttcatgtgccctttctggtctgctagagcgcctcatcgtggctctctgtctgagaagtgtaagcattagatctcccaaacaattgcacagttacctccaccagggcggtcagcaaaatgattttcgcgcgtcatttctatcggacccatggatgtactctaccacctatattgacgtgctaatgtcttgattgacttatgtataggcgctgcagactaattggaccatatatgaactagttctcttccaacttgacctcagtatacctggagcccacacgagttctatggcgtgaaggcaatgactcgcggcattgggggcgcaaccccctttgcctattgttaaactttaaataggtaggac

SEQ ID NO: 130282 - DNA, 638 bp, Zea mays
  Clone ID: MRT4577_50290C.1
caatcatacttcctaccctccccacctcttccacggttccaccccgtccctctcctctcgagaagcacccgcaccagggccagcgggtgcaggaggaggaggagcagcagcaggccgccggccgcttggggctgtgccacatgccgctctggggggccgccgcgtccgcggcgccggcagccgacggcgacgccgcccgcgcgccgtcgggatccggcggcggcgtcaaggtgatccggtcgctgctccccacccggcgccgcctccgcctagatccgcccgccaagctctacttcccatatgagcccggcaagcaagtccggagcgcggtcaggatcaagaacatcagcaagtcccatgtggccttcaagttccaaacgactgcaccaaagagttgcttcatgaggcctccgggcggtgtgcttgctccaggggaaagcatcatagcaacagttttcaagtttgtggagcatccggagaacaacgagaagccgatggacaagtgcaaggttaagtttaagattgtcagcctgaaagtcaaagggccggtggagtacgtccctgaactgtttgatgagcaagaaggccaggtcccggtcgagcaatattgcgggtagtattcttggatgctgagcgcc

SEQ ID NO: 130283 - DNA, 494 bp, Zea mays
  Clone ID: MRT4577_50291C.1
gagatttccatatgtgagtgggattctgctccctttccgggtcggatgcggcttcgtgagggtcgccgaggatcgactccgtgtcggagcggatcgaaacggcggtgtctgatgctcaggaccgctgcttcgtaagatgactctgatggccctggaacgaccactccctctagaggacgttcaaagctacggctgagcttcacctagatctagataatccactaatccgaagaggattaggtcccgttacttcggctgcatctccttctccaatgaggaggcgatgcggaacgcaatctgggtcatgaatggcaaatagctgcacggtcccatcatctgcgtattcgaagtccactctagaggcggccgaggaggatttgccgacagaagcatacgatgatgtacgagttagtaacaactacgaaaaggacaggagccgtgatggccataacgattacgacgggggcgatgtctcagctgatgacagcgacgac

SEQ ID NO: 130284 - DNA, 1772 bp, Zea mays
  Clone ID: MRT4577_50292C.1
gtcgcgattgacgattccaccgcttgtacatttcccctccccccacacacacgccggtgcgtcgcctgcgcaatcatacttcctaccctccccacctcttccacggttccaccccgtccctctcctctcgagaagcacccgcaccatacatcttccggcgcccgacgcggacggcgagccgctgctgctgctgccgccggaggaggaagggcaccagggccagcgggtgcaggaggaggaggagcagcagcaggccgccggccgcttggggctgtgccacatgccgctctggggggccgccgcgtccgcggcgccggcagccgagggcgacgccgcccgcgcgccgtcgggatccggcggcggcgtcaaggtgatccggtcgctgctccccacccggcgccgcctccgcctagatccgcccgccaagctctacttcccatatgagcccggcaagcaagtccggagcgcggtcaggatcaagaacatcagcaagtctcatgtggccttcaagttccaaacgactgcaccaaagagttgcttcatgaggcctccgggcggcgtgcttgctccaggggaaagcatcatagcaacagttttcaagtttgtggagcatccggagaacaacgagaagccgatggacaagtgcaaggttaagttcaagattgtcagcctgaaagtcaaagggccggtggagtacgtccctgaactgtttgatgagcagaaggaccaggtcgcggttgagcaaatattgcgggtagtattcttggatgctgagcgcccaagcccacaaatggacaaactcaagcgccagctagctgaagcagaagcagcccttgaggcacgcaagaaacctccagaggacaatggtccccgtattgttggtgaaggccttgtgattgacgaatggaaggaacgaagagagaggtaccttgctcgccagcagattgaaggtgttgattcggtgtagacacgaggcagccctgtaaactatgcagaatgaacataccgttttatgggcacgcactccagctgtcaaatggatttgaagcttgattttgcgaaggttcggatttggagcaatcaagcaacaatgaggcttttgtgtatttggggttcacgctgaacttctgtcctgggtttgggtgtgtgtagataagcagccactgcttggtaatagtacgtccttcagccatgtactcgtgttgttgaatgtgggtctctatgtgaatgtgatgcattctctagctgctgtcctgtcaacattaaaagtgtaattgtaatgtcaaaaggcacactccaaggtgattcagtggtagttctgccatcatgttacagtaattcttccatccacttgcttgtacaactcatacatgtcatgccaccctgagatttatgtcattcagttgtcagtcagttgcttggtcccgttgctttcagttcatccgacaagagcagctcgtgtagcggcagcactgattacggcgactgaaaggggaggggtgagcagcagcagcagtacatatagggttccccttcttggggctggtctcacacttggtcaggccaggcaggcgatacattggtgttgtgccggagtttggatcgtcggcgtctccttcatgctgacctgtgtacacttgtcttggtagcattttgttcatttttcatattttccctttggctgatatgacattactgggaggccgttgtgttggtgtggcgttgtgggttctttccctttgaggtctctatagatgattgtgatctactgc

SEQ ID NO: 130285 - DNA, 1573 bp, Zea mays
  Clone ID: MRT4577_50293C.1
cctcgaggccggccgggaaatggattcagatgaatgtccgaacgaggatagcacttctatctccaatgacgatggtggataccaacctgcagaatacagtcctgttgcagctgcaagcagtagattgagaagaagtgctaggaagtcatttgcatacaatatcaatggtacaacacaggatgatatctcggaagtgaaagtttcttacggttcccatgaagcatcaactagtggaagacgagttgtcacagatgtgcgtgaagggatgtggcgacaaaactcaagaagtgttggtttaaggtctgctaggaacaaaagagaaagtaacagcttccttgatacacatccattgggtagaaggcaccaggtttcttttaagtattcatggttaatgttgcttgagcatgaagatagctaccgttatattcctcaactcgatgatgaggttatgtacttggggcagggccatgaggaatatcttaaacaagtgcaatcatctgaattttgcccttggaaccggataaaaggacttaaagctgtagaactttgcaaaatacagggtcttgattatgccacctacagaggatctggtgaaagctgctgtaaattaaccattgaatttgttgattgcacgtccagtggatttggcaaaacatttatgatcacgttgcgtgagctggtcaactttccagattttcttgtggagagaacaaggtacgaagctgctatggagcggaactggacccacagagacaagtgcaaagtctggtggagggacgaagaagacaggtaggaggaacttggtgggagggacgggtgatggcagtaacacctaaatcacctgattttcctgagagtccatgggaaaaatatgtcatacagtataaggaggatggttctgatcacgctcatagcccctgggaacttcatgagacaggcagtttatgggatccatggaaacatccacatatggatctcacggttcgagataaattgttatcagaaatggaaaatttacaggaaatgtcacacagggatcaggatcattatggtgttttaaaactggacaaggttgcagaaaagtcagatttcatcaacaggtttcctgttcaattttctattgaggtgatcaaggcaagattagcgaacaaatattacagaactctgggggctgtcagacatgataccactgtgatgctttcaaatgcagaatcttacttttcaaagagcagtgaaatgaccaaaaagatccgcaagctctctgagttgctcgaccagatcttttcatcactgtagggaacattgcttgatgcctgattgacaatttcccttttcgtttctgcaaaaaaaaatttggccttaggcatcgagatgatttttactggtcctactgaggcattagagaattagccaaagtagttctcaggacagaaagggtttccggtgtagctccaaccagttaaactagttgctgatacaaagtgctcgtagctaacacatttgaccgtttgatctgttgtcaagatacaatggttcatcctattggacatgaaatattggggttttgttagag

SEQ ID NO: 130286 - DNA, 1829 bp, Zea mays
  Clone ID: MRT4577_50294C.1
cagtcccgtgcacttcgggacggtgctcgcatgacgtcggcgcgtgaccccttctacccgtccctacgtcgccgaccgttccaccccctccctctcctctcgaggagcacccgcaccatacatcttccggcgcccgacgcggacggcgagccgctgctgctgctgccgccggaggaggtagggcaccagggccagcgggtgcaggaggaggaggagcagcagcaggccgccggccgcttggggctgtgccacatgccgctctggggggccgccgcgtccgcggcgccggcagccgacggcgacgccgcccgcgcgccgtcgggatccggcggcggcgtcaaggtgatccggtcgctgctccccacccggcgccgcctccgcctagatccgcccgccaagctctacttcccatatgagcccggcaagcaagtccggagcgcggtcaggatcaagaacatcagcaagtcccatgtggccttcaagttccaaacgactgcaccaaagagttgcttcatgaggcctccgggcggtgtgcttgctccaggggaaagcatcatagcaacagttttcaagtttgtggagcatccggcagaacaacgagaagccgatggacaagtgcaaggttaagtttaagattgtcagcctgaaagtcaaagggccggtggagtacgtccctgaactgtttgtatgagcatgaaggaccaggtcgcggtcgagcaaatattgcgggtagtattcttggatgctgagcgcccaagcccacaaatggacaaactcaagcgccagctagctgaagcagaagcagcccttgaggcacgcaagaaacctccagaggacaatggtccccgtattgttggtgaaggccttgtgattgacgaatggaaggaacgaagagagaggtaccttgctcgccagcagatcgaaggtgttgattcggtgtagacacgaggcagccctgtaaactatgcagaatgaacataccgttttatgggcacgcactccagctgtcaaatggatttggagcttgattttgcgaaggttcggatttggagcaatcaagcaacaatgaggcttttgtgtatttggggttcacgctgaacttctgtcctgggtttgggtgtgtgtagataagcagccactgcttggtaatagtaatagtacgtccttcagccatgtactcgtgttgtggaatgtgggtctctatgtgaatgtgatgcattctctagctgctgtcccgtcaacattaaaagtgtaattgtaatgtcaaaaggcacactccaaggtgattcagtggtagttctgccatcatgttagttgttacagtaattcttccatcacttgtttgtacaactcatacatgtcatgccaccctgagatttatgtcattcagttgtcagtcaaaaacttgctacccttccgggccacatgaggggcctgtcccagcacagccgggatggcagcagctcgtgtagtggcagcactgattacggcgactgaaaggggaggaggaggagcagcagcagtacatatagggttccccttcttggggctggtctcacacttggtcaggccaggcaggcgatacattggtgttgtgccgtagtttcgatcgttggcgtctccttcatgctgacttgtgtacacttgtcttggtagcattttgttcatttttcatattttccctttggctgatatgacattactgggaggccgttgtgttggtgtggcgttgtgggttctttccctttgagatctctatagatgattgtgatctactgcatgggggtatgcttgggtctgaagcattgctgtgactttccccttttggc

SEQ ID NO: 130287 - DNA, 3789 bp, Zea mays
  Clone ID: MRT4577_50295C.1
ttatcagatgaagttgggcgagtattcattattggaactgggcaaggagagtcccagaaagatgcaaaatatgatcagttcttccttggagactatcggcctctcattcgtgataccaatggaagtgtcattgatcaggaaacacagcttgcaccatacaggagaaatatgcaagaccttttgtgcgacgctggtatgataccatatccagagcccttccagagtatgtttcagaaaccccggttgggtacccttggtctcgagtggcggcctccctctgtaaattttgctgttggccccacttacaatgcaacaactggtgaataccaaactatcccaattattgatccggataggtgggaaccggttccagagataacagatttcattgagcttgaacctgaaaatgaagttatctctgacgatactgattctgagtacaatggcatggatgagtattcaagtgaaggagaacaggatattatgagtggtgattcttcaggtacttcatattcgagtggagaaattgatgcagataaccctgataggcttaatctccgccgatcaagaagaaaggagaaaaaatcttaggctgatcttgttacttcatctggtcggcgagtcattaggaaaagatttttggatgatcctggtgtagccacagtgtcaaggccacatagaggaaggaaatctaggaatggatgttctagtaaaaagaaaagatcccctaaatccaggggtttgcgacctcggagacgtgctgctgaaaccgcattaattactttcccaaagaaaggagtttcaacagaagaggatgaagatgactccgagagtttctcagatagtgaattgaacacggatagcactgaagctgaacagttagaatggagtggtcagttaagaactagaagagagattaactccccatttgacatcgatgatgttacagatccttctcagtttactgataataaggaaaattctggaactggtaagaaactagttctcagaataccacgacgtgatttaagaactcaatttcctttaggaagcggaaaagcagaatgctccatacaggataaagcagtgaagtctctttctctagctaatcatgaaccagttgagcacgaactgactattgaaccaggacattcccctgcctccaaggctgaattaacaattgatggtgatctgcatgatagttctgctgtttgcagtaataactcaattaggtggggtgaggttaagatgcgatcctcaaagcgttgcaagtacagtgagccagctggaggtttgtggtcctcttcaaataacgttgctttgcaggatatcgagggatcgagcagtcagcagatacctcatgaatatggcgatggcatccagccaagtgttgtgcaaaacgtacaagaagtgcaacatggaacaattctagataacattccggaaaacaacagtactgatgaacacactagagaaaattttggggatttagaaaagatagctaacaatattaatgctcatgcagacggagtgaatgacactgtacaagctcccaatacttctcagcctcaactaaaagttaagtttaagtcaagaggctctgcagatgcagtaggaaatatcatgaactccaagcatgtcaaagattcagtgcagtgtggcgatgattcttccatcaatcaaccaagaaatgctgacttctatattgtgcccaaaagttctcaggaatgcctagataaaagcactagtttgcatgattcaaaaaaaccgtacttggatgcttcaaagaagtacactgcagtgtacaaaaggtcaaagcgaaagaacaagaaaaaaatggattcagatgaatatggtgtttagaaactggacaaggttgcagaaaagtcagatttcatcaacaggtttcctgttcaatctgttgcagctgcaagcagtagattgagaagaagtgctaggaagtcatttgcatacaatatcaatggtacaacacaggatgatatctcggaagtgaaagtttcttacggttcccatgaagcatcaactagtggaagacgagttgtcacagatgtgcgtgaagggatgtggcgacaaaactcaagaagtgttggtttaaggtctgctaggaacaaaagagaaagtaacagcttccttgatacacatccattgggtagaaggcaccaggtttcttttaagtattcatggttaatgttgcttgagcatgaagatagctaccgttatattcctcaactcgatgatgaggttatgtacttggggcagggccatgaggaatatcttaaacaagtgcaatcatctgaattttgcccttggaaccggataaaaggacttaaagctgtagaactttgcaaaatacagggtcttgattatgccacctacagaggatctggtgaacacgggtgtaaattaaccattgaatttgttgattgcacgtccagtggatttggcaaaacatttatgatcacgttgcgtgagctggtcaactttccagattttcttgtggagagaacaaggtacgaagctgctatggagcggaactggacccacagagacaagtgcaaagtctggtggagggacgaagaaggacaggtaggaggaacttggtgggagggacgggtgatggcagtaacacctaaatcacctgattttcctgagagtccatgggaaaaatatgtcatacagtataaggaggatggttctgatcacgctcatagcccctgggaacttcatgagacaggcagtttatgggatccatggaaacatccacatatggatctcacggttcgagataaattgttatcagaaatggaaaatttacaggaaatgtcacacagggatcaggatcattatggtgttttaaaactggacaaggttgcagaaaagtcagatttcatcaacaggtacttctaatatattgtttttaacaagttttcaccgaattataatttgcaaggcaatatttgttgaagttttcttcccaaaagtttgataaaagaattaatttgatacttcgtttcttttttatttcataatatattcttttgtcagacaacacagaaatttaggagataccatgcacggagtacattactttgatttttgttgcttagtacaaagattacaaattaatattatacctaacagtaatgttcatcttaactgactcctagccatacaattcttgccctaggtttcctgttcaattttctattgaggtgatcaaggcaagattagcgaacaaatattacagaactctgggggctgtcagacatgataccactgtgatgctttcaaatgcagaatcttacttttcaaagagcagtgaaatgaccaaaaagatccgcaagctctctgagttgctcgaccagatcttttcatcactgtagggaacattgcttgatgcctgattgacaatttcccttttcgtttctgcaaaaaaaaatttggccttaggcatcgagatgatttttactggtcctactgaggcattagagaattagccaaagtagttctcaggacagaaagggtttccggtgtagctccaaccagttaaactagttgctgatacaaagtgctcgttgctaacacatttgaccgtttgatctgttgtcaagatacaatggttcatcctattggacatgaaatattggggttttgttagagaagatgccaaggtgtaaatctggtggaggaaatgcattaactgataatttcattttgtacagacaccctcagcaataaaaggaaaacaagaaatgtgcatcgttgtct

SEQ ID NO: 130288 - DNA, 1854 bp, Zea mays
  Clone ID: MRT4577_50296C.1
cattgggtacctcgaggccggccgggttttcgtaaccgccagtgctaggggccagtagaaacttaactaagattttttatttatacctgttctagtttttttctgttctggctcggttattccatctagccgagccattcaacggcgaacccgaatcccgagcacaggccgccgctcgctcgctcgctgcagctacgcacgcacgcgcctgctcctccccttagcttccacaaggctcgactcggccggcggcgatggcgcggaagaagatccgggagtacgactccaagcgcctcctccgggagcacctcaagcgcctcgccggcatcgacctccagatcctctccgcgcaggtcacacagtcaacggatttcactgagcttgcaaaccaggagccgtggctctcatctatgaagttggttgtgaaacctgacatgctctttgggaaacgtgggaagagtgggcttgtggccctcaacctagatcttgcccaagttcgccaatttgtcaaggagcggttgggagttgaggtcgagatgggtggctgcaaagctccaattacaaccttcatagttgaaccatttgtgccacatgaccaagagtactacctttcgattgtatctgaaaggcttggcaacaccattagtttctcagaatgtggaggtattgagatcgaggagaactgggacaaggttaagactatctttcttcccacagagaagcaaatgacacctgacgcatgtgctccattgattgccaccctgccattggaggtccgcacaaagataggtggtttcattagagctgtattttctgttttccaagacttggatttctcatttcttgagatgaacccattcaccttggtaaatggtgaaccgtatcctctggatatgagaggagaactagatgacacagctgctttcaaaaacttcaataagtggggcaacattgtgtttcccctaccatttggaagagttctcagtccctccgaaagttttatccatgaactggatgagaagacaagtgcttctctgaaattcacggtactgaacccaaaaggacgcatctggacaatggttgcaggtggtggtgctagtgtcatatacgcagacactgttggtgatttgggatatgcttcggagctaggaaattatgcagagtacagtggagctcccaaggaggaggaggttctgcagtatgctagagtgcttttggattgcgccacctctgatcctgatggccgtaagagagcccttctaatcggaggaggaatcgctaacttcacagatgttgcttctacatttagtggcatcattcgggctttaagagagaaggagtccaaattaaaggctgcaaggatgaacatttatgtccggagaggtggtccgaactaccaaactggactcgccaaaatgcgcaccctaggcgccgaacttggcgttccaattgaggtctatggaccagaggcgaccatgactgggatctgcaaagaagccattgattgcatcatggccgcgtaaatcacaaatgtggttgttccatttgaagtcacatccgttttgtactagacgttccttgtacgtgattgctctggtaaaacagagaacgatcattgtcatgagtaaactcggcctttgtaacacagttacgcaagtaataattaagatcttggtttggtgctctgccacccttctagggtgggccggtgaggtgaatgtacaaataacaatgcactttgtgatccaccagattgcagtgctctggtatttctagggtcttgtactgcctgtgctgttttgtgtttgtttctcattgcgtttgctgttgaaaaaaaaaaaaaaaaaagcggcc

SEQ ID NO: 130289 - DNA, 267 bp, Zea mays
  Clone ID: MRT4577_50297C.1
tcccacgcgtccgcggacgcgtgggaccagttggacaggatgagatccacccgaagctgagatggcttcacattttgtgatttcgtgttccagagcccttgtttatatggagtaagtacaagagtaggttctgacagactgtacagttttcctgggtggaacgcggaatctgtttgtggacacatctcacccgaacgctgattgcttgtatggcagtcatcatcttcttcagaaatgtaatttagcagttgaagtggagttgacccg

SEQ ID NO: 130290 - DNA, 401 bp, Zea mays
  unsure (1)..(401): unsure at all n locations
  Clone ID: MRT4577_50298C.1
aagcagtggtaacaacgcagaatactnnnttttttttttttttttttttttttgggggttttttttttttttttttttttttttttttttttggggggtttgtttttttttttgtttgatttttttgtttcaatttttttttttcaaaggggccgggtttttgatggttttttataaacacttcctttgttttagtttaaattatttctccatgggactcctatcctgggtgacgaaatgatataaaatttgcttctcttgaaaacctttttttttactctggttccctgaagccggaccgaaggggtggatcccaggggccatgggacaatccgcttttgtcttgtgagttaggggggggccaagacatacatcttggagggggggggggggaccgaagt

SEQ ID NO: 130291 - DNA, 264 bp, Zea mays
  Clone ID: MRT4577_50299C.1
tcggcacgagagatgaaaagatgtggtgaaagagctagtggcccccccaggggtgaggttgactgtggctatggcaggaggtcgtggggaaggaggcaggaggtcgtggggaaggagggacgagaaggtatgatccaaataataccatccgttagatttgaatggttaaaaaagaggatgttatctagcgatctgaataattagtgatgctgagttaagactggctccaacttgttcgatagatttaatagaaattatggttat

SEQ ID NO: 130292 - DNA, 525 bp, Zea mays
  unsure (1)..(525): unsure at all n locations
  Clone ID: MRT4577_5029C.1
agnacgcgagcggctgcccttttttttttttttttttttttttttttttttttttttatttttttttttatttttttttttttttttttttggttttttttttttctttttttttttttttttttttttttttttttttttttttttttttttttgggaaccaaaccttttttttttcatttcaaatggtcaatacagggggnngctccccccggccccgccccccaggggggcgcggggcccatgcttccccaatcgtcgccccttacagccccaacttgtgtggctccccgggggctttccccaacacaaggttttttccggggggggcaccccccctaaagaaagccggccgcgagctgctcgtttggcacccccaactgcccgtggttttcggatccatttcgcccatgggctatcccagggaggccgctgcttggtgagattccggaaggactgctgtcatgcagacaggaatgaagaaagcgctgacaccttattcctggctcacaaatgctgccaggg

SEQ ID NO: 130293 - DNA, 327 bp, Zea mays
  Clone ID: MRT4577_502C.1
atttttatatcaaatattttttttttttttttttttttttttttttttttttttttttttttttttaaaaaccaagaaccctgaccaagggcaaatatacatgatacatgaagagaatgtttttggaccacatatacatgatataaaaaagggggttttttttgccggccatttactggtttaaataaaacctttaaatgccctaaaatttccgcacaaagggtttttacatgaattaaacaaatttttatgtttcaaataaaaatctccacccaatgggttttatattcaccaaatttacacatattcaaacaatgtgtaaattga

SEQ ID NO: 130294 - DNA, 596 bp, Zea mays
  Clone ID: MRT4577_50300C.1
tctctctgtccacgcacccacctcccctgctcctttccttccagcccggcacgcctgattctgaaatccaaatccagagatcccaattccactttccaggctgcagcggcgggccgggcgcggtcggccatggagtttaaggtggcatcgaaggcggccgcgttgcccgcagcctggcacggtacgagccagggagcgcagggccggagcagcgtcgcctttggatcggcgtggaggaaggcgtcctcgccgccggcgcgggcgctgttcgctgcaactaacaactccgcgccggtgaccagggtggagaaacagaggatagatcaaagtcaaatactgactttggacagtgtcagaacctcattgattagactagaagacagcatcatattcggtctcttggagagagcgcagtattgttacaatgctgatacatatgatagcaattctttccatgtggatggatttggcggctctttggttgaattcatggttagagaaactgaaaagctacatgcaaaggttgggagatacaagagcccagatgaacacccattctttccagaagatctgcctgagacactgttgccgcctat

SEQ ID NO: 130295 - DNA, 683 bp, Zea mays
  Clone ID: MRT4577_50301C.1
ccggccggacggccgacgatgccctcgccctgagccggtgctaccggctccaccgaccaccccacatcacgcaccctcaatccgaccagttccaccgcacactgcgtcccccgactcatctctatcccggcccacgctgcctcgcctcggtaagatcttggtcatgcacctccagactccgtccaagcgcctggcaccccctccccccggctgcgccctcagcacagtgtttagggtgatgaacagtgacacgctagatctgggagggggagagaaggagaccgatacataggggcgctgtagagggcaccgctgcagccatagggtacccctatacgccgcatgcaaggggagggggaggggcagcgtccaccgctgcagttagcctcatcacccaggaactcgctggcacatctccagccgcccctgcccgcacccggctactccggctcttgccacatccgtgaggaaaacggccgcgtggtcgtgattacagtaaatcagagagaaacaaagctgcatcttcttcatctccagaatacctaagccgtttgcaagaaataactgaaaaacaaattcagaggtcaatagaaaagggtgaaaagaaagaaaagtgctcagaagaagacaggggaatagagaaaaagagggtggaatttggaagcacaaaaagtaatcattcg

SEQ ID NO: 130296 - DNA, 230 bp, Zea mays
  unsure (1)..(230): unsure at all n locations
  Clone ID: MRT4577_50302C.1
gggtagaacatgatgcacatgacggctctggggagcgagctctatctatggtgggggggctgagacgggtctttggcttcgcagttcctctagctgtgtgatgtactggcgtcttgtcctttttttttttatggtacactgcattctggggggggggtgtgcatctgngcgttaaatggtccgtcgttttcctatacaaaaatctctcttgtttgcgcggagctattctc

SEQ ID NO: 130297 - DNA, 553 bp, Zea mays
  Clone ID: MRT4577_50303C.1
cggacgcgtgggcggacgcgtgggcggacgcgtgggcggacgcgtggggtccccgacggcacggtgatgaagacgatccacacggagaagggcagctgcctcgccaccgacagccacatcacgtgcaaggacggcaaggtctcccaggacatcctgctcaggctcagggacaccgagaccggcgatctcgtcctgcgcctgacctgggtcaacatccccggcgtcgcgcggtgaatcatcccctcgatcggcggggacggggccagggcatgaggcggcggcgacccgactcctgcccagctgattatacatccgtttacctggtattggcataaggagacccttggatgcgtgtaatgtttgtttgcagttctgataaggtgtgcaagaaagctcatgctactgggagcaatgcttgtatctcagttttgcttctgcgggttttttatccacaaattacattgttctcgttgatcacatttccataaaaccatttatcagtaggtcaccatgtagagcaaaagaagataagaaaaagttgcttcaacaaaaa

SEQ ID NO: 130298 - DNA, 227 bp, Zea mays
  Clone ID: MRT4577_50304C.1
attgtacgcacagagaagaaccaacaaaggcagccaaaatataaggcttacttatgctttttgggcttactgcaagaggtgctaccgaaaccattaacccacaatgctcacaagatcctatagctacccttcttaccccatacctatcaccagcggcgaaaccaatgtgtgaaaccccaatagttcaaccctacaggaaccaacaggcaaacgtaacaggcataaaa

SEQ ID NO: 130299 - DNA, 479 bp, Zea mays
  Clone ID: MRT4577_50305C.1
gagaggagacgccaattgctggagacagcgactgccggtggagagaacagctgctcgcccgcggccgcgggcgaggcccatttctagctgctgcactacgtggggcatcactggcgagtcctgacacgagcatccttcagtagaggattacatccgtacagcgagaatagcgttgcgccaactgctaacatctactgaagctacaccatgatacgcaaggattgtctgaactgtaacccctcccttctcacttagcctgccagatcatagcaagtactgcaatatcatcatgcgtaggacaacatatctctgaagctccagccctaccatgttgctcaacaggaactaatgatcgaagaaagcatcaaacacatggcatttaacactccaaagaatatttgcctgcctgatgttcatgtcaaaacggacacaggtgaaattacaatgtaatgctaccagacacagaagccaaaactgtt

SEQ ID NO: 130300 - DNA, 402 bp, Zea mays
  Clone ID: MRT4577_50306C.1
cgtgtaccaggtccccctatagctatagggattagagtttggggggggcatggtcatagttatagcctgtgtcaaaggggaatggggttacaattccaaaaaccctacaaagcgaaagcttaaactgaaaatcctgggcccccctaaagagtaagcgaactcaaattaatagtattggggtgactgccaaagttccatttaaaaaacctaaaatgccgggggcaccagtgattttaaaaacgccaaaaaacagggggagggggtatttgttttctgggccaccgtggttttcaccattgaaacgggcaacagcagaagggccttttccttttgcccctgggagagtaaaagaaagtggaccaggctgccttggccgtgctggaaaaaatgcaaatagagggt

SEQ ID NO: 130301 - DNA, 498 bp, Zea mays
  Clone ID: MRT4577_50307C.1
gccggccggtccggagctctctctttcggtgctctgctctctctttcggtgctctgctcccgcccacacacaccagcatccgattcccgccggactcacaggtatcaactggaaagccatgcgagacgcgacgcgacccgagccggcgaacacccgaggccgcacctgcttccgtctcatttctgatacaagcaacggactccggcacctcctcacccgcgcccggcggccggccggccgcaacagcacggacttctaggtttgtcacggccccacgacccgccccgccccgcccctcgctttgacgctgtgatgtgagttcgacctggacaccccgctggagctcggctttggtttcgcgccttcctgacacgggacaggaaccaccagcaccaggtactccgtactcacgaggtcttctatgtacgatacatatccagaaacaatcgagtcaaagaagtccactccgatcaaaaaaaaaaaaaaaaaaggccccta

SEQ ID NO: 130302 - DNA, 465 bp, Zea mays
  Clone ID: MRT4577_50308C.1
attcccgggccgacccacgcgtccgcgagaagatcctcgtcgaccacgaagaacggaggcgccttgctcaagcttccggcggcgagtttgtggcgactgacctcgtcgacgtgctgctgcagctcagcgaggagagcacgaagctggagtcggagtcggaggccaggctccctcgcgacggcgtcaaggccctcatccaggacatcatcgccggtggcacggagagctcggcggtgacgatcgagtgggccatggcggagcttctgcgacacccggaggccatggccaaggccaccgatgagctcgaccgcgtcgtaggcagtgggcgctgggtcgcggagcgcgacctgccggagctccactacatcgacgccgtcgtgaaggagaccctgcggctgcaccctgtcggcccgctcctcgtcccgcactacgcccgcgagcgcacggtggtggccggctacgacg

SEQ ID NO: 130303 - DNA, 360 bp, Zea mays
  Clone ID: MRT4577_50309C.1
ttttttttttttttttttttttttttttttttttggtttgggttttttttttttatgtttttttttttttttttttttttttttttttctttttttttttttttttttttttttccaaaaaggggaccccccactttttcccccgttttttttccaaaaaaaaggccccctaacccaaggtccttttctcttgaaaatgaagcctaaatcccccggcgggaaaggggcccttggggtcccctaagtggggccccccacaagaaaaattcttaaaattttttagcctaaaaggggtggccaattcccgggaaagggggaagtttaggaaaaaaacacccagaggggggggcgccccccccg

SEQ ID NO: 130304 - DNA, 957 bp, Zea mays
  Clone ID: MRT4577_5030C.1
tacccacgcgtccgcactcgatgttgctaaagagtgtatgtgagaaaacctacaactatatatgatgatgccatatggatgttgaatgatggatgcgatgaagctattggagctgcatggtactctgatatatgattgacattttgagtgtctggcagctctatgtgatcctaaaaatgttaaaaagcagaaaatattaattccacagtaaaaataagagattgagagggatctgaagttacaatgaactgggattataccattgttatggcaagcctttgtggttgtattgttggttgcatctgtatgagaggttggccatcaaattgatttactgtgatatcagcatcagtcttcttccttcggatcctttttgtttttttctctaaaccaccaataggccttgctgaacctcgtatttctttcgccttgggtttcatgcctgttgctgtaggtctaccattcttcttgttttgtttgtcatctaacaaaatagtttgaacttataattagagacagtcaacttgaaggatcatagttgtgtgatagaaagtatgtaccttgcggtatacacgaattgtccaaatcagattcagacctgattttcaagattttctctatctcttctgctaaattttcagcatttttagtagaaataaagtatgcttcatcggactgtgatgctcgaacagctattctgttgaaaattctgcatagagtggaatagcgatttgatatcttgactttaggatcctcatgtatattgcacatgctgcttatatgtaggacttttgcatcaacagtccatctcttaagtatgtagttcttaggaacatattttatattatggacatctagtatctttagtgcatgagaacataagatgccagcaaactcaaacttcttgcagctgcatatgacaattgattccaatggagaaaacttaacagtatgttc

SEQ ID NO: 130305 - DNA, 592 bp, Zea mays
  Clone ID: MRT4577_50310C.1
tcggcgaagcgaagctacaagctcgtgctccgtggctctagaagacgatgggcaaggacgacgtggatctagacggagctcgcggtggtgagtttcgctgacaacgactatcgactgaccttgccgggaaccaatccaaaacaaatctgagctggcgccctgggcactgtaccgtgcaacaaactacgggtacatggaccaactactgttactgaacatgatcgaggacagatggcattgttccaagtaacagaccgacgcccgtgggtcgggcgccattgctgcacgcgcaagccccggtcatgatgcgcatctcctgagagatccgagggcttatctggcgccagccctctagatcactggatgtagaagggccacatggaaccccccacgagggggcccacccacatgatccagcaggcgtccctggctcgcgctctgttgtaatgacgggggcaccgcactctcctgcatctgttgatgccggctcctgagaccgtgatagagggcatatgcaccatgaacaggggaagccccatatgaggggagccagaaccgtgacgtgggagtcgcctgcgttgcgcttagagtc

SEQ ID NO: 130306 - DNA, 552 bp, Zea mays
  Clone ID: MRT4577_50311C.1
tgtctccgctgcccagccggctcatgggcctcggcctcctcttcgccacacgacggagcacggagtcggtcgcgtccctgagcgtggcggcgaacgacctgctgtccaagcacaggctcccgaaggggctcataccgtgactccgaaacctcctacagctccaacgaggccaccatcgccttcatagagccacctcgtcagcacctgactacggccacttctgctcccagctcgacaactacaagaggaccataagcggcaagctctccagggacaccatcacggacctctccggcatccaggccaagaagctcttcctctggatctacgtcacgatgatgtacgcgcgccccgaacagagcaccatgtagatccacgtcgatttcggctcgaagtcgctatcggcctgcatgattcgaaaggtgcgcacctgcgggtccagagctgacgcacagctgcgcgaagggtgtggggccatcggagagctggatctgctccccgcatgccaggaatgaacctccagctagacaatccccgctaacagagaaacgc

SEQ ID NO: 130307 - DNA, 558 bp, Zea mays
  unsure (1)..(558): unsure at all n locations
  Clone ID: MRT4577_50312C.1
ttcttgcttgcctcccggcgtcgccgctcgctgggctcctgccgccgtctaaccctgggtccgtcccggccttggcgtctcgtcgggtcgcgtcctggctccttcgctccgtctcctgcctgcttgccggctcggccgccgggctgcgcgcgggctgggcgccggccccgccgtcgcggggggggtccctcttcaaccgcgccgccggctacgtcttcgacggcgcggcccaggcggcgtccgccgccccggcgcctgccgccggggcgaccggggggggcgcgctcgccgacgcgttcgccggcgccggcgccgtcgggctcgtgtgccccgtggtcgtcgccctcgtctgcctgcgcttcggtgcgggcctcccggccctcctcgctgcgctcgtggtgctcgtcctcgccgtcctcctggtgctcgncgtggcgctccgccttgtcctcggcgtggtgcgccccctcgctttgggcggggcgggggggctcgttctgggccggcgcgtgctgctcgctggctgccccctcgtcgtgcctgttggctgggctttcc

SEQ ID NO: 130308 - DNA, 826 bp, Zea mays
  Clone ID: MRT4577_50313C.1
cagccactcagccagccccctttacttgcacacaatagacaacctcgaacagaaaagaagcagttttgccgtccgagatgagccgccactgtgtgactctccttgtgatcatctttggattactgcagatggctgtggctctctactctaatccaagttcaacgcacccgaactgcacggagagatgtggcaacgtcagcatccaatatcctttcggcttcggatccggctgcttccggcagcccgatttcagcctcacctgcgacgacggcggcggcggcggcggcaaccagccgcccaagatctttctgcatgacggcatcaccgaggtcttgcccgattccggtggcacggtgggtctgtcaaggcttattgatgtagccatttcccacaccatctttatggcacctggtattcctagttacaacttctcgtggaatctcagttctttcactatgttggatggctcattcaacgtaactgggtgtgacttcgatatatatcttcaagaaccgggcacgaatggttccataccgcggtgtacaaatagctgcccccaaaacatcaccgagacggtggccagacatgactgcaatggaactgggtgctgcattctttacgttggagttagtgttcgtgatttccagctcaaatttgtgcgccacgataatggcgctagaggtgatcatgatgctctctctaatggaagcgccctgtgggatacaattaacattaccagcaactgggcccaaatatactggggatatagatgatcaaccgacatgcgccagagcgaaggaaagatataaactacgcatgtgtcagc

SEQ ID NO: 130309 - DNA, 125 bp, Zea mays
  unsure (1)..(125): unsure at all n locations
  Clone ID: MRT4577_50314C.1
tgaagaaaaattattanttggngccnancaaaggnnaaaaggtaatattaatagtgccttgctctatatagaattgnttgacctactgtaagccaaaaatgctagattatagatccttaggtgat

SEQ ID NO: 130310 - DNA, 207 bp, Zea mays
  Clone ID: MRT4577_50315C.1
tatttcttttttttataagagcacaaggggatggcaactcaaactcaacttttttttttttttatattccaatcacaaagggtcgggaacaaggggtgaccacttggctcaccctatacaaaatggaccagttttcgccaaacccggacaacttgttaacccggggcggttggggggcttaaaaccaacaaattccatacccttccc

SEQ ID NO: 130311 - DNA, 133 bp, Zea mays
  Clone ID: MRT4577_50316C.1
ggatcatataatttaagctcctgcccacggatgtatactctctgtttctgttgatatgctctcattccatctagcatcgctacttttcgtccgaaacttctttatgtatgcagtgccaagattaccactaaac

SEQ ID NO: 130312 - DNA, 245 bp, Zea mays
  Clone ID: MRT4577_50317C.1
agggttcgggtttttttttttttttaaaactaaaaaagactgttgcccaaatttaaaattttaatcaacacaacacaaagagtgttttaacgttgtgagacaaacatttccaagtttgttcataaacatggcgcttttacaattcatgggttatggatacatgcggttccgctcaagggcttctcagcaacacgtttaaacaaaaacagtaggcgcattggccattttctgtttaaacggagttt

SEQ ID NO: 130313 - DNA, 359 bp, Zea mays
  unsure (1)..(359): unsure at all n locations
  Clone ID: MRT4577_50318C.1
tcgcggttgtccctggcccgatgcccgggggcgggtacagcaccgggttgccctcgtacttggtccagttggtgagcagcgggtcggcgtcgtcggcgggcacggccaggcactgcacctggacggaggcgttggtggagcccgtgtagagcatggcgaggcggccatctggggcaacaagatcgcgtggggccacgccgtgtcccgagacctgatccactggcgccacctcccgctggccatggtgcccgaccagtggtacgacaccaacggcgtgtggacggggtccgccaccacgctccccgacgggcgtacgaggncgacagaaaggtgttttttttttttttcccccccccccc

SEQ ID NO: 130314 - DNA, 913 bp, Zea mays
  Clone ID: MRT4577_50319C.1
ctcatcgctgactccgaaccacgccgccaagccacctctactagctctcccccatccgaaccgaagccacacacccacaccatacccgcaccagccatcctcgcgatctctcagtcccccatcgtcagtcgccaccatgccctcctcccaccggattcagaggtgattcatgggagtgatgcgcaggctgctactgcggcatcaatggaggttgcctgccatggaggatccaagcatcgatgcgagggaggccgcggatcgtctcctggatggaaggaccatgccgcacggagaagcccaccggcgtcatcttcctcaaggcctgctcggtcgtctctgtccgttcctcctcttcttgtgcggttggcacatgatctggtgagacctcccaattggtaaaaatccattttgtgcttggcgatgtattccttgaggaccgtcatgctcttcttcagtgaggtacacaggataccaggctcattattgatagcaaacgattgggtttcctaaaccattattgcttttactctcggaccaagactcacctggctagccgagtagtcttctatctctgagtgattatctaatgtggattgtctgcaaaaaagctaagttttgtggaccttgctggttctgagagggtgaaaaaatctggttccgcaggaaagcaattgaaagaagcgcaaagtataaataaatctctttctgtttggctgatgttattggttctttatcttctgatggacaacatataccttactggaaccataagttaacaatgcttatgagtgattatctaatgtggattgtctacaaaaaaaggtactatactttaatcatccatttgtcttttcattatgattatataatgtggattgcctgcaaaaaaaaggtactatactttaatcagtcg

SEQ ID NO: 130315 - DNA, 476 bp, Zea mays
  Clone ID: MRT4577_5031C.1
ccggccgggaagaatgtgtcatcgcagggacagagagtcagagactgacagactggaagcgcccgcgcgtgccggcgatggagagggacgtcgtgctctccgcacccgaggccgctgggtcctcgtcctcccccgcctcctcgtcgtactcctccttcgccgagaccagggtcatctgccgagtgtaaggattggctctgccatacggcttctcctctcctgctggcgcaaagcatcgggccctagcggatcttggctcctacctgctcgtgctaatgcgttattctatgtgccgcttgcttgcaggtgtcagaagaagttcgcgcagtacacttgccccagatgtaacgtccggtactgctcgctctcgtgctacaaggcttgcagtaggtagggtatggtaatgctgtactggtgtcaatagtctactctgacgacaacttggcaccccatggatcagataccacctgaaatga

SEQ ID NO: 130316 - DNA, 454 bp, Zea mays
  Clone ID: MRT4577_50320C.1
cctggtgtttttttttcttttttttttctctttttttggaaacatcagttttaccgtgttttttgttgatttacggttttcaacgggaaaagacacgaccatcgggccaaagggaaatgcgccggaaccacactacaaaaaaccctcgcacgagcgcatcaaaaaggcgacaaaacctaaggctaaagacccccactcaaatggaatgaaccctattaaaagagctatggcggccctacaaaacaaaaactaaagcgagcgcaggtcagggcagcagccccgactcactcagggaacatctgctcattggcggggtgaccctcagcctcaacttagcggtggatcgggagctgaggctccaggagcccgctacttctagataccggtggcaatgggagctatgctcaaaagcacgcgagcatcctcaatcccggtgtcgaacgtatgcacttta

SEQ ID NO: 130317 - DNA, 452 bp, Zea mays
  Clone ID: MRT4577_50321C.1
acgttcgtcagccgcacggtgatttgtaaagatttggatgagcagacacgaaagtcgggaacaattataacacatgcactaccttaaaaattcaccattatgtcaaactaacacacgctagaacatgtcacaatgcacaggcaattcggtacgtggactgctctatattggttagggctgaggtgtatttgggccatgacctgaatcagtggtgccaggcgaaatatagctatgccccaaatgaatcattggggtccatctcttcttgaagccggagcgcgtcatcgaacatgaccaggctctgcccctccgtgacatctgctatggagtggtgggagagtccaaccctatggtcggtgacactggcctgtgggaagttgtattttctgatttgctcaaacgtgtcaccgcttccaatctgttctgatcggaccttcgacctgtcgatgtgc

SEQ ID NO: 130318 - DNA, 268 bp, Zea mays
  Clone ID: MRT4577_50322C.1
gggttttcatagcttttggaaatactttggtctctgaactgtaattagcaagaagtaaaaacagaaacgtcaaacgtcaaatgtttgctttgttacctggaggactaaatgtagatgtctttagtatactttgtatgttctaatattggaagataattttgtgaatctgtagattttattttttcagtcttaccttacaaatttcttttctatgaataatagaggaacttacggcactctgccatttgttaatggaaggaagtgcaga

SEQ ID NO: 130319 - DNA, 463 bp, Zea mays
  Clone ID: MRT4577_50323C.1
gccagccgagcgtgggcgcgggtggtagctcatgcgtcaggagaacgagctgtgggcaatgggcgcacgtggggatacctagctaggtctgttatgataccatgggtgatcatcaccggacggcgaccagctgggccacgcgatggagaggttggagcgagcagcatgtgatattgagggtgcaccctactgaagcctaacatgaggcactggtgtcttgaacacataaaacagagtcaaccggagcgagcgcgcagaacaccgtgaaccactgtcggcaggaccgtatatggtgccttaaaggggtggggtgttgctatgcacgctacacgaacgagtgaggaggcgcacccttaagtttatgtactgaacaagctgatgagctataagcgatcatgcttgtgcttgtggttatgccgtgcactgcaggacaatatgctgaatgcctgtgtttttgatggga

SEQ ID NO: 130320 - DNA, 467 bp, Zea mays
  Clone ID: MRT4577_50324C.1
ttattcggcacgaggctcccggggcgcgggggggcgtccatactctccctgagaggcgccggcactcgataactggctctgtactcagtaagacaatcggcctttcttgtcttagcccacggtctagctacgtctggttaggcgggaaagggcgaaattctagaaaacctatcccgatgaggggggggggctccttatattgtttttcacacatagcattatactctttaaaaatgatgtactaatggcactctaaccgaccccaaaagtctaccaatagaccatctatgatggatgaagctccccttaactacaatactaacgacgattaacctgtcggacgctttaacagattccaaactgttggttactccaactgagccgaataagccatactgatatccgtttcgtcttcctcattctactaatgaaagatctcttggctgacactttgattctgatcaatc

SEQ ID NO: 130321 - DNA, 1354 bp, Zea mays
  Clone ID: MRT4577_50325C.1
caagaatcaatcatgattctattttttatgaaaacaatgcaaaatatctaaggaaaatcttgagtatttcgcccctaactgcacgcgcggcctagccactgacgtggctccagtgcctataggtgacgccggtcataacaacaatactcaagagattcattgcttcagctgcacaccatatggatccttcattccctgcagcttgtaaaaccttgtttagtttaggaaacactccattgataaaactagaccgatcctaaaaggaataggtggctttattatatcagtattaagaagaaaataagcactcaaattcacctctaggacttgaacctaagtgttgtgggcgttcacaccctcaaccagctaggctcagcttccttgtctctttcgtgggctctatgatattacttattccataatattgtgctcagtggttagcgttgagtcatggcacttggcacttaatttgaattggtgtggccacttcagtctcatgctgggtaatatattagcataacaaatcttaccatgaacttcagatgggcgtcagcgccatgctttcataggtttaggcttccgggaaagacctgaagcatatgacttccaagctgccctacatgatcatatgaaatatttaaacaagaagaaggccgctgaagagatgattcagcattatgagaagcaatcttcagtggattacagcctcaaagaaggggagacattggttcttcagcttaaaaataaggaaacaggcaccaagacaaaatcgacattttttgagcaaggcctaaacaagctctccgttaacgaaaagacaagcgccaaggaggcccccgtctcccttaaactcccaccaccaccaccttcgcctgtctcaccgacggattctggagtcgctgcctcgcctttcaaagcagaatttcctccccaagagcaaccacctgctgaacccgtcagcagaaccagcgctctcccctccaaaggcgaacctgctccagagctaccagctgctgcagagaagatgaggagcaagaaaccgtggatgaagacttcggggacttccaggctgccgggtgatatcatgtatcttgtacatacatcatgttaccgagactttttttttctttctatttttggttttcaatcagctgtggcttctgccggcactctgttcctgtatagagagcttccatctcataacctacatacaaatacatggacaaacgttgtacccttttctttgagtttccatctcataagtcaacctacgagagaggaggaagaatgaaagcaagaggagctacctcctccatcctttgggggtgtttggtccctgattaaagttgagttc

SEQ ID NO: 130322 - DNA, 1318 bp, Zea mays
  Clone ID: MRT4577_50326C.1
cctcgaggccggccggggcgacgacctgattcactactccgctacgccgcattcggatccggccctgagcctttcccgatcccgcccgcttccctgcaccgctcggcacgatccgcccccgctccccgctcccggctccacgaccggtccgccgtcgagctcccggcgcttctgcggccggcgccatggcgaccggcggcggcaacgagcagccgccagcggaggccgagccgctggagctcgtgctgttccaggtcgccgagtgctacgtctacctgataccaccgaggaaaacggctgcctcctacagggcggatgagtggaacgtcaacaaatgggcatgggaaggggcgcttaaggttgtcagcaagggagaggaatgcatcattaaactggaagataaaaaaacaggggagctttatgctagggcatttctcagagagggtgaaccacatccggtggaacctgtaattgacagtagcagatattttgtactacgtgttgaagagaatatagatgggcgtcagcgccatgctttcataggtttaggcttccgggaaagacctgaagcatatgacttccaagctgccctacatgatcatatgaaatatttaaacaagaagaaggcggctgaagagatgattcagcattatgagaagcaatcttcagtggattacagcctcaaagaaggggagacattggttcttcagcttaaaaataaggaaacaggcaccaagacaaaatcgacattttttgagcaaggcctaaacaagctctccgttaacgaaaagacaagcgccaaggaggcccccgtctcccttaaactcccaccaccaccaccttcgcctgtctcaccgacggattctggagtcgctgcctcgcctttcaaagcagaatttccttcccaagagcaaccacctgctgaacccgtcagcagaaccagcgctctcccctccaaaggcgaacctgctccagagctaccggctgctgcagagaagatgaaggagcaagaatccgtggatgaagacttcggggacttccaggctgccgggtgatatcatgtatcttgtacatacatcatgttaccgagactttttttctttctttctttctatttttggttttcaatcagctgtggcttctgccggcactctgttcctgtatagagagcttccatctcataacctacatacaaatacatggacaaacgttgtaccctttaaaaaaaaaaaaaaaaaaaaaaaaaaaaaaaaaaaaaaagaaaaaaaatgaaagcaagaggagctacctcctccatcctttgggggtgtttggtccc

SEQ ID NO: 130323 - DNA, 535 bp, Zea mays
  Clone ID: MRT4577_50327C.1
attttattttctaacaagtggtgtcggagttagggttagacacattgtttttatccacattgtggccgccgccgccgggttttgctatttgtcgcattatgtcgactaaatttgatattccaaagtttgatggcaaaattagttttgctatttggcacattcagatgaaggttgttcttaccagtttgttgttcaaaaggcgttgcagacgcaacctgctgacatgactgatgataagtggcaagatattgatgagagagctttgtccgccatacaactcagtttatcttttgatgttctgcgtgaagtaatgcatgaaaaatccgcagcaatattatggaagaaattggaggagctgtatatgaccaagagtcttacaaacaagttacgtcttaaggagcgtctttcccctattcgcatgtcagaaggtacatctatgcaatcacatcttaataaattaaattcaattattatgtaccttgagagtcttgttgtgaagatagataatgaatataagacaattttgttgacccct

SEQ ID NO: 130324 - DNA, 3581 bp, Zea mays
  Clone ID: MRT4577_50328C.1
cctcgaggccggccgagcagagcacaccatcctcgcattattcttttcggatttgctccacccctccacccccatgcccgtgtccatctcaggctgcgtcacatcatcgccgccacacccagcaccagcaccagcaccagcggcggcgcaccaccaccggtgccatcgccagcgccagcgctagcgccggcgcaagcggaggcccgggcgacgcggactgggcgaagttactggccttcttttcgtcagcggcgttccttgccatcaagctaaggtgaaatgaaacaggtcttccagcaaggttacgtggagtttaccaatgggtctggataatacttatggcgacctatctggcatgttctatggaggcctgtcttatgatggctacacagaccacagcagcgcaaacgattacttcagatttgccgatccacttcctgccactgtgccccagatggcagcagaagcctgttcaaatccttcctccactgtgtcaagggccaatactgaaactgacaacccagaggattgggaattcatctcagatgagtccctcgactatatcagccggatgctcatggaggaggatattgatgagaaagttagcatgtaccaggcggagtcagcagcactgcgtgctgctgcaaagccgttctatgacattcttgggcacaagtttccaccgtctcctgaccgccagctgatctcttggtccatggacagccccagtgagagtagcagtagcatctgcacacaatctgtggcaagtactgtcactagcagcagtttcggcacgagagtggatagcaaccggcgctatgatgttggacttagtgagcagctggaagctttccgaggcttgtgtggtcaggcttcgaatccacttgttggtacatcaagtgatgcttccaatgcagtggatgagctagaagaccttttgatcacgaatggtgggatccctgagtatttgtttgagagccttccaacttgggatttcaggagaggtattgaggaagcccagaagagtcttcctgttagcgataaactagtaattgatttagaaactggtggtattgcaagaccccaagaagcaaggaaagatgttcctttgaatgccaaaaaggacgatgtattgaaggccaagaaaaatagacagagtgaagaccttgacctgatggaaggccggaacattaaacagtctgcattttgttccgatgaacctggttggattgagatgttcgatgatctgcttcgccaaactgagaagaaggctacagttctgcgagagctgatgcgtagtgaagcttccaagaattctcaggtcactcagacgaaaggaccaagtgggccacggccgcggggaaggaaaccaacaaagaatgatgtggtggaccttaggaccatcctcatccactgtgcacaggcggtggcagcagatgaccgcaggactgctaatgaattgttaaagcaaataaggcaccattccaagccaaatggtgatggaacccagaggttagcacattgttttgcagatggtctcgaggctcgcttggcaggcacagggagtcagctttaccgcaagcttatagcgaaacgtacaactgcctcagacatgcttaaagcctaccaccttttccttgcagcaagcccatttaagagactttcacattttctttccaatcaaacaatcttgagtttgactaaaaatgcatcaaaggtgcatatcattgactttggcatttattttggattccaatggccatgcctaatcaggcgtctctccaagagggaaggtggtccacctgttctgcgcatcactggaatcgacgtacctcagccaggtttccgccctaccgagagaattgaagagactggacaaaggcttgcagagtatgctgagaagttcaaggtgccttttgagtatcagggaatagcgtcaaagtgggaaagcatccgagttgaggatctcaaagttggcaaggacgaagttgtgattgttaattgcctatacagattcagaaacctgattgatgaaacagttgctgtagacagtcctaggaatagagtgctcaacaccataaggcaagtaaacccagcgattttcatccatggaattgtgaatgggtcatacagcgttcccttcttcatcactcgtttccgtgaggcgctgttccatttctctgcattgtttgacatgctagagacaactgtcccacgggatgatgcacagcgtgcactcatagagagggaaatgtttggccgagaggcactcaatgttattgcatgtgagggctcagacagagttgagagacccgagacatataaacagtggcaggtgaggaacctcagggctggatttgtccagtctccgttaaaccaagaaattgtgatgaaagccatggacaaagtaaaagacatttatcacaaggactttgtcatagatgaagacagcggatggctcctgcaaggctggaaaggaaggatactctatgcaatatctacctggaagcctaagaataactaggttcttggtctcacatgttacgtttcctattccattgatggtagcagctaattaaccagtcctgctatgttatagcatgtggaccttgacctgtgaacctgtctgatcaaggaaatggcttgaagacggataatgatcaacatggagctttgctagcttcacatctgtccagccagtactctgatagactgggtgtagacctctctaccttggtgttggtaccatcacttttattaaatttcgtagttttcttctttccatttacttctatgatcggcctggcgtcctattagcaataaccagatcactgcttctagttaattggttagccaaactacctactatcttgagcttagtatttttgacttgtatccatccatgttgaacattatttggttttcagcaccagcagataaaaaattccccaacgaggaagcatgaagcatctaaatttgttatacgagaatggacgctgctgtttgtgtggaatgtagtatctcatggagtgctttgcctttgaaataaaaaaaaaaaaaaaaaaaaggtcgaggggtcagaaacccattttttatttcatctctttgtagcaagtgatgcgtgctgtcacaaaatgactctttaaacttgagtggagcactagtttgagaatatcgctagaaagtggtgctacagattttcggagacgactagcgaatgcaccacaagggcatgatatcagtgcaatgcgaccactatcagtatcttcatttgataacgcattgttttaggcttttgatccttccagtccattctcttttatcgtacggttttcagatctgccatgtctaacatttatctaggaatatctggagtttgattatcataaaacttcatctcctatgaaactcactcttcattaaattacatgttaaaaggctgacgcgggctcaaaaaaagatggctcgactgtcagccaccgccgcgctcctcctcgtcgtcatctccctcctcaccgtcgcgcactgcggtggccctcgcagtcgcagcagagcacgacaccgggcccgaataacccgcg

SEQ ID NO: 130325 - DNA, 295 bp, Zea mays
  Clone ID: MRT4577_50329C.1
tggttacccgggaaccaaggctaggcccgcgcgcgctcgacacgagccatccgcagttgcccccaaacaaagcaactgacagggcgaacccagacaacacgaaaggtcagaagagacgggccggaacgaccataaccaccgcggggcacaaccccagcccacccggtagcgcaatcacgaagggcgacccaaccatctcccacgacaaccggcgcgagggctggaacgccaacgcgccgcacagcgttgcggggcacaaaacgccgcgagccgcgtggacacacgcaaccggacg

SEQ ID NO: 130326 - DNA, 409 bp, Zea mays
  Clone ID: MRT4577_5032C.1
acggcattttacacataaaaccaaattgtttttctatgctcacgcggagaacatgagactaccttgttgcatggattgtaatgattcagatgactgggtcagcgttgaccatccctgatatcacacatcctgagatcatatctggcgttctgaagcctgcttatcgcgttagtgatctcaaatacacactactttgctatgctagctgttaagctactttagtcacttgaattggcagtatatatacaaggtcagattggcatgtccgtctacaacgatcagcatgccactctagcgcctgttcttctatctacaaaatatatacgcatatggtggaaataaagactcctgcagcatcattgaaatacataatttagcacatcaggtgtgtagagcccacactcacata

SEQ ID NO: 130327 - DNA, 372 bp, Zea mays
  Clone ID: MRT4577_50330C.1
gcgatcggggctttttgtgagttcagaccgaaagagtggtccttcgtgatctaattcaactactgcatgggctattttccatggacgtgatagtaaaggtatattttatttctcgaacgcgcatgagagctgcacatcattatattaagagaggaaaggtccaaagtggaccgaaatacaacaccaagaccaaacccttaagccttcactccagcacccctacaaatggggtggggggagagcctgactgaccctactagaccctatttagggcttgttcggatattactaatacacatcgattggatgtgattggaaaaaattgagaagaattttgactcgattgtgattcaaacccattcaatttcactt

SEQ ID NO: 130328 - DNA, 493 bp, Zea mays
  unsure (1)..(493): unsure at all n locations
  Clone ID: MRT4577_50331C.1
tantgttgttggctaggtgcagtgcctattttgtaggcatcccttcactattgttggatcctatttgattccatgagccatgacccatatgattgttttattggaccttccattgacaccattatgaaatgacaatggtgtgattgaggttgagggtatcacagaagaaagtccaaacctatagatcaaaagagtggagaagataactctgctgagcaaaaaggcgaacataatttccacttgttttaaggtatcttgtttctactgaataataaaactctattaaagaagaaacatatcctttggacttattttttgaactttaatcataatgcttacctgtagaagaaaaaggtgtatcaactttttggcttaatgcaattaagaatcatgaaattctagatgagaggtgaaatattttcacaattatcttttgttatgagaaccattgatacttttgtgttccaacatgttgtaatccattctttacact

SEQ ID NO: 130329 - DNA, 451 bp, Zea mays
  Clone ID: MRT4577_50332C.1
aaaccccggccagtttcacggacaaaaagttgggagtctaaaaccctttatatagctaaaaaaagaaacccctaaaacggttaaaacccaaaaaaggggattggcaccggttaaaaaagagcattaaaaggcaagtaaaagggggtttttaaaggtttgggggagtttgacccccgggcttgcaaacaaaaattatggaaggggggggccattccccttttcaaaactataaaaccaaaatgggacatagcgggccagtttttatttggcacccccttaaattagggtttgctcgaagccagaaggggccccaaaaccagggggggtcatcacagggggggttactttggcgaccccagggatttgaaggggctcccggaatttccctcggggggaaaaaccagggcctccaagggcaaccggccccggttgaagggtttccaaggttaaa

SEQ ID NO: 130330 - DNA, 1388 bp, Zea mays
  Clone ID: MRT4577_50333C.1
cgccgttcaaccctcttctcgcctgatcgcctcccgcacgtacctctctatatttgtttctcccatccatgcgaagctccggcatctagctagcaggtcgctcgatcgccatgtccgacgatagcgacggccagcggcaatgccgccggggcgtcaccgtcgacgtcgagctcggcgccgccatggcgcttgccgacatggccggggtcgccggaccgggcggcgaacagccgccgcccgtgcggcgcgctactcccgctccttctgctcaccaggaggacgaggcgagcacgcggctgagcctggagctaggggaggtgagcatccaggcctccccgtgctccagcagctccagctttggcgggcacccgccgccgccgccgtcccaccaggcggcgtaccagcagcccgccgtaccggagccagcgacgactggctacggaccccggccccggcacgcggtcaccgaggccgagaaggaggcgaagcggctgcggcgcgtgctggccaaccgcgagtccgcccgccagaccatcctccgccgccaggccatccgggacgagctcgccaggaaggtcgccgacctgtcgtcgcagaacgagagcatgaagaaggagaaggacgtggtcatggaggagtacctgtcgctcaaggaggcgaacaagcagctcaaagaagaggtggcgaagacgtccaggaagccggcgatgccagcgcagcagcaggcggcagaatccttggtgccggcgccgccgcggccggggttcctgtactcagcggcaccgccggcaccagtgccggtgccctatgtctggggctcctggccgcccagcgccgccgccgggagcgagcagcacggcagcccgccgccgctctgcctgcagccctgcgcgtggtactacccggccgtagcggacccgcgcgggtcgccatcgtccgcgcacgcgcagcagccgccggcgttccaggacccgcgcgccgcaacgggcgaggaggacacggacgacgacccgtgctcgctcacgctcggcctcgaggtcgacaagcggagcgcgcccgtcggtatcgtcgcgggcccggcctccggctccggctccggcggcgggggagcgcagagcgacagggacagggcggcgcaggcgaggaggcggaggagggaccttaccaagctcaagcacacgcacgccgccgcccgccccggctcctccgagcagtggtaggcgcggcaaaaagcttggacaggcattgcgggcatgcacggcatcgcggtgccggtggtgactccattggttttcttctcggcggcgaactaaacagcttcgtgatctcttccgttttcttttcttagtatattctttgctgcaatatgtaactgaagaaattaaacg

SEQ ID NO: 130331 - DNA, 559 bp, Zea mays
  Clone ID: MRT4577_50334C.1
tccgtataaaaaaaaaaaaaaaaaaaaaaaaaaaaaaaaaaaaaaaaaaaaaaaaaaaaaaaaaaaaaaaaaaaaaaaaaaaaaaaaaaaaaaaaaaaaaaaaaaaaaaaaaaaaaaaaaaaaaaaaaaaaaaaaaaaggggggggccgtttttaaggtttccaagtttccgttccggggccttccaaggtttttacctttttttttggggccccttaatttaatttttttggccgtttttttacaaggtgggggggggaaaacccttggttttcccaatttttttccttttgaaatttttccctttttccccatttgggtaaataccaaaggggcccccccttttcgcctttccaaaagtttgcccccttttattggcaatgggtaccccccttttctcggcctttaaaccgtggggttttgggggtttcccccaattttaccctttaatttttaaacccccttacccccctttgtttccttttttttcctttcttttttccccattttcggggtttttcccccgaagattttaattggggggctcctttaggggttc

SEQ ID NO: 130332 - DNA, 312 bp, Zea mays
  unsure (1)..(312): unsure at all n locations
  Clone ID: MRT4577_50335C.1
ctcttnactttttanttaaaaaaaacttccccataaaaaaattggttttataaaaatttgcaatacatggcacgtttttttttataaaaaattttttttctcccaacttttaaaatacaagtcaacaagttctttaaaaaaatgggaaggaagttctttttccttttaaaaggaaactttttcttttggcctatcgcaggttataacacaaaacttgggacttttttaaaacttttttttgggttttggccgaactttccccatttatatttaacggcatttcctcttgatgccaatgggttaaaaagtttt

SEQ ID NO: 130333 - DNA, 150 bp, Zea mays
  Clone ID: MRT4577_50336C.1
caatccatatggattggggtaaaaccgaacaagcgccttatgtatgtatatcactgggaatgtcttgtgagacagagtacagcagcagtcagctgagcttcttgagcacagcaaaaaaaaaagggttctgaacaagaacgagcaggctac

SEQ ID NO: 130334 - DNA, 235 bp, Zea mays
  Clone ID: MRT4577_50337C.1
acagctcagcgtctcctctgtccaatgctattattcttggctgcagcataacacttggtgcaattttgttacgtcgaacgggccgtattatcaatactcactcctgctatttcatgcatatattatttttcatttttaaataatttaattatatttaatataatctttttttttattaaaattcattattaaattatttttttattttattctctcattttatatttaattaata

SEQ ID NO: 130335 - DNA, 376 bp, Zea mays
  Clone ID: MRT4577_50338C.1
tctctctctgtggacacagctgcgacccgcaacagagcccaaccacctgcggcgcgacctagccggcgagcggcggcaaccacaggtccggcgaggggcggcgttcaggtcgtcaaccatggttttccttcaagaagagatgtcttggaacgtgctgatctcaccggaccagctgagccccaagggcctgctgctccgcaagtccatcatcgtgcgtcttctggaggacgtcaccaacaggaaggcctccaaggagcatggctactacattgctgtaaacgagctgaagacaatctctgaagggaaggttcgtgagctgtccggagacgttcttttcccggtcacattcacctgcatcacccagaggcctatgaag

SEQ ID NO: 130336 - DNA, 190 bp, Zea mays
  Clone ID: MRT4577_50339C.1
gggctgcctactcctccccctcttaccaaatcctcttctgattatgcttacgtacggtttttaagacgggcgggggcggcagctgatctagattacctttacttcgtctaccggctacgcctgttccaccatcaacgaatcgactgcataataccttctactaatacggccatatccttcacttcaaagt

SEQ ID NO: 130337 - DNA, 370 bp, Zea mays
  Clone ID: MRT4577_5033C.1
acgactcatacgatagcacaataaatagtcaaacaacgggacccacaatagacggccaggttattcgccttgttaggccgggctgtctttatacatataccattatcgtgaccatctcgccagcatgcataaatgcttatatatcttcgtatctctcactacccatctcaaaagactggtatagcacgtgaaaacacccatatataaaccaatacgctatcacacgcgcaatcacacctcgaattacacctttagcacaacagttatgaacaatatcaaatcacatattacatgcacaacctttggcacaccaattggcaccaacaattatggcacaacatgtgcaacatcatggaccaacatactttga

SEQ ID NO: 130338 - DNA, 391 bp, Zea mays
  Clone ID: MRT4577_50340C.1
gaccacctcttcttaatcctggtagctggggcaatgaaatgggagtcttcctccaacgaagggggcgcggctccagatgtaacacgcagccgtacccacactggactgacctgatgaccatgacccgccgagagcgcaaccagcagagcggaaaccccgagtcccctgggaacttgaccatcacgtactcccacatagcgctaaggtgcaagtatttcgcctgcacagtgaacaaggccaggctatccaaggtaatgacgctcagtccaaaaaccaacaggtatacaagagcaacgagtagcaccgctttttcctagtctaacgacagattgatcgagatgtgacgataccgctgccacggttgctccccccgctacagagggagaggaac

SEQ ID NO: 130339 - DNA, 261 bp, Zea mays
  unsure (1)..(261): unsure at all n locations
  Clone ID: MRT4577_50341C.1
gcaatctggataagtctccgaatatatttagcaaccgagcattcaaaaaacaggcgattagttgattcaaatagaccacaaaaacagcaatcagtcccacctctccagtttctattttttaaatttcctttcgataggattctatttcttatgatcaaccanaggaaaatctttattttctgagggatcctaactttccaaagaaatctgtaaggancattagccaattcacttctaatttgagagcataatgatttaaca

SEQ ID NO: 130340 - DNA, 2742 bp, Zea mays
  Clone ID: MRT4577_50342C.1
aggccggccgggccgggaggagctaggcgatcgtggagcaagctaataatggcgcgcatcatgacaacaaggcggtcggacagcatcgccgacatgatgcccgaagctctgcgccagagccggtactacatgaagagctgcttccagcggtacgtctcccggggcagcaggctcatgaagcagcagcatctcctggaggagctccacgccggtagctcggacagcttcctcgggcacgtcatttcctgcacgcacgaggccgtggtgctccctccctacgtggccttggccgtgcggaggaaccctggcgtctgggagtacatcaccgtccactccggcgacctcaccgtccagcagatcacgccctccgactacctgaggcgcaaggaaagcctatacgacgaccactgggcgcaggacgacaactccctggaggtgaacttgagcctctgcctctccacgccccgcctcacgctgccttcctccatcggcaacggcatgcacttgctgtccagattcctgtcctccagcctcggcggcgtgaacaagatcaagccactgctggactacctgctggcgctcaggtaccagaacactaagctgctcatcagcgacaccctcctcgacacggtgggcaagcttcaggccgcgctgctcctcgcccaggccttcgtctccgagcagcacccggacacgccgttccagcagatggcgcacaggttccacgagtggggactggagaaaggatggggcgacaccgccggggcgtgcggccagacgctgggcttcctctccgagatgctccaggcgccggaccctgtcagcgtggacaggttcttcagcagggtgccgtcggtgttcgacgtcgtcatcttctccgtccatggctacttcgggcagcacaaggtcctggggatgcccgacaccggcggccaggtcgtgtacatcctggaccaagttagagcgcttgaggaggagcttcttcaaagaatcaaagggcagggcctcactttcaagcccaacatccttgtggtcacaaggctcataccagaagcaaagggcaccacctgcaacgtggagctggaacctattgacaagacaaggcactccagcatcctccgtgtgccattcaagacccaagatggccaggatctgccccactgggtctcccgcttcgacatctacccttacctagagagatacgcccaggattcttgtaccaagatccttcatatattggggcgcaaaccagacctggtcatcggcaattacactgatggcaatttagtagcttacctcgtgtcaaggaagctaggagttacccaggggacgattgcgcatgctctcgagaagacaaagtatgaggattccgatgtcaagtggagggaaatggaccacaggtatcatttctcatgccagtttactgctgatatgatcgcgatgaacaccagcgacttcatcatcgctagcacctaccaagaaatagcaggaagcaaagacaagcctggccagtatgagagccactatgcgttcacaatgccagggctctgccgcttcgctacaggcatcagcgtcttcgaccccaagttcaatatcgctgcgcctggcgcagatcaatctgtttatttccccttcacactaaagcacaagcgcctcatgggcttgcacccacagatcgaggagctagtctacggcaaagaggaaaatgatgagcacatagggtacttgcaagacaggagcaagccggtcatattttcaatggcaaggcttgacaaggtcaagaacatcactgggctggttgaatggtatggccagaacaagaggctcagggaccttgctaaccttgtagtcgtgggagggctcctggaccccaagcactccaaggacagggaggagattgaggagataaacgagatgcacagtttgatcaacaagtaccagctcaaggggcagatccgctggataaaagcccagacagaccgtgtgcgcaacggggaactttaccgttgcgtagcagataccaggggagcctttgttcagcctgcgctctatgaagcgttcggactaactgtcattgaggcaatgaactgtgggctgccaacctttgcaacaaatcagggaggccccgcagaaatcatcgtcaatgaggtctccggtttccatatcaatccacttgatggcaaagaggcaagcaacaagattgccaacttcttccagaaatgcaacgaagatccaatgtactggaacagaatgtccactgctggactgcaacgcatctacgaatgctacacctggcagatctatgcaaccaaagttctgaacatggggtccatgtatggcttctggaggactctggataaacaagagaagcaggacaaacagcattacctacacatgttctacaaccttcattataggaagctggcaaatacggtgccaaaagtgggcgaacagcctgagcaagctacggcagcggcattgcctgataggtcggcaacaaggccaaaagaaagagggacacagataaggattcaaagaactgtgagcaacttacttggaccagtgcttccagcctcccatctctcggatgctgcctgaagtgaggggctatcctgaccaaaaccagatgtgtgcccgagcgataatctgtttcctccttttttttcctcataactgtcattgactgcaaaagatgtaaatggaaaataagtaaataaatgtgttaaaaacagtaaataaaat

SEQ ID NO: 130341 - DNA, 190 bp, Zea mays
  Clone ID: MRT4577_50343C.1
attaaaaaaataaatttaaaaattttgataataaaacaaaaaaaaaaaaaaaaagagaaaggtaaattaatgacagcgcagtgcgctgaataaagcaaaaaacatacgggtggcagggctggggctttcctgctcaggtaccggatcttgctgctattggagcgagtgctatgctcctcgattgtattac

SEQ ID NO: 130342 - DNA, 182 bp, Zea mays
  Clone ID: MRT4577_50344C.1
accctgtctctaaaaaaataaaaataaagcaagcatatactaggttaatccagatggagttaggagggtttataagggcagacacatcctagtaaagaggaaatagagcaactaatgctgttttagtgtaataaggaatgattataatgatgaactttagtcataaagaaaaggtgaaatta

SEQ ID NO: 130343 - DNA, 365 bp, Zea mays
  Clone ID: MRT4577_50345C.1
cgcttccgtctcttctctgctgctccaagtcagcacacatggaatcgacttacacgctgaggtcaacctacatgatgtcatcgcctactctgccgccagagctgcttctcctcattgtcgacgcggttgtgccgccaaacccgcatctgctcttccccgcatcgaactccacgacgcggacgcttttggcgttgacaaaggtatcgcgggcgacacatgcgcaggcgacgcggctgctgcggaagcggtgcatgtttgttgattcgagccgtcggctggcagatatcctgctgtgcatgccgcgcttggtgccgactctgcctccagtcctgtcgctgcggcacatttcggagctgtatatagct

SEQ ID NO: 130344 - DNA, 529 bp, Zea mays
  Clone ID: MRT4577_50346C.1
gccggccgggccgggactctaattcatataaatcaaagttaaaaatgtctcgtcctcaagaagatggtattattcgtttcggtgatcatatttcacttaagcatgttacaactggtcgtttcctcacttccaagggtgatgaacactatgaatctggttctcaacaacaaaaggtcttctcctctgagcaacttttgggtgatgaaagcacctggattgtccttcctcctcgcgtaactgaggaagagcccggatacgaagtcggtttcgaggatgaaatccgtctcaagcacattcctactcgtgccaacttgcactctcatgaagttgagagccctgcttctggtcaacaagaagtcagctgtttcggtaacgatgatgagtctgatgagaacgatatctggaaagttcttcaatttgacgaagatgatgagcaatacgatgatttctggcgcgtaaaccaacctgctatcattcgtcatgtacaaaacggcaagctcctccactctcatgaaggtgctttatctgg

SEQ ID NO: 130345 - DNA, 868 bp, Zea mays
  Clone ID: MRT4577_50347C.1
gaaacggcccctcttcctccccgcacccaattcactcacatggtcctcgcaggtggaataccttgatgctatctcccctcccacagcctagagtttctcccaatccaaccaatcacaagggtacgaaatccggataggggcgccgccgcatcccgggacgagatttcactccggcaccgccccccagcctcgcatcggtgatccactggtggcgcgcgtagggtttccggcggaattcgcgaggggattcgccgagggcggcggccgagatgatccggttgcagacgtacgccgtgttcagcctgctggcgacgataacgtcggtgtactatgcgttcagcagcagggagcagttctacccggccatggtctacctctccacctccaagatatgcttcgtgctgctcctcaacacgggcctcgtcgccatgtgcgtcgcctggcagctcgtgaagcgcgtcttcctggggacgctccgcgaggccgaggtcgagcggctcaacgagcagtcgtggcgtgaggtcgtggagatcctcttcgcggtcaccatcttccgccaggatttctccgtctctttcctcgccatggtcgccgccctgctcctcgtcaaggctctgcactggcttgcgcagaagagggtcgagtacattgagaccacgccctccgtgccaatgctgtcgcacataaggatcgtgtccttcatgctattccttcttgtcgtcgactgcctcttcctggcgaactcgctggggtcactgatacagaagcgggaggcatctgttgcaatcttcttttcctttgagtatatgatactggcaacatcgacagtatcgacattcgtggagtatgtattctatgtcagcgacat

SEQ ID NO: 130346 - DNA, 330 bp, Zea mays
  Clone ID: MRT4577_50348C.1
gatgggattcctcgccaataacatcatggtcgtgggcgccgtccttgccgcgcttgtcgtccgcgggtcatgcgggccccccaaagtgcagcccgggatcagcatcaccaccaactacaacggcaagtggctcaccgccagcgccacatggtactgtcaacccaactgtgcatgcgctcctgacaactgctgtgcgtgcgggatcaacaacgtgaatctgccagcctacaccatgatcatcgcatgcggcaacttccccatcttcaatgacggcaatggctgtggctcatgctacgaagtgagatgcaaggaaaaacctgactgctcggg

SEQ ID NO: 130347 - DNA, 490 bp, Zea mays
  unsure (1)..(490): unsure at all n locations
  Clone ID: MRT4577_50349C.1
agcaaacaacaaacaaaggcaccgaggcgagcgngccnccaagcncnggccanggcagccancgncgnggcgccgngcacggcccagaacncgccgcaggacnacgnggacccgcacaacgcggcgcgcgccgacgngggcgncgggccggggggcggggacgacaccgnggccgcgnacgcgcagagcnacgcggcgcagcgccagggcgacngcaagcnganccacnccggcgggcccaacggcgagaaccncnncnggggcnccgccggcgccgacgggncggcgnccgacgccgngggcnccngggngnccgagaagcagnacnacgaccacgacaccaacagcngcgcggaggggcaggngngcggccacnacacgcaggnggngnggcgcgacnccaccgccancggcngngcccgcgncgncngcgacaacaacgccggcggcnncaacagcggcaggaacaacccgccgggcaacggcgccg

SEQ ID NO: 130348 - DNA, 410 bp, Zea mays
  Clone ID: MRT4577_5034C.1
ccccaaaaccagatttccaggggctttccaaattaaaccaggggggggttaaaggggaagggggtccattggacttccatttggctacaactaaatggggacgaggttccaaaaaggagggaaacaactttacaagggttttatacagaggggtttaccggctacatcccccccggaaaaggccagacggtcaaaggcaggacatcaagtcggacaaacaggggggaaggcagggggtattatttttttcgccaaaaccctggggtaaagaggggaggcctaagggcctttggggctgtaaaacggttgggggggtaatacttaaggagccctgggaaaggggaaagaaaaattctgggaggggggcccaaatttgggattacggggggtggggagccgggacaatttga

SEQ ID NO: 130349 - DNA, 553 bp, Zea mays
  Clone ID: MRT4577_50350C.1
tttcgttaaattcctacatcatcacactatgatcgcacacctaggaaagataagcatacttcaccaaaacaactgtctgaaaaatctccctcttcaggtgatcagaggttttcaggcaggcctagtggtgggcgcagtctagataataaaggagaaagaaacagccttacgaaatacagagatagagatggcgacctagcccaagaacgatcacatcatcaagatcgaacaccagctaaagttccattcagagagctaacaccatcaaattcatccataagtagaagttgtcatttttcaggcagttcaccaaatcatcctctgccaccttctgcaaggaatagcgactcttccttccttagtctgcatgatgatgaccgtaggcctcaaaatggagataggagattccatggtcatcaaaagaggaatgacatgaattcggttcgtggacatggacatgcctggaacaatccgccaaactgggcttctccagtttctaatggatttgcccccatccaacatggtggtcctccttgttttcacgacagcaacg

SEQ ID NO: 130350 - DNA, 201 bp, Zea mays
  Clone ID: MRT4577_50351C.1
gccggccgggagacaccatcgctgaagaacaggccggatagaggatgatactggccgcgctctccgccaactccgatggacacatccttgccgagcgaatccatggggttcccgcggaggagaggctacactggccctccttcctgctgaagctcggacccgagaacctgaaaggccccaagaaccaggagctccacgctg

SEQ ID NO: 130351 - DNA, 434 bp, Zea mays
  Clone ID: MRT4577_50352C.1
tcgcgggactttcccactcttcaagccgtctacctccccgtaccctaaccggttctctctttcactcccccactcttcaaatcaaccaaacatgcctggtgttcgcgacgtttcggctgaggccttcatctccgcctactcttcccacttgaagcgatccggtaagctcgacgtccccgtctgggtcgacatcgtcaagaccggaaccggaaaggagctcgctccttacgacgccgactggttctacatccgatccgccgccgttgcccgtcacatctacctccgcaagcacgtcggtgtcggtgccctccaaaagctccacggatccgctgccaaccgcggtaaccgtccttcccaccacaccgacgcttccggctcgatcgagcgcaagatcctccaatccctcgagaagatcggcgttctcgagaaagaca

SEQ ID NO: 130352 - DNA, 647 bp, Zea mays
  Clone ID: MRT4577_50353C.1
ggatcagcagaaactatcgctcgtcgccgtcgaccaaagccatgccaccgacatgtgggacagtgctgcaggtcccactcggcagggacgccggcggttcttggagacagcgagagcgaccgaccgcgcgcgcctcctcctcctccttcctcgccaggcacggcacgactcccagtggccaagtacactcacccgctcgcgcgcgtgagcgatggaagctctcgcctcgcccgccgcctccttcctcccgggtatcccgagcccgagccctagccatctcgcgcgcgcgcctccccgatccgcggcggccgcgctctcgcggcccccttccgggcgctacatcgccgccgcggccgcggccgccacaggggaccactggggcgccgaccaccagcactaccacggaggacgcgcgggcgcgtcggaggccgggcctaccgcgtcggcgcgcggtgtcaagtgcgacgtggacgtggtgtcgtggcgggagcggcgggtgctcgcgtccgtgcctgtggccgccgacgtcgatacgctgtggcaggtcatcaccgactacgagcgcctcgctgacttcatccccaacctcgtccagagattaatgggcgagaactccatttctcgatggtagatggtgacttcaagaa

SEQ ID NO: 130353 - DNA, 195 bp, Zea mays
  Clone ID: MRT4577_50354C.1
ccccttcctcccccccccccccccccccctccccctgtgagtcgttcgagtaggacgtgtttcccaaagaccatcccattgctcgttctgtccctttgttcacaacctcctccatgaccaaactatccggtgttccatgtcgccggcgtgtaggaggtgaagatgattataccggatgcgctgcttcaactgcgg

SEQ ID NO: 130354 - DNA, 867 bp, Zea mays
  Clone ID: MRT4577_50355C.1
cattgggtccctcgaggccggccggggagggcggaagctgtccagatcgcgtgattccgcatcccgttcgcgagcgcgacacacgctgacagctcacggctgaccttcccgagtcccgcggcctccagctccatcttgattcttgaggcgaagccccggtgcgtaagagtctgccatggccagcgagaataaggtctttgggttcgaggaagtcgccaagcacaacgtcaccaaggactgctggatcatcatcgccggcaaggtgtatgacgtcactccgtttatggatgagcatcctggtggagacgaggttttgctagctgtaactgggaaagatgctacagctgatttcgaagatattggccacagtgattccgcaagggacatgatggagaagtaccacatcgggcagatagatgcttcaacaatcccagcaaagcgtgctcatgtgcagccccagcaagcacccagccatgcagacaaggataatgacctccccatcaagatcctacagttccttgtgcccattatgatcctgggccttgcatttggtatacggcagtacaccaaatcagagtagtaactattcttagaggcttgcctttggagcctgtcttatggtaatggttcgaataaaaacagttcaataattgcgcattgtatttgtcaggtcgatgttgtctcattagtcacatgctactctgtattatggacatccatgttgaaatgtgcgcttttcccccatgaacaaaggcaaacaaaaagcggccgatgaattctgactcttaaaaaaaaccgagtagttgataccagattattgcagtaaaaaaaaaaaaaaaaaaaaaaaaaacaaagggcggccgccgc

SEQ ID NO: 130355 - DNA, 1156 bp, Zea mays
  unsure (1)..(1156): unsure at all n locations
  Clone ID: MRT4577_50356C.1
ccaccttcgtcttgttgtcgaacgtaggtgagccaaactgccaaagcccatcgggcaaccactagcaattcaactgctttcgcttcatcgctccatggctcaattcaatgcggtttcatattttttgctgccaagggcctcgatgccggcggccgggggaaagctgtccagatcgtgtgattttgcatcccatccgcgagcgcgacacgcgctgacctactcgacggcctccacctccgtcttgaggcgaagcgtagtgcgaaggaccaactctttcgaagggaaattatatctcaggtgcttaggagtctgccatggccagcgagaataaggtatttaggttcgaggaagtcgccaagcacaacgtcaccaaggactgctggatcatcatcgccggcaaggtgtatgatgtcactccttttatggatgagcatcctggtggagatgaggttttgctagctgtaactgggaaagatgctacagctgattttgaagatattggccacagtgattccgcaagggacatgatggagaagtaccacatcgggcagatagatgcttcaacaatcccagcaaagcgaacttatgtgcacccccagcaagcgcccagccactcagacaagaataatgatctcctcatcaagatcctgcagttccttgtgcccattatgatcctgggccttgcatttggtatacgtcagtacaccaaatcagagtagtactgttcttgaagacttgcctttggagtctgttttatggtaatggtttggatgagaacagttcagtaattgcttagtgtatttgtcaggtggatgttatctcattggtcatatactatgtattatggacatccatgtgttgccgaaatgtgctcttttccccatgaaccgaggcatacaagatgaattctgactcttccatgaaaaaaaaaaaaaaaaccgagtagttgataccagattattgcagtaatgtttgttttgtgtatgcgcacttggatgtcgcaataaatagaaccaaaccataaactacgttcatcgatgattaatacacccatggataatactccctgttttttccaacaatataaagtgtgttttctctattctcacnnnnnanaanannnnnnnnnnnnnnnnnnnnnnnnnnnnnnnnntcc

SEQ ID NO: 130356 - DNA, 598 bp, Zea mays
  unsure (1)..(598): unsure at all n locations
  Clone ID: MRT4577_50357C.1
caccaggagctctctcaaacgcataagctcacatcggccataaaaaagctccccgtctcccctagatcctctcgcggccagactcagcctctgctccccgccgctcctctccgcgcccctgcataccggatctcggcatgggcaccgccaccaccaacggatcggcggagcaggcgtccgcgcccgtgccggcgctcaagttcctcatgtaccgccgcacgggctggatcggggggctgctgggcggcctctgcgccgcgcagcgggatccccttcctctacagcgccggcaggctcgagaaccgcacccagctagaggccgacatcgacaccacccagcccacccacaagagcaacgccgcggacgtcacggcccgccccaacaaccactggtgccagactcaccgtgccgagaccatccgcgccaacaacaagagcacgctcacgctcaacaacatgtgccgnggccgaagggtcctgctcatcaactacgccacgagactgaatctccaagtacgacgccagccacccaatcggatgcggggccggctttaaggacgaagacacgcccaacttcgggggatcatcctactccaaa

SEQ ID NO: 130357 - DNA, 478 bp, Zea mays
  Clone ID: MRT4577_50358C.1
attcggctcgaggacacagggcgccaggggcttttcaggcctcatgctttgggtggccacggggggccgtcaatatgctgccatggcggtaacctgcgtcctattcacctgcgtctgtgccctccaccactatggtgcgctccgggttggatccctggtcgccccggtcgtcctagcctggctgtactgcatgggtgctcttggcctgcctaatatcattcactgtaatcctcatatctaccaacctttatacccgacttacatgtccaaggtcttacaaaaagactccaaaatatggttggatgtcacttgtccctatctggctatgtatgacaggatctgatgctgcgtttgcagatcttgatcattagtgacacagatgcattccatgttacttctggacctgcacgaaagtgcatataatgagcgtatggcaaatgacagtgccgatcccctagctctacacttgtggagcagc

SEQ ID NO: 130358 - DNA, 335 bp, Zea mays
  Clone ID: MRT4577_50359C.1
ccagagtccaggctccaggtattaccaccactccgactcgtctcgtcctcacaccccactccaccaccacctctgccttgcaaagatttccaccgatccgacgcctcgtccgcgcgctcggaggcagtagtgcggactaccctccccatactccatcccctacgcgaaggatacagccacctcgagttattaacgctgacgaggagaggtgcggcattccagcaaggatccttctcgagagcccagacaatctgaccgtccttgactatctggggggagccggtctgtactctctctttaatttgagagacgcgacaggtttttttttttgcaac

SEQ ID NO: 130359 - DNA, 229 bp, Zea mays
  Clone ID: MRT4577_5035C.1
ccggccgggagcgcaccctttccggacacactaggctagtctcacgagccatctcccacaggtgaacgtgatgtttgcacagctagtgcccgtactctgcgctaccgtcaccggcccggccaagcccgttctgacggtcgccgagccttagcatataccagactctcgccgagctgtccgccgtgccccatcgtaagccgccctagctctcttgtactgcagacagacc

SEQ ID NO: 130360 - DNA, 638 bp, Zea mays
  Clone ID: MRT4577_50360C.1
tcgggctgcctgcaaaaaggtgagaagaaagaagccgtgtccgcgtgattttctgggtgaatttttcccggcctccgctccggccagatcggcgcgggagtttgtcatggcgtctaagcgcatcctcaaggagctgaaggacctgcagaaggacccccccacatcatgcagtgcaggtcctgctggtgaggacatgtttcattggcaagcaacaattatgggaccacctgacagtccctatgctggtggtgtttttttagtgaacattcatttcccgccagattaccccttcaaacctccaaaggtttctttcaagacaaaggtcttccatcctaatatcaacagcaatggaagtatatgccttgacattctcaaagagcagtggagccctgctttgacaatttctaaggtcctgctcgtctgggcgccattgttcccttggatttgttgttggtcgtatgtatccctgatccatctaggatcatcgtattgtattgtagtgtatgtatgtcgtcggcctaccatcgttgccatccaccatagtgaggtggttggacatgcttcgcctatatgcacctgtgcttgccttccttcgggtcggtgctgtttggttaatgttcatcgaacacgttgatttc

SEQ ID NO: 130361 - DNA, 642 bp, Zea mays
  Clone ID: MRT4577_50361C.1
ctcgaagccggccgggccgcgtgattttctgggtgatttttcccggcctccgctccggccagatcggcgcgggtgaaccccggcccctaccgatccggatccgtccccatcgcctcgagtttgtcatggcgtctaagcgcatcctcaaggagctgaaggacctgcagaaagacccccccacatcatgcagtgcaggtcctgctggtgaggacatgtttcattggcaagcaacaattatgggaccacctgacagtccctatgctggcggtgttttcttagtgaacattcatttcccgccagattaccccttcaaacctccaaaggtttctttcaagacaaaggtcttccatcctaatatcaacagcaatggaagtatatgccttgacattctcaaagagcagtggagccctgctctgacaatttctaaggtcctgctctccatctgctccctgctgaccgactccaacccggacgaccctcttgtcccggagattgcccacatgtacaagacggaccggccgaagtacgagtcgacggcccgcagctggacgcagaagtacgcgatgggctgacgaacgctttcctgctcgtccacccgactggcgtctcaagaaagtcgttcctgggcgcccttgttccctt

SEQ ID NO: 130362 - DNA, 485 bp, Zea mays
  Clone ID: MRT4577_50362C.1
gcgagcgagggaccctgttccgtaagaaaagacagaagcgtctctctcctctcagagtccacgatcacaaacctctcgtctgctgcctgactgcctgcctgcctgcacaaaggagtaagtcaatgagcataagcgcatcctcaacgagctgaaggacctgcagaaggacccccccacatcatgcagagcaggacctgctggagaggacatgtttcattggcaagcaacaattatgggaccaccagacagtccccatgctggtggtgttttcttaatgaacattcatctaccgccacattaccccttcaaacctccaaatttttctttcaagacaaagggcttccatcctaatatcaacagcaatggaactatatgccttgacattctcaaagagaagcggacccatgctctgacaattactaaggacctgctctccatctgctccctgctgaccgaccccaacccggacgatcctcatgtcccgg

SEQ ID NO: 130363 - DNA, 206 bp, Zea mays
  Clone ID: MRT4577_50363C.1
tcgtcgtcgcgcatgcacgacgataccgtacagacatcaggaacttacagactacgagacaagacttgactaactcgtgcatattctacgtaccgagacagacggcgaacggcagcagagcagagcagcatggaccgaaccacaaggacggagacctgtgaccgaagtacagtgcatggcacaagcatcaccgagacagttaccac

SEQ ID NO: 130364 - DNA, 786 bp, Zea mays
  Clone ID: MRT4577_50364C.1
cattgggtacctcgaggccggccggggcgtccccgttcccaacctctcgtctgctgcctgcctgcctgcctgcctgcaaaaaggagtttgtcatggcgtctaagcgcatcctcaaggagctgaaggacctgcagaaggacccccccacatcatgcagtgcaggtcctgctggtgaggacatgtttcattggcaagcaacaattatgggaccacctgacagtccctatgctggtggtgtttttttagtgaacattcatttcccgccagattaccccttcaaacctccaaaggtttctttcaagacaaaggtcttccatcctaatatcaacagcaatggaagtatatgccttgacattctccctgctgaccgaccccaacccggacgaccctcttgtcccggagattgcccacatgtacaagacggaccggccgaagtacgagtcgacggcccgcagctggacgcagaagtacgcgatgggctgacgaacgctttcctgctcgtccacccgactggcgtctcaagaaagtcgttcctgggcgccattgttcccttggatttgttgttggtcgtcgtgtgtatccctgatccatctaggatcatcgtattgtattgtagtgtatgtatatcgtcggcctaccatcgttgccattcaccatagtgaggtggttggacatgcttcgcctatatgcacctgtgcttgccgtccttcgggtcggtgctctttggttaatgttcatcgaagacgttgatttcgttgcccgaaaaaaaaaaaaaaaaaagcggcc

SEQ ID NO: 130365 - DNA, 773 bp, Zea mays
  Clone ID: MRT4577_50365C.1
cattgggtacctcgaggccggccggactcacttcacgcaccaccctagtacaagagataccacgccaaacgtacgccagaacaagctaagcgcgcgcgagccgcagacatccgaacgatggccgtcgtcgaggtcgtcacctccgagctggtggcgccgagcgagcccacgccgcggcgcccgctctggctgtccaacctcgacctcgccgcgcggaacggctacaccccgacgatctacttcttccgccgtccccaggacagcagcgacggccggctgcgtgcggactcctgcttctcgacccacgcgctgcgtgcggcgctggccgccgcgctggtccggttctacccgtttgccggcggctccgcgccgccggccgcggcgggcgcgccgagatcgactgcaacgccgcgggcgcgctcttggtcgtcgcgcggtccgccgcggcgctcgaggacttcctccacgacttcgcgccgtccaaggccatgaacgacacgttcgtgcccacgtacgactccgctggccccgacgcaccgttgctactgcttcaggttacctttttcaggtgcggcggcgtggcgctcggcacggcgatgcaccacttcgtcatcgacggccgcagcgccttccacttcatccgaacgtggtccagcatcgcccgtggagacaccgccgccgcgcccccgtcgcttgaccgcacgccactccgggcgcgcccactgctcactactgccgccgccctcttcgacacacccacgagtacggcggcc

SEQ ID NO: 130366 - DNA, 266 bp, Zea mays
  Clone ID: MRT4577_50366C.1
gcacgtcttgcaagttttaaagtaacagaagaaaaaccacccgaccccaaggtttaacgaggggccttttgttcaacctttgtggtccacaacccaaccagttccggagattaatttatgctggaagtaggggcctgaacccgctggaggtaaaaaggtcccaaaattaaaaccttcaatggcatgtaaaataaggttccggaaaaaggaagggggtggggcgtcttttgccataaggtttcgaataaaaggaccgcggtcctttt

SEQ ID NO: 130367 - DNA, 1106 bp, Zea mays
  unsure (1)..(1106): unsure at all n locations
  Clone ID: MRT4577_50367C.1
gccggccgggctgcggcctgcaaaaaggtgagaagaaagatccgtgtccgcgtgattttctgggtgaatttttcccggcctccgctccggccagatcggctcgggtgaaccccagcccctaccgatccggatccgtccccatcgcctcgtgtgttttccgtcgagtattttagcgtgtgtgtccccccctcttcgcttcggttggtgcgtgcggctgtctcgggtagatctgtggtttggttcgccttgaaggcgcgcggcggcggtgtcgcggcttgtagcttgcgatttcacggtggagcttgtcggctgttggggtcggatttggagtttgtcatggcgtctaagcgcatcctcaaggagctgaaggacctgcagaaagacccccccacatcatgcagtgcaggtcctgctggtgaggacatgtttcattggcaagcaacaattatgggaccacctgacagtccctatgctggtggtgttttcttagtgaacattcatttcccgccagattaccccttcaaacctccaaaggtttctttcaagacaaaggtcttccatcctaatatcaacagcaatggaagtatatgccttgacattctcaaagagcagtggagccctgctttgacaatttctaaggtcctgctctccatctgctccctgctgaccgaccccaacccggacgaccctcttgtcccggagattgcccacatgtacaagacggaccggccgaagtacgagtcgacggcccgcagctggacgcagaagtacgcgatgggctgacgaacgctttcctgctcgtctgggcgccattgtttccttggatttgttgttggtcgtatgtatccctgatccatctaggatcatcgtattgtattgtagtgtatgtatgtcgtcggcctaccatcgttgccatccaccatagtgaggtggttggacatgcttcgcctatatgcacctgtgcttgccttccttcgggtcggtgctgtttggttaatgttcatcgaagacgttgatttaaaaaaaaaaaaaaaaaaaaaaaaaaaaaaaaaaaaaaaaaaaaaaaaaaaaaaaaaaaaaaaaaaaaaaaaaaaaaaaaaanaaaa

SEQ ID NO: 130368 - DNA, 937 bp, Zea mays
  Clone ID: MRT4577_50368C.1
cctcgaggccggccgggacttcacgtccaccctagtacagagataccacagtccacagcaaaacgtacgccagaacaagttaagcgcgcgcgagccgcagacatccgaacgatggccgtcgtcgaggtcgtcacctccgagctggtggcgccgagcgagcccacgccgcggcgcccgctctggctgtccaacctcgacctcgccgcgcggaacggctacaccccgacgatctacttcttccgccgtccccaggacagcagcgacggccggctgcgtgcggactcctgcttctcgacccacgcgctgcgtgcggcgctggccgccgcgctggtccggttctacccgtttgccggccggctccgcgccgccggccgcggcgggcgcgccgagatcgactgcaacgccgcgggcgcgctcttggtcgtcgcgcggtccgccgcggcgctcgaggacttcctccacgacttcgcgccgtccaaggccatgaacgacacgttcgtgcccacgtacgactccgctggccccgacgcaccgttgctactgcttcaggtacggtaggcacgtacgttgcagcatgcactgacggatgacttcccgttggttggttccaacttctaatcaatcatcgactttcctggatggatcagtttgtgagagcatgtggccgcctagttcgagtgaactggggacagattacgcaataacgtacgacacctttttgctgacataataatgaacggaacgatccaacgagatcattaaggatagtggtcaaggttaattaaaccagcaagttggtttgggtcttgggtcaccaaccaagcaaccatggttatctgttatctcaggtgcctgtcgtctccactcgctgcaggtcacctttttcaggtgcggcggcgtggcgctcggcacggcgatgcaccacttcgtcatcgac

SEQ ID NO: 130369 - DNA, 398 bp, Zea mays
  Clone ID: MRT4577_50369C.1
aaaaggcgtttggcatggcgtatatgcgcatcctcaaggagctgaacgacctgcaggaggaggcccccacattatgcagtgcacgtcctgctagtgaggacatgtttcattggcaagcaacaattatgggaccacctgacagtccctatgctggtggtgtttttttagtgaacattcatttcccggcacattaccccttcaaacctccaatggtttctttcaagacaaaggtgttccatcctaatatcaacagcaatggaagtatatgcctcgacattctcaaagagcattggacccctgctttgacaatttataacggcctgctctccatctgctccctgcttaccaacctcaaccgggacgaccactttgtgcaggagattgcccacatgtacaag

SEQ ID NO: 130370 - DNA, 435 bp, Zea mays
  unsure (1)..(435): unsure at all n locations
  Clone ID: MRT4577_5036C.1
cgtgggcggccgcgtgggccgccccgtggattcgagcctggttcccgctggcgtaccagcttatcgtatcgacagtcttctttgcgagatgttctactagctgctgaaagatgctatcagggtaccttgattttgttattttcttggaaaagaattagttgatggggagattttttttatttgtgctaaagtgtttgtttttagtttttgtctaccgattgtcaaatctattatagatattgagggtaaagatgttactattactgtattttttaagatggttggctatgctctncatggtttaaatatttttttctaagaaagaattagttcttgtgtgattaatcttttttcaattattatatttgatagagctgctatatatgtatttgtgatgaaaactaatctattgattagttttgaagaatgtttttt

SEQ ID NO: 130371 - DNA, 906 bp, Zea mays
  Clone ID: MRT4577_50370C.1
cattgggtacctcgaggccggccggggaaagtgaaacccgtctcgcaccacaagcgagcgagggacccggggcggaagaagagagagaagacgtctctctcctctcggcgtccccgttccccaacctctcgtctgctgcctgcctgcctgcaaaaaggagtttgtcatggcgtctaagcgcatcctcaaggagctgaaggacctgcagaaagacccccccacatcatgcagtgcaggtcctgctggtgaggacatgtttcattggcaagcaacaattatgggaccacctgacagtccctatgctggtggtgttttcttagtgaacattcatttcccgccagattaccccttcaaacctccaaaggtttctttcaagacaaaggtcttccatcctaatatcaacagcaatggaagtatatgccttgacattctcaaagagcagtggagccctgctttgacaatttctaaggtcctgctctccatctgctccctgctgaccgaccccaacccggacgaccctcttgtcccggagattgcccacatgtacaagacggaccggccgaagtacgagtcgacggcccgcagctggacgcagaagtacgcgatgggctgacgaacgctttcctgctcgtctgggcgccattgttcccttggatttgttgttggtcgtatgtatccctgatccatctaggatcatcgtattgtattgtagtgtatgtatgtcgtcggcctaccatcgttgccatccaccatagtggaggtggttggacatgccttcgcctatatgcacctgtgcttgccttccttcgggtcggtgctgtttggttaatgttcatcgaagacgttgatttcgttgcccctggctcttccatgcccatgtgaatcattttgcatacgtgttcttat

SEQ ID NO: 130372 - DNA, 920 bp, Zea mays
  Clone ID: MRT4577_50371C.1
attgggtacctcgaggccggccggggaaacccgtttcgcaccacaagcgagcgagggacccggggcggaagaagagagagaagacgtctctctcctctcggcgtccccgttccccaacctctcgtctgctgcctgcctgcctgcaaaaaggagtttgtcatggcgtctaagcgcatcctcaaggagctgaaggacctgcagaaagacccccccacatcatgcagtgcaggtcctgctggtgaggacatgtttcattggcaagcaacaattatgggaccacctgacagtccctatgctggcggtgttttcttagtgaacattcatttcccgccagattaccccttcaaacctccaaaggtttctttcaagacaaaggtcttccatcctaatatcaacagcaatggaagtatatgccttgacattctcaaagagcagtggagccctgctctgacaatttctaaggtcctgctctccatctgctccctgctgaccgactccaacccggacgaccctcttgtcccggagattgcccacatgtacaagacggaccggccgaagtacgagtcgacggcccgcagctggacgcagaagtacgcgatgggctgacgaacgctttcctgctcgtccacccgactggcgtctcaagaaagtcgttcctgggcgccattgttcccttggatttgttgttggtcgtcgtgtgtatccctgatccatctaggatcatcgtattgtattgtattgtagtgtatgtcgtcggcctaccatcgttgccatccaccatagtgaggtggttggacatgcttcgcctatatgcacctgtgcttgccttccttcgggtcggtgctctttggttaatgttcatcgaagacgttgatttcgttgcccctggctctttcatgcccatgtgaatcattttgtcc

SEQ ID NO: 130373 - DNA, 478 bp, Zea mays
  unsure (1)..(478): unsure at all n locations
  Clone ID: MRT4577_50372C.1
cccacagcgtccgggaggagtatggcagcggtggcggggggtatggtaggaaggcacaggaggagacctacggctgcttgacccatggctatggcaggacgaacgaggagcagagctatggcggttctggctatgggtatgagaagaaggctcngaggaggacgaaggagcctttggctctgctggctaccgtaagccaacaccctatgacgaggagacacactgtccataccgatatggagaggagcactccaagtatcagagcggcgagaatgacaggccgacctatggccgaagagaggcactctacggccgtatgaaagatgatgactactcgaacgatgagaagacgcggcgtaattctaaggaccaacatcatggtcaccactactatgactaaacaccagagccttctgctgagcgtcgtcctgaatcaccgctactgctactatatccatgcgctcgcatagataaagac

SEQ ID NO: 130374 - DNA, 909 bp, Zea mays
  Clone ID: MRT4577_50373C.1
tgggaccctcgaggccggccgggccggggaaacccgtctcgcaccacaagcgagcgagggacccggggcggaagaagagagagaagacgtctctctcctctcggcgtccccgttccccaacctctcgtctgctgcctgcctgcctgcctgcctgcaaaaaggagtttgtcatggcgtctaagcgcatcctcaaggagctgaaggacctgcagaaagacccccccacatcatgcagtgcaggtcctgctggtgaggacatgtttcattggcaagcaacaattatgggaccacctgacagtccctatgctggtggtgttttcttagtgaacattcatttcccgccagattaccccttcaaacctccaaaggtttctttcaagacaaaggtcttccatcctaatatcaacagcaatggaagtatatgccttgacattctcaaagagcagtggagccctgctttgacaatttctaaggtcctgctctccatctgctccctgctgaccgaccccaacccggacgaccctcttgtcccggagattgcccacatgtacaagacggaccggccgaagtacgagtcgacggcccgcagctggacgcagaagtacgcgatgggctgacgaacgctttcctgctcgtctgggcgccattgttcccttggatttgttgttggtcgtatgtatccctgatccatctaggatcatcgtattgtattgtagtgtatgtatgtcgtcggcctaccatcgttgccatccaccatagtgaggtggttggacatgcttcgcctatatgcacctgtgcttgccttccttcgggtcggtgctgtttggttaatgttcatcgaagacgttgatttcgctaaaaaaaaaaaaaaaaaaaaaaaaaaaagtactctgcgttgttaccactgct

SEQ ID NO: 130375 - DNA, 198 bp, Zea mays
  unsure (1)..(198): unsure at all n locations
  Clone ID: MRT4577_50374C.1
gcgtccgaacactatctancacacaatcacgaagactctttttgtttttaccacaaaccaccaatccgtgaaagcagcttggtttactgtcagcaggggcagcacagacaccgcgccacggtccatgtccaccaatacgcctacccattctgactcgttaatctcggtaccgtctgcatgagtcacaccacgttaaca

SEQ ID NO: 130376 - DNA, 162 bp, Zea mays
  Clone ID: MRT4577_50375C.1
cacccccgtcctgcgggctgttatacatagtaatgactgctcgtccaagcgccatacgagatcgttaccaccgttcccctcgacgtcttcagcaaaaattcctagcacctttctgcagccgtgcgaatgcagttgctaggagaatctcgtagcaagctacaa

SEQ ID NO: 130377 - DNA, 263 bp, Zea mays
  Clone ID: MRT4577_50376C.1
agacagtgcagccacccagcctttaccagcagcgtacggcagacgaaggcagtcgaggtgtggaggtgatcacgaagatacatgtggttgattgtttaatttgatagtttacattttttatgctttgtgttggtgtgtaatttttgtactcttggtggctagtttttgtcaaatcttttttggaatattgcttaaatgttttgattttatgatagtgaagcttgtattcagtgttttgccaattaatattatatgcttgtaat

SEQ ID NO: 130378 - DNA, 413 bp, Zea mays
  Clone ID: MRT4577_50377C.1
ccggccggagtcaatgggaagcacgcagagacgggggtcgtgaagcatgctctatctctaatacgtcgagcgttctggcgaattcagcacgatggcccagttactaccgcgcgcatgaccgttttctcgctcgacaagccacctgatggagggggtgtacattcatataggccgggcgtgaggtccacgccggagagggcggctgggagacggacagcgtcgagcttggcagttcagaataatggcacaatgcagctcgacgacaccattggcggggggagagagctttctaaacactttatagatattgcggcctgcggaagctcaaggcggacgctcgcgttgttaacaatcgagcgcgtgtcaagtgtgagaggcggagtgtcaccgtccaggagcctcttccatgctga

SEQ ID NO: 130379 - DNA, 383 bp, Zea mays
  Clone ID: MRT4577_50378C.1
gaacctatcattgaagcgtaaaggtacatgtgaatgaaattatgccaattcgataaatggagaggtgaaaagaaataatcaataatttcaaacactaagggaatagcgcgtacaatataattttcaatatattttatgcagggacatttctttttactgctaagactacaaatggtggggagatttggtactgttgtccttgcaagccatctttacaaggtttgtttgagtttaccaaacaacaacagtttttccaatagagggaccttattcaaggtgcccccgtcatagtcaatcgcacggacggtcgttttggaggttaaacgatcaactgtgtcattgggaattgttgtacgaggctcctgcctttgggtttcccaggt

SEQ ID NO: 130380 - DNA, 210 bp, Zea mays
  Clone ID: MRT4577_50379C.1
gtgtgcactatgtattctggttctaactgccagctccaccaggaggcatacaatgcggcggctgtccgtgccaacgatctccgcaggcttatctatggccccaagtgcatccgccaactactgtatatctgccatctcctttgcgactcccacagacggtccacatggcggatccggtgcagctgtcaacggacgcaaatgtgaaggcgg

SEQ ID NO: 130381 - DNA, 779 bp, Zea mays
  Clone ID: MRT4577_5037C.1
attcggctcgaggtcaaagacaaggacaacgtgaccttggaggatgtgctgcagcctggaacaaacatgcttgctgctggctactgcatgtacgggagttcatgcacgcttgtgctgagcactgggaacggagtcaatggcttcactctcgatccttcccttggagagttcattttgactcatccaaatatcaaggttaatgataaaaaaaactccacacttcttttctttcctggctgatcgatacccctggttagcactataaaacaaaatggtactacttgagtttgggtatcacgttttgtgcgtgcttcgttcttttcttgtgcagataccaaggaaagggaagatctattcagtcaacgaagggaacgccaaaaactgggatgggcctacagccaagtacgacgagctagggggctcgtttctgtccaaaaactactactgtgatttcgtaacaagccaggctgaattttatgccgtttcagattcgtggagaaatgcaagtatcctgaggatggttcaccgcctagatccttgagatatatcggaaggtgatccattgctcgttctcgactgtgtataccggtgtctcacagtttgctttcttctgcggtcatgaattgaatgtgtctgaagttttattaagaataatagtgcttgctcaagctattggtatctactcgtttttttcttctttttttttgtttaactaaaacggttgaatctatgttgttgtggacttgtggtccttgtgaatggtttgcagtatggttgct

SEQ ID NO: 130382 - DNA, 459 bp, Zea mays
  Clone ID: MRT4577_50380C.1
aaagtacatttatgctctcaacatttacacatgatcgtaatacaatttattaaggactaaatagtcttttcctctttcgatcatcatcattattcatcatcttcattgcgagccgaagctgtctatctggtgatagcttcagcgtttacttttatcctctttgatctgtctttatcttgtatgccttcgtcataaaggagaagagcttgtatcttgaagacgaagtttcctgtaatagattatcctgaaaacaaattgttaattatttttttgaagatcttctgaaggagaaggcctccaacaataaatgagcggcaactacttccatacaggcactttctcgtctccaaagctaagtaggatggctttgcagtaggtggtaccacaaaacgctagtgaaaattttaggaccaattctctgtattccattggaaaatataatcgtttcttgtgtaccac

SEQ ID NO: 130383 - DNA, 147 bp, Zea mays
  Clone ID: MRT4577_50381C.1
ggactatctacgcaaacttctgcttatgctataataaaaagaataacattttaacctctttatccgccaggtcggcaggtccggggaagtcttatgggtcaccggtcattctccccccttatttaggggcccaatcaataccctgcc

SEQ ID NO: 130384 - DNA, 616 bp, Zea mays
  Clone ID: MRT4577_50382C.1
attgggtacctcgaggccggccgggccgggaaaagaacacattgttagtattagacactttctagttcatcacccatggcaaagttcttcaactacaccatcatccaaggactcttgatgctttccatggtacttctggcatcgtgtgctattcatgcacacataataagtggggaaactgaagaggttagcaacacagggagcccgacagtgatggtcatgatgggggcaaaccgaaagataattgaagataataaaaatttattgtgctatctaagggctctagagtactgctgtgcaaggaccagacaatgctatgatgacataaagaagtgcttggagcattgccgtggttgaaaggtgtaataaaggatatgctttctttggatcttagttggtgatcagaaaaatgttctaccaattcatgcatgtaccaaaggataatataagctgctcaaaaaatcgtggttaattaaagttttttgttggaaaaatgataacttccttacaaacatataccaaattaaagagaccctcttaatgcatgatctatcttttaataaagaacatattccatagtaaaaaaaaaaaaaaaaggcccctatatattttttaa

SEQ ID NO: 130385 - DNA, 456 bp, Zea mays
  Clone ID: MRT4577_50383C.1
cagaaacaggtgctggggctttgaccctatgagcgccacaagcccggagaacaacagttcactgatttaactaaaattctgtaaataaaattggaatgtcggccagaaacttgcaacatcggttgagggctcacacacctggaagattgcatgtaaacaaccttatttttcctggactcgggcaggaggtagcgcttttttactcctggctttggaacataaaccacgatgctttgtttgcgcccattaactgacccattgttcgccaatgttcggagaacaatcctagacatgggggatttatctgtgacagctcgagaccgccccgtgaaaatgaagctgttctaaggtgtgttatggagcgttttcttggcgacttggacaatgtatagcggaacttctgcggcaatccaatgggagatcagggtccctacagacagccttattcatgtttgc

SEQ ID NO: 130386 - DNA, 210 bp, Zea mays
  Clone ID: MRT4577_50384C.1
tggcagcacacggacggcgttgccacacgacgctatggtacttaccgaagactgcatgcatgcaccttgatgtacccagcgcatgattacctgtagtgacgatgcaagctagactactcaggacggacctaccttgcagttggacgcgggcacaagcacatactggtcaacgcgactacctgcaccaagaaaagactgaaagacatgctc

SEQ ID NO: 130387 - DNA, 576 bp, Zea mays
  Clone ID: MRT4577_50385C.1
gggtacctcgaggccggccgggatcccctcattataccctactcgccgccatggcttgctccttccctgctggagcatccgccttgtccggcccaccaccatgcgtcagaactatcgacgatgaaccacacggacgctatgctcttcgcgccgcgcgtgcgctgctgggagtacaggtacgactcgtccattgtacatctcaccaggcccatcccgactccgacaacggccgcctgctcgtctacaacgtcaagctggtatatgatgtctacccagaccgcgaaaaccatggcgggatgaacaggtatgtgctccaaggggattgtctatgattactccaagaacaaatgcatcacccagctctactaccacatgaacaacacgtctgtctgtgaggacaaaactgcacgcaacattgacggactgaaggaacttaactcctactgcgcgaatgatgatagaagctacaagtgacttgtgagatcatcccttgtggactgtgcccacgacagacattaaaacctacccgaggatcaaatgtctatgaaacactgagcactaatgccgcgagctccg

SEQ ID NO: 130388 - DNA, 406 bp, Zea mays
  Clone ID: MRT4577_50386C.1
ttgggtacctcgaggccggccgggaaccattgttagtattagacactttcgcgttctagaactaggcgaagttcttcaactacaccatcgtccaaggactcttgatgctttctatggtacttctggcatcatgcgtcattcatgcacacataataagtggggaaactgaagaggttagcaacattgggagcccgacagtgatggtcacgatgggggcaaaccgaaagataattggagataataaaaatttattgtgctatctaaaggctctagaatattgctgtgaaaggaccaaacagtgctatgatgacataaagaagtgcttggagcactgccatggttgaaaggtgtaataaaaggatatgctttctttggatctaaaaaaaaaaaaaaagggcggcgcgcg

SEQ ID NO: 130389 - DNA, 533 bp, Zea mays
  unsure (1)..(533): unsure at all n locations
  Clone ID: MRT4577_50387C.1
gccggccgggccgggaaataaccattgttagtattagaccctagctagttcatcacccatggcgaagttcttcaactacaccatcgtccaaggactcttgatgctttctatggtacttctggcatcatgcgtcattcatgcacacataataagtggggaaactgaagaggttagcaacattgggagcccgacagtgatggtcacgatgggggcaaaccgaaagataattggagataataaaaatttattgtgctatctaaaggctctagaatattgctgtgaaaggaccaaacagtgctatgatgacacaaagaagtgcttggagcactgccatggttgaaaggtgtaataaaaggatatgatttctttggatcttatttggtgatcagaaaaatgttctaccaattcatgcatgtaccaaaggataatataagctgctcaaaaaatcatggttaattagagttttttgttgaaaaaanaaaaaaaaaaaagaaaaaaaaaaaaaagaaaaaaaaaaaaaaaaaaggccccta

SEQ ID NO: 130390 - DNA, 297 bp, Zea mays
  Clone ID: MRT4577_50388C.1
cgcgctggacttggcttgagctgtgagggcgtgggagggcaggatagcaccggaagatgctgctccgggcccaacacctgccctggccaggctctcccctcccaggggcagcgcctagtccccaggggctgccagagccctgtgtgccttgccgcattcccctgatgcagcttttggcaactgaacggcagggctctcgctgagtgcacctggggcttcctgagcccatctgcggcggccccaccctggcctaggtgctgagtgcagctgctgcagacagcacctcgctccttagtg

SEQ ID NO: 130391 - DNA, 294 bp, Zea mays
  Clone ID: MRT4577_50389C.1
gcctgcaggtctactctagatgatcccctcggggaataccaattccatatgaccttgttatacggaggcaaaaatgttgatatagggatagtaataatgggtcttctaattaggcctatcctgaacccaaaggaattgagatcggaattcttgggggaatcccaatcccaaattttaaggaataagggaggcaaaaaggtcaaattttgattgggaatatattggttacctaataaggcctatcttgaacccaaaggaaataaaaccgaaattcctcggggaatccacaattca

SEQ ID NO: 130392 - DNA, 676 bp, Zea mays
  Clone ID: MRT4577_5038C.1
gcgggaaaggaaaaaaaataattgtcgcgtggaaatcgactgcatttctctgtaggagtagaaaacaaaggcgtgtgtttgtttttttctctcctcgctgtgggacataaaaaggaatgggcctgcactctgcgccaccaacagtggttcagatggatggaaagaaaaaactcatcgccatcttttccgagcctttttcgtacggcttttatcattgctcggcggccaccaatgccatggccgcctcgaaaccataacttatcatcccccaccaccacccggccaccccgttggtagagacgacaaaagctcgggggattagctcgcgagctaaccaatcagggccgtcaaagccgccagagattccatctcgtttggcctctcgtggtgtcatatggggatgggaaatcctgcgctcgctacgctcggcctatgcctgcctgcctgcagcgtcgccatttcaccacttgtgcaaagctagctgatcctgtggctctggaccacacacacacacacactgctcgctcactcccctgcattggatggcatagaaaatgggggcaggcagatgcagtgcccatcctgccagtttaaccgcacatgagatttagaaccccccagctgctgaattcgatggcaacaagctttgtttttcccgtaacaatataaactacta

SEQ ID NO: 130393 - DNA, 159 bp, Zea mays
  Clone ID: MRT4577_50390C.1
aatctcaaacagggcacgggccaggagcaaaccgcaggtcatcagcgagagcccgaggtggacagataaagtgcatgagatagcttacgcataacgggaaccgattacactgcacatttcaattgggaaattctgatgctacacgggaaaaagatcctc

SEQ ID NO: 130394 - DNA, 382 bp, Zea mays
  unsure (1)..(382): unsure at all n locations
  Clone ID: MRT4577_50391C.1
gaaccaagatcaggccacagtcgtcatagctatgtaaggtggcccganaagagtgagtggacgcgcggcaattgtggcggcgagcttgcgcannntcnnnacctccgcggccctccgaccccggcgggccctggcttgggtgccaaagcctgcgcggcggtggctgcgtcgatggaaggagcctcggcttgcgtcgtggtcgcccacggcgccgctggacggcgaagctccggcgggacctgttcggcccgcgcgatgcccggnnagctcttcgcgcttcccttctgccggcgaagcaaggggacgcttgtctggccatatcgggcggctacatcgggccccgacccggagaaaggcccctggccctcgagaagcctgcgca

SEQ ID NO: 130395 - DNA, 384 bp, Zea mays
  Clone ID: MRT4577_50392C.1
tagacaacacatatgcactcaatattgatatcttggtgcacaaagtatgtgcacttatcagatcttctttaaaaggatcacgggcttcttatggccgcaagctttcagtgtctgtcaacaatgatctggttcattaaggagcattcatacatatttgcttattttgattatataatgcattcagtgcttgaaaattatatgacataagaatctaatggtggttgtgatgacagacatgcatttcatcataattttgttgatgaaatatcaaggtcttaaggttgacctgttgtattttgtggtaatgatgtgaatattaaccctacaactattatgttgcggtcatcattaaatttcttagctcttacaaagtattaaccttac

SEQ ID NO: 130396 - DNA, 550 bp, Zea mays
  Clone ID: MRT4577_50393C.1
ggaaggaattctggctcctcgggaaaaaaatggacgggtttttttgcccttgaacaaaaaacccccaggcgatcttttttggggaggaaacaaacggccccagtcccatggcaaattctttccccagttttgttctaggggggcccaaccatcctatttcaggccttcaaaaaaacgggcgcgggggtttcccgagggggaggcaggcaaccggggccccccaaaaaaaacccaaaaagcccgcagttgggtgggccccaaaaagcaagccccgttaaaagggccccccttgctaatcagggtaccctggggaaaaaccataaatcatagcccagtcccagttgggatttcgggggggaaatcactttttgatttttctcaaaacacccccaacgggaggcggggggccggtacccacccccgggaaaaaaaaaaatgtggttttttggggcttttttccttacccactcgttggggatggaaagcgaaacaaaaactttactagaaccacgggatttgggagaatttaaccctttatccggagaaactt

SEQ ID NO: 130397 - DNA, 216 bp, Zea mays
  unsure (1)..(216): unsure at all n locations
  Clone ID: MRT4577_50394C.1
cccacgcgtccgcccacgcgtccgcccacgctttctcccacgcgtncncccacgcntgctcctcccttcttgtttgggcttaataaacancaccancncaaggtgagcccccagcttgccccaggttgctacagcgagcgagaacaaggcaatggccccggaaagctccctttttacctacacaatcctaaactattgccacacaaacaagctctt

SEQ ID NO: 130398 - DNA, 252 bp, Zea mays
  Clone ID: MRT4577_50395C.1
aaaaaaaggcttttcccggatcgatgagtgaagggtaccaaaccccatgcgtggttagggcaaagagggcccccattgcttttctcccaaaaactttcccaccaacaaaaggaattggatttttaaacttccaagcctacaaacaaaatttatttccctgtatggaaaacccaaccagcggggtaacttgaagaacatttgccatgcctggaatcaaaagggtttgtccaaaatttaaaaaaaagccgttgg

SEQ ID NO: 130399 - DNA, 648 bp, Zea mays
  unsure (1)..(648): unsure at all n locations
  Clone ID: MRT4577_50396C.1
cttctcttttgttagtgtgataacatacagctcatgtatgagtttggtagttctttaatgctagagatttgtcataatcaaatccattcttttattcgctactatcctgcatacttatagctggcaagttgtgtagtttgtgtttgttgatgccaaatagccagtgttcctgtatacacgtatctaacatttatttaaaacaccttgccttatcagttcaactttatgtattttgacttgaatttgtccttgtcacaacatgctaagtgccctcacataagttaacttgcatgataggtgttaccattttaggcatcatcttgactatccgctgacccgttaatggtgactgaacttcgagaatgatttcataataatatatccatgcagaactatatgtctatattgatatgaaatgaaaaggctaccttatcagattgctattataactgagaactcctttaatgctaagttgtttagagaagttgctcttgattttatttaaaatctgaaaacactttatggaaactcagaaataagtatctcttttttggatttttttgcatcatcagtttgatatacattcaataaactngngtttnttgctttttgtttttatgaaactattgctatacaaattcatgtgta

SEQ ID NO: 130400 - DNA, 347 bp, Zea mays
  Clone ID: MRT4577_50397C.1
ggggaaaaaaaaaccccttgggtgaaaagggggggtcccggtccaaaacaaagttcccaccctcggggggggaaaaccctcctcaagacaaggccaggggtcaccgaaaagggaaatacccctttaactaaaacaaaaagggttttctcaaagaggaggggggctaaacccaaacccccgggggggggccaccccttcccaaaggtcggtcctttggtcgccccccactttttttttgccccccgggggccgctgttgcccccgggggggtttgccctctcaggctcccttcctggggtggccccctgcgcccccgggccccccctttttccgggggggggcgcttc

SEQ ID NO: 130401 - DNA, 299 bp, Zea mays
  Clone ID: MRT4577_50398C.1
ggcctctgaccatttgactggcttatctgagaactgattgctgtgatcaatcatcatggctagtgaaccaccctaatgtgaacttatggacttaaaacgatatggccaatgcctgtcattctaacacaccaaaaacctaatggttggcgttgtatctgtcatgaggttttgctgcagaagtaaaacctgaaccatttggtggaaaaaacttgtagacttggaaaggtcaaatgggactggggcttacttttaagagccgttctcacgcccgtggaggccaacctggcaaattacctcct

SEQ ID NO: 130402 - DNA, 482 bp, Zea mays
  Clone ID: MRT4577_50399C.1
acctccctcctcctggcccagtcgtcctagccaacaaaattcaattgagggttcttcagttcagccatgaagcttgagatgacagcagcggccatggtcttgctcctgctgacctcgggcgccgaggccaaggtgtgctactcgcgtagcaggaccttcaaggggtggtgctaccacagcatcaactgcatcgccatctgcatcaccgagggcgacaccagcgggttctgccaggccggggcctgcatgtgcacttatgagtgtctcaatggtgtcgtcgccggtggcggcggacagcatccatcggttggctcatcgctgcgtggtggtgctgacgctaaagcagccgtcccatcagtgtagagcttctgattctgggccgggggatggcagatggcgcactactactctcctgtgcacatgccaactcaagatttagagttgatgaataacacaaatggttctttcaaaaaaaaaaaaga

SEQ ID NO: 130403 - DNA, 1790 bp, Zea mays
  Clone ID: MRT4577_5039C.1
tgatcgccgccgacaaataaccgccgacgcgttggcggaccgaaggtgaggtgcgtggcgaccgagaagcacgacgagacggcggcggtcggggcggcagtgggcgtggatttcgcggacgaggaggactaccgcaagggcggcggcggagagctgctctacgtgcaaatgcagtcaaccaagcccatggaaagccagtccaagatcgcttccaagctatcgcccatatctgatgaaaatacagtgcttgatttggttatcattggttgtggtccagctggtctttctctagcttcagagtcggctaagaaaggtctcactgtaggtctcattgggcctgaccttccattcacaaataactatggtgtgtgggaggatgaatttaaagatctcggtctagagagctgtatcgagcatgtctggaaggatactattgtctacctagacaataacaagccgatactgattggccgttcttatggcagggtgcaccgtgacttgctccatgaggaactgctgaaaagatgctatgaatctggcgtgacatacctgaactccaaagtggacaagatcatagaatctccagatggacacagagtagtctgttgtgacaagggtcgcgagataatttgcaggcttgccattgttgcttcgggggcagcatctggtaggcttctagagtatgaggttgggggtccccgtgtttgcgtgcagactgcatacggagtagaagttgaggtggaaaataacccatatgatcctagcttaatggttttcatggactacagagattgtttcaaagaggaattctcacacattgaacaagaaaatcccactttcctgtatgctatgcccatgtcatccacacgagttttctttgaggaaacatgcttagcttctaaagatgctatgtcttttgatctacttaagaagaggctgatgtatcggttgaacgcgatgggaattcgtatcctgaaagtttatgaggaggaatggtcctacattcctgttggagggtccttaccaaacacagatcagaaaaaccttgcatttggtgctgcagcaagtatggtgcatcctgcaacagggtactcagtggtcagatctttgtctgaggctccaagatatgcttctgtgatatcggacatcttaggaaatcgagttcctgcagaatatatgctcggaaattcgcaaaattacagtccatcaatgcttgcatggagaacactgtggcctcaagagaggaaacgccaacgatccttcttccttttcggattagcgttgataatccaactgaataatgaaggcatacaaacattcttcgaagcctttttcagggtgccgagatggatgtggcgaggatttcttggctcgaccctttcatccgtcgatctcatactattctcattctacatgtttgcgatagccccaaatcaattgcgaatgaaccttgtcaggcatctcctctctgacccaactggctcatccatgatcaagacctacctgaccttataaaaccatttgcaccaggctgcaagcctgcaagaactcttagaaactgtacagttttgtagttgtacataagttagagaggatctggggggttacttggcggcggatctaggggttagcagcaatgctataatacactgtaaatcttttatggttgctatggtgattggatagagaagcacacccgtgttgtgcacgatggaagaataataaaagagatcaggtgatggtcatggttcctgcattggccaattttaggttgcaaaatttgctgtttc

SEQ ID NO: 130404 - DNA, 583 bp, Zea mays
  Clone ID: MRT4577_503C.1
cggcgtcgccggcgcccagcccgggccctgcattgccgtggtcgggaagcctcgacagtgtgtgtcagaggagggagcggttcatgagaagcatgggcctagagtgctgcccggctcctccgcaggccgatgccgtggccaccgtgggcgatgtcgacaaggaggaagaggttgtgccggaatttgggagattgtggtcgcagtcggatgagaacgactgctccatgtcgagttggtccacggaggagacgaggagcttagaggatggtgtctcggacgacaattctgtcagtggatccagccgggatgatgctagcagcaaggtgagcaggagtttcagttcgttgtccttcatccagaggctcatgagtcgcagtggtaagatctctggtgttcccaaggcggtcgagaggaggagaaacggatggcttcggaggctgggcttgagggctggtatcctcgatcatggaggcgatgaggctagcaccagctccttagagagtgagcaaaacaggcgtggaaggtatgaaaaggttaaggtccgtagctacaggaagaggtcgaaagaactgtcagcagttta

SEQ ID NO: 130405 - DNA, 771 bp, Zea mays
  Clone ID: MRT4577_50400C.1
tgtatgttggcatggaaagtttgacgaaccgcacgccacccggaaggccggaacatcggatccacgctcccctttcgccgccaggttcctcctcctcctagatggcgccgtcgccgctgccgccaccgtcagagaaggaggccccctcgctcgctctttgaactcccctctgacttcttcgattcatccgttcttctccgggctcacccctccacggccccctccgcggtggaaccgtcggaaccctctcggccgccgccgactcagcagcagcaccaacaactttcagaggctgcggggtccaggtggacgtgcaacacatgtgcctccgagttcgagtcgctacaggagcagcgcgagcactttaagtctgacctgcaccgcctcaacgttaagttgagcatggctggtaaaactattataaaggaagaggacctagataaagcagattctgattctctgtttgatgatttggagatatctagtgtctctggttcagaggacgaacaagaaaatggacctgcatcagaacgtgtactctcggttaaaggcaaggaagaattcaggaagaaactttactttcgttgtgcatcgggtgaaatgatttctatctatagatgcatgctgttgaaagaacatgaagaaccattaattgattgtaagtctggtcagatggagatgcatcttgtgtacaggaggaggagatgataaatagggtggaagtgtttggcttgtgaaccccgtgacacgtcacatttgagaattgtctac

SEQ ID NO: 130406 - DNA, 170 bp, Zea mays
  Clone ID: MRT4577_50401C.1
attatatggtcgccaatcaatcatatgcgctttgtgaggctgacgaccctgagcccacgagagctgatataggtgcctgcatatgttcctctccttcgcgataatgaggctgaaacgcaaataacggttgctgaaaaagatactaatttttgccgcatattaaattcaca

SEQ ID NO: 130407 - DNA, 251 bp, Zea mays
  Clone ID: MRT4577_50402C.1
gaaagacttcaacttcgctcctctctgcgaatgccctccggctgagcgtcgatgcccttctcacccccgctgatcgactgggaggcgcagagctacgcgggctacccagatttcgcgaccattccccttttcctcgactactgcctcaacaacaggatcgtgaccgagcgctacctgtgcaatcgcgacgcgacgctagacgatggagccgctggccaacaacccgccgctggtcgcgaccacctacgcgt

SEQ ID NO: 130408 - DNA, 540 bp, Zea mays
  Clone ID: MRT4577_50403C.1
acaagctttttttttttttttttttttttttcttttttttttttttttttttttttttttttttttttttttttttcctttcttttattgggggcccttattaagggaaaaaccacacataaaaaaaggggaaaggaagaggggaaaccacaaaaaaaaaagaaaggggaggaaaggggaagggaagcaaaaaagcaagagggaagggggggggaggagggcagaggggacccgaggggggggggcgccgaaggggaacgccacccccccgggggggggcaccggcgggggcgaaccccacaccaggggcggccaaaacaaggggggccgggcccggcgccaaaccgggcggaaccggggcaagggccccctcccgcgaggcggtgtcccccgggcaaaagccggccccgccaaaaaacgggaccaacctaaaataaagccagggggccaaccgcaggggcgaaaaaaaaaaaaccgggcgggccaaagggggggataacccacccgaaaagcggggagagcaaagccactaatggaacg

SEQ ID NO: 130409 - DNA, 850 bp, Zea mays
  unsure (1)..(850): unsure at all n locations
  Clone ID: MRT4577_50404C.1
gatgtacctcacccacccagagccaatctcgcctcccctcccctcccctcgcctccccctcccctggcggcgccgtcgttctccaccaggaaggaaagaggatctttgaggtgttggattgatcggagatgagcgcccggcggtttttgaacatcctggtgtcggattgccagaaattcacgtacatgctgcggcgcttcgacctatcccacaaccagttcttctacccaacaccagaagaagcagcggaacatgccaaggtggtgcctccattgacaggcatgcccgacaagtcaaccctatcagctaactcctcggcgggggcggggcacaacaagaagaagaagccgatgtatattcggccgccggcaccgatggtgaacatgaaaccatcgatatgcgccaagactcggtacgatcgatggggcgagatggattgcttccctctcactgaaaccaagctcttcttcaccgacagctccgcgcgcatcttccgcttcgatgccgacacccactgcatcgacaccatgcccagcctccacacgcccaagtccgaccccttgtccttctccatccctccaaatccgaccacctccaaggaaggcgaaggcgaaggcggaggcctctacatcatggacaggatcctcaggcccaacaaggagggtcaggtccagtttgagtctatctcgtaccgcaggcgctgcaaccactccagcaaggcctggcactgcgacgccctcccgccgccgnctttcgtccacgacccggnctacaaacagccntcatctgctcctatgccctggttggcggccacaccatctgtatctccatcaggggcgtcggcacctac

SEQ ID NO: 130410 - DNA, 329 bp, Zea mays
  Clone ID: MRT4577_50405C.1
tgtgcggcgctcgaggcggcgtttcgcaacaaacttatataatggctcttacttgttctgatatctttaagattttctttgctgtcgttcttcctcctcttggtgtctttttagaaagaggctgtacctgcgatttactgatcaatattggtttaacctgtcttggttatattcctggtatcattcatgctctttatattattctaaaatattagaaaagaaaaacacctcgacaaataatacatgtacaactactatatttatttataattaaaacatccttttttctttttctacaatcgtaaaaaaaaaaaaaaaaaaggccccta

SEQ ID NO: 130411 - DNA, 620 bp, Zea mays
  Clone ID: MRT4577_50406C.1
gccggccgggccgggaaggacacgtcatcttcaccccccaacacgccacggtacggtacagcctcatcgccacgccaccgacgaaagaaagcttggacgagtgaagggagatgccgccgccagctccgcgccgaataatcctgctggccgcggcgtcggcggcggcgctgctgctgtggccggccgcctgcgtaacggccgacgacggcagcacggcattcttgccgccgccgccaccggagcccgcgtcgccgttcccgttctgcccggcgcggccgcctggggtgtcgtcggggccgttcccctggtcgccgtcgccgccgccgccgccgccgccgtcgtcggtggcgatgttacctcaggacccggggttcttggcggcgggggcgtgccccgtcggcggcgcggcggcggtggcgtggctgctgctgccgctgctcgctgtgctctctgctttcttgctgctttcgcagtgactctcccgggtgctgccctggatggatgtgatgtgtccgtaatcgtggtcagttggatcggagatcaagatttactattttttttggaacgaagctaggaaagaggcatcctttcttggttggctttctttctttccttggttt

SEQ ID NO: 130412 - DNA, 139 bp, Zea mays
  Clone ID: MRT4577_50407C.1
gccagcctctggcattgccattggatacacacacaggtttgtggtgtgtccccaacatctttatcatattaaaatagccacaaacagagatgtccctgtgctgaatactactcttataaaaacaattcctgcattttgg

SEQ ID NO: 130413 - DNA, 217 bp, Zea mays
  Clone ID: MRT4577_50408C.1
tggttattggcaacgttcatggggtgggccttttaagctctaggttgggggcttcctttacggattccacttagtgcttgacggacccttagccccaaatacttcgattttttcgattgttctagttgaggcacatccgcttgttccacgtcaactccctcttcgacgtctccgttcagggtctcaatagagggctctggggggcctctggcacaaa

SEQ ID NO: 130414 - DNA, 232 bp, Zea mays
  Clone ID: MRT4577_50409C.1
acaagaaagtactccatgcacctttgtgggaaatttttttgccccataattacccatccccagatgattacatttcttctttatccatttgctataaacaatgggttcactccacaaatttacaagggtggaaggattatttgttttttgaaccaggacctattggcttttttgagacaagcctaagtttatagggttggcttattgaaccaacaacaccttttatggggga

SEQ ID NO: 130415 - DNA, 687 bp, Zea mays
  unsure (1)..(687): unsure at all n locations
  Clone ID: MRT4577_5040C.1
ctacattcctgttggagggtccttaccaaacacagnacanaaaaccttgcattcggtgctgcagcaagtatggtgcatcctgcaacagggtactcagtggtcagatctttgtctgaggctccaagatatgcttctgtgatatcggacatcttaggaaatcgagttcctgcagaatatatgctcggaaattcacaaaattacagtccatcaatgcttgcatggagaacactgtggcctcaagagaggaaacgccaacgatccttcttccttttcggattagcgttgataatccaactgaataatgaaggcatacaaacattcttcgaagcctttttcagggtgccgagatggtagtcgcactttttaccttgtctcagttggtcttcagagaaattcagtgcgctgaaggctactacctccatgaagtttttgataaccactatttttccttgaacaggatgtggcgaggatttcttggctcgaccctttcatccgtcgatctcatactattctcattctacatgtttgcgatagctccaaatcaattgcgaatgaaccttgtcaggcatctcctctctgacccaactggctcatccatgatcaagacctacctgaccttataaaaccatttgcaccaggctgcaagaactcttagaaactgtacagttntgtagttgtacataagtt

SEQ ID NO: 130416 - DNA, 189 bp, Zea mays
  Clone ID: MRT4577_50410C.1
attatagatcgccagctgcacacctattcctacggtggtttgcaattactacacaagcaaaacttggtcgcactgcactacgttagatatgaggctgcgcgtgtattgcgtgataatgatgttagtatgaggcattactgtgatgttcaaaatctgtaacctgagagttacctgtgagataatacctga

SEQ ID NO: 130417 - DNA, 1366 bp, Zea mays
  Clone ID: MRT4577_50411C.1
atggatgtcctaggtttcctgttttcgaaggctgaagaagaggggctactgcaacagctttcgtatagaaagaaacttcacagggtctccatgtatgcagatgatgttgctctcttcttacatccatccacagctgatatggccctctctcttgatattttaaaactgtttggggctgcatctgggttgcacaataatgcacagaagtcaaatgtctatcctataaggtgctctgaacaagacttggcagttgcccggaacatgcttccagggggtatttctgcattcccttgcacttatttggggctgcctctatccttgcataagctgtccaagcatcagttccaaccaattgttgagaagattgctgatcagctccccaattggaaggcagatctcatgactcgagctgggaggagagtgcaggttcagcatgttctcacaagtatgatggtctaccttgctatggcagttgacattccaaaatggggtctggatgcgattgataaaatacgcaggggttttctttggaggggccggaaggaggcaaggcaagaggagcttggaggtcttggcatatctagttttctagaattatgttgggcccttcgaatgcgttggcgctggctgcagaagactgatcctactcgtccttggtctgatctccacataaaagttcctggaaaagctagagctttcttcatggaggtggtcattactgaggtgggagatggcacaaatacaaagttttggaaggataagtggttatatggtaagcgaattaaagaccttactccaagttttatataatattatacccaagaggattatcaatagcaggacagtttatgaggcaattacagataaaaaatggatctctgatattcaaggtccactgaccgtgggaatcttaacagattatcttcagttgtgggatatgacttcagtttggcagctgcagcctaaggttgaggataaacatgttttcagtattgctcctaatggcatctattcagcaaagactgcttacgagggcttctttttggggtctgtaattttccctcatcacaagaaaatttggaaaacttgggccttgccaaaatgttgtttcttcatctggccggttgcacaaaatcgactctggccagcggatagacttgctaaaagagggttgagtcatcctgagaagtgccccttttgtgatcaagaggatgaaactattgatcatctcctcgttacctgttccttctccagggaattctgtgttaccatgagccttagagctgctaatgaggaaaggatgcaatgggagattgctggtgccaaggggctctgccatctagctgtacctttagctgagagctaa

SEQ ID NO: 130418 - DNA, 403 bp, Zea mays
  Clone ID: MRT4577_50412C.1
ttcgcccgtcgacccacgcgaccgaggcagcgtggctaaataattaagtcgaaaatgaacaacgatgcaaacaacagtagcagcaacacggcgtgtgacgctggtaactgctcggtctccgcatgctgggttctggttggtgttgctcaagcggtatttggagttggtgcctgctgatgaaaaatatcccggctgccgcggatggcacggccgtggacgatggttaaccgcctcagcattgggcaaccccggtgagcttgcatgaggcttgccgcggcgcatccgagatgcacacccagcgtggcctacgacaactgcatggcgtcgctgggcgccgacccgcacatcacggaggccggcagcaataacatgcacgggctggcggtgctggccaccaggatgg

SEQ ID NO: 130419 - DNA, 233 bp, Zea mays
  Clone ID: MRT4577_50414C.1
cggaaccaaaaaccccgggtcgacccagcgtttcgcttagattggttgcataaaattacatctctggttacatgtgaggttgtaaaatcagtatggaattatggatgagtgtaccaaccttaatgtacccgttcaagattatggtggtatctttgcgtacaatgctgtaactattcatttttttttgtgtgtgtgtgaagttaaatataagatgaccacacgtggacaggcct

SEQ ID NO: 130420 - DNA, 930 bp, Zea mays
  Clone ID: MRT4577_50415C.1
gggcccttttttttttttttccggggaccccaattttcgttttcgggcgcagggccgtcgaggaacagctccggttcctgacggaggaggcgggcgtcccggaggcggagctccagcgcgtgctccggcggcgcccgcgcctgctcgtgtgccccgtggcggcgcggctgcggcccacgctctacttcctgcgcgcgctcggcgtgcccgacctgcaccgccgcgccgacctgctgtccttctccgtggaggacaagctgctgccgcggatcgagttcctcgagtcgctaggcctgcccgcgcgcgccgctcgctccatggcgcgccgcttccccgcgctcttcggctacggcgtggacgggaacatgcggcccaaggcggagtacctcctgggcgtgggcgccatgggccgccgcgccgacgagctgtacgagttccccgagtacttctcctacgcgctggccgcgcgcatcgtgccgcgccacgaggcgtgcgccgcgagcggggtcgcgatgccgctgcccgccatgctccgccccggggaggccaagtttcgcgccacgctcgatagctgcgtcgggtccacgctgccccggaggcggtcggcgctgtggcacgccacgtgggtggacgacgacgcgacggcggcgaaggagacgatggtgtgacgtgcgcattatattggtaggctggtagcgtatatgcgtatgtccatatggcattggctgcttgtaagtatgagagccatgatgaatctggttgcgtgcttcttccatcaggtgaacggaggcattaattcttgcttggctatacttggttgtgcttatatagccatgcaggtgattgttaccctgatcgtgtgaatatacactcctcccagaggcttgggcgtcagtcaaaaaaaaaaaaaaaaaaaaaaaaaaaaaaaaa

SEQ ID NO: 130421 - DNA, 758 bp, Zea mays
  Clone ID: MRT4577_50416C.1
cctcgaggccggccgggccgggacactcaattttctgcaggacttcttggttgttggccgccaccacttcctccattctcttccttccatctccaaggagtttgcaactagctttttttggttggctatggacagcatagctttactttttgttcttgccctttgccttacttgttcttcagcttgtgccttgagctggtctaatcaaatcatcctgagcttcagcgtctgctagctgccggtctgcgttgcactgttgcaagcctaccgatctgtctttgatttgcatctacctgagcctcacatgcatgtgattgattgattgcctgccttgtcttcagcttgagctgctgatgagcccattctgcttggagccaaaaccacttggttgcacacttgcagtagtatatagtagcatgcggcggcggccggcggcagcagcagcttgaattgcatcgattcagcttcactttgcctttttttttgttgatcttatatatcagaatcgtcgtctggatttcgattcctctccatcccatctcgtcagattcagatgccttctaggagtatttatcttcttattattagcataatagcatccagatttgttcacgcagcagcatcacgacgacgagaaacggagaaagcaaggattgatatactgatctgatagatgatggatcgacaatatggaggaggattcgagcacgttcctgcagtgggcaatgaaacatctccagcacccgggcgccgccacc

SEQ ID NO: 130422 - DNA, 190 bp, Zea mays
  Clone ID: MRT4577_50417C.1
gccgcgcttgagcagccgtataggattttcagaagatgcgcgcccactgtggtgatcgacgtggcgaatgcacagacattcccagaccaccgtgtgaggcggtctacagcttttagtctcaagtcaccctcacaacaagacctcaagctcgcacacatagaacgcgatgatattgtatgactgtcgacaa

SEQ ID NO: 130423 - DNA, 451 bp, Zea mays
  Clone ID: MRT4577_50418C.1
aaaacggaaggcagtcttacaaaaattaacatcagcggggactttagtccttatccccgggcgggggaaccccagggaaaaagggagaatttacaggggcccttcccattatttatgacccaaaaacctttatcctttaaaaaacgggttgggttctcaacaaaaaattaaaaacttttttatcctgctgcttgcaaggggggggaaaaacaatccaaatttccaggtttttcctgggggacaagaaaaaccccatcttttcccattcttattaattcccaaaggctctcctttatttacaaaggattggggagcctttttttttaaacttcgggggggggcctggctaaatataaacgactccggggaagggaaaaaagctaggcctcgtttttttttggtgaacaggggacctaaccattgccatttaaggaggggggtagggccccaa

SEQ ID NO: 130424 - DNA, 654 bp, Zea mays
  Clone ID: MRT4577_50419C.1
ggccgcttttttttttttttttttgcttctaatattttttttttttttttttttttttttttttttttttttttttttttttttttttttatagggacctttaaaactcagtaccgggggggccccacaaaacaaaaggggaacgggactaaaacagaacaaaacacaaaaaataaacaaaagggcccccccaaaggggggcggttgcaaaacgcgcggagggaccgccaaagaagggggggaaaagggcaacaaagggggggggcgaaaaagggcaacaggggtggccacatgggggggaaagaaggggcccaacaggggcgggggaaagagggcctaaagggcccccacaaccggggggaaaaagggccaccaaaggggggggcaaaaaaaaaaacaaaggggggccccacgccgcaaggggaggggccaaacccgctgccgcaggaaaaaggcaaacggcccccccccaagggggctaaaggggaccagccgtggggccggcaaagggaaaagagggaacccccccagtaggggaaaggggggaaccacctgcaggggaggggggcaaaaaaaaaggctgcatgaaaccaccagaaagacgggggatagccacagctgcaggcatggtgggaccaggagggttaggggaca

SEQ ID NO: 130425 - DNA, 443 bp, Zea mays
  Clone ID: MRT4577_5041C.1
cccccgccaccctggcccttttctcgcgccaccgcccggtggggcggcgccgatcgaccgagcgccggtcacgcaccccacgagctaccgcgcggggtcatgtccatctgtgcacacgaacgcaccgaaggagcctattacaccgcgcccggacaacgctagccttagtccccaacatggcagcgacagactccgagggggggggggctcccctcctgcatgcaggtagacacccggcgccggtgcggaagctagcgacggcggcggcggatcgagctccaacccaggggagggaggtattggagaatcgatcaatagctaccgaagaggacccgaggatcgataatcatctggggaagagaaggatacatgcacacgcgaggggggcagggattgagaatgccactcttcagaacagggagatggcggtgcgcctggagata

SEQ ID NO: 130426 - DNA, 1660 bp, Zea mays
  Clone ID: MRT4577_50420C.1
gctagcaggagccaggtcgcgccgacagcagcagttggaagaggatccatggggaaggaggcgacgcttgcgttcacgcccacctgggtggtggccatcgtatgcctcgtcatcgtctctatctccctcgccgctgagcgctcactccattacctcggcaagtatctggagtgtaagaagcagaaagcgcttttttcagctctacagagactaaaagaagagctaatgcttctcggattcatttcattcgtcctgagtctctcccaaggttttattgttagcatttgcattccagaaacttctactgacttcatgcttccatgcaatagaggcaactccagagttgcagaagaaggtgctaaaatttgcaacaaaaagggtgatgttcccttgctatcactggaggcattacatcagctgcacattttcatatttgtacttggtttagtccatgttgtgttctgcgctacaacaatatcatttagtggggccaagatgagaaagtggaagcattgggaaacagaaattcacagagaagtacatgagaagttacagcaagaaaagaatgaaggacaagggtcatcattgagtattgttgtgctacatcgggagcaccaggatgaatttgtccacaagcggacaaagggattttggatgaagctcgctgttgcaagctggataactgcattcttgaagcaatttcaagattcagtgagtaaatcagattatgaagcacttagatcagcttttgtcgtggaacactatcccgagaaaccagatattgatttccacaaatacatgactcgcgctgttgaatatgagtttaaaagagttgttggtatcagctggtatctgtggctttttgtaatcttattcctgctgctgaatataaatggatggcacacatacttctggttggctttcttgcctctatttctgttacttattgttggtgccaaactagagcacattatcactcggttggctcaagaggcagcgatatcattatcaaataatacagaggaagttccgaaaataaagccatgcaaggaccatttctggtttcacaagcctgagctagtccttcatttgatccatttcatcctgttccagaattcgttcgagattagttttttcttctggattctggtatcagaaggtttcggttcgtgtatgatggaacggaagccttatgtcatttccagacttgttatcggggtgatcatcgaagtcatctgcagctatatcacgctgccactatacgccatcgtgacccatatgaccggacagatcaagctgcatggttttggctcccgcgtgcacgagagtgtccatggctggatcggcttgaggaagaaacccttctcgttctggaagattcccggcggtgaccctaacgctgattccggcagggaggccgacgtaacccgcagggtggccaaggagcggtcggggagctcgcgcagcatgccgatggcgccggctgacgagatcgtcaccgtcgacgacgtcgcggtggctgcagctgccgttggccaaggaccataaaattcctagctagcaaacaccagcagggaaggcaggcaggctgccgaggtaccgtgcgcagcgggttgatgggtcggacgctgcggaaaattcctcgtgtcgggagcaggct

SEQ ID NO: 130427 - DNA, 669 bp, Zea mays
  Clone ID: MRT4577_50421C.1
cccacgccgccggcggccgggcgccatggtgaaggcctacctccgctacgagccggcgctctccttcggcgtggtcgcctccccggagtccaacgtcgtctacgacccctccggccgccgcctcctcgccgccgccctcgaccgcttcgccgcctgggacctcaagcgcggcctcccctccgccaccttcaccccatcctcctcctccgcctccctcgccgtctcctgtgtcgcctcctcccccgccgccgcctccgcctccgcttcctcggttgcgagtggccatgccgacgggagcatcaggctgtgggacgccgagaccggcgcctgcgaggcgacgctccacggccaccgctctgctgcttctgccatacgcttcgctccctccggcgctgtcctcgcctccggcagcaaggactgcgatgtcatcctctgggacgtcgttgcacaggccggcctcttccggctccgtggccaccgtgatcaggtaacggatttagtgttcctggattcggggaagaagctggtgacctgctccaaggacaagttcatccgggtctgggacctcgacacacagcactgccttcaaattgtaggtggcaccacagcgagatatggtccatggatgttgatcctagcgagaagtttttggtgtctggctcggccgat

SEQ ID NO: 130428 - DNA, 425 bp, Zea mays
  Clone ID: MRT4577_50422C.1
gacggcccggcgcaggtagcgtggcatgacgacctgcctccgcagctcggccttggacagctacttcccccacaccccgcacgcgcgtaccgactgccagatcgacacccgcgccgactgggccgtagagggcgccccttcgctcggggggggggtgggacttcttccgccggttcatgggtaacccttggccggtggccgcttccgagaactaagttgggaaaacttccggtttttgttttcttcttcgactattttttccttggggcttgcttggtctgctgctctggccgctggtgcgactggcaacctgatggacgggaattggggaaagaagaaaatgaaatggctgtggactttattggcgggcgtcggcgaggcacaggttttactaacggaaggggaatcaaaacggtggctttgac

SEQ ID NO: 130429 - DNA, 402 bp, Zea mays
  Clone ID: MRT4577_50423C.1
cccacgcatacgcctaaacgtgcgataaggctatccgttcaggcatagtcaagacgcatggtcagcctgccgaggccatgatgaggaacgacgagtgcatgataatgtgactgatgcaacacgtgaaggtgactcgacctgtttgttcgtgagtggggaagcgcgctcatagaacaccactgcacaacatacactcgtgatagctagatcgctgtgtggacgcgaagccaccccaacctgagcagtgcccagagagacacgctataagtgactcccacgtgcacctgaagcacccacgccgaaacgtctgagctcaacaaccatacggagaagcttagcatcatctcgcgacggtggccgaccaacaacgtactacatgtagaacgggactaacagataccc

SEQ ID NO: 130430 - DNA, 385 bp, Zea mays
  Clone ID: MRT4577_50424C.1
gcttcactcccaggctcagcgtccgccccggcgcttacaaaccgcgagcgccgcaggccagaaggtcgaagcgtcagctcaccatcatcaccactacttccagcaccatggcatgtcgttcgcgtcgcatccgttgcgacggcgaacctctgcggttgctgtcaccctgcccgacgccaagccaatcccactgacgacaaagcctgccgagtaggcgaagcccgtgggtacgttagtcgatggacatcgctgccacggttgttcgagcagtcacgcgtacaatgatacaatctcagttcacgcaacgccgccatcatcgtcaacacaatgatgggccgccgtttcgttcatcgcgtctaactcgccatccgtgtgtagtgatacc

SEQ ID NO: 130431 - DNA, 187 bp, Zea mays
  Clone ID: MRT4577_50425C.1
tcgagtcggactatgcctgcacgcggtcgaagacgtcagacgacagttcgaagtgtccgcccgggcgaatgccgaacaggtggcggcagtagcggttcgcgaacagcagctcggcttcgtcggcggccagggccgacaccgctgcgtgaaggctttttagcacggtcgcgaagcgctcgtgcgctgt

SEQ ID NO: 130432 - DNA, 391 bp, Zea mays
  Clone ID: MRT4577_50426C.1
gggggggggggctaccttgggggggtgtcatctcccccacttcttccccaatgaataccctcacccctctcggtttggtttttattgagccgcgcacccaaaaaatattcttccaaatggaaagggaaaggctcaaaataaccccggtccgggcccaatgattgggaaggaaccccctcagaaacaagttgcacctcctggggggagtccgaaaaatcccttggccagggatgtaaatacccttgtgacagccaaccccgcactcctaaaccccccgaggggggagggcttcttaaaaaaatccggggcccccccggggatcgggggaccccccccctgggggggggacacccctccccccgcatagggggggctactccttcaaaaggac

SEQ ID NO: 130433 - DNA, 577 bp, Zea mays
  Clone ID: MRT4577_50427C.1
tacctcgaagccggccgggacaaaaatacaaaaaggggggccagccgccacaatttccccaatgaagacgccgccgcatgcagaccgatgcagccgcaccaatcgcacagtctcatagctactgaccagacacgggatctccttaaaacgaacgtacgcgatagaagtaggaaaaagtaagtccctcagctagtctccgagaccattactaaggcaagatcaaattgaccaatctgacgaacacgggacaggggaaggaggatagatcactgaccccgatcgccgatgcgagggggcaaagcaccggtactgcgacaaaagtgtatccagaatgtggggcacacccggcacccccatgatttattattacgaccccacccacgaacaaaaccaggatgtctcccagaacaagtaccaggacggctgatgaaaaatatgaccccgaagctagaggaaccgacgtgggaccggaggttgcggaaagttattatacgagcacgcggccgtcgaaaatacacaagcgaaaggacaaccgcagggcactagcagaccagtagggatcatagccaccatctat

SEQ ID NO: 130434 - DNA, 236 bp, Zea mays
  unsure (1)..(236): unsure at all n locations
  Clone ID: MRT4577_50428C.1
tctacaactgctgaaggaccgcaggaaatgcgataaattggatgatccaatgctttagggccggttacctatgaggggtatatatcaggccttagctggtgctgccatgtgcttgcaagaacaagctactacacgccctcacatcgcggaagtggccactgctctatcatatttngattaacaggcttatgacccaaacgcccctgttcaacaaagccggagcaacgcatttaccc

SEQ ID NO: 130435 - DNA, 536 bp, Zea mays
  Clone ID: MRT4577_50429C.1
agtcagtaggatatatattagccacagctccctccacagtagcagcaatatggctggggagagggatggaagtcaccacacacacacacacaaacccacgctacaacatgcatgattatggcgccacagaagcacccgtcattggaatcactttacaacgaaaaaggacacaaggaactcctcttctaggctcatctgggcagccgttagatcctcggtttcacacgtcgtccattggcatcgccaccatcaagaacttcagttgaatacaagcaggggctcacggagtgatctcctaccttggccacatactcgagaagctcagtcaggagggatgggcagctttgctgcaaataatcaaacccatcggtctgcatgacagctttcaaattctcaggcagagccacaaatttcaagcaaacagtttttagctgataacagtggtgctgttcagccagtgccaaagtatttgctactgtgtttattgcaacatcttcacacagcttaagttcacagagcaactttaatctctccac

SEQ ID NO: 130436 - DNA, 621 bp, Zea mays
  Clone ID: MRT4577_5042C.1
gccggccggtttgggatctcaagacaccatcgaccttcatatctcgctacgtatgacgctgtaaaaaaagcagccacaatgtcgagaagcaccatggacctctcctgccacgggcttcgccgggaaggccgcgaacgtgtcgtcgtggtccgccttcttggtggcccgagtgacaacgctcaatacggaagggaaagccaagacgggggtggaggacgaaaggccgtgaaaatgccccgaccgctccgctgcacctgagacacactgtccgtcgagacgccgagctgacctgagagagtgattgccggcggactaccgctgagacaccgcgtggttggcggcgtacccggacacgctcgccaagaaccgcgagctggatgtgattcgctgcccgctgggccatgctgggagcgatctgatggatcttcccggagttgctcaaccgcatcgggggcgagctcggcgaggccgtgtggttcaaggccgcttcccacatcttcagcgagggagtactggactacctcgggatacccgagactcatccacgcgcatagcatcctcgtcatctgcgactgccaggtcgtgctcatgtgcgccgtatagggataccgtatcgccggc

SEQ ID NO: 130437 - DNA, 2396 bp, Zea mays
  Clone ID: MRT4577_50430C.1
acctcgaggccggccgggatgcaatcctgattgcttttttgtcgcgtctgcttctcccccctcctgcctcttcgtgctgcttcctggttggggaagtggaaggagaaggagaaggttgcgtgcgtcctgcgccgataacgcgatggtgtccattgtcaccgaggtatgggcgctcgctggatgcggcccggtgtccaaggcggcggcggtagcggtagcggcgcaggagttgccggtgcagcatccttctcctgccgcagcgggaggagggaaggccaagaagagagtcgtgccagtgtcgttcagaggcgtcagcagcggcggtggccaggaccaccagcgcgaggcgttaacctcgacggccgggccggcgacgcaaaaccacacacacacacgccacctccttgagtccttgtcggctcgccatcgccaccatcatttcgtgtcgagtctccgtttcaccctccccaaattcccctcaaatcgatctcccccgcaccccgaatccccgcgcccccgcgtctgaatccggcgccccccgccccgatccgtccgatccgcgccgaatcgccgttgctcggggcggaaccctagcccgatctccacctgtttcctcgcgatgggcgccggtcgtgtctgccgcggcggccctttctccgcctcccccgccgctggcgccgccgcggggcggccgttcccgccgctcaccgcgtcctcctcctcatctccttcatcggccccttccgagacagcgtccacgtcggtcaccaagacggtgaacggctcccaccacttcaagatcgcgggctactccctctccaaggggatcggcgtggggaagttcatcgcctccgagtccttcaacgtggggggattcgactgggcgatctacttctaccccgacgggaagagcggcgaggatggcgctgcctacgtctcgctcttcatagccctggccagcgaaggcaccgatgtgcgcgcgctgttcgagctcacgctcgtcgaccagagcggcaaggggcaagacaaggtgcatacccactttgggaggtctctcgagagcggcccatacaccctcaagtaccgcggcagcatgtggggctataagcgtttcttcaaacgagttgccctggaaacatcagactatcttaaagatgattgccttttagtgaactgcacctgttggagaagttcaatcacatactgtccaacatggctctacatattggtcagctattgacaagtggaaagaggacagacattgcattcgaagttgatggagagatgtgtcagacattgcatttgaatcttttggagagatgtttcctgcccacaaggtgattctttcagcccggtctcctgtttttagggcacaactttttggtccaatgaaggataaggacatgaagtgtataaagattgaagacatggaggctccagtattcaaggccttgctccatttcatgtattgggatgagttgccggatattgaagagcttactggtgtaaatacaacttgggtatccaccttgatggctcaacatttactagctgctgcagaccgttatgcattggagagattgaagttgctctgtgaacttaagctgtgtgaagatgttgcaataaatacagtggcaaatactttggcactggctgaacagcaccactgctatcagctaaaaactgtttgcttaaaatttgtggctctgcctgagaatttgaaagctgtcatgcaaaccgatgggtttgattatttgcaacaaagctgcccatccctcctgaccgagcttcttgaatatgtggccaagataggagagcactccgtgagcccctgcctgtattcaactgaagtccttgatggtggagatgccaatggacgacgcgtgaaaccaaggatctaacggctgcccagatgagcctagaagagggagttccttgtgcttattttttgttgttgttaaagtgattccaatgacgggcgctttctgtggtgccataatcatgcatgttgtagcgttggtttgtgtgtgttgtgatttccccagccccattgctgctactgtagagggactgatatacatcctactgactagactgcgttgctgctgcaaagcagcttttcatcatatgccaaggatggtctggtgcaaaggtttgatcaaggggggagaatggcgcagaatatgttctgcagaagttttacctttcgctaggccagatttgtcgattcatggtcatctgtattgactgtattcaattgaaatgaaatgtatccgttgaacattcactttcaaaagtgcgtaaaaaaaaaaaaaaaaaactctcgaaaaaaaaaaaaaaaaaaaactcgagagtacccccaaaaaaaaaaaaaaaaaaaaaaaaaaaaaaaaaaa

SEQ ID NO: 130438 - DNA, 185 bp, Zea mays
  Clone ID: MRT4577_50431C.1
gacagacctaccatagtagagcacatggatgatcacatcgatatagacaacctgatggcagagctgatggtgaatctagactataatctcgactatggtaccaccgatgggaccatcatggcgggagctatggtagagcctgctgagaagcttgctgagcatcttattgagcgtattatggaggc

SEQ ID NO: 130439 - DNA, 2522 bp, Zea mays
  Clone ID: MRT4577_50432C.1
agacaaagctctggtgaagcggctctcatcatgtgaaacaatgggatcagctactacaatatgcagtgataagacaggaacccttacattgaataagatgacggtcgtggaagcatattttgctggaacaaagttggatccatgtgatgatgttagccagatgtcagacagtgcagcgtcacttattattgaaggaattgcgcagaacacaacaggaactgtatttctgccagaggatgggggagcagctgaacttactggttcgcctactgaaaaggccattctttcttggggccttaagatagggatggatttcgacgacgtgaggacaaaatcttcagttattcatgtttttccatttaactcggagaagaaacgcggcgctgttgcagtacagttagatgatggtgttcacatccactggaaaggtgcagctgaaatagtgttatcatcttgcaaaagctggctttccgtcgatggctcggttcagtcaatgagtgctgagaagcacgatgaattcaagagatcaatcgaagacatgggagcaaattcattacgctgtgttgcttttgcatactgttcctttgacattgaaaagatcccaatggaagacataacaagctgggagttgcctgaggatgacctgactctgcttggcatcataggaataaaggacccctgtcgcccaggtgtaagggatgctgtacgcctgtgcactactgctggtgttaaggtgcgcatggttacaggagataatattgaaacagctaaagctatagctctggagtgtggaatactagatgcaaatagtgttatttcagagccagttgtaatcgagggaaaagtgttccgtgagatgtctgaaagtgcaagaggagaggccgccgacaagataattgtgatggggagatcctcgccaaatgataaacttttgcttgtccaagctttaaaacgaaaaggccatgttgtagctgttactggtgatggcacaaatgatgcccctgcattgcacgaggccgatataggtctttcaatgggcatttccgggacagaagttgctaaagaaagctctgacattataatcttggatgatgacttcacgtcagttgtcaaggttgttcgttggggacgatctgtctacgctaatatccagaaattcattcagttccagctcaccgtcaatgttgctgcacttgtcattaatgtggttgctgcagtgtcctctggtgatgtgcccctaaatgctgttgagcttctgtgggtgaacctcataatggacacacttggagctcttgcattagcaaccgagcctccaacagacaaccttatgaagagaaatcctgttggtcgaagggaacctcttgttacaaatatcatgtggagaaacttgtttgttcaggccctttaccaagtagcaattcttctgattttcgattttgatggagtaaggattctgcgtctgcagaatgaaagccgatctgatgctgagaagataacaaatactttcatcttcaacacatttgtattttgccagatcttcaatgagttcaatgcacgaaaacccgaggaaaagaatgtcttcaaaggggtcacgaagaatcacctgttcatgggaataatcggtataacgacagtatttcagatactgataattcagttcctggggaagttcttcaaaatagtgaggcttggttggagactatggttggtttcagttgctatcggccttgtgagttggcccctggcttatgtgggtaaatttattcctgtgcccgtaagacctcttccggactatttcaagccccgctgttgtcgggaaaccgccgcgccgagacgaggaggaaggtgggcagagctaaagcgcaacgagtgggcagtgtaaataggcacgtgataaaaaaatggagataaattgcactggttgattccatggtagcagcatcctggggatgtacgcataagatggcaggtagtcggcctcgtcgttttcttctaggagaagcagtcggaagaaaagaagtactatacagaagccaaacttgtctacccctatccagctggtgtgtctgctatgcggcagcgaaacttgagtcattagattgtagcctgaatgaaagcagcgctagcttgcgatgtagcagtacctttttttccctggcgatatcatctgactgtaaatttgtaaatgctttcggactacgagttgttcttatttttcatccacctcttctctacggaacgtttttttctatataagaaaataaagtcaacagagcagttctaaaaaaaaaaaaaaaaagaaaaaaaaaagaaaaaagaaaaaaagaaaaaaaaaagaaaaacatgaactaaaaaaaaaaagaagggcctcgccccttcactgccacttctcgtcctcctcgtgtaacttgcatctaggcgcatgtaccgacatcctcttatctcggagccagactctgacttcctcggctgccattcaaacgttccatagaccttgtttaggtagaatgcacttccctact

SEQ ID NO: 130440 - DNA, 744 bp, Zea mays
  Clone ID: MRT4577_50433C.1
ggtatccactttgatggctcaacatttacttgctgctgcagaccgttatgcattggagagattaaagttgctctgtgaacttaagctgtgtgaagatgttgcaataaacacagtggcaaatactttggcactggctgaacagcaccactgctatcagctaaaaactgtttgcttaaaatttgtggctctgcctgagaatttgaaagctgtcatgcaaaccgatgggtttgattatttgcagcaaagctgtccatccctcctgaccgagcttcttgaatatgtggccaagataggagagcactccgtgagcccctgcctgtattcaactgaagtccttgatggtggagatgccaatggacgacgcgtgaaaccaaggatctaacggctgcccagatgagcctagaagagggagttccttgtctttttttttgttgttgttgtaaagtgattccaatgacgggcgccttctgtggtgccataatcatgcatgttgtagcgttggtttgtgtgtgttgtgatttccccagccccattgctgctactgtagagggactgatatacatcctactgactagactgcgttgctgctgcaaagcagcttttcatcatatgccaaggatggtctggtgcaaaggtttgatcaatatgttctgcagaagttttacctttcgctaggccagatttgtcgattcatggtcatctgtattgactgtattcaattgaaatgaaatgtatccgttgaac

SEQ ID NO: 130441 - DNA, 2021 bp, Zea mays
  Clone ID: MRT4577_50434C.1
cattgctacctcgagcccgggaccctcgggcgggcggggtacacccaaaaaaccacacaccacctcctcgccggctcgtcatcgacatcgccatcgccatcgccatcgtttcattgcgagtctccgtttcatctcgccccctcacccccacacacactggaatccccgcgtctgaatccggcgccccccgccccgatccgcgccgaatcgccgccgctcggggtggaaccctagcccgatctcgatccgtttctccgcgatgggcgccggccgtgtctgtcgcggcggcccctcctccgcctcccccgccgcagggcggccgttctcgacgctcgccgcgtcgtcctccgcctccccttcctcggctccttcagagacggcgtccacgtcggtcaccaagacggtgaacggctcccaccacttcaaaatcgcgggctactctctctccaagggaatcggggtggggaagttcatcgcttccgagtccttcaacgtggggggattcgactgggcgatctacttctaccccgacgggaagagcgccgaggacggcgctgcctacgtctcgctcttcatagccctcgccagcgaggggtaccgatgtgcgcgcgctgttcgagctcacgctcgtcgaccagagcggcaagggtcaggataaggtgcatacccacttcgggaggtcgctcgagagcggcccatacaccctcaagtaccgcggcagcatgtggggctacaagcgtttcttcaaacgaactgccctagaaacatcagactatcttaaagatgattgccttttagtgaactgcactgttggcgttgttcaatcacatactgaaggaccaaagatatacacaattccagtaccgcggtccaacatggctctacatattggtcagctattgacaagtggaaagaggacagacattgcattcgaagttgatggagagatgtttcctgcccacaaggtgattctttcagcccggtctcctgtttttagggcacaactttttggcccaatgaaggataaggacatgaagtgtataaagattgaagacatggaggctccagtattcaaggccttgctccatttcatgtattgggatgagttgccggatattgaagagcttactggtgtaaatacaacttgggtatccaccttgatggctcaacatttactagctgctgcagaccgttatgcattggagagattgaagttgctctgtgaacttaagctgtgtgaagatgttgcaataaatacagtggcaaatactttggcactggctgaacagcaccactgttatcagctaaaaactgtttgcttgaaatttgtagctctgcctgaaaatttgaaagctgtcatgcaaaccgatgggtttgattatttgcaacaaagctgcccatccctcctgaccgagcttctcgagtatgtggccaaggcaggagagcactccgtgagcccctgcttgtattcaactgaagtccttgacggtggtgatgccaatgggcgacgcgtgaaaccaaggatctaacggttggaagaggagttcctcgtgcccattttaagttgtaaagtgtttcgaatgacgggtgcttatgtggccgtgccatatcatgcatgttgtagcgtgtgggtttgtgtgtgtgtttgtgacttccatccctctccccagccgtattgatggtactgtagagggtgttatcgctaatatataccctactgacttatgtattgcatcgctgtttcaaagcagtctgtcatcataagtgcacacaggtggaatagggcgaggatggtctggtgcaaaggtgaaataatggcacagattgtgtatgtgtgtgtcctgtttttcagaagttttaccttgcggtaggccagatttgtcgattcttagtcgtctgtatttggctgtattcaattgaaattgtgaaatgtatcagttgaagttatgcgtagacattcactgcaaacaactatgacacaaaatggtgctctcatcatgattttgcaagtgccaagtatg

SEQ ID NO: 130442 - DNA, 391 bp, Zea mays
  Clone ID: MRT4577_50435C.1
tgagacgccaggccacgccggtaggaagtctgaggctttgagaggactgagcaagcgtaccacgagaaactggtgttcccgaccaccacgcggatggacttggccgacccgaaagccgaccccctttcttccttcctacgacaccacggcgcgttatgcttatcccgtcgggtagccatggcgcgcgactgcaccgccacatccgtgccagcgctccgcccctggcttgatgaccttctcccgctgctcgtcgacctactgatggccgcccacattctcgctctaggttactggatctacaggctgaccacggacgggtgcaggcagccagcgctgagcaagaaggactaaagggaccgctcccggtgtccgatgcttgaaaccagtttgt

SEQ ID NO: 130443 - DNA, 559 bp, Zea mays
  unsure (1)..(559): unsure at all n locations
  Clone ID: MRT4577_50436C.1
ccggtccggattcccgggtcgacccacgcgtccgtgaattactacttgagtagatatgtacaagaagagtcgtcgtctacctgtgagcgaattatttcgaggttgtgcgttgcgatgatgggaggtggtctggtgatggaccagggcatgatgttccccggcgtgcacaacttcgtggatctcctgcagcagaacggcggcgacaagaacctcggcttcggcgcgctcgtgccgcagacgtcgtcgggggagcagtgcgtgatgggggagggcgacctcgtggacccgccgccggagagcttcccggacgccggtgaggacgacagcgacgacgacgtggaggacatcgaggagctggagcgccgcatgtggcgcgaccgcatgaagctgaagcggctcaaggagctgcagctgagccggggcaaggaccccgcgggcggcgtcgtgggcgacccgtccaagccgcgggagtcgcaagagcaggcgcggcggaagaagatgtcncgcgccccagacggcatcctcaagtacatgctcaagatgatggaggggtgccgcg

SEQ ID NO: 130444 - DNA, 275 bp, Zea mays
  Clone ID: MRT4577_50437C.1
gtctaaccagctggatcaccggatacgttggaaactatgaatcatctgaatttggaccttcctcttgttgtaacagcactactcttcaaccacagtaaatcagactgggattacacggagagtttaaccaacataatttttaaaaggcaggaccgctacctgtccatatgcgaataacatgaaattgttgtggtagtactcaaatcgtcacggataaggcaaagagaccggacttggtggtatgatgtcaacaaaaggatttccagaaacatact

SEQ ID NO: 130445 - DNA, 266 bp, Zea mays
  Clone ID: MRT4577_50438C.1
tgttattcttggagctcctccaagtttaactatcgttaatgccacctacaactctgacatatcagttacttgcttgacacctgcttatgtggcaggaagacttcccttcctctatgtatctgtttcgaacgatggtgctaattatttctcgaatgagcttatgcttacttatggagtggttccatgcatctgtgaaatttcttttgttgcaaatttcctgttttctttggcagactttttgctttctctcgtccccctctgtcctg

SEQ ID NO: 130446 - DNA, 490 bp, Zea mays
  Clone ID: MRT4577_50439C.1
aggggagcgaaacatcgggtcgaccccccagaagcaagcaacaagggcctaagggggggccctaatggccccaaaacaaaaaggtcctacaagcccacacgggcgggggaacgggggggcccctcttaaccctttaggggaaaggtgaaaggcgggggtttgaccaaaagcccggcagaacccagggcccgggaactaaagggggagaagaacttcactttttcccctttttggggggggggggcgaggcttaaaaaaaaatttcccccccaaccccggccggggaaaaggctttttaaattacccccccctcaagggcatccccattggggggggccccggaatccccggtctcaaaattggaattgggggaataatcgggggcgccgcccccccccggaacttgggggtcttccccaacttccccaccattttccccaagaacacccctttgcttttggggcccaatgcccttgggggtggcaaaacc

SEQ ID NO: 130447 - DNA, 220 bp, Zea mays
  Clone ID: MRT4577_5043C.1
cgttctggctggcacatggctgactataataacatgccattttcacaaaagcacggcatggatcccaactgctcctgcgccgccggtaaagaggctggggatgcccagtgtagcctgtagcgctagagaagcacgttctgacccctctgtctttctctggtcactcaatttcaggacaggagtttcgccctcccaaagagttttggggtatctttctctc

SEQ ID NO: 130448 - DNA, 325 bp, Zea mays
  Clone ID: MRT4577_50440C.1
aaccggttccggatttccggggtcacccaaaacttgggtgaacccttgggattccgacccgtaagttcaccataatcaaatcagcaccctggctgttgctgcctaaccttgaggagtcctggtccttccaattgtagtaacaatggccattcccgcccattgtttctctctgggcaagtccatgccaatagataacttgatagcccgcctcctctcattgggagaacaacgaaactgggatgtcagcctgccggacactaaagagaaccttggggcttcgggtggcagaattaaaacattatctcgatgactcgaggcctaacct

SEQ ID NO: 130449 - DNA, 362 bp, Zea mays
  Clone ID: MRT4577_50441C.1
attcggctcgagcgcgtcgcagcccaaatcactctctccttcgccatgggcccccgcagctccgctgtcttctacgccaaagcccagtgcgtcatcagggtcaaagactcccaagagagggacgtactacccgtcctccctgactggagccatcactaccacatggcatgtatacatatgttgctggagcagaacacgacctggcctgactgtagaatctagcagcttgataatcagaacagcgagcacaatgtccgttcggcgccggcgccgtccctaaacggtgaagcaccctccatgagctctcaaggctctcctgagccggcaggctccaacacgtgccgctgcctgttcgccgttgc

SEQ ID NO: 130450 - DNA, 515 bp, Zea mays
  Clone ID: MRT4577_50442C.1
cgcgcagaggcggctcgagtgcctaccataccctaggggcttggtgagcggccgggctgcggctggtgttcacgcaggccgttggtgagaatgccaccgagactggtgagtacacctatgtccaaccgggaggacctgcaggcggtcgagctgtctgctgatggcagcatcctggtattggtgagcaaagtagagcacaattgaaaagtcagggatgtgatgaacatgtatgtgcactcgacggccttgcataatgggaggaagagggaggaagatgttaaacgttggccagctggtgaccgaaggtacggaagctaacctaccgcttatggtcctgctgaaaagggaaaacagcgggtgtcaacaagtgccctagaaccagacgagccttttagttcctcttgacagaaaatatctctacacaggcttgtgcaatatgctgactttaagttatctacaaacctttttgcactgaagagcggtgaacaaaagtcactagatacttttatcccaaa

SEQ ID NO: 130451 - DNA, 365 bp, Zea mays
  Clone ID: MRT4577_50443C.1
tgcaactgaaaaaaccaagcatcgcgcggggacggtttaggctgctacctgcagatcccagcctgcgggaagccatggtgtccgtctccccctccaacggagaacaagggggcgttcaagtacatcctatccagacccactcgacagtcgaccccgttgcgccgagcatctccgtcggcgccgcggcgccgtcccgtgcattgggcgcgagcaccaagaaaagcgcggacgaggtggagctcctgctgcggcggaacgcggagctggagcgggaggtggcggcgctacggctagagctaagctcggggcggccctccgcctagacggccgaagaagccgaagagcggctgtgcgtgcagctcggc

SEQ ID NO: 130452 - DNA, 797 bp, Zea mays
  unsure (1)..(797): unsure at all n locations
  Clone ID: MRT4577_50444C.1
tcggccggacctcgtcggtcgtccgaatctggtggactatctccatcgccgggcgtccatttttggccgggtgagccgggggtgggtatttggtgccgtgggttgctgctctcgcccgtcgatgcttggttagcagaagagacggcggcggtaccatgttgcagtgcctggatggagtgaagcagctccttgccgtgctcctcaagtgctgccacatcgacctcaagcagcccaacggcctagaggatccggaggtgctcgctagggagaccgtgtttagcgtgagcgaggtcgaggcattgtatgagctgttcaagaagatcagcagtgctgtgattgatgatgggctgatcaacaaggaggagtttcagttggcgctgttcaagactaataagaaggaaagtttgtttgctgatcgggtatttgacttatttgatacaaaacacaatgggattcttggatttgaagaatttgctcgggcgctctcagtatttcatcccaatgctcccttggatgagaagattgagttttcattccaactttatgacctcaagcaacaaggcttcattgaaagacaggagacttttgaggaggcagacacanagcatgatgggaaaattgacaaagaagaatggcgcaatttagtagtgaggcatccctctttattgaagaacatgacactacaatatctcaaggacatcaccactacatttccgagctttgtcttccattctcaggtcgatgatacctgaatttctgaaactaatgaatgtcagaaggtggactgcttgctttgc

SEQ ID NO: 130453 - DNA, 1547 bp, Zea mays
  unsure (1)..(1547): unsure at all n locations
  Clone ID: MRT4577_50445C.1
ccggccgggccggggaaacaattaaaaaaaaaaaaaaaaaaaaaaaaaaaagaaacgttcctgaaaaaaaaaacacgaagaactccaccgtttcatcctctttccccaatccgttcaacgacggcttcaggaacccttcctccggcggccgccacaacgagcctcgggcaccgcaaagcaaatcctatcctatcagtcgaatcgtgcgtctcgtcgagcctcgatcctatccccgccacgccgatccctcgtcggtcgtccgaatctggtggactatctccatcgccgggcgttcatttttggcccggtgagccgggggtggggggtgggtatttggtgccgtgagttgctgctcccgcccgtcgatgcttggttagcagaagagacggcggcggtaccatgttgcagtgcctggatggagtgaagcagctccttggcgtgctcctcaagtgctgccacatcgacctcaagcagcccaacggcctagaggatccggaggtgctcgctagggagaccgtgtttagcgtgagcgaggtcgaggcattgtatgagctgttcaagaagatcagcagtgctgtgattgatgatgggctgatcaacaaggaggagtttcagttggcgctgttcaagactaataagaaggaaagtttgtttgctgatcgggtatttgacttatttgatacaaaacacaatgggattcttggatttgaagaatttgctcgggcgctctcagtatttcatcccaacgctcccttggatgagaagattgagttttcattccaactttatgacctcaagcaacaaggcttcattgaaagacaggaggtaaagcaaatggttgttgctacacttgcggagtcaggaatgaatcttttagatgaggtcatagagagcatcattgataagacttttgaggaggcagacacaaagcatgatgggaaaattgacaaagaagaatggcgcaatttagtagtgaggcatccctctttattgaagaacatgacactacaatatctcaaggacatcaccactacatttccgagctttgtcttccattctcaggtcgatgatacctgaatttctgaaaactaatgaatgtcagaaggtggactgcttgctttgctaagcaaactttcagtgcctgtttgatggttgaaaaatctcatcgtcctgaaggcatcaaatcatcgtttgttgttaataatctttttccttgttttgtatttggaattcttgctggatcctgtgtgaatcctcttctattttccctctccattgttcctttattctatttcggttttgatggccagtacttgagtcagttaatgtgtacaaagttgcgtctgatgctgcctgtcattgaattgtatggcatgtgaggaagatttaaattgtatattcaacttttgtggtcatgatagttgcacatatttttaccatcctttctaatttatatttgttatttttttctcgctggcggtctagannnnnnnnnnnnnnnnnnnnnnnnnnnnnnnnnnnnnnnnnnnnnnnnnnnnnnnnnnnnn

SEQ ID NO: 130454 - DNA, 193 bp, Zea mays
  Clone ID: MRT4577_50446C.1
aatggaaatagcacctataccccatggcaggattagagaactactagtcccgaactcctgaactttaaatagaatgtctacacaatcaaaaactttaagtaacacaacctttgtccctgcatgcatagatatttatttcagtccattgctactatctgggaacagcggtgcaagtaacgagatccatgcatgc

SEQ ID NO: 130455 - DNA, 341 bp, Zea mays
  Clone ID: MRT4577_50447C.1
atgggaaaaaccggacacttttattaagttgggggggggacaggacatatgggtaaaacaaaaataggccactggggagaggaaaaactaaccttttaaaaagcggggcccccactggttattaaaaaacaaaaacttacagggccaacaaaagccctaatacaaattcaggggggaacgccgaaacatatatatatatggggaacaaaaactggggaatagggcaattaattcaatttggcactaccaaattccccagggggccaacatttttttctaactcggccttgaacaagtttttaacaatgtttaaaaaaaccgggccactgggactggatttt

SEQ ID NO: 130456 - DNA, 212 bp, Zea mays
  Clone ID: MRT4577_50448C.1
acgcgctacaggcgcaccatctacctgccatctcctttcacgccacgtatcctagaccacggacaggggcaccttttcactgacgctgtacatatccatataagacatcaaccctttacgaagcatcgcatacctcaaactcacactcaacctcaccaacatacacctcaagcacactgaccgacctcgacacactcatacttaccgatctc

SEQ ID NO: 130457 - DNA, 400 bp, Zea mays
  Clone ID: MRT4577_50449C.1
ggaaaacaaaaccagggggggtattttaaaaaacaagcccacacagaaacctgatcggaaccaggtttgttaattaaaatgccccggtataatttgcatcgaaacgggtacacgagggggaaggggggtacatttaaaagcccgccggggggagggacgacgatacatactaaatacaatacaatacaagcggggggaaccagaaaaaaaaaaaaaaccgaaaaagacagaaaaaattaaggggaagcgctatatttatcccgaaaaaacagaaggggagctaacacccccgggggcggcggcggcggcggcggcgacggcgacggcggaggccttggtttactaaaaacctcggaaagaggggaacctgtcgcccacaggccgaggttgcggttggggc

SEQ ID NO: 130458 - DNA, 534 bp, Zea mays
  Clone ID: MRT4577_5044C.1
atatcaaactccgaggcgagaggttgctcactgataacggaggtcaggcgtgggtgttgtgctttcctaataacaagttaaacaaagggggcttcaggaacatgtagagagaccgggggggggggggaaaaaatggagcccttggcacaaaggatcttcctcacacttggggcttgctgatgtaccaggggcgggaactttaaagtgacccccaaacacgcacaggaatggaaggcatgttacatctggaacaaaaaagaccgaaaaaaccgggccctcgtgaaaaacttattatggtaggtgaagagcccgaatataaccacctttggaggctggcactacaaagacctcctgaattagctggcgatacatggcatggctttctttagctatgccattcataaattattgcaaccaaagccctaagcttgtttttcctccgcccataagaggccccaatgcaacaagggcgagggggatcaccccattagcattccctcccagaacttgcaatgtgaactccaatgggaatta

SEQ ID NO: 130459 - DNA, 500 bp, Zea mays
  Clone ID: MRT4577_50450C.1
gggtgggacaaaaaaaaattttttttgggttacaacaaaaaaaagcacatggaaaccacgggggccccggaggaccttcaaaatcaaaccaaaattaaaggggccggccgaccccgaccccgacctaaccaaagcctcaatccaaaggatcatttactaaaaaagcctgattgttcaaaaacaagggttccctttttttggggaaaccagggggctccaaaccgggccccctggacttgatctcaggagaaccccaaaaaccaggctcaaccaaaacaggggggtattggattccaaaagcccctgcaaatttagaaggggacacgtacctttttggagcactcctaaacgccccgccccgaaaatccacagccctagaaacaaaaaaaaagccccgggcgggagtttttggaggggcatccaaaaagcttctaacacgggctttggagggtccatcaaaaaaaccccggccaccgttttttggtgggttgggggaaaag

SEQ ID NO: 130460 - DNA, 202 bp, Zea mays
  Clone ID: MRT4577_50451C.1
gtaggcccccagcacttttatttacaagcattaaaacccaggccccttaggataacatttttcaaacaggtcccgagggaccttggccgggatggggcccccaaaggggccccccctgatctagctgccttaaaagaccaacagaaatgagaacctggccgggcggcctcacaaagggggcaattctggaaaaaatcaaaaa

SEQ ID NO: 130461 - DNA, 494 bp, Zea mays
  Clone ID: MRT4577_50452C.1
ggaaatgcacatgcacgatcataatagggtattaagcgttgagcatacactttgtattcgacataaagcacacatgctgttaatggccaacagtagacataacataaggagccatctcaccatgggtaaactgccaacaagaatcatgccatgctgctacgaatgcttactgcaagaagagaggcctgattcaatccttgctatccaggtattaggacaggcattccatggcttcttactcacaatcaacagttggggaacaggtgctaaagatctactaatgatggtgaagctttgaaagctaaacaaggatgctatcaatattgaaaagtggtaacagaattcttaagatttggttcacctgcaaaagcaaccttaatatttaaggccagcttaactgctgtcatcaaacaagtgaagatcatttagtgaattcaacatcaacaaatcctctattggtaagggctgcagataccatcctgatgccttctggc

SEQ ID NO: 130462 - DNA, 2144 bp, Zea mays
  Clone ID: MRT4577_50453C.1
ggtttgtgattcattgagagggaaagtgacattggtagatctgaagttgatccgtttgattttcctagagaaaacttacgcgtccggcatctcgtgcgcacaatttcaaggatgtggaaatcaggacacctagctacgatcaagaaagcacagatgactactatggtaattttaattcttcacatgatacattggcccatggcagcagcaccactgcttgggataagcaaaacgacaaagctcaagacaactcttcacctgttgtttttgatcaatatgattctgatgttgaacaagagaatttgttggacacattctcctcaaagcatactgaacaactacctgctcccggagatcatatgagattctcaactgcagattggagtgaacagcataccagtgaatctccatccaagcagagaacgtcagccctattttccagaacagaaacacaactatctgataatttaggaacaaacaaaagtgatattccttcacctcattcttatcataacatgcgtcctgcttttgattcagatggtggtagctctgatgaggaaatagccacaaccacgcatgcagtgcctttaaggtcacattcaggaggatctgcttcgtctgtcctgaacaaaggtggtggacctgatgcttcacccatatttgattattcaggagcacatgcagtgaggaacttgaaccgtgtgcaaagcagagattctgatctttcggaagaagagacagatttagataaatttaaaggttcatccttcgccagagcaaatgagcagcagctgttgccttctgccatacgtacttcagcaacttctgatgataaggaagatgacatcagcctgaactttggtaagttaacgcctggactaagaaacaaacccaggcaacccccaccatacaccaaagtttccagggagagcattctgcctaagcagtccttgcctaaggtttctgctggcactgaagagtcagtcgattctgaagagaatactacattcaaacaggatagaagtagtccccaaagctcattttcagccaggacttcttcaggtaaagactacgacagtggactttatgaaaggaaccgaagtgttggaacacactgggaagcaaaatcaaccatagcaagaaattcctctggtttagatgatgctgagaagttatctgatctacctactaatataagtcttccaacaactaagagttctgaacgctggaattcgagtaaagtgccttatcatgaaaaaccaggtattggaacacgccgagaagtgagatcaacactggctagaaattattttgattcagatgacagtgaagaagaactagagcaacagcagattcctcagtcgaagcaatctggagtgctgatacagtcacgcaggacacgggaggtgacatcagacacaaagagagatggtcgtttccaaaccggagctcagtatggtgatgaaactgagagtgtgacaagtaagacacaagtccatcaaggattcaacagctcaagtactgaacggagtgaaaggagggatccaagtgtgtaccccagggttgcagtacagcgctcttcgtctaaagctgagcagattgaatctccgatggagagagggaagccacaaggagctgaaatgagaagcaccttatttcgaggaaatgaagaggacacagaaacctcatctggaactccaaaagaaagcacccccaaaacaccccctgcacatgttcatcccaagcttccaacagactatgattctttcgccgcacattttaggtctcttcgaacaaaccggccttaggtttacacgacatatagagtttggagtttcagttgaattaagtcatatatacgatactatgatacgttttatggaggttgagttgagatttgtacattatagcaacactgttttctggacactatcgtgctgtgctagtttgggcgtacaattcttttgttctcttgtatcctcatatactcaatagaatcatattgtaaagactttaatttcctgttagtgattattaataagcacggcatgttggcatatgtatagaacatgcggggttctttcattccattgtaacgggatctgctacactcatgctatgagattgtttcatgctttctgccc

SEQ ID NO: 130463 - DNA, 184 bp, Zea mays
  unsure (1)..(184): unsure at all n locations
  Clone ID: MRT4577_50454C.1
tacgttaggccacggaagtttgatgctcgtgatgacctggcggcgctcgagaaggactacgcagaggtcggcgctgagttcgatgagggcgangatcgcgacgacggtgacgagtactagagaagtttgctgatgacgcagcatcagggccagtgtgctgcacttatcccgtgatctgccgtga

SEQ ID NO: 130464 - DNA, 484 bp, Zea mays
  Clone ID: MRT4577_50455C.1
atacacactccctagctccgtctctcaagacttgtctcccgtcgtcgtcctaactcctctactcgccagtcatcatggtcgttacttcgatcgaaataaacaacttcggaaggatcgcgaggctcatgcgcttggtagccctccaaagcgacgatgaccatctcgacgccggccacctccccttcatcgccacgacactagatgacctacatgtcggagtacaacaccgtcgacgggcacatgccacacagggacatcgccctcaaggactccctgacccttctcttcggagacaagaagagcaccggacttcttcatgcggaagcctgcatgaaatcccgtgactagagagtggggttgagtctatagtggagatctgcggtatcttagctgagtgggccgactctgccgaaaatctcacgagagctacctcgaaggttgttatctctgccccaagcatagacccatccatgtatgttgttgc

SEQ ID NO: 130465 - DNA, 394 bp, Zea mays
  Clone ID: MRT4577_50456C.1
tttgcacgcatcgatgcattcaatcatattgtcaccgcggtcggccgggtttaaaccgagggccaagatggggcaaagaggacgtggacaccctcggggaggccgttctggagggggagaaggagggggagaaggccgacttaacgtccagcttaacgatgcccttacaataccgacgacatcagcattcgcacctgcattcccaccatcaaggtcatcattaagaagggcgtcaaggagatctcaagggccaccttggcaggccaaaaggtggtaccaaaagggacaacttgaagcctattgttacacccttggctgaactccttggagatgtaattgggattgacaatgatttgatttatgaatgaattggggaagtagctggcaatttggc

SEQ ID NO: 130466 - DNA, 604 bp, Zea mays
  Clone ID: MRT4577_50457C.1
ggtcgccgccgtcgcgggctccggcgacacccagacccaggccaccaagatggccagggccatggcgtcggccaccgagctgctagcctcccactgcgtcgaggcggcccagcacgcgggcgcgcgccacgatcaggtggctgccgcggtgcaggccgcggtcggcgtcggaagccccggcgatctggtcacgctcacggcggccgccgcgaccgctctgcgaggagcggcgacgctgaagcagagggtgcagcgagagacggcgaggagcaacgcgagcgtcctcccgtacgagagagggagttcgtggagcccggacatctggtgcaaggaaggggacctgctgaaacgcacgaggaaagggggtttgcacaggataagagtatctatctacatcaacaagaggtcacaggtgatactgaagctgaaaagcaaacaccttggaggcgcgctgtcaaagaacaacatgagcgtggtttacggcgtgtacagagagcttccgacgtgggctgggaagggctccgtagaggagacatgctggttctgacttaacaccgtgcaaggtttcgcggaggtggagtgccgtgggcgacaccagcaaacg

SEQ ID NO: 130467 - DNA, 140 bp, Zea mays
  Clone ID: MRT4577_50458C.1
gctatgtccgaagtagagtccattggtgagtatatgaattggtggattaggcaaagtagaggtgtatggaaaagttgaagattttgggtgggtgtctcttattagctcgtcactgagtcgtgcgtgtcgttgattccctg

SEQ ID NO: 130468 - DNA, 602 bp, Zea mays
  Clone ID: MRT4577_50459C.1
gccggccgggccgggatcatccttttagtgagcgttacaattccgctgattctgtcgttgccatccgctcgaggatatgtcgcgtcttcctctgttgcagttgcccctagcggtatcgtgaagccccatccgtatcttgctcgacatgtcctgcaaacagcacgcgaccctcatgtcccgcccgagggctaaagccgatgctaccatctatctgatcccatctaactattaccagattctaatatcagatgttgatcttaccccaccgtaccttactgctgtgaccggtaccccttccctcctacctagacgcaaatcactgactgtcaatgagattgaggttattatgctgggagtgtccatctgctatcacctcctatgtattgcaacttctaggaacttccctattatcccatacgccggacttattgacttcgacctctattattgccttcctgatgatacagaattgtgaatgtttccagttctctgcaagccagatgagtatacattaatttccagtattctgctcatgtaactgatcatatcttgaacacattgagctccttgcggaagaaccgttttcatggaatgtttttacg

SEQ ID NO: 130469 - DNA, 171 bp, Zea mays
  Clone ID: MRT4577_5045C.1
aacacggaagtccgggaacagtaaaggaatactgttcactatttataggcacaggacacaccctggggggaattacaatattcccccttataagggactaccaccgcgtcttaaacatttatgggataaaaggtaagggggggggtgacgctcataggcaccaccaagccg

SEQ ID NO: 130470 - DNA, 618 bp, Zea mays
  unsure (1)..(618): unsure at all n locations
  Clone ID: MRT4577_50460C.1
gtgtgctgggatcaagtctcacacatatgatgactcatggtacaaaaacgaatgtcacatctttactatataattggagttctataaaaatagataaataattacatcaaatgaagacaacgatccagcaaccatagttgattgggagacaacggcctagacctctcacgaactcatcgcaatatccttcaagctcttcatcttgtggtacctgtccttgaccacgagttaagcagcgtaggggcatgacgttgatgagtggcgggtcggtggcgagggagttcccctggcaagaaattcctgccaccttccaccccaggacgctagtaatccaccgcgcacgggtcccgtgggtctcggcgaacacccgcgcatggtcaagtgctccgaatcctgctaatggcaaagaatcacgtcggtggtccacggtcaccgccgtaggagatcctctccctcactcacggtttcgtggtgcttgggcgagatagatgagggtcgaagggtcccaatgtctctcttatactccacgaagaagtcagattgagggcgacatgggtgggattttcngggcgggtcatgccgatactcaccctcgcttggaatcgggacgaagtctag

SEQ ID NO: 130471 - DNA, 432 bp, Zea mays
  Clone ID: MRT4577_50461C.1
atgccggccatcaatgataatggtccggtggttcttcagctgggaggtgatctgaaccacgggatccggataccagcgagtccggtggagagcgacgacacatgctacatcacatcgacgggacccttgtctccgaacctcatgctgatgtcgattctaccagtggctccgattcctcaaccaagcgccagagaaccatggaggggtgggcgcagggctgtcctcatgttcctgttgcccagacacttgccgtcatacccctacctcttaggcacaaccgtccctagaaggggcaacagcactggcggcatcaactacagcccgaggagcagtcttcgagcttctagccatggtggaatatccgaacaccatggtaaatactttttcctctgtgttgggcatcaaattgagcggcggacggtccggccctga

SEQ ID NO: 130472 - DNA, 541 bp, Zea mays
  Clone ID: MRT4577_50462C.1
ttcgggaacctcagacactaccacttccttcatcatggcacctgcaactggcggcaagaagcaaaagaagaagtggtcaaagggaaaggtcaaggacaaggccaaccacgctgtggtcctcgataagcagacctccgacaagctccagaaggatgtgcagtcataccgcctcatcaccgttgccaccctcgtcgatcgcctgaaaatcaacggctcgctcgcccggaaagcgctgaacgatcttgaggagaacggacagatcaagaaggtcgttggacactccaagttgagcatctacacacgagcaactggtgccgcggagtaagcggatcgttcgatgacaaggctacggatgcgagactcggttattcttcactttccatatggcttgggaaacctgcttccttccattaccggcgcatgagatgtcaaagggtcatatacaggcctggcgggcatagtatgagagcaccgccaagggcttttcccgcgcggctatgtattgaatgaaaaggaaatcggaattgcatcctgccaactg

SEQ ID NO: 130473 - DNA, 415 bp, Zea mays
  Clone ID: MRT4577_50463C.1
taccatggcaagagaacggatttatatttatgcctgaaaaaaaatgaccgttcatattcaaaaaaaaaaaaaacaaaaaaaaaaaaaaaaaaaaaaaaaaaaaaaaaaaaaaaaaaaaaaaaaaaaaaaacttttccggcctgcccggacgaaagggaaaaaagggcaatattttcaaaaaattcataacactggggagcagctatatcatagggcccaaagggcccatatacgccctatagatgacacttaaaacgaggccactgtgccgacctttaaaaactgggaaaaccctaaaactcccccaatttaccaaaccttaatcgcctggcaaaatttccccttttcccaaattggcgaaaaagccaaaaaggcccccccctttcgcctttccaaacagcctcaaagcctaatt

SEQ ID NO: 130474 - DNA, 345 bp, Zea mays
  Clone ID: MRT4577_50464C.1
aaacaccaaacggggggttcgtcattcaaattcagggttacttggtgtcccaaaagaaagattggaaacaagtcccggtctgccctgcaccccagagagagagatagagagcttcacgccgtttttttttgggaagggggggggaaactcccccaaccttttctttttctttgtaattgagctagattttagggagggggggaacctcacataacattttccacggataccccagggggcttgggaccacgtgctcattgttggcccaggaaatccaccccaagtccggctttgggtggccttgccgggccctggacccaaaggggacataatacctgagctttt

SEQ ID NO: 130475 - DNA, 1142 bp, Zea mays
  Clone ID: MRT4577_50465C.1
atgtagttctgcgatcacatttctgaggaatagaatggataggcctcgaaagcgtggtgcagactcattatccagccgggctgccctgatgcttgatgcagaaagagaaccagaaaagacatggggccccatagttgaaatacattatgtagggggaacttatagaggtagatgtcaagaaggtgtccctgaaggaaagggacgtctaaccttcagtgacggaagcttttatgatggactctggaggtatggtaagagatctggtttggggactctatttcacagtaacggtgatgtataccatggaacgtggagggatgaccttattcatggaaagggctggtactattttcacagcggtgaccgctggtttgcaaatttttggaagggcaaggctaatggtgagggtagattttatgccaatgatgggagtatcttctttggccatttccgaaatggatggcgccatggggagagcctgttggtagatgcaaacggttcaaggtggatcgaagtttgggctgatggtgtacttatcaacagaactaaaatggagaaataaggttcagatctaaatacattttcctgatgtttctaaaacttggctcctcagatggctacgcttcaaagtctcagatgttgcaaggcactctggttcggagcctctctactgtacacgaagtcgtcctatcttcagtcttgaaagtcgtaaataggtgcgctgtggtctgtggaggtttcgatgccctaatttcaaaggggcagactgcaggcgtttctgtatataccactagactgcaagtatgggaggatgcctttgttcatacggctgatggatcaagctgggaacagctatatacccaactgtacctgaacgtgaagtgtgtttgattagttccactgataacccatagatattttcttgtcaaggttacatggacgaaacaggctctcgtggccgtgctcctttttctccccccaattgagtgcttgagtttccacgaatgtgggcccaaactgtatcctttaccctttttaatgtttccatcaatattatctgcccgttgtatttcgacaaaaaaaaaaaaaaaaaaaaaaaaaaaaaaaaaaaaaaaaagggcggccctagttaaagataacga

SEQ ID NO: 130476 - DNA, 456 bp, Zea mays
  Clone ID: MRT4577_50466C.1
gggggccaaaaattagtttttaaaaaccaaacccccccttaaacactttttggggggggggttcttatatttatatatatatatgggcccctatataaacccccaaaagctttgattgggggtgggggggggtgcccccattgcccagggcccaccatttatgaatctatgatggcccacccaactgcagttggagcggcccccccggcgggggggggaggacccccccctcgggaagccccccccatagcagggcccggaaggactgggtccccccctttttggggagcccgggtgccaaaaatccccccgggtccacctcgcccttgttcatgggtaccacctacctggtttgaaaaaacctggccagggccacccggtcctcctggccggaaaaagggggaaattggcccggaggagcttcttcaccaccggcgtgatgaccatgtccccccc

SEQ ID NO: 130477 - DNA, 343 bp, Zea mays
  unsure (1)..(343): unsure at all n locations
  Clone ID: MRT4577_50467C.1
cggaacccccgggccgacccacgcgaccgatttagctaccggagaacgcnagcaccgcgacaaggcggggcaaaaacgaaggcagggggcgggaccgaacccaaggngcgagccgacacccggaagaccggcggccaggcgggggcggaggcaagccggccgaccaacaaccgcacgggcgggcngaacagggacaagaacagccaagagcngcccaacgaaagcgccaaagacggaaccggggnagngaaagacacaaaccncacgggccaggagcacgagaccgagggacggaggcagcggaanccggcaggaagccaaaccacgccgaagcggacagagc

SEQ ID NO: 130478 - DNA, 985 bp, Zea mays
  Clone ID: MRT4577_50468C.1
cacgactctcggcaacggatatctcggctctcgcatcgatgaagaacgtagcgaaatgcgatacctggtgtgaattgcagaatcccgcgaaccatcgagtctttgaacgcaagttgcgcccgaggccactcggccgagggcacgcctgcctgggcgtcactcctcttgtttctggcgtcgcctccgtccggctccgcttcttccacccgtacccgtagattgatttccatccgggtcccttccgttccacggcaagtatccgtcgcacgattcaggcccaccctcgccgtcgtccatggcgctgcagtacgtggaggcgcagcggcaggcgcggccggacctcgccgactggtacgccgacctcgccgacctctaccagcgcaagctctggcaccagctcaccctcaagctcgaccaattcctccagatcccggccgcacagactggcgacacgctcatacagctctacaacaacttcatctccgattttgaaacaaagatcaatttgctcaaactcgcccagttcgccgtcatagcctcgcgccaatatcccgacaaggacgccgccatcaccttcctcgaggggataatcaccaagcttcgcgaaaccagggagctgcggatcaatgagcctatccttcacgtcaagatgcagatcgcggcaattcacctcgacaaagggaaccacaaggagtgcaagaacctgctggaggaagggaagaccaccctggatggcatgactgatgtggatcctacggtccacgctagcttctactggatatcgtctcagtaccataagtcgctccaagagtttgctgagttctataagaacgcacttctctatctggcctacacaaccgtagggtctctctcagagtcattcaagctggacttggcatttgacctttcccttgcagccttgctgggggacaacatctacaactttcggggaattgttagctcaccctattatcaatagtcttat

SEQ ID NO: 130479 - DNA, 279 bp, Zea mays
  unsure (1)..(279): unsure at all n locations
  Clone ID: MRT4577_50469C.1
cattgggtacctcgaggcncggccgggattggcctttcttcatcaagcaacaaacaaaaaaaaactggagaacaggcaaaggcctccctccctcaactcaggaaaccatccaacttgtcgatcggccttgcttgccttggtactcctgcttccgccatggttcagatcaaagagttgtatcctcccccctcgaagttcttgtgttgtgtcagcagtgtttaattttggtacccgcgtttgaattttgctgtatggatttgcgcgtatatacctttgact

SEQ ID NO: 130480 - DNA, 248 bp, Zea mays
  Clone ID: MRT4577_5046C.1
ggggaaaagaaaaccaggccccaacaccggcctactggaaccccccaaatggatccatcaatgggtcatgggcatacccaggaaaacatactttcaaaacattattttggaatttggatgggtatgccctgcccatgaagcctaaaccacttttagaggggggccactcaaagaattcacattattgccaacaaaacaaaaggacaaccgggggcctcctggtccaaccggcccaaaattaccaaaaa

SEQ ID NO: 130481 - DNA, 869 bp, Zea mays
  Clone ID: MRT4577_50470C.1
aaataaaccttctcttgttggcgtcgcctccatccggctcggcttcttccacccgtacccgtagattgatttccatccgggtcccttccgttccacggcaagtatccgtcgcacggtgagattcaggtcccccccctcgccgtcgtccatggcgctgcagtacgtggaggcgcagcggcaggcgcggccggacctcgccgactggtacgccgacctcgccgacctctaccagcgcaagctctggcaccagctcaccctcaagctcgaccaattcctccagatcccggccgcacagactggcgacacgctcatacagctctacaacaacttcatctccgatttcgaaacaaagatcaatttgctcaaacttgcccagtttgccgtcatagcctcgcgccaatatcccgacaaggatgccgccatcgccttcctcgaggggataatcgccaagcttcttgaaaccagggagctgcggatcaatgagcctatccttcatgtcaagatgcagattgcggcaattcacctcgacaaagggaaccacaaggagtgcaagaacctgctggaggaagggaagaccaccctggatggcatgactgatgtggatcctacggtccacgctagcttctactggatatcgtctcagtaccataagtcgctccaagagtttgctgagttctataagaacgcgcttctctatctggcctacacaaccgtagggtctctctcagggtcattcaagctggacttggcatttgacctttcccttgcagccttgctgggggacaacatctacaactttcggggaattgttagctcaccctattatcaatagtcttattgggaccaagggtggagtgggtctatcacat

SEQ ID NO: 130482 - DNA, 825 bp, Zea mays
  Clone ID: MRT4577_50471C.1
cctccttctcttgttggcgtcgcctccgtccggcttggcttcttccacccgtacccgtagattgatttccatccgggtcccttccgttccacggcaagtatccgtcgcacgattcaggcccacccctcgacgtcgtccatggcgctgcagtacgtggaggcgcagcggcaggcgcggccggacctcgccgactggtacgccgacctcgccgacctctaccagcgcaagctctggcaccagctcaccctcaagctcgaccaattcctccagatcccggccgcacagactggcgacacgctcatacagctctacaacaatttcatctccgatttcgaaacaaaaatcaatttgctcaaactcgcccagttcgcggtcatagggtcgcgccaatatcccgacaaggatgccgccatcaccttcctcgaggggataatcacaaagcttcgtgagaccagggagctgcggatcaatgagcctatccttcacgtcaagatgcagatcgcggcaattcacctcgacaaagggaaccacaaggagtgcaagaacctgctggaggaagggaagaccaccctggatggcatgactgatgtggatccaacagtccacgctagcttctactggatatcgtctcagtaccataagtcgctccaagagtttgctgagttctataagaacgcacttctctatctggcctacacaaccgtagggtccctctcagagtcattcaagctggacttggcatttgacctttcccttgcagcccttgctgggggacaacatctacaactttcggggaattgttagctcaccctattatcaatagtc

SEQ ID NO: 130483 - DNA, 804 bp, Zea mays
  Clone ID: MRT4577_50472C.1
attctccgtcgcacggtgaggtactgctgctgctgccgcttagtccaatttcccttctcgtttatatcgtccaaaaaaaaaaaactagggttttactttcatcttcctcgcctcgcctcgccgcattgctcttgttctagttggcggtggttgtcgccctccccctccccaaaccctaacggaaaaggcttcttcagattcaggtcccccccctcgccgtcgtccatggcgctgcagtacgtggaggcgcagcggcaggcgcggccggacctcgccgactggtacgccgacctcgccgacctctaccagcgcaagctctggcaccagctcaccctcaagctcgaccaattcctccagatcccggccgcacagactggcgacacgctcatacagctctacaacaacttcatctccgatttcgaaacaaagatcaatttgctcaaacttgcccagtttgccgtcatagcctcgcgccaatatcccgacaaggatgccgccatcgccttcctcgaggggataatcgccaagcttcttgaaaccagggagctgcggatcaatgagcctatccttcatgtcaagatgcagattgcggcaattcacctcgacaaagggaaccacaaggagtgcaagaacctgctggaggaagggaagaccaccctggatggcatgactgatgtggatcctacggtccacgctagcttctactggatatcgtctcagtaccataagtcgctccaagagtttgctgagttctataagaacgcgcttctctatctggcctacacaaccgtagggtctctctca

SEQ ID NO: 130484 - DNA, 892 bp, Zea mays
  Clone ID: MRT4577_50473C.1
caccttccccgaagattgatttccatccgggttccttccgttccacggcaagtatccgtcgcacggtgagctactgctgctgctgccgcctagtccaatttcccttctcgtttatatcgtccaaaaaaaactagggttttactttcatcttcctcgcctcgcctcgcctcgccgcattgctcttgttctagttggcggtggttgtcgccctctccctccccaaaccctaacggaaaaggcttctccagactcaggcccaccctcgccgtcgtccatggcgctgcagtacgtggaggcgcagcggcaggcgcggccggacctcgccgactggtacgccgacctcgccgacctctaccagcgcaagctctggcaccagctcaccctcaagctcgaccaattcctccagatcccggccgcacagactggcgacacgctcatacagctctacaacaacttcatctccgattttgaaacaaagatcaatttgctcaaactcgcccagttcgccgtcatagcctcgcgccaatatcccgacaaggacgccgccatcaccttcctcgaggggataatcaccaagcttcgcgaaaccagggagctgcggatcaatgagcctatccttcacgtcaagatgcagatcgcggcaattcacctcgacaaagggaaccacaaggagtgcaagaacctgctggaggaagggaagaccaccctggatggcatgactgatgtggatcctacggtccacgctagcttctactggatatcgtctcagtaccataagtcgctccaagaggttgctgagttctataagaacgcacttctctatctggcctacacaaccgtagggtctctctcagagtcattcaaggtggacttggcatttggcctttccctt

SEQ ID NO: 130485 - DNA, 281 bp, Zea mays
  Clone ID: MRT4577_50474C.1
tcaccacgtccgactgccctctccaaactctaaccccgacgtgcctatccaactcgtccagcggcgtcgaccaacgatgcacaaattaccacagaccagccatcgggtacacaactgaccaacttgttgagcacctacagaaactcaagagacattacacgatctacgatcaccctgacatattgacagatgctgtacaggctatacatgtatgacatataggatgtgcactgagcaacaatctactctttatacacaagaagcatgtgttatatgttata

SEQ ID NO: 130486 - DNA, 834 bp, Zea mays
  Clone ID: MRT4577_50475C.1
gcttctcttgttggcgtcgcctccgtccggcttggcttcttccacccgtacccgtagattgatttccatccgggtcccttccgttccacggcaagtatccgtcgcacggtgagctactgctgctgctgccgctgccgcctcgcctagtccaatttcccttctcgtttgtatcgtccaaaaaaactagggttttactttcatcttcctcgcctcgcctcgccgcattgctctttgttctattctagttggcggtggttgtcgccctccccctctccaaaccctaacggaaaaggcttcttcagattcaggcccacccctcgacgtcgtccatggcgctgcagtacgtggaggcgcagcggcaggcgcggccggacctcgccgactggtacgccgacctcgccgacctctaccagcgcaagctctggcaccagctcaccctcaagctcgaccaattcctccagatcccggccgcacagactggcgacacgctcatacagctctacaacaatttcatctccgatttcgaaacaaaaatcaatttgctcaaactcgcccagttcgcggtcatagggtcgcgccaatatcccgacaaggatgccgccatcaccttcctcgaggggataatcacaaagcttcgtgagaccagggagctgcggatcaatgagcctatccttcacgtcaagatgcagatcgcggcaattcacctcgacaaagggaaccacaaggagtgcaagaacctgctggagggagggaagaccaccctggatggcatgactgatgtggatccacagtccacgctagcttctactggatatcgtctcagtacataagtcg

SEQ ID NO: 130487 - DNA, 221 bp, Zea mays
  Clone ID: MRT4577_50476C.1
atctataactagttttatttttagcggtaaccacaaaaacagtttgggaggttataaaaccctgtccggtaccttgaaatccactttcaccggtggttggtccgatacacaaaaaaagaaagatcattcgtcaaatactgcacgcacacattcggtttgcttctatcacccaaaattaatcaactaaaaacgaccgatggcacgcgatctgtacatacacg

SEQ ID NO: 130488 - DNA, 819 bp, Zea mays
  Clone ID: MRT4577_50477C.1
aaaaaaaaaaaaaaaaaaaaaaaaaaaaaaaaaaaaaaaaaaaactgcactattggccgcggcccacacacactacagcaactaggtccaacaggtaggcaactcgccggccctctccggtcacaagcctccacagaactctccccgactttgccgtccactcccccgccgcagccgcgccgttcgccgggacaggagggatagtagagcaccaggatgccggcgacgccgacgatcatcggtgccctcctggggctgggcacccagatgtactcaaacgctctccgcaagctcccctacatgcgccatccatgggagcatttgttggggatgggtctcggtgcagtgtttgtgaaccagctggtaaagtttgatgagaagctcaaggaggacctcgacaagatgcttgagcgcgccaggctagccaacgagcagcgctacattgacgatgatgaatagatgcccagatttatttgccagcgacctgtattttttttgcaacatgttgtcagtacacatggccaggactgatgatcccccatcgtcttagttctctcagctttccgcatttcaactgtgatcttgtaataagatgtcggatctcatggattaccaatgtaatacaccaattatgggttcttgatctgatggttggctttctctgataaaattactcaattaaaatgattgtgtttttgcaaaaaaaaaaaaaaaaaaagcccctaaaaaaaaaaacaacgcgttcgccgccatgtacggccacatgccgctcgtagccaccacagtcaaggccgtggacagccgcgggagctggttctg

SEQ ID NO: 130489 - DNA, 804 bp, Zea mays
  unsure (1)..(804): unsure at all n locations
  Clone ID: MRT4577_50478C.1
cggacgcgtgggcggacgcgtgggcggacgcgtggggtgtaacagcgtgagattaataaaaacgtatcaataaaaaagatntctttcaaccaaaacattcagatttcanaacactagcagtctcatctatcgngcgcgcagtctgctgcgctgcgctacgaaccgggcggcattagttgggccccgccgtcgatcctccgtccacgacgggctcagcagcaccaccacaccacacgatcgccctcaacacgggagctagaagctacacggattaagtaaggtctgtgcttaaagactcgattggttaggacttgggagtaagctactagctagaagctccagtagtcgatcgacagcaatggccaacttcgctgctcagattaaggacaagttcctcggcctcgtcgaccgtgtcgccggccgcggccgcgccggaggcggcaaggacgacgtacaggagcccactaccaagctgcacaccgtccagcgcgtcgaggttaggtcgcgaggccgagcagcagagcccgtcgtggacggaggatcgacggcgggggccaactaatgccgcgcgcccggttcgtagcgcagcgcagcagactgcgcgatagatgagactgctagtgttctgaaatctgaatgttttggttgaaagacatctcttttatctggtagctggtgcaactagctgttatgggtacaagtagttttttgtcgtaacatgtgtaacagcgtgagattaataaaacatatcaataaattcgtgctttcgatttgtaaaaaaaaaaaaaaagtcgagctcgtgcc

SEQ ID NO: 130490 - DNA, 271 bp, Zea mays
  Clone ID: MRT4577_50479C.1
cggaggtctcactgagcaccgtcccagcatccggacaccacagcggcccttcgctccacgcagaaaaccacacttctcaaaccttcactcaacacttccttccccaaagccagaaggcgcacaaggaggaccatgaggtggctgtactgggggcacccccagcacgatccttccaaggtccaccgtgatcaacatccacagcgagacctccgtgcccgaccatgtcgtctggtcactgttcaacacctcttcttgaactggtgctgtctgg

SEQ ID NO: 130491 - DNA, 695 bp, Zea mays
  unsure (1)..(695): unsure at all n locations
  Clone ID: MRT4577_5047C.1
cccgggttcgtacccacgcccgtccggtgttaagaacaaccaataatgtngcgttcaccacggncnngaaaatttgtcttcaaaactgntccannacttctgtgttttcttccgatttacangaagaatttctacttacctgcgtcacgnaaatccaagaaaaactttcgaaagtttggttacatagaccggggtactaaagagtttaacgatcagcaacgaaaaaatccctccccagacttccctagttttcgatatggcagagaaccagggtattgggataaggatcacaacctagtcgcagtaccggagatgatcccagagataatagtccctgatctaacagattttaagctgaaaccatacgtgtcatatcgggcccctgatactgtagaaggagaattcacggcgaaggatttgtttcatgtagtatatggtagcaagattgaaaaagatttcatcgaaggcagactcagtgaagatggctcccctcttgagccaagtgaagaggaacttttgactgctgaagaagcaaggaatgctcatctgaagttggggtctgatgtatttactgatgttgaaaatattgtgaatgacgatgaatggatgaaagagcagcccaaactagaatacaactgaatatctattgacaagaaatctgtcacatttagtaaataaatttgttatattacatc

SEQ ID NO: 130492 - DNA, 636 bp, Zea mays
  Clone ID: MRT4577_50480C.1
ggaccctcgaggctctggccgggccgttcgggcccctgccttctccgcctccacccgcctcattccgtcattcgggtctccagctgtttccgcctcccgcctcccgcctccttctgtcccccttccggcgcagcctctctcgccccgtccaggacgcaagcggaccctaggcggagccaccttccactcttccagaaagctctctccggaggccggaggggaggccaggatggcagcgacgtcggggccgcccgcgagcgccaacggcaacggctccctcgcgggggtggccgcggcggtgggagcgcccaccaaccccatggcgacggcgctgctcaccgatcaataccagttctctatggcctacgcgtactggaaggccgggaagcacgccgaccgagccgtgtttgacctgtactttaggaaaaatccatttggtggggagttcactgtttttgctggccttgaggagtgcatcaaatttatggcgaattttaagttcacagaacatgacatttctttcctgcaatcagtcatgccaacatgtgagggtgctttcttcgattatctcggggaaagcgactgctctgatgtagaggtggcctctattcctgggggaccataggttttccaaaa

SEQ ID NO: 130493 - DNA, 320 bp, Zea mays
  Clone ID: MRT4577_50481C.1
tgagaggatacttacacacagagaagaatgggcctggagattcactgattggttgggattgaggatcatcaagcaatgaaggggcatggcctgtgccatcaagcaatcaaaaggtgacacatgtacattctacaagtctgaaggctgataatgaagaatacgttacatcctatgagaccgcagcagttgcggttacagcctggtcacatttgctctggaccagcatgtggagaaccccccagagggccagcaaaggagacacagggtacgtctcaatggattgcaacaaagagcaaaaagaaggggcaccagtggcgaat

SEQ ID NO: 130494 - DNA, 632 bp, Zea mays
  Clone ID: MRT4577_50482C.1
agacgacttggaggattggtgcttggacagatacacactcatattactccacatagggttaggctgtttatcaactgcgagataaactaggggctggcgctcaagctggaagtgcaagaaagagagcaccactcgaccctgagaggcataacaacgcacactggcgcagcgacgttcacaagtatgatctgcggcgtggagcgtcgtgataagaatggcccctggcagtgtctacaggccaggcgaggaacatgaagagcacgaccacggataagaatgacgacgcaagctgcaacatgccgacacactcttactgccttatcaaatggatcgacgaccatgcatatgattattatgtatgtatctcgggggggaggattaataataataagataggccggatcagcatgccatacatacggtattgagtctacccgtgttaaagttacacaaacagcagcagtatgcccctcttctgctgctgctacccgggcttcagcgtcttgtgctatatgcgcaggtcgtccaacctcggatgcgtgcgatagcatccaataagctctgaacgtcaacaagcgtggtagtagagtggtgctactgttactgtagtacgtcgtcgtcttcatgcatgc

SEQ ID NO: 130495 - DNA, 216 bp, Zea mays
  Clone ID: MRT4577_50483C.1
caggatttggaccacggcaaagggcctgggaccctcgcccttgttcaatcatttgcacgatcgaatgctgcgctgcgccctgcaggattcatccgactggaggccgagggtgcatgcacgtcagtcgcattgcacggccatggacacgtacaacgcaagcttgtgactctgtgacggggagcggtgagcatgtaagggtgtgacacgggaggactc

SEQ ID NO: 130496 - DNA, 177 bp, Zea mays
  unsure (1)..(177): unsure at all n locations
  Clone ID: MRT4577_50484C.1
aggaattcggacgaggaaggtgccacgtatcccggcccttctccacaccgcctatacctccccctgngctccacctcgccgtgtccgcgatggaacccatccttgccttgttcgcgacggatcccactttgtgttttctcacaccgatgtacgctttcaccgtgtcgtctgatggaa

SEQ ID NO: 130497 - DNA, 408 bp, Zea mays
  unsure (1)..(408): unsure at all n locations
  Clone ID: MRT4577_50485C.1
ccgtccgnngaaatatgaanntctatcgctttctagtgtccgtactctggttgctggtatcancattcctgtgaaaccatcaaattggtggcttggctcatacctgcaaacatncgagtanccacctttcttttggctggtctcatagtagtaatgctctaaatctctaatcatttatgcatttcactttgacttgccttacctaatcagtatgaaacaattgttactggagatgcccacttgtcgagtagttaatgtatggatgaagctaaatatggctttgtcatcgttatccatgctaaattgcctggacccaggtgtgctctcctttctgcattaaagcaaagcatttacttcttcggtatcttttctgtttcaatnttatctcgtggagtaacacaagcaatc

SEQ ID NO: 130498 - DNA, 183 bp, Zea mays
  Clone ID: MRT4577_50486C.1
tcgataaaggctaataacatagagccagggtgctatacctagccatccaaagcttatcgacacagaatcaggtgctgcctttctaccaccctgttcaggatttgctcacatcactcttgcttctacaacaatgtttgcctttctggcaactctcttagacacacccatcttgcttctaccaac

SEQ ID NO: 130499 - DNA, 475 bp, Zea mays
  Clone ID: MRT4577_50487C.1
cctagacttcggtgcgtttgctctgcgcattcatcccacatcaggaaatgcgggcatgctacaatgaccatgatggcgccgcatccgcatccactgccgctagccacatgccgcagcgcctgcgtttgcagacaccacactcaccaatgtgttcgtgggcacgcctgctgtgagataccctgactgacgccttccgttagcacttacagcgctacggcgacatgactagaggcctggatgatgtgctacaagctcacacgaccgttccaagggctaactggttgctgacaatcaaggaggcggacgcggtcaagaaggcgtgcgacgacgccacccccgtgatgaacggactgcgagctaactgcaacttttccaccctcagcacctaatcaggcccaacgacacacatgctaagacctttgccggcggtcactacggcatcggacgcgccagtgctgacctatgaacatgcatc

SEQ ID NO: 130500 - DNA, 755 bp, Zea mays
  Clone ID: MRT4577_50488C.1
catttgttttggcggcggcggcggctgccgcgccaccagctttcctgtgcctctttcgcctcgcgggctatttctcctcctcctacctctcggcctcgtccttatacgagcgccagtgtgaattttcgagcagcagctagctagcctgtcgtctcctccctcttgttcttggctactgatcctgttctgtcggtgatatccaagaaaacaaagacttggtctttttcctctgcgtgagcgagctgagtgagggagctcacttcttcgaacagccggagcctggagcagcagttgagctcccccggagaaagctgagccacggcgcctttgttgctctccgccgcacatggacagacagctcgctcttcccggcagtaacagctcaaggttctaggtctcggtcggcgatggagagggagtcgaggtcaagggtgctctcggagacggcgtcctgcgccggcacgccgaggtcggttcagtcgacttgcagtctccagcgccggtactcttcacggagcattctgaagccacatgatggcgcactggacatgtcgccacggttctcctactgcaagcctgccgccgacagagagaagatgatttcaacagaagacactccctgaatttaccagagcaattgccaggtcattactccagaaaggcaacagacggacccaaaggctagctcaaagtctgttgcagatttggttgggggagatcgcagcgctcgagcaggaagtcatacgcaaggaact

SEQ ID NO: 130501 - DNA, 142 bp, Zea mays
  Clone ID: MRT4577_50489C.1
cttatactgaatggtcacaggtaaggaccgtcttatccgctcacgcccagcatgcaccctcatatgcgttaagaagacgctcgtcttacacagatgcagggcacccttaggacaccgtatcctctggatcatgcacgagtac

SEQ ID NO: 130502 - DNA, 569 bp, Zea mays
  Clone ID: MRT4577_5048C.1
tgcttatcggtgacaacaacgccgaacattgtgattattattgctaggaggagaaatgacgacctccttgggactagccttgaagtgagcggaaatgttctcctggttagcgaagacaccatcacactaaacgacatattcagcgccagccgaacccaatgctatgtaatcatgactgctgctatcagacacatgagccttcttatgaccaaagtagaaggagtctggtatgccttgaacatggcctcatggcggttccattgttcgggcacatgttttacttgaggatgggaggaacgcaaagagcgctaaccaacgtgaagaatgcggcagactagctgacacaagagattgtctgaatggcacacgcctggacaccaggacttcatatcctggaaaagacactgatccgcgatcgtgatctgtgtgctggaggcgcgtgagcgtggatgacaatctgaacacaggctgggtagtttcattatgagaccttggtggagaggctgagcgcggggaagctgggagccatgactaacacgaacggatagactctcagggaggggagtggc

SEQ ID NO: 130503 - DNA, 670 bp, Zea mays
  Clone ID: MRT4577_50490C.1
ctcgagttttttttttttttttttttttttttttttttttttttttttttttttttttttttttttttttttttttttttttttggaagggaggggggccaacttttttttttttggaaaggcccctgcccatttggtggttttaaaggggaagggggcccccttgggaaaaaaaaacttcccggggggggccgccccaaaaattaaagggccggaggggggcccccaaaagggggggcccccccttaaacgaaaaaaaaaatttgggggcccctagggttaaaacccccaaaaaccttttccctccctaagtggcccggggggccccccccaaattaaaaaattcggaagggttgttgggaaaaatcgacccggggggtctttgggaataaagggggtttccccccgcccccccctttaaaaaggggccaaaacccgagggggggggggcccaccccgggggttttcccggggaaaaaaaaaaatggccttcctttgggggggggcccaatttttgccttgttaaaacccccggggccaaaaggtttaggggaaaaatttttttcataaaagcttcccccaaaaaaccttcccccccaaaaccatttgtttggggggaacccccccccttgaaaaaaaaatcccttagaaacccggggaaaggaccccc

SEQ ID NO: 130504 - DNA, 2284 bp, Zea mays
  Clone ID: MRT4577_50491C.1
tacctcgaggccggccgggtcttttcattcccatttgttttggcggcggcggctgccgcgccaccagctttcctgtgcctctttcgcctcgcgggctatttctcctcctcctacctctcggcctcgtcctcatacgagcgccattgtgaattttcgggcagcagctagctagcctgtcgtctcctccctcttgttcttggctactgatcctgttctgtcggtgatatccaagaaaacaaagacttggtctttttcctctgcgtgagcgagctgagtgagggagctcacttcttcgaacagccggagcctggagcagcagttgagctcccccggagaaagctgagccacggcgcctttgttgctctccgcacatggacaggcagctcgctcttcccagcaggaacagctcaaggttctaggtgagggtgaggcagggctcggtcggcgatggagagggagtcgaggtcaggggtgctctcggagacggcgtcctgcgccggcacgccgaggtcggttcagtcgacttgcagtctccagcgccggtactcttcacggagcattctgaagccacatgatggcgcactggacatgtcgccacggttctcctactgcaagcctgccgccgacagagagaagatgttcaacagaagacactccctgaatttaccagagcaattgccaggtcattactccagaaaagcaacagaacggacccaaaaggctagctcaaagtctgttgcagatttggttggggagatcgcagcgctcgagcaggaagtcatacgcaaggaactgcacctgctctctctctacagaagagcgtttgatcaatacgtatctgaatcctgcagcttcacaagcgagcagcaggtggaccaagaatttctgaaaagcatcgacgagggcgcgctacgtctgagggacataaagcgctccgcggcgttcgacctgccgacgacgaccatctcaggctctgagcaggaccaggaagcaccaccagagcccaaggcaggcgcgaggcattccagcctcgtcaacttcctgagcgcctccatctcggagtacgtgcccaagatctcgtgcaagctgtcggaggacatcctgggctgcatcgccgccgtctactgcaagctctcgggcgcggagggggagtgctgcgtggcttcgccgagcccttcggtctcgtcttggagcaccttctctccgaggcgccggaacgatagctggagccctcggtctcggtgcaacaacttcgatagctggagcccgcggccgtgtggagtcgagaaggagagcggtgagcagagcccaggcgtgatgatggtcgtcgttccgaggatacgcgtcgacgctgacacgtttgagtacgcgtcgaagatgctcgagactaccaggtctctgatacagcgcctggagaaagtcgacccggtgaagatgacgcacgaggagcagctctgcttttggatcaatatccacaatgctctggtcatgcatgcttttctggcctatggtctgcacgacaagcgcatgaagagcacggacatgattctgaaggctgcgtataatgttggcggccaatcagtaaatgcgcagactattcagaactcgattcttggatgccagtcccatcgtccatcactgtgggtccgcgcgctattcacgccggcgaaaaggtccgcggcgaggcacccgtatgcgctccagcacccagaacccgttgcgcatttcgcgctgtcgaccggagcgttttcggacccacctgtgcggctgtacacggcgaagaagatacagcagcagctggaggcggcgcggacggagttcatccggggcagcgtggcggtgcggaagcaggcgctgctgctgcccaaggtgctgcactactacgcccgggacgccgcgctggagctgcggcacctggtggagctggtgtgcgagagcttgtcggacgcgcagcagaagcagctgcagctgctgcagcggagggccgtcgacaagtgcgtcgagtggatgccgtacaagtcgtccttcagatacgttgtacatagggatctggctgactaggcgggcgccagccacgtacggtttgctctgtgtgtttgcttgattgcttgcttggttggttggttggttggtttacaaagtgtacaagtagtgggggtgggggtgtacatgcatgcatgtaaatacaggtgtgcatgctcactacttttgagctagtgagctgtggcttgaaacactgtacattcatccaaaaaaaaaaaaaaaaaagcggcctctttgtggg

SEQ ID NO: 130505 - DNA, 322 bp, Zea mays
  unsure (1)..(322): unsure at all n locations
  Clone ID: MRT4577_50492C.1
ctcactcttcaaatttctcaaggtctgctttttcggactggatttacaacttttttactgataaaattacaggtgatccaattttaaccnaatcccttcatcattaaatatcatctttaactacctctcatcctatcttctaataatatcactcatataatctcacattgacgatatatataatatcaacaccatgcatcaaataatatcaactataatgtatactactttaccatgtttatatatatataggttccctacatttcttttatacatatatataaactactccatataatatttctttacaacattatataca

SEQ ID NO: 130506 - DNA, 469 bp, Zea mays
  unsure (1)..(469): unsure at all n locations
  Clone ID: MRT4577_50493C.1
gggaccgcaaacaaacccccccgcccggaccccncgcagaaccgagcgccaaccaccacgaggggcaaggccaacgccaccaaaaaggaagaggccaggctccgggccggcggcggcggcgccggaaagcgcaagaacgccgacgcgagcggcaagcccaagcgcccgaccaccgcccccngcggcncacgcacgaaacaggcaggagcaccaggcgcgggggccaggcaacaagagcgacgcggccgngagcaaggcagcaggggaaaagaggcgcacaagggcagagcaagagaagcagacccaagcggaccaagcagggcagaagaagcaggacaaagagaagaccaaggcaaacacngagaaggagagcacaagcncaaagaaggcnaagaccgacgacgacgacggcccgaagcccgaggncgacgaagagganggcggnagngacgaagacaacgacgacgac

SEQ ID NO: 130507 - DNA, 155 bp, Zea mays
  Clone ID: MRT4577_50494C.1
agcggcacacgcggaggacagcccaagcctacacatggtaatcgtcagcagatcagcagcgaagtactatggtctgatctccgccatggtgtcaacaaaggagcagtacacacagtgggatgatgtgatggtgtccacagatctccgcagcctcc

SEQ ID NO: 130508 - DNA, 236 bp, Zea mays
  Clone ID: MRT4577_50495C.1
ggaatgttctggcattgggatgaacatgttctaaaacgtactgcgttagaaacgcgagcatacggagtgctatcagcgcatcctgagaggaaatgatgtcatggtgttctctcagcgtgatcaaggagagcaccctgtgatatgtggcgacagagctgaatgtagtaagtctagattaattccctgtgggcgtggagttctattggaatcatattgtcgactttatgacgagtggg

SEQ ID NO: 130509 - DNA, 335 bp, Zea mays
  Clone ID: MRT4577_50496C.1
cagatgctctgtattttcctcagggttattggcaaaactttacgatcggcattgttcctgggtttcatgaattgcagcatcttacgtcttctctggcttcataatcgtgagagatgatgcctgtgtggtggcggtgggtgtactgggcggatccggcggcatggacggttcatggcagagcgccccttgtttgtggagttcctcgaggcatatttataataatattatatatttatattatggtgatattttgtatttgtgaatgatctagctagctatctgtaaatgatctagttgtgaatgatattataattgtgatgcttttgtgaatatat

SEQ ID NO: 130510 - DNA, 239 bp, Zea mays
  Clone ID: MRT4577_50497C.1
ctctctttttttttttttttttttttttttatcgagcgtttttttatttgctacccccaaatcttaaaacttacaccgaactgaaactcgttgggtttcccatccaatatctttcggttttggggttacaactaccattttaaagggaccactgctttaggattgccttatttttttctacggttttatattcaacatcccattcacaataaaaagactttcctgggccattaactttt

SEQ ID NO: 130511 - DNA, 2117 bp, Zea mays
  Clone ID: MRT4577_50498C.1
cattgggggcctcgaggccggccgggacgcgcaggacaggccgtacggacggtgtcggcggacggccgcgatgggcgggggcgacgacgcggcggcgggcgttggagacgggttcgcgtgggatgccgactcccagctctactaccacgccagtactgctttttaccatgaccctgttgctggatggtactacagcagcagagatagccaatattacgtctacaaaaatggaaattacatgccattgacaacagatctggaaaatgaacccacagccaatcatccatatgatgaggccaaccaagatgtcttggaacactcttcaggcttggaaacaactatacttgacaatgagaatgaaataccaggacctccatcagaatggatggaggaaacactgataaacttgtatttgtcaggctactcaaacaatgaagtcaatgctgaaagttcactagtaatcgcacattcaaatgaggaagacagaattgaaacaaccgggaacaaactagatagcttgacctcggacagtgcttcagcctctctgcatgatgctacatcacagcaaactgaagttgaaacagaaacaaagaattccgcttatgtgtatgaatctttgggggaagaggaagagaaatggcacgctcagtatggtcaggtcgagaggtcaaatgatgatcaacatttacctccaacaattgatatatgggattgggatgtggtccaagaccatgttaacaaaggtcagcccgtggttaggcttgtgggatgtttatctaggggttcaaataagcttcatccttctcttcctactcgtggtggccttgtaaggactgctcctgtgcgtgaagttcatcttgacctcgtgcaagtttcaacagggaagctgtacaggctaaggaaccctagcagaaagtacttagccactttatccgcatatgactcctccaacccaacaaaggattgggggtttcctgatattaatttgaataagcaatccactgcaaagtgccaatctgaagttcttgctgataaatcttgtggcggaggaagtgtctcagctgctaataccatggagccgaacacaaaagtttacagggacagagctgctgagagaaggatcctacatcgtggcttaggggttgggcctggacagaagcagagtaacaccaacaatttcgatgaatacgaggaatcaatcgaggacatggattcaatgggagttgcgtcagctgatttgaatttccaatccagcggtttgctttcggctaagagaataatggagaacatgggctggaagcagggagaagcccttggaaaaagcagaaagggcattgtagaacctatacagccttccatcaacaaacatggtgccggtttgggatggaggcaaacccgctaagatgttcctttgaagattccagtctttgtatttgtatcctctgaaggtaagttccaattgtatcgaataaaccggagggaactgaattgaacttgattctaaattttgctgcttctctcacacagttttaaaaagttgcaacttgtacttaaatgtggtctatgtgtattagcctgtcagatttggtgttcttaattcaagtgcaactacaacggaagaattgaggcaactgacttgtgcttgctgcttaaatctggcgtttttttggacagcagtatattcacaggctttcccttctcatttttcttctcatgggcacgagagtaatcagctggggctttgttcttgttcttgtcaccaccttgtctgctcctcttcttatagatgggcttttttatcttgtatgagctagcatttacttcgatgctttgccatttggatgagcattgaagtttgtcttcacaacctcatcttgtgcctcagcgacttgcatgacatcgatcagttcgttgtatggattgtaagcatcttgtaagtagttgcgagtactttagatagcgctcgggtggaaagtagataagtctttttcctatcttttcctgatctgtgataactttatcacaaagtgacaagttggtacaaatttgatgtaaggttgaattatattcatccacggttttgtaaccaacaaacataaggcatgcctaatcttgtt

SEQ ID NO: 130512 - DNA, 153 bp, Zea mays
  Clone ID: MRT4577_50499C.1
gaccacccccccgcccaaattttttgaaaagaatagaatatttttaggtgggaggatttaaaacaaaggagaagatctattttttatttggagtacaataattgaggaattttttagggatatattaacgtgtgttgatagaataatgtatta

SEQ ID NO: 130513 - DNA, 309 bp, Zea mays
  Clone ID: MRT4577_504C.1
gggccccacaaaaaaatttttaacctttttttgaccaatccaaccaatttgacagaccgggtttttactggcgaaatggggcaagttttgggggtaaaatttttctgcccagctggggtgggtttttttaaccatgccatgcctaacgatttttctttaccccgggatttgttttaaaaacagggttttctgtttgtttgttaggccaagatcactgaatgattcctcaccctcgctgttggtaaacgtgccccttgggtttgtcctaaccaatttttaggtccttggcttgcaagtcctcccaatgtt

SEQ ID NO: 130514 - DNA, 1334 bp, Zea mays
  Clone ID: MRT4577_50500C.1
tgggaacaatgaggattcatctgttgcactcacacgtggtgattttgctggagagctacaagttcagcaggttgaacaagatgaactacttccaccaccgaagttagagtcatcaaagtcacctgatggagggaagtccgtcagttcgttcccaaaccaagggtgtttcccacagttctttgagggtctggattggatgatcccgccttcctgctaccaagactccaatggcatccattcagttaccgcatcggatagcatctttaatccgtctgaaggtatacctccttccacaatgaacgcggacggcatggacgcgttccaaacatcttgcctttccgagtgctttcctaattccatccaagaattcatcagcagtccagatataaacacactgacatttatgtcgcctgagatgcaacatctggatgcccaacacgacggcagcaacttgcagagcacgtccaactcctatgtgcagatgagcttctcggaggagagccagagtgcatccttaagtggcctacacatggaagctgtccatatcaacagctcctgccttcaaccactggcgacagggagctttgatgcagggacgttctcaaaactatcaaacataaaagaatgccaggccttgcctctgcaggagattcacagcagctccatgggaacaccttcgtgcagtatggatgcggcggcggtcgagtactgtatggatcgaagtgtgaagccactgaaaccaccggtccggacatatacaaaggttcaaaagttaggatcagttggaagatctatcgacgttacacgatttagagactaccatgagttgaggtcagccattgcctgcatgtttggactacaggggaaactggaacaccctggcagttcagactggaagcttgtttatgtcgactacgagaacgatgttctcctcgttggagacgacccatgggaggagttcatcaactgtgtgagatgcattcggatcctggcgccttcggaagtacagcagatgagcgagaatggtgtgcatgtcttgaacgactgcatgcaaatggcttagaaaatcagggttatattgccctgcgcagcctgcacagtgtaacgtcgcaaatacgagaaatgagtgttcttcgtagccacgcagcggctcttcttgtaaataaaagatacatcacgtgcatcccattctctgaatgctttgattcttttctagcacgagaagagaccattattatatggcggtgcattacaggtttattttctatttttttcatgcaatgacttgaattatgagcttacgaggaagagggtgataatgtatcaaattatcc

SEQ ID NO: 130515 - DNA, 437 bp, Zea mays
  Clone ID: MRT4577_50501C.1
attcggctcgagcgcgtgcacagatagaggtctttctcaccaggctacacccgccgaaaccttcgcttaaagacgcagatctttgagaagaccatgattgtcaggattatgaacctcggggagaacccgcctgataacggtggcatcctccaggccaccttccagatcttgtgggggttccaccaggggcactgcctgatcatccttgatggcaaccaggtggtggaccgccgcacccttgctgactagaacatgcactgggacagggccatgcactttatgacccatgtcaagggcgggatgggcatctttgcgaaagccctgaccaacaaggctattgggctcgacgtggagcactctgtcagcatttacaacccgaaggagatgatgcaggtcaacgaggagttccctacgagcaggagctgtttacctttagt

SEQ ID NO: 130516 - DNA, 391 bp, Zea mays
  Clone ID: MRT4577_50502C.1
tcctcaaaagccgacccacccgactgttaattcaaatagagggagctcgtccatggcgtgctgttttcaatagtcgatggggggagtacccaaccgttgataatctatctagccagcctttccatgccttgccagaggaccctcgcctccgctgcggctgacggtcgtctgctgctcgtggaggcagcggtcctgctgtgcctgtccgttcctccggggcgcgcggcacccccggtcgcggaggttccggatttcctttttttcactagcaaacttcctttcaaacacttctcctgttacgtaacaatttgttctacatgatcaaccaaagaaacacctgttccactaccctgccgcctctttataagaaccccaaactttgatccctgtg

SEQ ID NO: 130517 - DNA, 2012 bp, Zea mays
  unsure (1)..(2012): unsure at all n locations
  Clone ID: MRT4577_50503C.1
accaacccccggcgccgagcagccatggacgcctccctcctcctctccgtaggcctcgcgctggtgctgatcccgctctccctctcgctcctcaaccggctgcgccgggaaaacatgggggccctcgaggcgggccggaccaacccccggcgccgagcagccatggacgcctccctcctcctctccgtcggcctcgcgctggtgctgatcccgctctccctctcgctcctcaaccggctgcgcctcggccgcctgccgcccggcccgcggccgtggcccgtcctgggcaacctgcgccagatcaagcccgtccggtgccggtgcttccaggagtgggcggagcggtacgggcccatcatctccgtctggttcgggtccggcctcaccgtcgtcgtctccacctcggagctggccaaggaggtgctcaaggagaacgaccagcagctcgcggaccggccgcggaaccgctccacccagcggttcagccgcaacgggcaggacctcatctgggccgactacggcccgcactacatcaaggtgcgcaagctctgcaacctcgagctcttcacgcccaggaggctcgaggcgctgcgccccatcagggaggacgaggtcaccgccatggtcgagtccgtgcaccgcgccgccactgccccgggtaatgaaggaaagccaatggtagtgaggaagcacctttctatggtggccttcaacaacataacaaggctggcatttgggaagcggttcatgaatgcaaacggtgacgttgacgaacaagggcgtgagtttaagactattgtgaacaacgggatcaagattggtgcatctctctccgttgctgagttcatttggtatttgagatggttgtgtccacttaatgaggagctttacaaaactcacaatgagagaagggaccgcctgacaatgaagatcattgatgagcacgctaagtctctcaaggagagtggtgccaagcagcactttgtggatgcacttttcactctcaaacaacagtatgaccttagtgaagacacagttattggacttctatgggatatgatcactgctggaatggacacaacagtcatctcagtcgagtgggcgatggcagagctggtcaggaaccccagggttcagaagaagctgcaagaggagctcgaccgtgtggttggccgtgaccgcgtcatgctggagaccgacttccagaacctcccctacctacaggccgttgtcaaggaatcactccggctgcacccgccgacgccgctcatgctcccgcacaaggccagctcgaacgtcaagatcggaggttacaacatccccaagggcgccaacgtgatggtgaacgtgtgggcggtggcgcgtgatcccaaggtctggagcaacccgctggagtacagaccggagcgcttcctggaggagaacatcgacatcaagggcagcgacttcagggtgctgccgttcggtgctggccggcgtgtgtgcccgggcgcgcagctcggcatcaacctcgtggcctccatgatcggacaccttctgcatcacttcgagtggtccctgccggagggcactagaccagaggacgtcaacatgatggagtcccccgggctcgtcacgttcatgggcacaccgctgcaagctgtcgtcaagccgcgcctggagaaggaggagctgtacaatagggtcccagttgagatgtgaggtgcctgctgccgctttgaattcactgctcgatttgtgtttttctcgctgctgctgctgcttcttctttcagctttaagctgttgaactgagttgttcgtgttgtaaaatatgaggtgctagatgcatttcgaatctcataaattgttacatgtagtttgtcatagacttgcacaatgtgtctttatacaatagtataacacgattcaacaattccccttcgaaaaaaaaaaaaaaaaaaagcggccaaaaaaaaaatgtgggtgtggtaggagtaaaaataaagaaagaaaaaactnggggggggggcc

SEQ ID NO: 130518 - DNA, 339 bp, Zea mays
  Clone ID: MRT4577_50504C.1
tgagtcttaccggtgaatcgaatggctgggccggcgcgttttctctttcgcccccgtcacgccactgggcagccgccgccgccgcagtaacagcagggccctctacctactcaacaagcagagcctgcaccgacttacattaccaagaacatgccggcagacacaggcagagcaaatggcactgcaggcgctgccacccgaaaacggccggcggatgggggcgactggcttcgcccggtactgttgctacgacacacaaaaacggactgtcaactcctataccggacaagggaaaaagactatataaatgcccaatcctttccccgggaaatgttccat

SEQ ID NO: 130519 - DNA, 317 bp, Zea mays
  Clone ID: MRT4577_50505C.1
aagacagtccttgctcagatcgcctcggtcaaccgaacacatcacggccaccggaaagaaaatgtcgcgcgctacatctgcggtcctcttctacatcctcgccgtcgactgatctcagcgcggcctacgtaccggaagagtcactatggcaggtagtcgtgcaaaggcaccggtcgagtgcaataatgcacgaagtcctgcagactcttggcacagcacacgactctgctgcaattaaaactgcacgcgctaacggacatcatgccggatctagaccagccgttgcagctgccccatcgtcgtcttcgtctaggaag

SEQ ID NO: 130520 - DNA, 243 bp, Zea mays
  Clone ID: MRT4577_50506C.1
cgcgtcgagctacgatagcgtgaattatagcttcagacttcgaacttgcaacgtctgaagcatatgggcttccacgggcaataccatacaggatcctacatgcattggcagcggggatctaacatttaccagccctgtctctggagcagtcatcagtcctatcactgcaggtacatcaggtgcatctactggcacaaaatatcatggctcaactactactacaactcgtgcttgcaaactttg

SEQ ID NO: 130521 - DNA, 341 bp, Zea mays
  Clone ID: MRT4577_50507C.1
attattatattataatttataaaaaatttataatatggaactatagatggtggatgtttaaaataaggttgttaagttttttataatatgaaaggaaaaaagaaaaaaaaaaatggtgttgtaaaaaggcaacagaggggggctaaattctggggggagaacggtagaaattggagctgttggaagaaagaataaaagaatcccaccccctgggggtaagagggaaacaaaaggggggggttaaagaaaaaaaaatggtggaaaaaacttgcaaatggaaggggaaaaaaaaaagaatacagtaaaaaggcataaggggtcaaaacaaggtggttaaatgg

SEQ ID NO: 130522 - DNA, 278 bp, Zea mays
  Clone ID: MRT4577_50508C.1
atcacactctactcttggagcttgaagcactagcttaggcataatatgaggtctttgttttgacggtggcaattcatattttctttttgggatatttcaataatatatttgatctgtgactagctagtgagtttacttttgaaattaaccggctaatgattcttgggttggttgatgagtataaattggtcaacacaaaagttgcattcaacatcggcaatttattttcatgacaagcattccgactttgcctattatacaagcaagtaacaataaaa

SEQ ID NO: 130523 - DNA, 220 bp, Zea mays
  Clone ID: MRT4577_50509C.1
aaagaagcataatacctttttcatcacagtaaaatagtaaaaaaaatatgaaatttacgtcctaagccctttttattgtttttcaactaccctaccattactcgatatggcacaggcgacggcttctgtgacttctacagggaaccaccaccgctctttttaattggtatcggtgacggttattcttacgcgttcacctttatgatttccaatggtgcaa

SEQ ID NO: 130524 - DNA, 245 bp, Zea mays
  Clone ID: MRT4577_5050C.1
atcgctcacatagctcctataccttgcattcttcacctatacctctcaccagcggctgcttgcatgtgtgaaaacccaatcgatcagacgtaccggatccaacaggcaatcgcatccaggatcctaccatcattaatcttgctcctccaacatgcgtcaaccctattacagcagctaactttgggccatttggagggacaaaaccatgcgggtccacaacgtccaaaacctgggcctgccaaact

SEQ ID NO: 130525 - DNA, 329 bp, Zea mays
  Clone ID: MRT4577_50510C.1
cgaccggaaggagactatcctccatcgctattccaccgccgtcaccggcctgacaatgaccagcagtatgagcgtcctccgcctgctgctcggctgcatttaggctccagtcagagtcaggcaagccgctggcgggccccaggcggcgccagttgatgagcaggtgcggcacctacaacgcaaatatgatgacaccgtaatcaaaccggaagctgacggggcgctaggagcgctacatcatgaactcctcctagaattaagggagcaagatggcctcctcctgccctgcgcatgcctggtgcctctgcgccccaaaggccgaatctggg

SEQ ID NO: 130526 - DNA, 473 bp, Zea mays
  Clone ID: MRT4577_50511C.1
gggggcgactcgcacatccagcggagaagctgcggcgtgggctgaccctgtccgtcctctgcggccggggagagcaagaagagatcccgcgccgacctcttctgccacctccacctccacctccacccatggcgggctgcaccttcagcggcgacgagacggcgcccttcttcggctcctcggcgccggcgcgcgctcgtgttctgctgcatgggcgccgtctacgggacgggcaagagcggggctggcgacggctccatgggcgataagcgccccgtagctcggcgtgaagtccatagaccgcggcgacgcggcgggagcactaggaatctaccgacatgtcatggccggaacaatctacaacgaggacaaccccaaggccaagccctgcttcctcttcgacgggtacagacacctctcctccggactcgcctgagcactcgatggcctcgctgacggaacgggcatcgtga

SEQ ID NO: 130527 - DNA, 155 bp, Zea mays
  Clone ID: MRT4577_50512C.1
gcagattttcgagataacccttaagctgaagacaatcatcctcggggttgaagactcgtatacgattgtaatgtgaaggcgcagatccatgataaggaatgaattcctcctgatcagcggagactgatctttgctggcaagcagctggaagatgg

SEQ ID NO: 130528 - DNA, 195 bp, Zea mays
  unsure (1)..(195): unsure at all n locations
  Clone ID: MRT4577_50513C.1
ccacgcgtgcgtccacgggtccggcatctcccacagggaccctatacctttttgaagctcgctgaatacttcagngggacggggggattgttcatttacaaccagatcaaccacgttccccccgccgtgaacagtcccctccatgtcatccccaatgtcatcaccgtcgagttccgcacctatatctagatcgtt

SEQ ID NO: 130529 - DNA, 186 bp, Zea mays
  unsure (1)..(186): unsure at all n locations
  Clone ID: MRT4577_50514C.1
ngcctcttcagtcattctgtttttctggtcctgcaagttcaccaacgtatcctcacatgatataatggcttgtgcagccatcaatgctcgagcttcattgtcttcaatggctacaccagccattatatcatgtgaggatacgttggtgaacttgcaggaccagaaaaacagaatgactgaagaggc

SEQ ID NO: 130530 - DNA, 363 bp, Zea mays
  Clone ID: MRT4577_50515C.1
gcgttttcctttattgggtagactggaaagacggatcaagcgctggacagattgatcgactccgacgccgtccggggcaagatgaaagggaggggggctgtgattacaaaggattaacagggggggcgggatgatcggcccttctagcatgttctaacctagcggggttgcctcaccgggcatggattgattacaacgaattcaaaaataaggggccccaaacaaaaccgggagggacagggaaatgaaacaccatgcccgtattgcacgtttccgctgggctgcagagccctgttgcacactgcacagatggaacggtcacttttcagccgaagagctcccacttcctcggggggggccgcc

SEQ ID NO: 130531 - DNA, 722 bp, Zea mays
  unsure (1)..(722): unsure at all n locations
  Clone ID: MRT4577_50516C.1
aattcattcggcacctggctccggccttcccttcctttcctccgctcgctcgcttccgcttcctcctcctcctgctcgccgcggctcgcgagggaagttctaggcttccagcggagtcgtcctcgcgggagtgcggagccccggcacggcccggcggcgccacctcggcgccggaggagggacgtttgcgctgctccctagggccgaggcccggatcgccggattcagccacgggctcgctcggatcaaggaggcgcggaggcgggctcggttggtgggttttccgccggccgtaattcttgtggcggcttccttgctttcggagacgcggggctggggagctcccgtgcttgcttctggctaatccgcgcttccttgcgtcgccctgcccggtgctgctactcgctggctcgcttggtttcgctggattacaggacgaaaggtgacgaggaggtgcgctgacgcttttgctcggctccggttttggctgccggcggagtcgcaatctcggctagatttgccgagtgccggcggtgtcgcaatcccgtctagatttgccgcgccgcggcggatgcttcgacgcgcgccggatctccaccgttcctgcggcgcggagtgaaggtacggttccagaccggattttgngaagatgggtgccgtcggggcagcacaacccgatgggcccgggcccagcagtgggcgcgtcgctgctccggactagc

SEQ ID NO: 130532 - DNA, 979 bp, Zea mays
  unsure (1)..(979): unsure at all n locations
  Clone ID: MRT4577_50517C.1
ggcggccgtggcgtctgagccctgagtcagttacacgccctcgtgcgcgcgctcctcccgcgacgcatcggcggaaagcgcgcacggccacggncaccggaacctcaaaagcgagggtgtggtgatgccataactaggaccgcgcgcacatgctggcatgcatccatgtccaggatatgcaacgacgcaaggatcatcccacatccacatccacatccatggccggcgttgcctttttggtgcgtgtatattaacccgcgggccgtcgttcttgcggctatccgcacactgaatcacgaatctctcgagccgcagtccagtccatccggctgcaggctctctgagtctgagtacgttggcgttccaggcgataactagcttagcttggcttggcacagtcaatcgtctccgatggcggcggacatgcagattgtcctggccgcggggaggaagatcgaggcgcagtatgtggagatgaaggtgccgctctactcctacggctgcgagaagaagatcaagaaggcactgtcacatctcaaaggtatacattcggttcaggcagactaccacgagcagaaggtgaccgtgtgggggatctgcgaccgcgacgacgtgctcgctgccgtccggaagaagcgccgagccgcgcggttctgggatgatgatggcggcgaactgggtccacgcgagcgtgcgccgacgcccggccgagaagctcccaagcagtacctggcagccttcgccgcgtacaggtggaggaagtcgtggaagaagcttttcccgctgatccgcctctgaagctcaccgtgtgtgcttaagcttattggcttctagcttctccacaagtgagcagtgtgtgtgcctgcgtcttgacgacgtctcaggaaccggaaaaaggggttggaacatggaacttaaggtgtgggcagtggggaaaaaaaaaaaaaaaaatttttttttccccccccccccccccccc

SEQ ID NO: 130533 - DNA, 222 bp, Zea mays
  Clone ID: MRT4577_50518C.1
ttgcgagtagcagcacgatacgtagcagctacggacattacaggctacgaaggctagcagcttgatgacccctacagaccatgtaccttagaccacgcaaactaggtgctcaagacaccgaggtccgcaagagcggaacctaaccctggcacaagcctgatgggaagacccaggtgacagtacgagtaccgcaatgagggtggtgccatggtccccatccgt

SEQ ID NO: 130534 - DNA, 487 bp, Zea mays
  unsure (1)..(487): unsure at all n locations
  Clone ID: MRT4577_50519C.1
tccgggccaaagggccctttttttttttttttttttttttttttttttttttttttttttttttttttttttttttttttttttttttttttttttttttttagagctccttgttcacagttttgaatatattacaacattcatttctgttttatgggggagcacaagcacacctgcgaccattcaacaaattccaactaatacttctacacatcaccaaccttcaaaccgggtccagaatattcacggatacaatccagctcataacatggttataaataaattgatgcactaatttttacagcactctataacatgcatgtatatgtattactctccatgtcagttgcagcaaatcaggcgaaggcaaccaaataagatacaggtggagtactgcctttcaacccccaatccgttgggggttctcttctcctttttttcctttngactgnngagnnatacatatacatgcctgttatagagtgct

SEQ ID NO: 130535 - DNA, 429 bp, Zea mays
  unsure (1)..(429): unsure at all n locations
  Clone ID: MRT4577_5051C.1
ggtgttgggtggttttttttttttttttttttttttttttttttttttttttttttttttttttttttttttttttttttttttttttttttttgggaaaaacgggggggcaggccaaaaaagggcttttttttaatccccccctaaaggggggggggggggagcttttaaccgggaaaaaacccaagggggaaaactttggggggtttggaaaaaaagaaaccctttaggaaaaagaggggaacgttaaaaggttggtcccaaaaaaaaaaatcagggggggggccttctttaaaaaaaaaaagggaaaaaagggcttgagggaattgagggtaattttaaatttcgggggggtaaggaaaacacagaantggaggggtttgtttaaacccaaatgaattgggagggcgttaatttcacgggggaaaa

SEQ ID NO: 130536 - DNA, 107 bp, Zea mays
  Clone ID: MRT4577_50520C.1
gtgcattccacgtcataactcttctatcgtgccacctcaatcaaattcacaggtcttctatagtgccacctaaatacagataaatgcccgtcgttgcacaacttaat

SEQ ID NO: 130537 - DNA, 647 bp, Zea mays
  Clone ID: MRT4577_50521C.1
tcgaggctctgccggggaagccgtgtatgggcgagggtcagccataatccccggctaggaagttcatcacctgccggggggaagctactgtcctcaccagcccaaggctctggagcgggacggccgagaagatgagtgacggataaacgacactcaatatggcgacgccctttcagcatttctcgccagagtggcagagagcaggtaggaagataccatatacagaaaaaggactgtacactcaagaagctctcttcatatatatggggaacatccgagttcgactctatggcatcaattgaacaactggagcagatccttactactgtatgccatgtcctactggcataaaaccgaggcactgcgatggaatagggtgttactccaactggacctccggaatgggaatgcatcttattgtcggatcaaacatcattgaagatggccacagtgggaaagaggatcgaagctctggtgaatgactgcacaagaagttgaattggtatgcttgatcaatattgaagaagctgagcttatgaaccgactgtgctgtatgggagcgggagccaactagggacaaggaatgctatgataatgatactgcaactaatctttgctggcatgatagtgatacgtctgcaggaact

SEQ ID NO: 130538 - DNA, 2155 bp, Zea mays
  Clone ID: MRT4577_50522C.1
gcaccaggagagagagagagagagaatagtctcgagtttttttttttttggaacagaaatagaaaggtgtagtatagagctccttgttcacagttttgaatatattacaacattcatttctgttttatgagggagcacaagcacacctgcgaccattcaacaaattccaactaatacttctacacatcaccaaccttcaaaccgggtccagaatattcacggatacaatccagctcataacatggttataaataaattgatgcactaatttttacagcactctataacatgcatgtatatgtattactctccagtcaaaaggaaaaaaaggagaagagaacccccaacggattgggggttgaaaggcagtactccacctgtatcttatttggttgccttcgcctgatttgctgcaactgacatggagcgaagccgtccagcgatctctgtgaacgctgggcgctgtgccggatctggagcccagcactgctccatgagccttctccactccggatcacatgaagctggcacatgtggcctcagtgtgttgtttacgatgccccctataattgcgccatagtgcatattggcatatggttcttcgccagtgaggatttcccacataacaataccaaaagaaaatacatcaaccttctctgacaccttattgctgcttccattgagtaattctggagccatccatgggagtgtccctctcacaccccctgaaaccagggtatttctttttattttggacaaaccaaagtcaccaactttgcatatgggacgtgattgatctttaagatttacaagcaagttatcacacttcaaatcaaagtgcacgatatttttcgagtgcaaatattccaggccaaatgcagcatccattgctatgataagccgcttacgacgatcgagatatttgtccttgcgctgcaaaacatgtcgaagagaaccattaaccatgaactcagtcacagttgccaatgtaccacctggcccatctttcacaacaccataaaatgccacaacatttggatgatgaagctttgaaagaatttcagcttctcgccagaattcgtgtgctagtctttctagctctgaagaccgtcctgtgaagcaacttttctttattctcttaatggctacatcactgcccctccattttccatggtatacagttccaaatgtgcctgaaccaagttctctaagctcttcaaggtcttcattctttataatctgcaagtattcaaaatcattgtctttaaaggaagcatccatgactggcccaacagccctaccctcttcagtcttctgttcctcaaaatccagatgagatggcatcatttcatgcatatttgtaaaaggattgtcaacttggaacccttcaacattcttcgttgttgttggattgtcaatctgcgatgagacaaaacctggaattgaaatgctaggatcgacattggtgcgggaaactattgaaggaacttccacagtagtatcactctgaagatccaaattcttcacattagttgtatcatgctctaagtgatctaagggataaactccctcctcgatctttgccagatcttgggcctcatccttttttggaaactcattttgtgcaagatttctgaaaaatgaccaccgctggggttcatagttaggcatattcaaactatggataggatcaataaaaggactggacgactgtgctgaagaattagcatttgcaaagaaatcagaaagaatgtcaggggaggtcctctctgtactactagcaatgtctctaatctgtgtgctcgggataatagtttccttgtgggaaacatccaaagagctggcggaacatggtacgacaggatcgtgttcacaatcagttggcagtgttggcttaggagcatcccaactaatatgatgtggcacagcagcatgagaatccagctgattagttgtttctacatcttgaaaattttcctcattgagtttgcccttagctacaacatgttgagatgcatggctaatttggtacacatatcgaccgcttgagtcatataagggcctcttttcaccaaccagatgttcactaaatgcaccagcgtgctgtacagtgttggtaaaacctttactcagtctgtatgagactatcgtcgac

SEQ ID NO: 130539 - DNA, 762 bp, Zea mays
  Clone ID: MRT4577_50523C.1
ttcaccatcttccttccgcggctagttttttctgaacatatctcgatggctgcgactatccatcctggcatgccatccatatctttgacagccgcggcaaccctacagtagagatagacatgtttggttcaaatgtaaccattgtgaggctggctgttctcactggagcataccctggtgtatatgacgctctggagttgagggatgatggctctgactatttgtacaaggctgtcaccaagggtgtgaaaatgtgaattactgttattggacctgctctgattgcgaaggtaccctacagatcagactgcatgattgataacttcatgaatccaccacgttgatggcaccatctatgagtgcctatggagcaagcacaaccttgccgctaatgccattctgtatgtgacattagctgtctgcatagctgggaatagcatcaacagcattcctttataccaccacattgacaacctatgtgacaacaataatttaatgatgcctgctgctgcattccatgtcatcgacggcaggctcccatgctgagaaacaagcttgcgatgcaggaatttatgatctcttcctactggagctggctccttaaacgaggctatgaatatgaatggtgaacactatcaccacctgaagtaccgtatcataaatgagtatgcgaaagaagccactaatgatgaagccaaatgtgcgcttgctcctaacatccctcacaacgaagaagggcttgagctcttgaagactgcattg

SEQ ID NO: 130540 - DNA, 256 bp, Zea mays
  Clone ID: MRT4577_50524C.1
caaacgcgtgggttgaactctgctacaactgcgacattgggtctaataacacgagggagtattcagcgcgtgctattagacagcaaccatccgatcatctgttgaaatttgaaccgtttcgccatgttataacagctagggtagcacagaaataaaggtaggaactgcttcaatcatatacataagacacatactgaattaaagtgcggtgtgagtaaagatgaatcatgaataaaagaaaattcccgccaatttg

SEQ ID NO: 130541 - DNA, 290 bp, Zea mays
  Clone ID: MRT4577_50525C.1
gtctctcgttcgcccacgcagacgctagttaagggcggacataacagttcaaactggtgtgatagtccatggcggagcacaggtactactaacatatcctggtacaacagaataaaggttcaggggcattctgcttttaccgacactgtgagcgcgccgacaacacggcgggcacgcggacggaagacgcggacagttgtgcgtgtaggcagcataaatacaggatggacgtgtaggaccacatttgcgagctgcaactcacagaggttatcgccattgcctgtgtggct

SEQ ID NO: 130542 - DNA, 392 bp, Zea mays
  Clone ID: MRT4577_50526C.1
cgcccagcgtcgggagggccagccagcgccctcggcgggccgcgcctcgcgcggcgcctccacttcggagccgagcgaaaagacccggcacccaccgccaagatcagagaggcgggggcggggcgcgctccggcggttcccttcaggccccgagaagaaaagcccaggaggccagaggccggggagaagaacccacttttggtgattgacctccgatcgcgccctcccggtgctacctgcgtggagagtgattcaccccgcggttggcgcgcgtcttgttgcctcgggagcacgaatacgggctactattatcgatgtatctgtgtgttgctgtgctggttgacgggtcgaggccgaaaaatgttgcacttgattactactgttagtgttaa

SEQ ID NO: 130543 - DNA, 214 bp, Zea mays
  Clone ID: MRT4577_50527C.1
attcggctcgaggggagcttgcttgctaacggttttaaacaggttgggcagcatgatggacccgggagacgaatggattcccttgaagacaatgttagctgcaaacaaaatcaccccatggaccactgcgcggctccagtggtacgagcgctcagggctaacggggggcagcgtcgagacctacgaacacaggcaacttctgtgattctttgag

SEQ ID NO: 130544 - DNA, 406 bp, Zea mays
  Clone ID: MRT4577_50528C.1
gttctagctcttgcactgtacgcttgcgtggtacgcgtggtgcgcgcgcatgctctgccgtagtgataggtgctgacggtggccacgccaccccgacctcttggcattttcctgcccttggtttgcagctcaccttcgacgtcggcgtcatcgccatcttcggccaccggctggccggccacgtgaaggaggagctgaggaggaactacttcaccatggagaaaggctacaacagcttccccatcccggtcgcctgcaccagctacagccaggccatcaaggcgaggcagcggctggccccggtgctgaccggcatcctggcggaccggaggccccggcgaaccgactactacgacgaccatggcctcctgaacgccctaatgcgctcccttgacaacagcggggc

SEQ ID NO: 130545 - DNA, 341 bp, Zea mays
  Clone ID: MRT4577_50529C.1
aaaaaaaaaaaaaaaacataaaaattataaaataacaaaaaaaaaaaaaaaaaaaaagggcagggaaaaaaaggaagcgaagagaagacaaaatacatggacaaacaaccaacgcaaaacaggggcgtccgagctcgagctcccaggctaaacgcccctaccttgcccccgccatgcaccagcttcggcccgcgccggtccaacgcacgccccgcgagatcgccaggacggcaccgccaaacccccggccggccccaacggctgcggctcccgagccataccgcctgccgcccttgcgctagcagggaatcggcctcgggacctccccggtcccgcccatc

SEQ ID NO: 130546 - DNA, 443 bp, Zea mays
  unsure (1)..(443): unsure at all n locations
  Clone ID: MRT4577_5052C.1
ggcgccacacatggcatcccagctgcgccgcgcgccgtgccccggtntccacggcctccgggngcttacgccgnncgcccaggtcccgcggtgtgcagctgctgtccgtccgtgnaggggtgnnggcaggaagagnngtcgtcgtcgcaggggcattccgcttgcgtactacatttcggctccnngccacctactctggatgagtggggagcggacgatcgatcgctttgatgctttgttcgcgggnngcggttcgggcttgnngcgccgtcggcgaaaccccgcaaggcgacnnggcggggctgatagcttggaggtcgcgcgactttccggcctgcatgaacgggtgaaacccctgccgggttcaacccttcgnnccgacacgctgnngcctgcggcgccgtctggccacattcctcggcgtctggcatctgtgcttcggg

SEQ ID NO: 130547 - DNA, 290 bp, Zea mays
  Clone ID: MRT4577_50530C.1
cacggacgtccgatcaggcatgtacaacgacttcccggacaccggggagcgccagcacctgtccgcgggagcctcggcgctgcccaccttctacttcatcttctggctcgctaactctggcctacccgacgcctgagattacatgctggcgcgcacgcgggccggcgtattccggaaccactactatatgctcgacgcgctcgagctcaaggcgctcaacctcctctccaaggccgaggacaagtcaagcatcgaacacaccggcacggcccacagatgggacgtgctct

SEQ ID NO: 130548 - DNA, 723 bp, Zea mays
  Clone ID: MRT4577_50531C.1
cgccctggtgtggactacgacgagactttcaaccccgtcgtcaagttcgccaccgtttgcgccgtcctctccctcgccctctcccggaactgggcgatccatcagctcgacgtcaagaatgccttccttcatggcactctgacggagactgtctactgtagccagcccaccggcttcgtcgatgccactcacccggatctgttctaccgcctgaaccgctccctctacggcctcaagcaggcgccgcgggcctggtacagccgcttcgccacctacctgtccttcatcggcttcgtcgaggccaagtcggatacgtccctcttcatctaccgacgtggcgatgacatcgtctacctcctcctctacgtcgacgacatccaccagcaagccatcaacattctagagcgggctggtatgtctgactgcaagccctgctccacgcctatcgacacacaggcgaaactctctgaggacgatgggcccccgatcgccgacgcgacggcttaccggagcctgaccggtgcacttcagtatctcaccttctcccgacccgacatcgcttacgccgtccagcaggtgtgcctccacatgcacaccccacggaagccccatctcaccgctctcaagcggatcctgcgctacctccgcggcaccctcgactacagtctgctcctccgatcatccccgacgttggagctcgtggtctacgccgacgctgactga

SEQ ID NO: 130549 - DNA, 295 bp, Zea mays
  Clone ID: MRT4577_50532C.1
aaaaaaccaactaacaccactgcaatactttaaaccctaacatgccacggaacttattctagcaaattcctgaaatttaaacttgaaattcaatcccccctacaatggattccgtgaaaaaatccaatccaagaattcaaaaaaaaaaaaaatcaaaaataatgaaagaacaaatttttgggaactttttcaatcaaaatgtgaaagtttcataaaaactcttttacaaactaccaatatcctgcaccaaattgaaatcacatcgtgttgccaagattctcactaaatcaatttg

SEQ ID NO: 130550 - DNA, 362 bp, Zea mays
  unsure (1)..(362): unsure at all n locations
  Clone ID: MRT4577_50533C.1
cgtgaatgtgtctcatacatattcctctagggctcttgcaaaatccaatggtttatggattaggtggtgacctcccttcggttaaagatccgcgacaaagtttctaagttgagtttgatctttgaagtgcaaaattgttttgatcataccttgangacatcctaaaagcaggtttgggattcatataacgagtttttaatgagacaaacaagttctagggtcaaaggcaatatgaatgacatgttagattcaagtattcaacaggatctctaggagtagatcagtggggtaaactgtgttctgtanggtaatttcaggttcttaactaatatatcaaaacagtattagattgttaccgtcag

SEQ ID NO: 130551 - DNA, 224 bp, Zea mays
  Clone ID: MRT4577_50534C.1
tcccggaccaacccggcctgcacacaaactcacgcgcttacaacaccccagccatttagttgatctagctaagcacactcgaacattgctcgatccacatctacggttgatactacccacaactatatcactcctacagtcctcgatcctactgcacgccatacatctcaacccccaattacgccttcttctacccaccacaccattacccaataaacatccat

SEQ ID NO: 130552 - DNA, 272 bp, Zea mays
  Clone ID: MRT4577_50535C.1
aattactaatacaagggttaaagaaggtagattttgttttcaatatttgggtaatattagaaagattcttcccacagggaagaactagcaagtgtcccaattttttccaaacgttggggaagggaaaattcactgtatcatgaaaccctaagggtttgttgcacttcctgctttttaggcctggataacagtatcaccatccttatttacagaagggtaaaactgactcttaatgagaaaagctttataagttcaagggctgtaaaatatga

SEQ ID NO: 130553 - DNA, 628 bp, Zea mays
  unsure (1)..(628): unsure at all n locations
  Clone ID: MRT4577_50536C.1
attataatgatacttacccnttttttttttttttttttgttgggttttgggccggcaaagggggcaatagatcgcaccgggaaaacccaaaaaaaaactagggaaatagggggacgcccccggacccaccacgtacaaagatgacccaagtagggccggcaacaaaaaacaaaccccgcgccaaaaggccaaggccggggggcaaaccaaaaaacgcccccggcgaccgcccgccaaaaaaaaaaggccccaagccatttccggtttaaccttaagagactaacatggacaaacgcccaccgctggccgccgcgggcgcggccggggaaacaccgccccggaccaaaaagcccggacccgggggccgacccgggaaacccggaccggcccccgaaggcggaccaagtttccctaaagggaggcccaaaaaaactggggggaaacaagggcaaagcgggttcccgggggaaaaaggaaacccccacaaaggcccccaaaataaaaccggaagctaaaagggaaagcccggggggccaaagggggagcaaccacaaaaaatgggtggggcccacggcccccttccaggggaaaccgaaacgcccctccaaaaaaaaaccccacccccggg

SEQ ID NO: 130554 - DNA, 231 bp, Zea mays
  Clone ID: MRT4577_50537C.1
aaaaaaaaaaaaaaaaataaaaaaattattttctaaagacacaaactaaaaaaaaaaacggcgggctgatttcaaacttcctgctattcacaacctttttactgcgccaacccaactactattactctccacctattttcactcttcgcgcaggtagctctctatctttccccagccaaaatgccgatgccactcactctcataatcttacccctcatcactaccttgctc

SEQ ID NO: 130555 - DNA, 290 bp, Zea mays
  unsure (1)..(290): unsure at all n locations
  Clone ID: MRT4577_50538C.1
ctcatgtgcttccatcatttgagttttctacgggtgcacgtccatttattatgacttaaggttctagnggagggccatggagaaagagaattaccgatttggatggaactgagggtgatcttccatggtggtgtgtggactgcattactctcaatcgatatcccaaggagaatacaaagtaaatgctcactacaattccctattttatcctcagagatgatatttttccttgatatatgatatatcttatattgtcttgttttttgatcaactacctcctccccccccaa

SEQ ID NO: 130556 - DNA, 477 bp, Zea mays
  Clone ID: MRT4577_50539C.1
ggaacaaaaaaggcccacggcccattttttttgggggggtgccctgaaaaaaacacacttaatcctttaaataaccagggtcccggtcccaaggccgaaaaatttcccaccgggtgaaacccaaggttttggccgggggaaactttcccccaaaaacccaatttttggttaccaagttcgttttgggttggaaggggggcctaaaccccctggtacgggggccctgggccccaaccttttaacaagggaagggggggttcccaacggggctgccaaagccggtttggggggtccccctttaacccgaaatagggagccccggataaattcagggggcgttgggcccccctggggggccccaagtctttggcaagtttaacaataaacaaccagttcaaggaaagccttccccgggccctgggatagccggtctttaatggggtggaaggagggaaggaaaccaaaattttccccttt

SEQ ID NO: 130557 - DNA, 524 bp, Zea mays
  Clone ID: MRT4577_5053C.1
cgaattgcggaaccacgcgagggggggcgcgagaaagcccccaaaaacggaggggaggcgcaccaaccagcgacacaccaagcgccagcgacagccagacagggcacgcccccaagacacaggagaccccagaaagaagcaacagacaagaacgggcccactggacgacagagacccacggggcgggagcggcacaaaagaacagccggcgccaagcaccacggagaagccagcccacggcacaccaaaaacgaaaccaagagagacggaaaggaggcactgcaacccaaaagccaacgtgaaccagggccaagccccgaaggaaaacaaacagcaaagcaagacggggggggaacggcgccaaacggagaaaaagggaggaaaggggcaagcggtaacacacaaaagaaaggcaaaacaaaccggaggaaccccagacaaataaacaaaagggcagcaaagccgaacaagccaaagaaacgaggcaacgcaaaaagctgaagcacacagacacctcaaaagaa

SEQ ID NO: 130558 - DNA, 345 bp, Zea mays
  Clone ID: MRT4577_50540C.1
gatgcacacaacgttcattattccaactgaattacatttattgtacttatgtttttgacatagatttttttttttgccattcgcttggggacggggggagcccatgccccatgacggggggcacaaacacctggtcccaaacaaaccaaacaaacacggtggttttgggaggcacccaagagggggaattgttcaagtgctccgagggggggtttaaaaaagaaaaacctttttaaagctaccctccccgggaaccgggcacgatttaccagagcaccctggcatccacggggggcattaagacccccatgactgggccccccccccccaatcctttggggatcc

SEQ ID NO: 130559 - DNA, 304 bp, Zea mays
  unsure (1)..(304): unsure at all n locations
  Clone ID: MRT4577_50541C.1
gaacaaaaaagagagagagacacacagacaccggaaccgagcccacagcccacaggcacggacaacgcaccccccggcgacgcgacgacagaaaagaccacccagcacccgacgcgagccccggcgccacaaaaccgngcccccgggccgcccacagcaaggccacacacagaacacacacaaacaccgacgagcccgacaaaaaaacacgcccacaacccaaaacggagaacagcggcagccagccacacagngacccaaacggcccgggaaaggccagcgggaacccgccgaacagcaccga

SEQ ID NO: 130560 - DNA, 840 bp, Zea mays
  Clone ID: MRT4577_50542C.1
agatacaaaatagcaatatcatgacagcctttttatactccaaaaattagatagaatggctctaagtcgaattacagcgtgatttaaaataagaccacaaaacagcaatgcttgcttccacagggaaacgaaaaaacgggtctaaaaatgaattaataaatataaccaactcccaagttgctgggactacactatagtaaccacaaccttgtaattacctcaaaatataaattcagtcctgtcattaaacacctgaggaattccattgcgccatagagcaagcaacagtgacacacggaacaacaaaggtcaggacacctaatctggctaatcaccacaagctcagtgtgacagtgattcaacgtagagataaatgcataaaccaccaagtaattcaatccatgtgaatctcctaactaataataactcaatttgtaactgactgtcattggttggcatcatcggagtccgagtcacttgcattgtatcctggacgtttcatgccaaccttcaaagctgaagacctgaaccttgacaccctatccatccattgttttcccttatactcgttcttgggggttccataacccgagaagaacatctgcgctacaagcacttggttggcgacgtcgcctttgcgcgccttcttggacccgtcctggaaccagcgctggacgcagtcgccgaccacctccgccagcggcttccgctcgcactccagcccgcccacttcattggcgcccaccatcgttcggttcgtctccggcggcaagggcttggggccttcctcccagagtgccgcagccggcagccgacgacgggttggggaaaaaaataaag

SEQ ID NO: 130561 - DNA, 819 bp, Zea mays
  unsure (1)..(819): unsure at all n locations
  Clone ID: MRT4577_50543C.1
aaaaatgaattaataaatataaccaactcncaagtagctgggactgacacttttttagtaaccacaaccttgtaattacctcaaaatataaattcagttctgtcattaaacacctgaggaattccattgcgctatagagcatgcaacagtgacacacggaacaacaaaggtcaggacacctaatctggctaatcaccacaagctcagtgtgacagtgattcaacgtagagataaatgcataaaccaccaagtaattcaatcctgaagtcccgaaaccaaggttaggggaatattagaaataatgaaaaggtgagcaaaagcttataccaaactttcttaccctgtgaatctcctaactaataataactcaatttgtaactgactgtcattggttggcatcatcatttgcatcatcggagtccgagtcacttgcattgtatcctggacgtttcatgccaaccttcaaagctgaagacctgaaccttgacgccctatccatccattgttttcccttatactcgttcttgggggttccataacccgagaagaacatctgcgctacaagcacttggttggcgacgtcgcctttgcgcgcctccttgtacgcgtcctggaaccagcgctggacgcagtcgccgaccacctccgccagcggcttccgctcgcactccagcccgcccacttcattggcgcccaccatcgtttcggttcgtctccggcggcaagggcttggggccttcctcccagagtgccgcagccggcagccgacgacgggttggggaaaaaaagaaaggataagaagcaagcgccggcccggcc

SEQ ID NO: 130562 - DNA, 2295 bp, Zea mays
  Clone ID: MRT4577_50544C.1
atggagttctttgctgccactggtgaggacgacgactccatcgacacttccaacctaccggccaaacaagcatcctgggagttatccccccaagctagccgctccatgggtgtccctggagctcatcttcaaagggctgctgcaaacttcaatagcttcgacctcaactctgaggccccaaactatggaagcttcactcaattagttctttctccatccatccccaatccagatctcgagtttggagcaggtcggcgtggcaaggtagctggtcagcactctgtgtctccaagccatgctgcggcaccgcaaaaatcttgcagagtggacaccacatctgttgctagaaatcccataaccatgggcgcacatggcgggcatcaccgttctgtggcatctcttcgtggtgccaaggcgtccagactgcaccctgaaattggtagcaggcatgggaatcttggtgtaggtgcaagttccaatgtcacagcaccatccttggcagacacagaccacgcacaagacatggaggacgaagtggttatcgatgcattttcaaatggggagcactatgacaaggctaactggaattccgagaacactaatgtgttctgtgacctgtgtgttgaggagatgcgcgctgggaatcatagcaatggttttctaacagcgagagcttacaaaaacatagctgagaagtacttcttgaccacggggttgcgacactctaggcagcaatttaagaataggtggcaagccttgaagagaatgtataatttctggctgtgggtgaacaaacaaacaggtcaaggctctgtttttgacgatgacgcattttgggaatccaatactaagggacaatccgagtggaagaagcttaggtacgccccccctgaatggatcgatcaatttgaaatcatgtttcagcatgtggctgttgatggatcatctgcatgtattcctggagagcagattttcaataaaggtggttgtggtgacaaaaaagatgtcgatggcagaaaaagagttgggcaaagcagcatatgtgctaccagtccacagaagaaaacaaagagccctatgatggactccagttcatctgatgaagaagatataagaatcaatttcgcactgcagcaaggaagtctcatacaacaatatggggcaatagcgtgtctatttggtgcgtactacaacgataaatttatgaacaaatctatgcagagacaacctaaagtaactggtatggagtgggttatgacaaccatgagaaattctgtatcatgcttcaacatgtttaagatgagccgagagatatttgataggttgcattgtttgctagtggcttcatatggcttgaaggggacaagtaagatgagctctgttgaggcattagcaatgttcttatggataattggagcaccacagtctgttagacaagcggataatagatttgagaggtccactgaaacagtcagtcggaagtttgatgaagttttggagtgtatgtaccgtctctcagccgatatcataaaacccaaagatccagaatttaggacagtgcatcctaaactacgtgttgctcatttttcaccccacttcgataattgcataggtgcccttgatggcacacatgttccagttgtagttcctgcgccaaaattgcttcaatatgtgggaaggcatggatatgcatcacaaaatgtgttggctatttgtgactttgacatgcgcttcacctttgctgtcgcgggatggcctggatcagcacatgacatgcgtgttttcaacgatgcaattcgaaagtatggcgataagtttcctcatcctccaccaggcaaattttatcttgtcgactcgggatatcccaatcgaccaggatatctagcgccgtacaagggcacaaagtaccacttggccgagtttcgacaaggatgtaacccttgcggaaagaaggaggtatttaattatgtgcattcgtctcttcgcaatgttattgagcgagcatttggcgttctcaaaatgaaatggaggatcttgttgcacctaccgtcatatcctttggagaagcaaagcaaaatagtacttgcatgcatggctcttcataactttattcgagaaagtgcgatgcctgatatggacttcgacatatgtgatcatgatgacaactacatgccgatggaagcgccaatttcatctcatagtagaggtagaagcgaccagttaggtgatgaagatcataatatgaatttgttccgtgataatttggcagatgctttattagctatgcaatcatga

SEQ ID NO: 130563 - DNA, 347 bp, Zea mays
  Clone ID: MRT4577_50545C.1
cgggaaaatacaaaaaaaaaaaaaaaaaaaaaaaaaaaaaaaaaaaaaaaaaaaaaaaaaaaaaaaaaaaaaaaaaaattctggagctcggggatgaccggcacgccggctggggggctggctcacgtgtggcgtggggggcctgggcgggcagggcatccgcgggcgtagtggaatagtcaacaatttggcttgtctttccttgcaatgtaacgttgacttggttagggcatgcgatctctgccgtttgttagccgtagtgtaaaaacccacgcagcggatagggggaatgccttggtgaatggggatcattggggcagaaacttttgtacagatgattgttgcag

SEQ ID NO: 130564 - DNA, 237 bp, Zea mays
  unsure (1)..(237): unsure at all n locations
  Clone ID: MRT4577_50546C.1
atcgccatngcacaccgactcnccgtgtcccctcattctngcccggcaccgtngggnncggtgngaacagacagacncatcacnatgcgactcggcgtngggtggccgtnagnacaagtcagcncaattccaggagtcagtcgaagnaacttccggttcatnacgttcaaganaacgncancgcncaggtagtgnngcagntngnagcgncgacactacgcgnttcaccggnncatc

SEQ ID NO: 130565 - DNA, 325 bp, Zea mays
  Clone ID: MRT4577_50547C.1
aatggaatgacagcgcgcctactggcacatggggggtatttgacgacggtggggcaaggacaccgactgcaaatttgccagaagcaaagctgtacaaatctgagcatctacagagaccagagaaccgggcactagttgaaaaggcaaaatacatccacattgctggatcctcccttacagtgccatctgattctatccagcctagtagctgagcatgctgcagcaaactacaaggcgcttcccgatgaaccccctctgctcccctccatctgcgagttcctccagtgatgcccaagagaacgtcctctccgatagctgactacat

SEQ ID NO: 130566 - DNA, 614 bp, Zea mays
  Clone ID: MRT4577_50548C.1
ggccgcaaatttttttttttttttttgagtaatagtcctcacccggcttccttttcacgattaactgtacgtggatcccaaaaaaaaaatctcggcttctcgctacagagacgaccatgggaaagaattaatctagaggacgagtcgtgaggatatggcgttgccgtcggccaccgtacgtgtgccgtggacggccagcaccttccggcttgcaccgaacatgctggtggcgttgttcttcctggcggcgctactggcggccccggcgcgttcgtcgtcgccgtcgtccaacaacggcgccggtcttcagcagcccaccctgaccgtctgctccgggcactccactgtcgccacgagcggcgagttcgccagcttcctcgcagccgtgtgcgccggagcctacggcggcggcgtcgccccccacatgtcccacagcatgtcctcgtacgtcgccgccgagaaccggaccaccatgtacggggtcgcgcagtgcagccccgacgtgtcggcctccgagtgcactgcctgcctcgccgttgttggaaccggaccgcccacacacggcgtgtccgtcggggccgcccgcacccccggcgcaagatcatcccggccgg

SEQ ID NO: 130567 - DNA, 486 bp, Zea mays
  Clone ID: MRT4577_50549C.1
caatgcaaacttctaacgcatgagaaaatgtaattaattttatgcacagacacggagtcatttcaaactggtctatcaagcaaatcgaagccttgcaccaagtttttcaggttataatcttaacctacctgaaataacatcagaatggtaacctgtatcttttttttcactcttcttacagcaaatcaattatctggaagtttcattttatatgccaaaggtatatggaatacttgaataataacactaaatcgtgatatataagcttctctgtttcaatatatctcagtagatcaacttgctttttcccctctggttacttaagatgttagatgagtacgatacatatgtaacatatcaacgttcaatccactcttgctttggtgcatttagtatagacaggttacaaggtggtgtttggattaaatggaaattctttttcagtgttcgaagtatttgttaaagtagattcaaatttcattttat

SEQ ID NO: 130568 - DNA, 601 bp, Zea mays
  Clone ID: MRT4577_5054C.1
cctcgaggccggccgggcctacctcttcgcgtgaatcgtgtcccttcccttggctgcaggatccaagcaacacggaaggagggaggtgagcaccatgtcggcgctgttcaacttcaactccttcctgaccgtggtgttgctggtgatctgcacctgctcctacatcaagatgcagttcccggcaatcctcaacgaccgcaccggattccgtggtttcttttggaaagctgccaggataggtgagcgattgagcccttgggtatcagtcgggtgcttggctatgggaatatccactattttcttctaaggccgaagtgttaatctccacaaatttagtctaggacgcagcaccttgtttcacttgtagagaaaaaaaaaactattgtaagcattttgcttcagtttttaatggaatgggcactgtaagatctgtatctgcactgagatttctgagattaacaaaaatgttttctcataagatttctgagaaaaaaactttgtagaccttgtagctgtttgaagagtggtaattgatgaactgctgagagaaaaaattgatgttccaacaaaaaaaaaaaaaaaaaaggcccctagggcccgg

SEQ ID NO: 130569 - DNA, 254 bp, Zea mays
  Clone ID: MRT4577_50550C.1
cggacgcgtgggcggacgcgtgggttgaggttgcctctctaataacattcatctgttcctgggggggggtttctaagtcacgtagtaatacgtgtactcgcgaccagctgatgcggtcaacgctagctagtgattttgatttgtacaagccagatatattgtgcactagaatcatggcaaccgaggtcctatggagctcggatggcacatgtggaatgctaatcggctggaagatataggggatatgcaccgaa

SEQ ID NO: 130570 - DNA, 321 bp, Zea mays
  Clone ID: MRT4577_50551C.1
tccgggagctctacaacggtagcaccatctcgctcccactcccaaccactccgccaccaccgctctcctgcgcctgcgtccgcgcctcctccctgcggccccggccgcgccggcgacatggccatccccgtcgaggaggccatcgccgccctctccactttctcgctcgaggatgagcaaccggatgtgcaggggttagctgtgctcctgtctagtgaaagatatgcgactaacagtcctattgagtacagcgatgttgctgcttatcgtctatcactaggagaagatacaaaagcaatcaaccagctgaatacactgacc

SEQ ID NO: 130571 - DNA, 300 bp, Zea mays
  Clone ID: MRT4577_50552C.1
aaacaagaacccaccagtacgcacttcctcctcctccacctcctctctgcctctctctcctcgctccctccgccagtccgctcccccctggcccatcagatccaattccttcccccgaaccccgtcccggatccgccgcaattccttcctgcgtcgagctcgactgctccctctccctgcccgcaagaatcccgccgtggccggcggcttagtgggactcccaagtcgaagccaaggctggtggggggcgcgctcctgccgggcgtacgggccatgggcgcgctgttgccgttcgtgcgt

SEQ ID NO: 130572 - DNA, 2236 bp, Zea mays
  Clone ID: MRT4577_50553C.1
tgggaccccggatcctttccccaatcccatccataatccatcggcgacgagctgatgcgcaagcgccgccgacctccccacctcggcttctgtctatccctcgacaaaccgacctctcccgccgccgaccgccgtcgatctaccgatcggccggacgaaagacccacctctccccaaaataggcggctgagacatacgttcctatctccccttcgctgccggagaaaagcctcgcagcctgcccctccctcaccttcacctcgatttctctgggcctccgaaccccgccgacaggagcgttccagcatctcctatcccgtgccgcgtacgtctgcacggattagcgttccttctattggtaagtaggtcacataatgtcttctgaagataaagcaatggctaatcgtgtcacttcacactcgccaaaagctatggtgtcggaaccagatcccaacaggatgatgatgtttagatcaaatatggagtattcacaaacaaatggccagacaaatgctgttcttggtcctgtggctatcttttgggacattgagaactgtcctgttccatgtgatgtacggccagaagatgttgctggcaatgttaggatggctttgcgcatgcatcctgttgttaggggtgcggtgacaatgctgtctgcttatggagatttcaatgctttcccaaggagactccgggagggatgccagagaactggagtcaaacttgttgatgttcctaatggacggaaagatgctgctgataaggctatactggttgatatgttcctttttgcacttgacaatcacccaccatcatccattatgctcatatctggtgatgtggacttcgctccggcattgcatatacttggccagcgtggatacaccattgtcattgctattccgtcttcagttaccgtctcatcagctctgagcagtgctgggagtttcgtgtgggactggcctagccttgcccgtggtgaaggtgttgtgatccctaggtccttggtgcgccgtctggctgattatccatgttatgtcaacagtgggaatatgggacagttccctgataatcagaatgaagaggaggccattgtatataccggaacatcaaggaatgaatatggtggcagacctcccgtcaatcaaatgtattgttataacacttcccagacaactagagaaccaagcaaagctttgtatactgttgaagatgtgaactgtggtacatcatcaaggcctcataatttatcatgtcgtcagagtgaaagtcctgagacagaccaaggtttgacagatgagcagtcatggtgggttcgtcctggtgatcttcaaggattgaagggtcaactaatacgtctgtttgaattatctggaggatgtgtcccacttgttcgtattccctcagagtatctaaaactctttggcagacatttatatgtatcagaatatggagctgttaagcttgttcatcttttcgagaagctggccgactcttttgttgtcgttggtaagggtcataaaaagatgatctgtctctgcaattctggtgataggaacctgaagaattatccaagtacgccaatcattctgacgaagaaaaacagaggaaattctgctcttgaagaaagcacgataggagcatgtcagcaattaggcagctcatcagatgaattatcagaggatgaaccaattatcaacccagatataaatgttgcatgtgtgttcaatgagcatctagacagcttcagaagggagattcaggagctccttgtttgctactcctgccctgttccgcttggtaattttgagagtttatatgagcaacggtataagaagatcattgactatgagagcttaggagtcaccggtctggaggagctagttgagaaggtgaaagacgtggtagatttgcacgaggaccaaaccagcaaaagcaagttccttattgcaaactacacaaccggttaggctctttctgttgtcttgatgtcctagttcagctcctaaagtacttcagctcgtgtttccttaacatgtgtcacacagggtcggcatctttttttaccgtgccggtatgataagtgtgaatggcatagtaagtatttgtaatggcttccctcatgcctcagctaatctgtgcaaacagggagttgtttcttgtatgcaaaaagatgattatactaaagaacagtgaccatttatttggcaaatacatctaattccagttcaagtcc

SEQ ID NO: 130573 - DNA, 434 bp, Zea mays
  Clone ID: MRT4577_50554C.1
aaaagactgcactgaatgtcccatgtttcagatttatactgtcagccgtctaagtggcattttattgagaagcctatatatccgccctttaaacatctacattgcgtgcctttttggaccttgggttaaacctaagggcgcgcaggcacgatgtccccacaaaggcttacgacctactatgtctgtttacaccacatttatcctcccctttcgcaaaaacaggggcctctagttcctgtgattctactgtggcgtgtcaaacatcttgctacatagcgatggggcacaagagctttcggtgcggtgcttatgcaataaatcttaactatctggcggtaccattcattggcatactcctgaaccaaaatgctaacaaacacggatctgcacccctaatgtatatgctcgatttacgcatgtagcctatcctgcac

SEQ ID NO: 130574 - DNA, 801 bp, Zea mays
  Clone ID: MRT4577_50555C.1
gctagctccatcgctctcctttgcataaagatcaccacctccattcgcacgcacaaagctctctagctcgcagataagccagagagaaaggatggacgagtcgtggaggtgcacgatgggctcggtgctgccgaggcagcggtcgtcggaccagcacgccgccggccaccagaacctagcccccgacgacttccgggacgtgtacggtgggccacctcgcacggtgctcctccgcagcttcggcggcgaggcggttgactaccactccccgacgggccacggccaccagtacacgagctacggcggtgccgaggccttctgtcgccggccttacgccaacgggcgcgcggcggccgtgcccacggagcagggcttcttcgacgacatcttcggcgcccgtcgtcacatgaggtcgaggtcgagttccaagtccaagtcatcgtcggcggtcagctccgacgagttcccatccgccggcttctgccggccggtggccaccgccggcggcggcagccgcgcagacgccacgctctcctccttcacatctaggctcaggccggtgacgatcccttcgcggcgatatgactcgtcgccgccatcgacgtcgacgagaggggagtactaccagagcagctccacgtgctcgacggccccgtacccggcagctcgctactactacggcgacgacgccaaggccgccggcagcaggtcgaaccacagcagagccggcggcgacgggtcggcagcaacgcgacaccaccgggaccaccgagggggcagcagcttctgttgcttcacgtc

SEQ ID NO: 130575 - DNA, 476 bp, Zea mays
  unsure (1)..(476): unsure at all n locations
  Clone ID: MRT4577_50556C.1
tttgtccccctccctcctcccacctttcgttctctccccctccgcctgctcccttttaggagcgcgcgcgcgcgcgcccagatctagggtttcttccgcggcaagtagagcagcccgcatggcggtctttacgaccagatcgagctggttcatgcagtgcaagtccgttcgttgagcctgaggttagtgttttttgtgagaaggcaaaggatattcnganggaggaaagcaangnncagccngnaaagagtcctgttactatatgcggngaaanncaaggacaannncaagaacnngcngaacncnnccgaaacggnggaaagngnccagaaacgaacaacnngnnaaagggagaaaangnngaccgnggnnacaacncngncgaaacngncacacnnnnggnggcnnaaaaagnncgaaanccncagaggaacaccaaacncagaggaaaccangaaagccggcagaaaacncaa

SEQ ID NO: 130576 - DNA, 2301 bp, Zea mays
  Clone ID: MRT4577_50557C.1
cccccgagggggcctgtccagtcatggttttggtccatgccactcgtaaatactggttaagacataagaatcatttgcgttttaaaatagctccctccactccctaaaagtagacacagctgttatgaccttcgttcgataccttttcaaaactgttttgtccacccccagcaagtgtagtcgcaaacggcgcggccgctggtgcacccggagcttcctgctgtctgttggcgcgcggcgcgctacacgacttatgtcccgtggaagtctccccgggggcttctagtttagccctcaggttcggccgcaggcttcagcctaccgcgttcgaacagttggtcagggtttcaatttcggaggtggagatcttctataggtgataatgggctcttctgagggtactgctgttgatccagattcagaaaatcaagattcaatctcaccccgtgcggatgttggcatcccggtcgccgagggcgatgtacccgtcgcggatcgcaccgatattccggagctccgcctcgccacgccggggacgaggtggctgagggctcgagctgatggcaagcagcaggtcaaggaattcgagcttgctcggggaagggcgcacacggggaagaagagttggatcgtcagctttgatggcgtcaacaacgtggacgaggctaggcaaatagttggttcagctgtacttgtgaaagctcgagatagaccagaaattgaggatgatgaattctattcacttgaccttgttggaatgagagttattgtcaaggatacaggcaagctcgtaggaacagttggtcaggttttcaatttcggaggtggagatcttctacaggtgataatgggctcttctgagggtactgctgttgatccagattcagaaaatcaagattcaatttcatcacgtgagcatgtgtggattccatttgctgaagatattgtacctgatgttgatatggcaagcagagaaatgcggattacacctccgaaggggttacttgagctcaattctcgttctgacaagagatcgaagaaagaaaggcgtgcgatggagtggaaggacaggaaaaggtttcaacgtcgtgtaattgcaggaaagaaggtactctccgaaatggaccaagtccatgttctggaaggtttggtatcaggggacaaggtccaaaaggcatcacttgcagagcagattgggagcattgactttcaattgttccgacatgcagtacattgtgttagcaagcagattgagagctcttcaatgaatttgctcgctaactcttcactgtcaaggaaaaaagtgatcaaaataccatacaagactctcatcaaccttggggacaaagctgaacatgcattcagtagtgaatttaaaaatggccttgacattcttttgaagtccaaagcagctattgtacttgttagaaacggctctgactctgatactgagtttctgagtttgctcaattcttttagtgaattaatgaaggttgtagaaaataaagtttctccccctttaattgtcattgccccagctggtcatgtggagtcagttcggaaatgcctggtagagaatgactattttggttttgacactcaaaaggtgtgggtgctggaagagctggagcttccagttgtcagtatatgctcggagggaaacagaaaaaaagttctgatgaagtctccctgggagataataaaaaagccaacaggttctggagcaatcttcagcttactgttatcaaacaaaattttggaaaccctcaatgaaatgggtgtacagtatacacagatctgcagctcatccaacaaaccaatcatcgggcatcctttgctctttggggctgtcgcttcccgcggggctgatgttggcatccaggtctccaagaccggtgaaacattagacgatttcgacgtgatcctttccatcgaccagctgaacaagatgtgccgagatgtcacccagatcaggttctccgctcgctccgaacagaacgtgcacgtcgagcatgtcgacgggcagtgggtcgccgtccagccggaggtggcaaattcccatcgcctgcatgccgaggttacgagtgtcttagactcttgcgctcctgataagctgtgtgtcatggagattgttgagcaataaaagtttcttgcctgtgtactgtacataatcacaagtacttgatagatgcgtgaggtttttcttctgctattgttttgctatgaatttttaggggagcatctacgaagcggaataccagccacccactgccgtacttgatagatgcgtgaggtttttct

SEQ ID NO: 130577 - DNA, 304 bp, Zea mays
  Clone ID: MRT4577_50558C.1
ccgagctctgctctctcaaaacatgttcttttttacgctcccgacaatctcgttgggcagcggacgatatatcctgccagcgtgccccatactaacaaaaaaatacggaattacattttgatgatcctgtggagaaccttactgaaagtgctattacccttgataatgaggaagaatccactacttaaactaatctacctgatcagtctaaataagaaactcaaaagctttacgatgaactcacttatacaatattttacaacttgcttaaccacagacatttgatcattaacaataaacatgt

SEQ ID NO: 130578 - DNA, 209 bp, Zea mays
  Clone ID: MRT4577_50559C.1
accacgcgtccggcgtacatcgtccctttgcccttactagcaaccgataatccgccggcgttgagatgttggttcatcacggtcttctatgtgacgactagctcctgtccgattcattcaactacaacgagctctagaactgcgtgctgcgggaggtcttgggaaagtggatgacctatggttctgttcatgtgtacattgacgccaat

SEQ ID NO: 130579 - DNA, 507 bp, Zea mays
  unsure (1)..(507): unsure at all n locations
  Clone ID: MRT4577_5055C.1
tagaggaacagccagcccggagtggagtgtttgatgaggacattgaagatgttaagagngcagatgcagaatctgtagtagccgatgaaggcaattactcaaatggatgcagaagaactgaggagaagcttgatgttggttctgttactgggtcatcacattcagaaggaaagtctctaggggaaaagtcccaactgacaacttgttcacgagcggtaggctgtgactttgaatctggtgatagcgcagagcttggggtatgaatgtggcatcatcccatttctgcagctgatgattcttaataagggacagcttattaggatagctctggtttaggtactgcacccgttctggcctacagtggcgacaggttcaatacatgccgntcgcgtacatgggtaacactggttcagcgtcttcgaagcacaccactcaagatgtggctgcngtggcacatcatgtgggcatcggccactctaatttttagacgctggaccttgcatcgtg

SEQ ID NO: 130580 - DNA, 404 bp, Zea mays
  Clone ID: MRT4577_50560C.1
gtttttccatatgaaaataatttagacagggagtgggaagtcatggagtccccgccaataactgagttgaactcactgccaaaatcaaagggtcggtccaagaatttcagtgaagatgaagatatcttattggtttcagcatatctcaatataagtaaagatgctattgttggaagagatcaaaaagagggtaggttttgggaaataattgagaattactttcatgacaacaagacattttagacagatcgcaacgcatcatcgttgtagcatcgatgggcttttattcataaagaggttatgtgtatttcaagcataccatgatgccatataaagaaagaatgtaagtgggaagacaagtgtcgacaagctgcctgtagcgatagcaactttttatgatctgc

SEQ ID NO: 130581 - DNA, 190 bp, Zea mays
  Clone ID: MRT4577_50561C.1
gttgattgattaaaaccaaaactttattatgaccatgcctatattattgggcgtaccaaaccagaaagagggcgcacgtcttactgcgttggtacgaccaaagatagagcgagggggatagaggagatttgccaataatgaagaatcagaaaaagggcggaagggcagacctgcccgggcggccggtcga

SEQ ID NO: 130582 - DNA, 489 bp, Zea mays
  Clone ID: MRT4577_50562C.1
gcccagcttgctctctctgctcttccccctcacacttctccctcgctcatcactcatggtcgcacagtcacactacagagcccagagccctagtgtcctcccctcccctccccatggcccctcaccgcctcctccagcttctactgctcctcgccgccgccatgaccaccgcccggtcccagacccagtcaccagccgccgcgccatccacctcaccctcctctaccgccgccgccgccccaagcccctcatcctgctcctccccgtcgtcctccaaggacacccacatcttcacctcgcccgccgcgtccccgtcctcgtcccacgccggcgccaagctcacctgcccggccggctcccccgcgcccacccacttcccgacctctccgacggcaccgacgtctgggcaccaccggaggccctactaagtactgaggaggagtgacgatgttttcttgcggggcgttgctccctcgctggtgccttttg

SEQ ID NO: 130583 - DNA, 426 bp, Zea mays
  unsure (1)..(426): unsure at all n locations
  Clone ID: MRT4577_50563C.1
cgggacttacctgtatgggataacaggcgaacaagaagggctgtggtctaggccagtggcccgcattgcacttggtgggtgagnctggcctaccatcttcctaatgggagagtggacatcataatttgtgctagtgtggggtacgcgtacgcgcggcccctgtttaagaaaaaaaaaaaaaaaaaaaaaaaaaaaaaaaaaaaaaaaaaaaaaaaaaaaaaaaaaaaaaaaaaaaaaaaaaaaaaaaaaaaaaaaaaaattccaccatcacacacagaaatccacaaaagaacttcaacgtcacacgggggttgaacaaaaacaaaccaagggtcggaaccaagggtttacaaccagaaggggaactactgctcgaaggaggggaggtcggtggccccggccggtttcggccccacgggggggggg

SEQ ID NO: 130584 - DNA, 553 bp, Zea mays
  Clone ID: MRT4577_50564C.1
tattgctctagagagaacgctcgggagctcggatctgctcgatgtaaaactgaacgtcactgttgaaactcaaaagagctctactacaggcaaccagccatgcactatgaggtcagacaaagctgggaaaatgcttgctgatgttctgctcaagggactgcaaggaagcaggcctgtcactctagtcgggttctcgctgggggctcgtgtggttttcaagtgcctgcaggagttagcgcagctgggaaataatgtggggatcgttgagagggcggtgctcatcggtgcgccggtctcagttcaaggtgagatgtgggagcctgccaggaagatggtcgccggaaggtttgtgaatgtttactccaccaacgactggatcctcggcgtcactttccgcgctagcctgttcacgcaaggtttggccggcatccaggacgtgcatgtccctggagtagagaacgtcgacgttaccgagctcgttgtcgggcactcttcgtacttgtcgcttctccagaagattctagaccatcttgagctaaacacctactaccct

SEQ ID NO: 130585 - DNA, 320 bp, Zea mays
  Clone ID: MRT4577_50565C.1
atggagcaccatagagacaccagacaacgggagggttttaaaagagggggggtgttacccacccccgcactcgaaggcaatgcctactgagttcttcgaggactccccctacaaacttggctcccccagcggagacgccaccttgaaccgggctcaatggacaatacacagaaaaatacaatggaactgactgacttgaattacggccttgatataactccatggctggatggatggatgcatgcatatgttctgcctcgatggaattggtacgaataatgatgctcaagacaaacaatggaggaccagagttaaaggac

SEQ ID NO: 130586 - DNA, 427 bp, Zea mays
  Clone ID: MRT4577_50566C.1
cttctcccaatctcccctacaccagaacaagtggcagttctttggtccgcgtcagagaggccgcccccatgtctgggcgcggcaagggcgccaagggtctgggcaagggcggcgcgaaccgccacctgaaggtgctccgcgacaacatccaacgcatcaccaatcccccgatccggacgctggctaggaggggtggcgtaaagcgcatctcgggcctcatctcccaagagacccacggcgtgctcactatctttctcgagaacaccatcctcaactccatcacctacaccgagcacgctcgccgcaagaccgccaccgccatgtacgtcgtatacgcgcttaaccgccagggacccaccctctacagattcagaggctaggctaggcgcctcttatactctgagactgcctaggggacatgtctctg

SEQ ID NO: 130587 - DNA, 205 bp, Zea mays
  Clone ID: MRT4577_50567C.1
gcggccgccctgaatttttttcatttttttgtcgctgaacaccttcatactgattgtttaaacaaaacaccaaacagctgaatggcgccgccccaatggccatgagattccacccgcatgcaactggataattttactcgccttttgaaagcttccaatacggctatgtggcatcgagggacccatcagatgctaccaaacatta

SEQ ID NO: 130588 - DNA, 745 bp, Zea mays
  Clone ID: MRT4577_50568C.1
tcggccgggaatggtgcttttgtagttccttcctagccatgaccaaaagaaaattttaacagctcatctgaagatttttttttgtccgctacccatttctcttggtcctcctcagctgagggaaggtggttcagtctaggtagtgattcaattccgtagaaattgcacgctgccactgctgaaaaagcagtgcttatcagaaaagcacaaagcatagctcaacatgttttttttcccagccatgtgcacatgctgccattgctctcagaaaccaaaagcagtagttcattactttgcctttgaggcttgcgccaaactggttcgtaatgagaagctctcgaatttccacaccgtggtttggttcgttggttgcctttgttgtatagtatgcggtatgcagcacttgtgttcactcgttcttctgtagccaatgggatgtaaacctctggcaacagagcgtccagatccaattgggaggtctgcatcaccaagcccctgctcttcatatcaaccaagtccgcgagcctcatacaacccaagcgcggcatcctcctcgttcccaagctctgggtcctcctcccacattactcttggcgggagcaacttcatgggaggcgtcgagggcagctcccttatcccgtggctaaagaacctctcgtcgagctcctcgttcgcctcctcctccaagttcccgcagcttcaccacctctacttcaacggcggttccatcagcgcgccggtgacg

SEQ ID NO: 130589 - DNA, 111 bp, Zea mays
  Clone ID: MRT4577_50569C.1
acccaaattcaattaataagacgaaatttcttttgaaccgcagggacacttgccatcaactatttaaggaattagaaaaaggttcacattaagtctagcaaattagcacac

SEQ ID NO: 130590 - DNA, 376 bp, Zea mays
  Clone ID: MRT4577_5056C.1
cccatctactagctcgactacatggagagatggctaggcatgcaggcagcggcccgtaactcactggtcggcccacgcgtccgatcgttctgaatgagctgtggaagatggtcatctacatcatgtcggactgggaccaatgtgatgctgctgttcgagtacacttcgcggattaggatcggccggtggagtatgtgtatcccattcccacgacgtatgtgcgattccttggttcgagtcctgttcaggccaagatgtacgatcgtgcaccgttggcacaacgaggttggccactactaattcctccaggcatgtgtgttaggattcttgggacgttgcctactatctaagcctggggatgctgccgagagagagc

SEQ ID NO: 130591 - DNA, 340 bp, Zea mays
  Clone ID: MRT4577_50570C.1
ctggccacaacatgctcgcttagatacacgcaggtacatgcacatatggctctatgacagtgaagtagctgtacgtgagggacacttgacagcaatatgtgctactaagctatatatcacatagatactacaaaccaactgattagtagacgaaccttgatgatatctaataatcagctcgcagtggagccagatacgtcttgctaatcaggagcaggatgatctgtatacaaaatgaaaggttaagtacaggtatacgatactgtgctactatataagggtaacactttcttcagaaaagatagtgatcagatgtggtcattaagcacgaactaagcag

SEQ ID NO: 130592 - DNA, 339 bp, Zea mays
  unsure (1)..(339): unsure at all n locations
  Clone ID: MRT4577_50572C.1
acggtctcaaatggagggcaacttataatctcatatcatattcgctggcccccaccttctcgtgaancaaaaactggtgtagtgtacaaggcaaattttccagatagagaggggcgaactgtaatcattatcaggcctacaaaggagaattcaacgtcccattacgttcagattccgtttcttgcgtatgttattggagaatgcgaacctggaccaacgtgaacgtcaagagaaaatggtatggcagacagacattacattattgacaatgtcccacaccacaccccaaaagactgcacaaacatgaactatcctaccctccaaacattcaccattcat

SEQ ID NO: 130593 - DNA, 241 bp, Zea mays
  Clone ID: MRT4577_50573C.1
gcggcacaaacgagtgttgatatgtcacgaccgggtaaaaaaccagcgcacagcaccgggttttttgcagcattcttggaaggaatggctgaacaaaggcatagcttgcctggccagcggccactattttattggggaggcgggtggctgacgaaacaccacagtttggttgggtcgacacgcaagtagagcataacttggattgaattatactaatcataaacatatactgttggctagc

SEQ ID NO: 130594 - DNA, 1111 bp, Zea mays
  Clone ID: MRT4577_50574C.1
cattgggtacctcgaggccggccggggggtgactcttgtttctacccacttatctttgcagtcgccactgcacgccactgcttggctcgcgtgattcgtgaaccttcttgccatggcgacgatgtctgcagcgtctcatcgctgctgtgcttcttccttgagagctttaaccgtgttgtttgtgttggcagctcttgtttcagatgtaggcggccgacatcatcatcatgtttgtcgtccttatttctcctgcggtggttttagcaatatatcgtatccattccgtcggcaaggtgatccatctgggtgtggtgtccaatcgtatgagctggtttgcacggatacagacgccacaattcgcatcggcagtggaacatacaccgtgcttagcatcaactccacgtattcttacttctgggttgtcgatgccaacctggacatccagagcagttgcccccttccctggtgggattaccatggtgagaccagtactgccaactcatatcgtaggaggactgagttcaggccttatttcctttatccgaattcgatgtcgattatctttgtgaattgctcgaagccaatagagaacaatgatatatatgagccggtgccttgcttgagcaattcttctttcatctacttgctaactcactactcgtatggctatgctcttgctgagattctggagccctcatgcggttacctagccatgatttatttgggtggtccaggcataccggtgcccaagaatacaagctatccagatgttgttaagttaatgaggaatggatttggccttagatttccttcttcgattggtgaccgcggcatcagagaatgtttcgcagagtctgtgcgtaatttccttaaagagccaagaaagtatcagattgtggacattctaatggtcgaggaattatgggcttgttttctcgatcaacatggatcaactaataatgttgtcacttctgttatcatcgacattatcaaaacaataccaatatgtatggtggcttctgaaatctacacatgtttttttgcaggcttggattggagcccgtaagcagaatttggtcttcctagcccataaatcctggaaagcagggat

SEQ ID NO: 130595 - DNA, 137 bp, Zea mays
  Clone ID: MRT4577_50575C.1
acgctatgctccactttctgtttactctcattattgccattcttttgctagtgatcaccagagagatttttaaccatctcttacacctgtaccatctcttcttcctcttgttctaaagcccattatatgtttctcac

SEQ ID NO: 130596 - DNA, 656 bp, Zea mays
  Clone ID: MRT4577_50576C.1
gccggggtactcacttatctttccacgtcgcctctccactgattggctcacgattatgtgattcgtgaaccttcttgctgccatgccgatgtctgattcttccttgagagctttaacggtgttatttgtgttggcagctcttgtttcagatgtagaggggcgacatcatcgtcatgtctgtcctcatttctcctgcggtggtttaagcaatatatggtatccatttcgtcggcaaggtgatccatcggggtgcggtgtccaatcgtatgagctggtttgcacggatacagatgctacaattcgcatcggcagtggaacatacaaggtgcttagcatcaactccacatattctcacttctgggttgttgatgccaacctggccgacatccagagcagttgcccccttccccggtgggattaccatgctaggaggaccagtagtaacttacatcgttggaggattgagttcagccatgatttttctaattctaatccgatgtgggtttacgctgacgcttactttgattggacccgtggcaactcatatcgtcagaggattgagttcagccatgatacccagttttcttctttggattattcggggtgggctatctttgtgaattgttctcagccaatagagaacatatataataata

SEQ ID NO: 130597 - DNA, 1834 bp, Zea mays
  Clone ID: MRT4577_50577C.1
ttgggaccctcgggccggccggggtccgcagcgtctcatggctctgcttcttccttgagagctttaaccgtgttgtttgtgttggcagcttttgtttcagatgtagaggggcgacatcgtcgtcatgtctgtcctcatttctcctgcggtggtttaagcaatatatcgtatccatttcgtcggcaaggtgatccatctgggtgcggtgtccaatcgtatgagctggtttgcacggatacagacgcgacaattcgcatcggcagtggaacatacaaggcatgccggtgcccatgaatacaagctatccagatgttgttaagttcatgaggagtggatttgcccttcggtttcctctttcgtatggtgacaacatcagagaatgtctcgcagagaatacgcgcatgccatggttttgcagtgctttccatgaagaaccaagaaatagtacaggcatcagggaacagatcttggacattcttacgttcgagacattatggttttgtgttcttgatcaacttggatcaactaataatgatgtcaaatctgttctcatcgacatcatcgtcggaataataccatttgttctgtggggtctaaaatctgcacatgttatttgcaggttcgtattgatgccgctagcagtatttgtcttcctagcctataagtactggaaaacacggataacaatagatgcagttgagaagttcctgcgaatgcagcatatgcttgttccgatgagatatgcatacacaaacatcattgctatcaccgcccatttcagagacaagctcggacaaggaggctacggtactgtatacaagggggtgctacagccaggtgaagttcatgttgctgtcaagatgctgggcaactcaaactgtaacggagaagagttcatcagtgaggtggccaccattggaaagatccaccatgtcaatgttgtgcgcctcattgggttttgctccgaggaaaatatcagggcacttatctatgagttcatgccccgtggatctctcgataagtacatcttctcgtcggagaagacattctcatgggacaaactcaacgagatcgctctgggcattgctagaggtcttaactacctgcatcatgggtgtgatatgcagataatacactttgacatcaagccacacaacatccttcttgatagcaactttgttccaaaagttgctgattttgggctagccaaattgttcccaaaagatgacaatttcgtgccactgagcgctatgcggggaacgattggctatatagctccagagatggtatctcgaagctttggtgtcatctctagcaaatccgatgtgtacagctttgggatgctactattggagatgacgggcgggcgaagaaacgcagatcctcatgcaggaagctccagtcaagcatactacccatccttggtgtacaagcagctgagccagggtgatgcgaacaggatcagtgaaggtgttgatatgcacgagttagagaagaagctatgtatcattgggctttgctgcatccagatcaagccgcaagatcgaccgacgatgagcgaggtcatagagatgcttgaagctggtgtcgatggcatccaaatgcctccaaggccatacttttgtgatgaagagggtgacagttcttactctataatctctgaactggatataatagaagagtagtagtagtaaaatgcacttgtgtctatgtgctcttaatgtatcagactattaagattgcaaggttgccataagctaaggtactggttgtatgcttttattgagtgtgataatgtgatatcatataaaatacctccatgaagttttttact

SEQ ID NO: 130598 - DNA, 197 bp, Zea mays
  Clone ID: MRT4577_50578C.1
cagccggccgggaattatcctgacagtctatctagctagtagctccctgaaaagttcctagagatccattatcttcgaccacagcctctgcaagaagaagacgcctactgcagtcacccactaggggggcggcaagccccccatcaacgtcatcgcacatcctctcctaatcgaccagcctgagaccccccgcttca

SEQ ID NO: 130599 - DNA, 698 bp, Zea mays
  Clone ID: MRT4577_50579C.1
gccggccgggtcggaacaagaaaattgaccaacccactttctgagtgtgactgtgacgagccgtgctcaccgaacgggcgacgacacagaacgacgatgtgcggagctgcactgcaccggaccaccaccttctgctggcaggccctgctcgcccgcgccgcctgcggccatgctggggcaaggataacaatgctgcgcaccgtaaaaagcgctccccatagaagatgggacagccctgaccggcccaactacattggtccgctctccgagaatacgccttcgaacctgagcggctagctacccggccactaaacttggaacaccgcgaggctctcgagcggaacgaataccttcgcgcgatgccggcagctacaggtgatccactcccggaggctcaggctgtgggcgatgggctgaatgttcccgaatatcctggctaacaacggggtcaagttccgtaactgggcgtgcctcaagggcggcgcacacatcttatcatactgcggattgaactacctggcaaaccccaacctgatgcacgcggaaagaatcctgagcatctggacaagacaaatggtgctcatgggcttcttcaagggctaccgtgctccaaggagccccgctcgttcaaggactccacaatgagtaccccggagaacccttcgatccgctgggtctcgtcgacgacccggagaccg

SEQ ID NO: 130600 - DNA, 675 bp, Zea mays
  Clone ID: MRT4577_5057C.1
cctcgaggccggccgggaccatctatccgactgcctctcctcatccacgagcgtcgtcaccaccggtgaccgccaacctccatacgccgtacgcctgggtaacgaccaataggtgaactactggtgctcagagatgaggtcaaggccccggacacacgttcagacgatcacgcaagaggcaggtcatgaatcacggccgtcaggcaaagtcatatcaagctcctgacggtcatcgcaccgccacgcgatacacttgcacagctatggtaccctcgatgaccaccgattgcgcgagatcgtggaccaactccacggaaggctgaaccagcgggacggcatcagccctcgattggatatcgaggtgccacaccttgaggaatggactgcaagggtgctcccgtatacacagcccggatagatcgcccgcacgacttatgcatgcatcatggaccacaaggacgtccgacttgagaacggaacaggcaaggacctacgcatcttctattgaagaaactgagaaactttggtatgctctgcctgactgcctcactctctccgactagagtacctgttattgtactttaatatgtctctctcagactacagcgccgtcttttacttgaatattggtgactgcattggtctatcacgttaacagcgtggactgcattgcct

SEQ ID NO: 130601 - DNA, 1109 bp, Zea mays
  Clone ID: MRT4577_50580C.1
tcgatccgtagcttagctgcaacacatcggtgatcgttccatgtgtgtgtgattattgatcacaatgccttgcttggcgcaagagttccaccccaagctgcccgcggccagtcactactgcaagtccttgtcgtcgctcatccgggagacctacgcgcactgccatgtcccctgcgtcaggacccccgccggcgccgggtggagctccggcgaggacagcgacgacgacagcgtcctcgacgaagcgcaaggcaccaagcaggtgatcctcaacgagatgaggagccggcagatgaagaggcggtccaggtgcggcgtggacgtggactcgccgacgctgcctctgtcgtcgagctctgctttcgcctggtcgtacaccccgctcgatccaagaaccgtcctcgacacggtgtcaagtcccaagacgtgcacgtgcgtcgtggtggagggaacggccgcggaggaggagcaggaggaggaggcagccgacgggggggactgcgacgcggacgacgagagcgaggcgttcttctccgtgaagagcttcttcacgcgcagcacgagccgggcggcgaccgtggcgtcgtcggcgtgcatgctgacagacccgcccccgccgacgctgcggtcgcccgaggcctgggagcgcttccgggactgcgaggggtggccgttcgggctgtgccgtcggccgcggccggccgtcctcccgctgccgccgctgcccagcacgccagccgactcgtggaagtggcgcaagagcgtcggtagcctcgccgcgagcccagctcctgcttacagacacaaaatcactactgctgctcctgctagcagtaaataaccgcgcgcccgttaactaacaaagaagaagcccgaaccgtccgtgtcgtcagcagcagcgacgctgctgggacgtggcgacgacctttacaagactgcagctagtagcctgcgtgcttgatgcttgttcgtcgtctagaatgcgagagttttccccacaaaattcctatgaacatagattttgcatgcttgttcgaggcggccttcatcttctggaagggggttttcaggtgtacgtgttctgaataatgaagtctagtgtacttttc

SEQ ID NO: 130602 - DNA, 269 bp, Zea mays
  unsure (1)..(269): unsure at all n locations
  Clone ID: MRT4577_50581C.1
tttacactcccttcacaacatgaagtagctgtcagatttttaactggccacttcctnactnccttactaacacatgttatccaacaatgattttattaccaaatatcttactgctaaaagtttactctataccatatactacctcttcaagacgaatttgttgaaactaaaacctaagtactaaaaactataaacttaaatgcatgaaataaaaaaactaaacactcatttaaaaacattaaccactaactttcttaaaaaaataataa

SEQ ID NO: 130603 - DNA, 291 bp, Zea mays
  Clone ID: MRT4577_50582C.1
gcctggcccgcgcgctgcacgcccggggcgtcgggatcaccgagttccacaccgccggcgcgcggccgcgggaccgcatctcgtctaccgcggactactagccgtctggagattgagctggcgcgaggtcgaaatgcccggcctgatggcgtagcgcgccgagttcagcccgtccaagctcttcgccggctctaggatctcggggtctctccacatgaccattcagaccgccgtcctcatcgagaccctcaccgagctcggtgccgaggtccgctggtgctactgcaacat

SEQ ID NO: 130604 - DNA, 860 bp, Zea mays
  Clone ID: MRT4577_50583C.1
agccaggatgcgacaatgcgaggcaggctgcttcatgcgtgaaaccaatcgtttcttcggcccggcacatgcaagcagccatgggcgagaaagaataggaccgccgccgccgctttgtccctccgttcacaaccttgtcgcacgagtctcttattcgcaactggacctgttttgtttaacaaatttaaatatcctgcatggagatagtggaaagggtattatgcagactttggaaagggaaggcgttatcagtgatctattattcagttgttagcttggctctttgggcatgtaagctgaatgtacgggatttttggtacccttgaacaagttgactcctgctgttttttgtcgaacagtggtgcttcttgatctgtaaaccatgttaacttcatctttatgcaatattgtggactaggactagcccctttaactcttcaaataaaaggtctacttgtgatctaatgttgctatactcaagtgatttgttattgccgtgtactcctgtgatttgctgaaagttttagttgtgttcaaactcatgttgtcacttcattcataaaaagatcaaagcagtggtaacttcaccaaaatgagaaatagtgatcaaaccaaagtgagtgcagccttccaaacacagagttcagcactgacatatgcagtccaagccagtggcggacccagaaagtttcaaaagcctgggcaaagattacaaaagctgaggcttgcccaattgttatacttcggagtccccttaggttttggccataactacatcacacatcacaccacatgagccggaaagtcattgaaaccctcttattaaaaaaaactgaagcaatgttgccaccaccgccatg

SEQ ID NO: 130605 - DNA, 1189 bp, Zea mays
  Clone ID: MRT4577_50584C.1
aattcggcacgaggaaagaataggaccgccgccgccgctttgtccctccgttcacaaccttgtcgcacgagtctcttattcggttttggccataactacatcacacatcacaccacatgagccggaaagtcattgaaaccctcttattaaaaaaaactgaagcaatgttgccaccaccgccatgccattgccgccacagccagtccgtcgctcttgccctatcctgttagccgtcaacgacacctgtggtgtgacgaggatggcatcaacatgtgcggcaagggtaccgtctctgcggtgggcgccacaacgtggctgggtgggttcgtgggtttcagtacgcccagcgaaatgcaggacatcgggaggacatgccgttgtgtgcgctgctgttagcttcagaccatgcattgacattcacaagggaaaagttaaacagattgttggctctactcttcgggatttagcaaatgatagcatggaacttgtgacaaactttgaatcagacaaatctcctgcagaatttgctaaattttataaagcagatgaacttctaggaggacatgttataatgcttggcgcaaatccttcaagccaggctgctgcactggaggcactacgtgcatatcccatatcctgtatgtgtttagtgatggcaagatgaacactgaaggttaagaaaacttgtcgagctggttgggaaacagaggctcgtgctggacctcagttgtcgaaaaagtggtggaactactatccttgctggttaggaattgatgaggaacttgtggaactattggggcactattcaccaatcccagtcacttatgctgggggtgtgtcaacaatggacgacctagagaggataaagaaagcaggcaaaagtcgggtagatgtaacaattgggagtgctctagatatatttggaggagatttgccttacaaagatgttgtcctttggcacaggaagcaaagtatggttggtcaagtgtgaagaaacacaagatcctctatctcatctcctatttcaaactattttgcgtcccctattttacactacactggagacagtcttcagtgatgtaattcaaatctgaggagcatgacttgtttgggtttggacaccagggttggcgctaactcaaaagtggtcaatttgtgagtaatgtactgttcttgacagtttctgacc

SEQ ID NO: 130606 - DNA, 577 bp, Zea mays
  unsure (1)..(577): unsure at all n locations
  Clone ID: MRT4577_50585C.1
ttgnccgggngcccggcacatgcaagcagccatgggcgagaaagataggaccgccgccgccgctttgtccctccgttacaaccttgtcgcacgagtctcttattcgtagctgctggattgcaaccgttgtttggaaaaaaaaaacaaatattccccccaaatccatttccttcactgtgtattattttgcaccaaactgtaaatttgtcatctttctctttgtcaaatatgcattgtaggcttggatttgatctgttgcagcaactggacctgttttgtttaacaaatttaaatatcctgcatggagatagtggaaagggtattatgcagactttggaaagggaaggcgttatcagtgatctattattcagttgttagcttggctctttgggcatgtaagctgaatgtacgggatttttggtacccttgaacaagttgactcctgctgttttttgtcgaacagtggtgcttcttgatctgtaaaccatgttaacttcatctttatgcaatattgcggactaggactagcccctttaactcttcaaataaaaggtctacttgtgatctaatgttggag

SEQ ID NO: 130607 - DNA, 543 bp, Zea mays
  Clone ID: MRT4577_50586C.1
cctcccccccccccccccccccccccccctccacacccctgcacttattgttttttttttttttttttttttttgaaacaaaacacgaaaagggagttttttttggggaggggcctgtttttatacaggggaaacaaagccccccaaagggggggccccttaggagaaactgccggttgcccccagcacaatttttttgaacaggtcccaggaactggtcccgacaaccccccccatggtggggacatccatcccctgggggggggccgggggggatatgtttcccctttggatacctattcctttgcaatgcaaacctccggcagtctacggggggcccacatgagcccagggccccccaaaggcccccccccatttgcctgccggggaaagggggcatatggcctggcctggcctcatgcctaaggcctaggctttacctaaacacaggaggccgggcaaaaaaaaaggacgggccaacgttgccttgggttgggggggtttttccccggatcccaaaccgattgggggcccctggggaaa

SEQ ID NO: 130608 - DNA, 185 bp, Zea mays
  Clone ID: MRT4577_50587C.1
gcgcctgagtggtgagagactgccctcgaagaaaacatctgtcaagatgagcaacctgaatcctgagtggaatgaacacttcaggttcatagtcaaggatcctgatacccaagtccttgagcttcacatgtttgattgggaaaaggtttctagcagttaagatgcatgataaattgggcatgcaa

SEQ ID NO: 130609 - DNA, 119 bp, Zea mays
  unsure (1)..(119): unsure at all n locations
  Clone ID: MRT4577_50588C.1
cnatcatatncnccatnntnaatctgaaaactttgancgntcnctagaggntcccagatcggtcaattcctttgcctattgatcctgttccaaatttaaaagtagattnnatcctnatt

SEQ ID NO: 130610 - DNA, 340 bp, Zea mays
  Clone ID: MRT4577_50589C.1
tttctgctgtcggacaagcacgcggacgccgggcgcgccaagtaccggctgctcgacacggcgcgcacccacaagggcgctaccgacgagtgcttcaactgcgtgtaccagcgcgaggactaggtgggcaaggtgggcgtgtcggtggcgcgggagctcatggacggggccggcgacgcgcttaagaccaacattacgacgctgggccccctggtgctggccctgagtgagcagctcaagttcctaacgtgcgtcatgatgcgccgagtgttccgcgtcaagggcgtgcgcccatacataccggactttcggcgcgcgttcgagcacttttgcgtgtact

SEQ ID NO: 130611 - DNA, 615 bp, Zea mays
  unsure (1)..(615): unsure at all n locations
  Clone ID: MRT4577_5058C.1
gtccctccccctcccctctgcttgccgcgcttggattcagctccagccgcgctatccctcgcgcccggctgtagctcgccggatctccccgccccgagctcgccccaatggtgccggccgagtccttcccatctctctccctcacgttttcctctctctgccatggacgccggagttcttctactcggcctctagctgcctgcgcacgtgcccccctacgccgcgctctgctcgcggagctccctggtgccgcgcgcgcccctggctcggcccagcgcgccgttcctgttcgcttggccgcgcgcacttcctgctcagccgctcccttctctgctcgttcccatggcgtgctcccctgctcccatggtggtcgagttccctggtagctgcgcccaaccgagctctctctccgacggtcgtcctcacctcatctnctctctgacccctgctcagatttcgaccagccgagtcccattttccatggatgcgcgcgacgctcctctgttggccgcgccctgttccgccttgccctatgccatggcgatcggtcgcccagtctgtagctccctgctcggccatgccacgcgtcggcgctcttcctttgttgcgtcttgc

SEQ ID NO: 130612 - DNA, 715 bp, Zea mays
  Clone ID: MRT4577_50590C.1
gaaaaataatgctgcgcttttggaggacgcagaggagcaccacctcgtcgaacgcgttatccgtcgtggagatgaacgtgcacatggactgcgacggctgcgagaagcgagtcaggaaggccatgtcccggctccaaggagtgagctcggtggagatcgacatggaccggcagaaggtgacggtgacggggtacgtggaccggcgggaggtgctgcgcgcggcgcggcggaccggcagggcggcggagttctggccgtggccgtacgacggcgagtactacccgttcgcgatccagtacctggaggacaacacgtacatggccaccgacaggtactaccgccacggctacaacgaccccatgatcgggtcctacccgtgccacgccttcacgcatgtcatcgacgacgacgcgctcgccgtcttccacgtcgacaacgtccacgcctgcgccgtaatgtgatgcatgccccggagctaactggtcttcttctcgcaaaagagagagaccatcttaaacattatattatcagctcaagaggccgtacgttaacaaatcgctgatgtgaacaagcagctcaaataaaagtcctgctctaaacaccgcacaaaaaaaattggtactgtgtgatttttttttattacttgtgcaaaggttgtatgtgtgtccggtaccattcagcaaggaatctatagaggaatggacatcgatggacg

SEQ ID NO: 130613 - DNA, 2006 bp, Zea mays
  unsure (1)..(2006): unsure at all n locations
  Clone ID: MRT4577_50593C.1
tgggtacctcgaggccggccggggcttcactctgccctgcgccgccgccaacgctgcagccgcagttgccgcaggcgggaacttggacgtgctactcgcgactgctctcatctgttcccgcgtaggattcgttcacaatggcccgtgtgtatgtcggcaacttggatgcacgcgtgacttccggggaactcgaagatgagttccgtgtgtttggagttctgcgaagtgtttgggtcgcacgcaaaccacctggttttgcatttattgattttgacgacaggagggatgcagaggatgctattcgtgatctagatggtatgttagcagtgtcttttggttgaacttgtttgaagctttgcctggacacttcagttttatgaagagaaatccctgtgattatttgatcaggcgtgtatattaagagcttcttgcttctagatttgactttttttggtgaacgaagcaacactttgattgttctggatttgcaatttgttactctttactccttcactttcctcttatttttgtcgggttaactatacattggtgcatggtttctaanataggtaagaatggatggaaagttgaactatctcgtagcaccaatggtcgtggcagtcgtgatcggtatggtggatctgagtcgaagtgctatgaatgtggtgagactgggcactttgcacgtgaatgtcgtctgcgcattggctctggaggtctaggcagtggaagacgtcgcagtcgcagccgcagtcgcagtcgcagtcgcagcaggagcaggagcagaagccgcagccctagataccgcaggagtccaagctatagtagaaggagctatagccctcgttatcgctctccaaggcgccgtagtccttcgccagctcgcgcgcgcagctatagcaggtcaccatagtacaactgcaacgatgctgttatgcacaggtaatggtggcaggtactggtgtagcaggagctaggcctgaagcccgtgcctgatacttcttggtgtgagaacttagtccttggtttggctgtcaggaacaaatttggaactgtcgtcaactgcatgacttcagttcaggtttaaaaccttatctagcttaattgtgattgccttgattatgccattatagaacttaatatttggatgtattatgcgactaagacatattaccttttctctgttgaaaaggcatgttctgcttaaacgactcggccaactacggctctcagttagtcttcatggttttgttcctccattcttggcacgtccttatctgcaaacaaatgtcaacgttccattactagctgccttcgatgtttcatcatgaaattcttcaccgaagatgcaacttcatcacaaattagtaacatcctttcccctcatatagttgataaggtttgagtgtactgagcactaacaaatgcagctcgcgaaagtaagaccctttttcgtcatagaacaagacagctattttaattgcagcactcgtgtgaaaatatatctactctgcatggtggggattggggcgattgaagtgtgtggccttcagctgcacctagttgggcatcccaggaacctagtcaggctgactacagcaagaggcgcatcctttgactaaacatgtttgttttatttcttgtggtttgattcttcacttctgttcattgtgttctgccttcactgcaccctattggattggtagtggtcgaacaatgcttctgtctgtggtaagttattcttggtacaatggctcttctttacccctgatcagtgtatgttggactttctgatagagttagcaccaattgtagtataaatatgttcttttttctctggaaggtaattgtaattctatctgaatactccgatttgagatataatctgctcttgtcaaatggttttttaaagatcaaaaaagtttcaccaaaaaaaaaaaaaaaaaaaaaaaaaaaaaaaaaaaaaaaaaaaaaaaaaaaagtactctgcgttggttaccactgct

SEQ ID NO: 130614 - DNA, 302 bp, Zea mays
  unsure (1)..(302): unsure at all n locations
  Clone ID: MRT4577_50594C.1
accgcctcgcctagcctgcctcttccagcacgtgccaccgccatctccgctctgctctcgcaacggaaggacactgccggtcgcctgccacaggtgtcatgtcggagtgagttcttttggaagcnctgaancccgcccccaaccccgctgcgccgcctgcgccgctccccacaagacaccgcctccgacgagccactccactcccgcgtcgtcgaacgcgccccctcccccgagacccccccgccccccggtggcggcgggcagcagtcccaccacgtccccttgccccccagcccccaccc

SEQ ID NO: 130615 - DNA, 281 bp, Zea mays
  Clone ID: MRT4577_50595C.1
gtggttctctccttttgccatctttagtgaagctatgaaaggtaaggtacattggagtctactgtgctatactactgttgtgcttggccggtctatttttgttctatttgtttcacactccgatttgaaacaagtgaaatgttttttccttggaggagatggagccagatgtgaacttattatctttcttttttgtgcagagtcgagtgatcaagaccaagagcgttgagtacatgcccttcctcctgtcgctggtgagcttcctcaacggctgctgctgg

SEQ ID NO: 130616 - DNA, 730 bp, Zea mays
  Clone ID: MRT4577_50596C.1
gccggccgggcctggaagcccgcagcattaccacactctccccgccactcgcctcctctgagctgcctgcttgttcgagctcccacggctccagtgtccccgacacatcagccgctccctccactcgccttcctttttgacgttccaggatcatccatggcatccaaaccaagtagggaagactagcatcgaacccgctcgtcacaggatccaaccgcctaagaaacaaagcagccgtggcgacctcctagaggagtcaaccaggaacaagaaggcatcaagcatgttgccgtaggtgggagggggagggcaagggcgcaaaaatggcaacaaccatggccggcgatgggatgcggcggcggtgagcgcatggaggaggacgaggcggggacggcgtcgtcgtcgtcgtcgccgcctattgtgcagctgggctacgaccaggtcttgtccgtcctccgtctgctcccgcccgaggccgtgctgtccttcgccgccacctgccgcgttttccgggcctgggcctcctcggacgcgctctgggaggcgctgtgctgccgcgactggggctcccgcgccaccgctgcgctcgccgagcgccggcgcgaccgcggcggcggccttcaggcgccggggcggagggtctacgccgaggtcgccaggctcggcgcgctgtccgcgcgacgcgtccccgccaggggcgcctcaccgcggccccgcgcggcgcactcac

SEQ ID NO: 130617 - DNA, 265 bp, Zea mays
  Clone ID: MRT4577_50597C.1
aatgtgggaaaaaaagtcaaactggcttataattctaatttataacagatggatcaagatttaacatagaatgccaaattgacaccatgcacggaagtacctactgaaggacctggaagtgttttactgaaattacaaaacaccgtgtagctgttaacaccaaagacttggaccctctacgtcatattctacaggagggcaagggcccggaacagctgaaggcctattggcaccaaccgcacctggagaacggaacgatcgacta

SEQ ID NO: 130618 - DNA, 1309 bp, Zea mays
  unsure (1)..(1309): unsure at all n locations
  Clone ID: MRT4577_50598C.1
agaacacaggtgtcgtgaaaacaccgctaacctaaaccaaatgggaaaggagaagactcacatcaacatcgtcgtcattggacacgtagattcgggcaagtctaccactactggccatctgatctacaaatgtggtgggatcgacaaaagaactactcgaaaaatttgagaaggaggctgctgagatgggaaaaggctccttcaagtatgcctgggtcttggataaactgaaagctgaacgtgaacgtggtatcaccattgatatctccctgtggaaattcgagaccagcaagtattacgtgaccatcattgatgccccaggacacagagactttatcaaaaacatgattacaggcacatctcaggctgactgtgctgtcctgattgttgctgctggtgttggtgaatttgaagcaggtatctccaagaatgggcagacccgtgagcatgcccttctggcttacacactgggtgtaaaaaactanattgttggtgttaacaaaatggattgtactgaaccaccctacaggtccggaattcccgggtcgacccacgcgtccggcagcacctatggattccaccgaggctacatacagtcagaagagatacgaggaaatcgttaaggaagtcagcacctacattaagaaaattggctacaaccctgacacagtagcatttgtgccaatttctggttggaatggtgacaacatgctggagccaagtgctaatatgccttggttcaagggatggaaagtcacccgcaaagatggcagtgccagtggcaccacgctgctggaagctttggattgtatcctaccaccaactcgtccaactgacaagcctctgcgactgcccctccaggatgtctataaaattggaggcattggcactgtccctgtgggccgagtggagactggtgttctcaagcctggcatggtggttacctttgctccagtcaatgtaacaactgaagtcaagtctgttgaaatgcaccatgaagctttgagtgaagctcttcctggggacaatgtgggcttcaatgtaaagaacgtgtcggtcaaagatgttagacgaggcaatgttgctggtgacagcaaaaacgacccaccaatggaagcagctggcttcactgctcaggtgattatcctgaaccatccaggccaaatcagtgctggctacgctcctgttctggattgtcacacagcccacatagcatgcaagtttgctgagctaaaagaaagatcgatcgtcgntctggtaagagctggaagatgccccaagtcctgagtctgccatgctgcattgtgat

SEQ ID NO: 130619 - DNA, 470 bp, Zea mays
  unsure (1)..(470): unsure at all n locations
  Clone ID: MRT4577_50599C.1
gctgtgttggacactgttggctctgtttctctcctgttctgctggtggggacctggcagcgaatgggatggtatcgggtgatgaatatattgccgaatggcttagggaccaagaaccttcgtatcaaatcccaagcttctcatgcccccgccgcagcttgtcttaagcagctacaagatactgttgctacatgtatcaatgctgagggccggtacacactatatgatcttgaaatgtcatggcaaaccataagaaaggcattggaatgattgctcgtgtgngatgcgttcaacgttgcgtgacttaggaagccacattatcccatgtctgtgaaatggtactttctgacagtagtgccagacctgatgaattgcgcctccgagctaaaggcttagccactctatgaagaattgtccagggcgctagagccaaccctatctgagcggaaacatctcagacgaggaatctac

SEQ ID NO: 130620 - DNA, 523 bp, Zea mays
  unsure (1)..(523): unsure at all n locations
  Clone ID: MRT4577_5059C.1
cgggtcgaccagcgtcggaaccgtgatgagaagaaagatggcggaagggcgatggcccgcttcggatcgatctcggcacgacgtactcttgcgtcggtgtggacacgaccggtcggatcattgcaacgaccaggtaccgaccacgccctgacgtcgcttaccgactccgagcgcctatcggagatgcggcaagaaccagtcgccatgaaccccatcaacaccgctttgatgccaagcgttatcggcaggaggttcagtgatgcgtctgtccagagtgatatcaagtgggccttcaagtatttctgggcctgggagaaccatgatgtgtccaccagggtgaggagaacatttgcactgaagagatctctttggtctataagatgcggaattgtgaactaccttggtagcacacaaatgctgggtacagtccctgcctacttaatgactaagaggcaggccaaaagatgctgggggatgctggcttaatggctggatatcacgaccacagctgcagttcgnctat

SEQ ID NO: 130621 - DNA, 472 bp, Zea mays
  unsure (1)..(472): unsure at all n locations
  Clone ID: MRT4577_505C.1
cttgatgcctgcaggtcatactctacctcacattatctcaattagagctatatgagagaatgctatccaaaacttagtagatgatattggaaactccaccatgtctatgagtgcccaaatcggagtattaccctctatggcaagtaggagtggtaacctaaactactcgtgatgtgtacgtgcctacaagacattttcactttcacttgctcttttcactgactttactttcgtggttaccaggtatcttatgtgacaactaggatatatggtacacgatgcttaacataggatctatttatgcactctcacgacattgatctcatcatgactttactaaggacctggagaatccattggccacaagatccattaccctatattggacataaacttatgagtgaagaacctttagaggaacgttcgatgatcagggtctnaccgaaggcgcaaagtcttaatgtgtagacgc

SEQ ID NO: 130622 - DNA, 494 bp, Zea mays
  Clone ID: MRT4577_50600C.1
gcgtccgcccacgctgacgacattgctgatgacttcttcccgctctgcgacattgacggcgtgatcgtccacatgtacctcccgagggaccgctggactggctactcgcgcggattgtacttcgtcagggacaaggaccaggacgaggcacataaggtcgatggtagactcgatggcagattggtaatcatgaggcagatcatggtgcactgtgccaaggccggaccaaatgctgaacggattattatggggccaattatggagccagtggcaaggcccagaggtcgttctacaagacggaggccccgacaggagtatcgtgatgattatcaagatgactaccatgataggcattatcgaaagcgaagccgaaatcagtgcagacatggctactcccgtgacaggtactgccatcgggattaccggcatcgtagcctgagtcctagactgactactgctcgaagtagccgtagtcatagtcgcactcgcggtta

SEQ ID NO: 130623 - DNA, 1785 bp, Zea mays
  Clone ID: MRT4577_50601C.1
ctgtacgcctgcaggttccggtccggaattcccgggtcgacccacgcgtccggtttgccgtcaggacgcaggtgttgtgaaaaccaccgctaattcaaagcaaaaatgggaaaggaaaagactcacatcaacatcgtcgtaatcggacacgtagattccggcaagtccaccacaaccggccacctgatctacaaatgtggtggaatcgacaagcgaaccatcgaaaagtttgagaaggaggctgctgagatgggaaagggctccttcaagtacgcctgggtcttagacaaactgaaagctgagcgtgagcgtggtatcactattgacatctccctgtggaaattcgagaccagcaaatactatgtgaccatcattgatgccccaggacacagagacttcatcaaaaacatgattacaggcacatcccaggctgactgtgctgtcctgattgttgctgctggtgttggtgaatttgaagctggtatctccaagaacgggcagacccgcgagcatgctcttctggcttacaccctgggtgtgaaacagctgattgttggtgtcaacaaaatggattccaccgagccaccatacagtcagaagagatacgaggaaatcgttaaggaagtcagcacctacattaagaaaattggctacaaccctgacacagtagcatttgtgccaatttctggttggaaatggagaaacatgctggagccaagtgctaatatgcccttggttcaagggatggaaagtcacccgcaaggatggcagtgccagtggcaccacgctgcttgaggctctggactgcatcctaccaccaactcgtccaactgacaagcccttgcgcctgcctctccaatgtctacaaaattggtggtattggtactgttcctgttggccgagtggagactggtgttctcaaacccggtatggtggtcacctttgctccagtcaacgttacaacggaagtaaaatcggtcctggtgctccctgaccctctgaggggagctcttcctggggacaatgtgggcttcaatgtcaagaatgtgtctgtcaaggatgttcgtcgtggcaacgttgctggtgacagcaaaaatgacccaccaatggaagcagctggcttcactgctcaggtgattatcctgaaccatccaggccaaataagcgccggctatgcccctgtattggattgccacacggctcacattgcatgcaagtttgctgagctgaaggaaaagattgatcgccgttctggtaaaaagctggaagatggccctaaattcttgaagtctggtgatgctgccattgttgatatggttcctggcaagcctatgtgtgttgagagcttctcagactatccacctttgggtcgctttgctgttcgtgatatgaggcagacagttgcggtgggtgtcatcaaagcagtggacaagaaggctgctggagctggtaaggtcaccaagtctgcccagaaagctcagaaggctaaatgaatattatccctaatacctgccaccccactcttaatcagtggtggaagaacggtctcagaactgtttgtttcaattggccatttaagtttagtagtaaaagactggttaatgataacaatgcatcgtaaaaccttcagaaggaaaggagaatgttttgtggaccactttggttttcttttttgcgtgtggcagttttaagttattagtttttaaaatcagtactttttaatggaaacaacttgaccaaaaatttgtcacagaattttgagacccattaaaaaagtttaatgag

SEQ ID NO: 130624 - DNA, 187 bp, Zea mays
  Clone ID: MRT4577_50602C.1
aagattttgcgatatgagattgatggaaaagctgttttgcaaggatgagtggggggaacctggacaacggccgggcatactgctggaggggggtttaactattatttcaccattctaaacaacatttgccgtacagaaacccatgtaacgccgtgaagaacttcccttggtgaaggcaccataactg

SEQ ID NO: 130625 - DNA, 406 bp, Zea mays
  Clone ID: MRT4577_50603C.1
cagtcagcaccacccctcctgcccctatgcgctggcgggccgagcgccgcgagcgagctgggccgcgggcggaggaggagttgaggctgaccgaccccgcggccggcggcgacgagcggacgcagatttggcagccgtgcgcggaatgcccgcggaaggaggggagagagggagggcgcacgcgcagctgatctaagctgctccctaccggttcgcgggctgcggtgcggctgctgacgcttagccagcgcgatggccagcggcggctcctacaggcacagctcgtacatggctccgaggctgcgcggcacgctggtggccgcggcgcacgtgtcgcgccacgaggaccgggacgacactagtcccacacctgacgtggaggcagttcggcctgatccggtcctgc

SEQ ID NO: 130626 - DNA, 260 bp, Zea mays
  Clone ID: MRT4577_50604C.1
tcggctcctacctatgctccctttttactatcccctcctttcattagcaggagctaacacagcagcagtctccccttgaataatttgtgcagttgcacacacgagcaatatactagttactgttttattcagcacccatgtatttcgatatcattttcctttacttatgtaacacgagggaactactcaggagctgttaaactgctgtggaagctggtttaacagatcgacgaatttttggtcgcaaacaaaaataactt

SEQ ID NO: 130627 - DNA, 311 bp, Zea mays
  Clone ID: MRT4577_50605C.1
caaaaatgaggcatgcgaaaatatatagggaatagcgtaccaatatataattaaggggacgatagctgaagaacaacctaaaatatcttaaaatcaaatgggtatggcacgaagtgtgggagggggaaaaatgactactaattggggcatcgaaggggtgggagcagaaacgcagggggcgctagcggtggtgggagaaggagaacgagcaggccctggggcccggaaaggatttctcggggaaaggtgacaaggggcgaaccagaacgacgggggggacatggagggcgcctagcgggggggataacctt

SEQ ID NO: 130628 - DNA, 470 bp, Zea mays
  Clone ID: MRT4577_50606C.1
tagaacgtgaagctggcagcaagggcctgatggcggagctgggtggagcagtccgctgccgctgccgctgccacgaccccgaccgaggtagtgtcgtcatcgtcctcctctgccaggatatggcggcagcggcactcctcgctgcagaacgccctctcgcctctgcaagcacgccattgtcagtacgtactcagtagtagtcagcagtagtcacaagcgaaacctgcagctatatatattgtacggccggcggccgtcgcgcgcgctaaagacgacggacctgtacatgtatatgtccctgccgtcggcgagctccccgtggcagaagaagcaccgctgcaggaacgggcaggcggtcgtcagcgacaccgtcggcgccggtgcacgggaagaagaaaaaaagcggccgaaagaagcggcggcggagctggcgcccttctggacgtcgacgacgtcgttcttggcggtgg

SEQ ID NO: 130629 - DNA, 816 bp, Zea mays
  Clone ID: MRT4577_50607C.1
cattgggtacctcgaggccggccggggcgactcccacgcccccattacatcgcttcttacgagctcgattcgacgccgccggtgcagagcccacgccaggtgtggggtgatcggcctcgagcgacgccgtcgataagcactcagggtccagctacaatgtcgccgtcatcggctttggcgcaggcgtctgtccgctcactttgcgcccgtgggagtagagcacggcagagtggtggcaacgtgggttcacgagtcctctatacaccctttacctcctccacccctctccaccatccactcctacgaccttcatcgccggcccgacccgcacatttttcatcgcaccgcccacacacacgcaccatcatgtccaaggcaccaggcaaggtgttgaacattggcaacatcaacccccacgtcaaggcagcccagtatgccgtgcgtggtgaactagccgtcaagtcggaagagtaccgcgccaagttggcaaagggtgagggcagtgacttgccctttgacactgtcattgcagcaaacattggcaaccctcaacaactagaccagaagcccatcacattcttcaggcaggtcgccagtatactcgagaacccgggtctgctagagcatgaggatgtcctactcaacagcctcggatacaagtcagatgttgtcgaccgcgcgaggaagctcttgaaagaggtcaagagtgtaggcgcatacagccaaagccagggtgctcccggcatcagacagagcgtggcagagtacattgagcgtcgagatggctacccagcccagtttgaggacatctacctc

SEQ ID NO: 130630 - DNA, 451 bp, Zea mays
  Clone ID: MRT4577_50608C.1
ctctgtcctcctcttcctactgtaaaccacctcgtccctatccgcggcaaccgttcaccgcgccgcgaggcctgctgatccgaccgaccttccaccgtcatggctcccctgcgccgcgcgtctcgcctccttcgatcagccgtctgccggctgaggtctccagcgccggctcgggccttctccagcgccgcggcgaccgagacgggtgccgtgatcgccgccgctgccgtggcggtggccagctccgggctcgggctgtggctgaaaccgccgtcgcttgccgactccggcgaggcgcccggcgaccagatctcggtcgcctgtgccggcgccacggaagcgcgggaagagaaggggtggttcctgttcgcaaactcatttcgtagaagggtcttcttcaactacgagaagaggatacggcttctcagtcctcctgagaagatttttgagt

SEQ ID NO: 130631 - DNA, 725 bp, Zea mays
  unsure (1)..(725): unsure at all n locations
  Clone ID: MRT4577_50609C.1
tgggtacctcgaggccggccgggccggaactagtaggcctgctcttggagcagcaccagctgcgcccaccagcagcagcatcaagagcaccacctcaaatcacaagcaaggccactcgtcccctcctcgccaccgccaagaacgacgtcgtcgacaagggcagctccgccgccgcttccttcagccgctcttcctcttcttcttcttcccgtgcaccggcgccgacggtgtcgccgacgaccgcctgccctttcctgcaccggtgcttcttctgccacggggagctcgccgacggcagggacatatacatgtacagaggcgagagggcgttctgccagcgaggagtgccgctgccgccatatcatggcagaggaggacgatgacgacactacctcggtcgggatcgtggcagcggcagcggcagcggcagcggactgctccacccagctccgccatcaggcccttgctgccagcttcacgttctgaggtggtggccggccgagcgggcgggcgggtagaccaccgatcgaggactggtacggtgggcctgcctgccaccggcggcttgccgtggaggaagcaacgatgttcatcaccttgagtcagataccttgtccaaacacaccaaagggatggggtgtgtcacgngactcacggctgatataatcagattgggcttcaatttcaacgtttaaaataatgggttaagtttcttctttttttgt

SEQ ID NO: 130632 - DNA, 622 bp, Zea mays
  Clone ID: MRT4577_5060C.1
agcggccggcccgacggacactgatggaatcaaatacgcaggatataccacgaaaaagtttacgtttatgtggaaaaaaatgcactaatacattttaattgaaaaatagcgatttactaagacagtatttacgtcattactgcgaactcttgtttggtgttatacgaggtagctgttagatagccattcaacgtaccccaaaaggccacatgtaacgcggacctattctggaacataccatgcattacagacgtatgaggcattaccctacaactgtgattatattccacttctactttttaaaataaaggggattttgaaagaggtatttcttttattttcacactatctttcttttgaatccaaatttacgttccactagaaggatataaaggctatgagaatgggaaaagaaaaatactatattttattttaatgagatccccttttgagttccccttttttgcaattatcttattatcaattccattcatttattttatagaatacttttttattctatatctataaaaaatctttattttgtagactaaaaaatacaatagtccttattccttatagtacatatacttagttatatcataacaatcttaagatatat

SEQ ID NO: 130633 - DNA, 984 bp, Zea mays
  Clone ID: MRT4577_50610C.1
ggtagtcacaccaaaccccggacgtgaaacggatcaaacacctacacatatcaccaccaacacacacacaggcaaaacacatcaagctcaacacacatggctgacaatgccggtctagtaggcctgctcttggagcagcaccagctgcgcccaccagcagcagcatcaagagcaccacctcaaatcacaagcaaggccactcgtcccctcctcgccaccgccaagaacgacgtcgtcgacaagggcagctccgccgccgcttccttcagccgctcttcctcttcttcttcttcccgtgcaccggcgccgacggtgtcgccgacgaccgcctgccctttcctgcaccggtgcttcttctgccacggggagctcgccgacggcagggacatatacatgtacagaggcgagagggcgttctgcagcgaggagtgccgctgccgccatatcctggcagaggaggacgatgacgacactactacctcggtcggggtcgtggcagcggcagcggactgctccacccagctccgccatcaggcccttgctgccagcttcacgttctgaggtggtgtccggccgagcgggcgggcgggtagaccaccgaggactcgtacggtgggcctgccaccggcggcttgccgtggaggaagcaacgatgtccatcaccttgagtcagatagcttgtccaaacacagatgggtgtcacggactcatgcacggctgatataatctgattgggcttcaatttcaacgtttcaaaatgatgggttaagtttcttgttttttgttggaggtgaatgtttttttttttgcaaattgtcttcttatacagtatattattctgtcgaaactacctttttgttttcagtgctctatgattatctcttgttaagtaagttggatagtaagtttgtacatttctatcctctttaagcttttgtatttatataattatatcatataccccggtggcatgcttgaccacac

SEQ ID NO: 130634 - DNA, 452 bp, Zea mays
  Clone ID: MRT4577_50611C.1
cagccgaaaaaaagctagccttgggccacatgacccgggggcggccacaataaacggccaatattgaaggaataaaggtcgggggccatcgccggacgggaaatgaaatcagagcaaacgggtaagactggctgctttcaagccatgatcttggccgccctcacataagggctgcccacaaccttcccgacattcaaaagggtttcgagaggggcagggaaaatttcctcggccttaaaatcctcaaagataaggaggcacccagccccttgatctagggccccagcaaattttttgtcaacgatcatttgcgacagctttttctaaacaggggcaatcggcaattcaatcatctccgctatatgggcaatccccacccttgagtggggctcaatcaacctgcaaagattctgctccagcagggtttcatccaggaaaaaaaagatccctgg

SEQ ID NO: 130635 - DNA, 366 bp, Zea mays
  Clone ID: MRT4577_50612C.1
gggtgtgcggcatctgcttcgacgcgtttcccgcgggcgggacgcggtcggccgggtgcgccgcccactactactgcgacggctgctggtgcggctacgtcgcggcggcggtaggcgacggcgcgcgctgcctggcgctgcggtgccccgacccgtcgtgcgcggcggccgtcgtccgggagctggtcgacgaggtggcgcgcgacgacgaccgggcccggtacgcgcggttctggctccgctcctacgtggaggagagcgggggccggatcaggtggtgcggcggcgccggctgcacccggtccgtggagctcctcggcggcttggaagcggaggccgtggcctccgcggtcgacgtcgtctgcg

SEQ ID NO: 130636 - DNA, 537 bp, Zea mays
  Clone ID: MRT4577_50613C.1
aaaaaaaaaaaaaaaaaaaaaaaaaacaaaaaaaaaaaaaaaaaaaaaaaaaaaaaaaaaaaaaaaaaaaaaaaaaaaaaaaaaaagtttttacttgcccgtttggcctttccggggggccctttttgggggtttctttctccttggtggcttttcgtggttgccttttggggccccatttgggcgtttcctttttccttttccatttctttgttcacatttttctgcccttttttttggaaaaaccctttttgtaaccccctttatttcccttcctttacttccctttttaaacatctgtttttagaccaatggggtcctaccaaatggcctttcccaaaagttccttcccctttttggccattggtcactgccttatggcgccccctttttcccggcccttttgggggttcccttcaggtggtcccttccatttgcccccctcctttggcccgttccttaggcttttttcctttccttttttcccttttttttcgggtttccccggcgggttttccctggggggttttttttggg

SEQ ID NO: 130637 - DNA, 379 bp, Zea mays
  Clone ID: MRT4577_50614C.1
aaaccgggggcagcttctcattggcgggaaaaatcttcaacatctaaatccgtacacaacaattgccaaccctgtgactgtgaagcaagcccatttcttccagtccccgcaactttagattccactctacactctttccagcatgcgaacactgtgtacgcaatggcccttttactcttctcctgcccccactggttggccttctttgaaccatgggttaagacccccttccaaatgggacacgttggtgtttcccttttggaccaacaagtccgcatgttttatggacccatgattgcttcccctcagggaaattttgcgtttggttcagggtccctcctgtagagcattccacaattttcttatgatctttcccaac

SEQ ID NO: 130638 - DNA, 451 bp, Zea mays
  unsure (1)..(451): unsure at all n locations
  Clone ID: MRT4577_50615C.1
ttcccgggttcgaacccacgccgtcacgcagtatcangtcaaagtcggcatgtggcgtagaagagggtatcgtctgaaccagaacccagcatgaagaatgggtcaggngtgtcgtcgtcgtgtgccctggtctctgtnncagctgccatgcgcctctgcaatggcagatgtcacctagcccctgcgcggtgtgctgcatgggcttgtaccgggcgctggctgccggccctgacgaacgatgtatgtggctgccgtgcgggtctgtatcccctacgcggagtatcctgagggcagccgcagtgcatgcccgctggcggctggctgccctatctacgccgggtggtgggcagacgagcgccatgtaccagcccgctccggcaacagtgctgccagcagcagatgaggatgatggacgtgcagtccgtcgcgcagcagctgcagatgatgatgc

SEQ ID NO: 130639 - DNA, 263 bp, Zea mays
  Clone ID: MRT4577_50616C.1
atcacacgtacgctcgcggttctgaaatacaccactgacgcagactgtctgaggtgggcaaccgcttcatgtgccagctgcttgggctagctaacgcaggtcggtcgcagaagcggccgtactctgtgtccatgatggagctcagcgaccccattgtgctgtacaacttgcccttcgacgtctacgagcacacgctgtacgtgcacgccaaccagcacatgatcaagccatgcgaggcgatccatgacgattactacatgatc

SEQ ID NO: 130640 - DNA, 419 bp, Zea mays
  Clone ID: MRT4577_50617C.1
tggcttggaacctttgggctgatttatgtgcttgttgaggttattgttgatggttcgtctactaatatgccttgtggttctgagggtgctcctgctgatggtcatgtggtggtgtctggaaggaagatgatggtgatgcgccgggttgctggtttgatgcgtgttcttcttcttggcggttcggatgtgggtgtgatggttgtttgtggtaattgtgttgatgctgatgctggttcttcttcgctgcggtctgatgtttgtttggtggtgcttgcgtcgcatgctagtcctggtagttctgtgtagtcgctgtcgaagtagattgctgagtctgtttggggttctgaggtgcttgggtggttgcctgctcgggttactaaggaggttaagcctagtgttgatgcgttggtgccgtcgtc

SEQ ID NO: 130641 - DNA, 136 bp, Zea mays
  Clone ID: MRT4577_50618C.1
ttttccttatcgaggggtctacatgaacatgaatatcccggacggacttgcttaatgcacaagccggacctttgccagatattggtccacgagaaattcaggttcagccggtcaggaaataggagaagggggccct

SEQ ID NO: 130642 - DNA, 387 bp, Zea mays
  Clone ID: MRT4577_50619C.1
caagcatccaagtgtataagcggtaccgggaattggctgcagtctacgaatagagtgcgccataccaaggaatggctggcaaagtacacatgatctggatcaccatgattgcgtctgatggtgttcacctggttgtacataccaagcgatacattcaggtcgctggtaactgatggctgagtagcatgtagtgaacgtgcgtatacaccaatatcacgtctgtcggacgatggttcgtattggctgtagcgttagaaggatccgttgcagtgatggaagcactaaagcatactatggccgtgctgccagaggaacacgtgcagaatcactgttatgaagctggcttctgtgacatctgctcctgcgactcctgcgcctgattcaatg

SEQ ID NO: 130643 - DNA, 418 bp, Zea mays
  Clone ID: MRT4577_5061C.1
gaaatgggcacgtttccccttcgtatttctgtccatagggcaatggccacttgctcatgcaaccaaacccaacttaaccggattgacctagctatgtacacgatcataaggaagggcattgaacacttgaacaattggtggccttcattctcacaccaaaacttggctcctgggggggaaccgtggccgaaatttttatgcctgtttggagaggtttcgttttcaagtctgacgagctctggttaatattcttgggctaaaagttgttacccattttgttgatcgtaatgacaaggacacagacgatgtccgccaccaattcggtgaatagggcaatggcgggcttgacgcggtccatgtaaaaggggcgcgaaatcttccaaatctcctttgtgtggttcacttcttaacccatttt

SEQ ID NO: 130644 - DNA, 534 bp, Zea mays
  unsure (1)..(534): unsure at all n locations
  Clone ID: MRT4577_50620C.1
ttctatgcgtgatatgatgccaaagttgggatgtgatccctacaagattaatccaacgcaacaaagaaaggtttgcttttcttaaatgggcatccaatgctttccacaacatgcaggttttccctcctggttcgggcactgtacaccaggtaaatcttgagtatcttgcccgagttgtcttcaacgaagatggcattctttacttcgacagcgtggttggcacagactcacacaccactatgattaatagtcttggagttgctgggtggggagtaggcggtattgaagcagtcgttgcaatgcttggccagccaatgggcatggttttgcctggtgtggttggattcaaattgagtgggaagttacgggatggtgtcactactactgacattgttcttaccatgacccaaatgctaaggaagcacggtgctattggcaaattcgttgaattctatggtgttggtgtgggcgagctatctttgcctgctagggccacaattgccacatgtctncagaattggagctaccatgggc

SEQ ID NO: 130645 - DNA, 436 bp, Zea mays
  Clone ID: MRT4577_50621C.1
gcacgactctaaagacacatcgtggaaccaagtactgcctttggatccttggaaatggaaccactttactggctagcaattcaatatgggctgatttagtccgtgattcaaaaaggcgcagatgtttctttgatgcttttaaggataaggacttagcagaagtagtcatgtttgcaactaagcctgagcaatggaatcgaagagaacaggtccgtcctggtggtgccatcaggagccttctaatctcgttcgagtgctgctgccctgaaaccggtttctaaaagatcctggagtgagcaatataggatgagtgaagtaataccatagtgtgctgccctgaaaccggtttctaaaagatcctggagtgagcaatataggatgagtgaagtaataccatagtgtgcttgaaagatatacttgtttggattttctggct

SEQ ID NO: 130646 - DNA, 2254 bp, Zea mays
  Clone ID: MRT4577_50622C.1
cgggctcgaaaaaagacagggcgagatcacttgttctttgtgttgaggcctccatcatctatctcctctcctctcctctctcgtcgtgctggccgaccggcgacgacctatagctcctgccgcctcacgtcgagcgcgccatggccgccaactcaacagctaccaagcatgctttcaagcgtatattgacgagcctgattaagcctggcggtggtgaatacggcaagttcttcagccttccggcactaaatgatccaaggatcgataagcttccctactctatacgtgttctcctggaatcagctatccgccattgtgataacttccaagttacagagagtgatgtcgagaaaatcattgattgggagaacacatctcccaagctggctgagatacctttcaagccagcgagatgcattctaatggacaacactggagtcccagctgttgtagaccttgcagctatgcgtgatatgatgccaaagttgggttgtgatccctacaagatcaatccattgattcccgtggatgctgttattgaccatgcagtgcgagtggatgtagcagggacctatgatgcattggatagaaacgaggagttggagttccaacgcaacaaagaaaggtttgcttttcttaaatgggcatccaatgctttccacaacatgcaggttttccctcctggttcaggcactgtacaccaggtaaaccttgagtatcttgcccgagttgtcttcaacgaagatggcattctttacttcgacagcgtggttggcacagactcacacaccactatgattaatagtcttggagttgctggttggggagtaggcggtattgaagcagtcgttgcaatgcttggccagccaatgggcatggttttgcctggtgtggttggattcaaattgagtgggaagttacgggatggtgtcactactactgacattgttcttaccatgacccaaatgctaaggaagcacggtgctattggcaaattcgttgaattctatggtgttggtgtgggcgagctatctttgcctgctagggccacaattgccaacatgtctccagaatatggagctaccatgggcttcttcccggtagaccaagtagcattggactatctcaaactgacaggccgaagcgatgaaactgtgtcgatgattgaagcatacctgcgagctaacaaaatgtttgtggacgagcatgagcctgagacggaacgcgttttctcttcacatctggagctggaccttagtgaggtggagccttgcgtttcaggccccaaaaggcctcatgatcgtgtccctttgaaggaaatgaagtcagactggcatgcttgcctggacaacgaagttggcttcaagggctatgcagtgccaaaggaacaacaaggcaaagttgtgaaatttgacttccatggaaggccagctgaaataaagcatggcagtgttgttcttgcagcaatatgtagctccacaaacacatcaaatcccagtgtcatgattggtgctggccttgtggcaaagaaagcctgcgaattgggccttgaggtgaagccatgggtaaagacaagccttacccctggatctgtggttgctaccgagtacttgaaacatagtggccttcaagattatctgaaccagcaagggttccatgtcgctgcgcatggttgcgccacttgtgtgggcaactccggtgacctggatggatctgtatcagctgctatcacagaaaatgatatggttgctgctgcggttctgtcggccaaccgaaacttcgaggggcgtgtgaaccctctcactcgggctaactaccttgcctcgccgcctctggttgttgcctatgctcttgccggcactgttgacattgactttgagaaagagcccattggagttggaaagggtgggaatgaagttttcttgagggacatatggccttcaaaccaaaagattgatgaggttgtggagtccagcgtgcagactcacttgttaattcaagaaggtgtacgactccatcatggaactcaaattttggtggttgcactagtgtggagacttgaattcatgtatacacttagttagactcaacgttagtgtaaacagttgatgaccaagttttttaattagtattttagtttggatgtatagtacccttatgtatgagttatttgacaatgcttatttatgagattgaatgccaaaaaaaaaaaaaaaaaaaaaaaaaaaaaaaaaaaagaaaaaactcgaggggg

SEQ ID NO: 130647 - DNA, 2576 bp, Zea mays
  Clone ID: MRT4577_50623C.1
gggaaacattaagattggctttcattgacaataataaaggcagtagaataatctcaactacccgtaaatctgaagtcactagtggtaacaaggtttacaagccaaaaccactttcagatgataactccaaacgattattttatacgaggatatttggtggagaagacaaatgccctgacaatgaagtggatgaggtatctaataaaattctaaggaaatgtggaggaataccactagctatcatcacaatggctagtttattggtgggtaagtcatggggacaatggtttgaggtctgcaactctattggttttggcgataaagatattgagcaagtagacaaaactatgtcaatattgtctcttagctactatgatcttccctgtcatctaaggacttgcttattatatctaagttcattcccagaggattacattattgataagaattctttgatatggaagtggatagctgaaaattttgtccataagaaaccaggagtttggttatttgaggttggagagggatacttcaatgatcttgtcaacagaagcatgatccaggcagtggcatcaaaagacagcagtataatagatggttgccgcgtgcatgatatggtgcttgatctcctccgttctttggcacgcgaagaaaacttcgtgactgtcttatataatgatgaggacatgttgtcagaaataagcagcacgcgtaggttagcccaccaaaagagtacaatggatgctcatctgcacaattataagcagggcatgcaacatttgaggtcattaacagtctacaggtgtggtgctgataaggagctctcgtttcttctgagctttaagctcttgcgagtcctagatttagagaatgtatatactacgagctggcacaatgctaggcatattgggaatctaattcatctgaggtaccttgggttaaaacgcacatatatgcctgagctaccagaagaaataggagctctgaagtttctgcagacactggacctggtggagaatttcttcatggaggaactgccatcgagcatagggcagctaacacagttggtgtgcctacgtgcttcagggttgataacaagcatgccccgtggggtaatcaaaacgctcacggccctggaggagttggcagtacaatgtcaattcaacgagcgtttctgcaggtaccaagggcaattcaaggaactaggcagcctgagtgaacttagggtgctaaagattaaggtcattagcacgatggaacagagcatactgccagatcttatgcaatctctaggaaatctccataagatccagagtctaaaactggagagtcatcctggttgcggtcgtgccgacaatgcaatgtttgatgcaatggcgctaccgggacatctcagacatttgcttgtgtcagagtactttgtccatttgtacaggctaccgtcgtgcattaatcccctatgccttgttaaactctcccacctggaattatatgtgatcgatatggacgagcatagtatgcaaatcctcggggagttggccgagctccgccatcttgtgctgtcaacgagatccacagtaagagttaataacgttgccgctgatggtttcttccacaagttgagatcctgcaagttttatacctcgatggtcctgtttgtgctcaacgaggactcgagtgtctcgtttaccctgtggaacgggacagatgatctagtgctgagctatggaaagaaggatggtgagtgtccaagtgcgccggccgtcatgccaaacctagaagagcttctgtttagcgcccagccgaagtggtccctgatgaaatgccaaggtagccatggcaacctcggcctggagcacctccgttcgcttcagaaagtcacagcggtgatcagctgcgaactgtatatgtttgaggcggagaagatggaagcagagctcggcatcagctgcgaccggtatttcgttgaggcgtgggtgatggacgcggaggatgggctgagagatgcgatcggtgttcatcccaaccaccctactcttgttctcggtcgcaagaatgaaggtgtcctcgcaagtgatgtgtcggacgatactgatgctgattcagccacaagaagaacatgagggtgagggctcttctgttcacctaaacgcgtgtaaacagccgactacacgcgttcaaacactaaacgggagtggctcctggataaagaccttctctaatagcgaaagtgtacgcggcgtaaaagagcaacccgaaggtgataggagtaagcgctgaagctattgccagagaggttcggcttgatatggtaacaaagaccaaggacaataccaacttaaagggtgaaaaagaccacttattccgtgataatttatattacaattacgagtaaatatcaagggcatgaatgtaattttgtttgggctgtgtcccgtgcctataaatatatgaacagtagtaccgtattgttcaggctggattgtaatcactcccacgtcattctcgctcttacaccttttggcaagccgaaagtacaattataatacaactattggcaatgtttattcatgctc

SEQ ID NO: 130648 - DNA, 335 bp, Zea mays
  Clone ID: MRT4577_50624C.1
gacaggccctgagaccctgtcagggatgtccggacgcacacgcgcgaaggcgattatacgcctctgtcccgttacaccgaaaaactttggtgaccacacggcgatccggcgcgttgagttcaccacttattctagtcagcacccgcttatgctttcttgcttgacccctatgagagtcgtgtgcccacaacaaggcgtaataatgggccttttggggccttgtttttctgtggtggagtgcatgacgaaagaggaactctttgtccccctcctctctctttgggaacaactgtaccgcgatgtttgcctcacggggacgaaaaaagaactggtgc

SEQ ID NO: 130649 - DNA, 171 bp, Zea mays
  Clone ID: MRT4577_50625C.1
cacggacccttggggcgctaactccctaaccttaatctttttctttctctatcaaataccccttttgctatctattattcttacttacaagcgttcattcataaatcatcacactttatcttcattccacttacttttcaaccaatctcgattaccaattctgtgaatcaa

SEQ ID NO: 130650 - DNA, 299 bp, Zea mays
  Clone ID: MRT4577_50626C.1
agaattacggacaccattcttaaaagtaaggattaagggacaaggtattacgaacaaagttgctggctgtgtacgcacgggtagaatatggcaatgcattaggttccagtggagggagcctcagacctaacgaaagacaagagctcatttgccaagggggtaatcataaaccgaacaaaacgatagatgacgaataacatgaagccaagcgtgattaaaaatgcgacggacggggtcaggaagttttcgtacgggtcaacctaaatgcacgtgatctatacggatgggtggcggttgat

SEQ ID NO: 130651 - DNA, 714 bp, Zea mays
  unsure (1)..(714): unsure at all n locations
  Clone ID: MRT4577_50628C.1
tgtgcaggcgctcgatggcggccggtttccccatggcttatcatctgcgcctctactttcttctctctctgctcctccggctccgcctgatccatccaagacagggatcgccatgctcagactcggaggagcaccacttacgaatcgaaggacgacgctgaggcgcccaagacctacccgcataaggctgccaccgtccggaagaacggcttcatcgtcatcaagaaccgcccctgcaaggatgtggaggcttctacctccaagactggtatagcatggccacatcaaatgccactttggcgccatagacatattcaatgggaaagagattgaagatattgttccttcatcacacaactgtgacattccgcatgtgaaccgtactgagtatcaactgattgatatttctgaggatggatttgcgagccttcttacttcatatgggaacactgaggatgatcttagactcccaactgatgagactcttgtggcccagattaaggaagggttcgaaagcgtgaaggatcttggtgagactgtccagtctgcgatgggggaggaacagatctgcgcgatgaaggatggtggccccaagtaacttccttggctttgtagacggaaccctactgtatctcaacttaaatcggaaaagaagtgtatcaccaaaggattgctaccgagacattcacctggttgcagctggtttntgctata

SEQ ID NO: 130652 - DNA, 282 bp, Zea mays
  Clone ID: MRT4577_50629C.1
gcttcctactgtcacagcctcgcataagcgagagtggggaccatatggattatcgtatacacaaaagcgacacctgaccgtcaggagaaggtcatacgctatcgctcaggcggctaggggaaaacaaacaaattaatcgccggatcacaaccggtcaaagaaatctcactgaagctcaccaccgccaacccactggaagtgagcaaccctgccacgctcgtacaaaaagacgttagaacctccaggactggcccacagcgtccggccttccctggagagcta

SEQ ID NO: 130653 - DNA, 532 bp, Zea mays
  Clone ID: MRT4577_5062C.1
ccacgcttgcacaccgttacaggggaacagtcctaataccagtaatcatgatatatacaggacatgggcatgtggtgcaatgtgtaattgttacatgcttgtgtttttcagttctactacttatcggcttttttccttggggggtttttcaacgaacacaggctttggggcattattttctttttcttttttgagattttatcaatgtttaagcaagcacagcagtgtggataggcaacgaacatttgcgcccccatgtcgtttttttggctcgtcgggaagccggcctgatcaggccagcgcgttggccaaatggcgcgagaacgggaacagccaaacctgtatgagatgcgtgccttttttttcggacccgaacacccattcctgtgcgcgcctgtggaccaagtcgaacgccagtagcttccacggtgaccacaggtacaccagctcccgggcggggtgggaacgccttgaacaggaacgggatgggttgggacgccgaggcgccggggtacaactttgctgaccccga

SEQ ID NO: 130654 - DNA, 677 bp, Zea mays
  Clone ID: MRT4577_50632C.1
aatcgctttcatctgctgctctacatttcttctctctctgctcctccgcctccggctgatccatccaagacagggatcgccatgtcggactcggaggaccaccacttccaatcgaaggacgacgctggggcgtccaagacctacccgcagcaggctggcactgtccgtaagaacggcttcatcgtcatcaagaaccgtccctgcaggttgtggagggttctacctccaagactgataagcatgggcacgccaaatgccactttgtcgccatagacatattcaatgtgaaaaagcttgaacatattgttccttcatcacacaactgtgacattccgcatgtgaaccgcactgagcatcatgtgattgatatttctgaggatggatttgtgaggcttcttacttcagatgacaacgctaaggatgatgttaaactcccaactgatgagactcttgtggaccacattaaggaagggttctaaagcgtgaaggatcttggtgtgactgtgcagtctgcgatgatgaagggagacatctggacgtggaagggtgttgtccccacctgcttccttgactttggagaccgaaccctactgtatctcaacttatatccgagaagaagagtgtcaccaaaggattgctaccgagacattcacctgccttgagctggattttgctat

SEQ ID NO: 130655 - DNA, 211 bp, Zea mays
  Clone ID: MRT4577_50633C.1
tcatgtagtgtagtggtatgcctctcttaccggagactgtagatgccaagttcgaatcccttgcttttatatagttttaaaaaaaaaaattttaaaaaccctacccgactccgccgccgcccgccgctgcggctcagcgcatagcccgccgcgacctcatcgatcaccttcaactgttaaacatggcggagggtggaccccagttagccgt

SEQ ID NO: 130656 - DNA, 687 bp, Zea mays
  Clone ID: MRT4577_50634C.1
gtgcgtgctgtggatcgctcgcgcggctttctcaattttatctctgcgctctactttcttctctctctgttcctccggctccgcctgatccatcctagacaggaatcgtcatgtcggactcggaggagcaccacttcgaatcgaaggccgacgctggcgcgtccgatacctacccgcagcatgctgcgaccggccggaataacggattcatcttcttcaagaaccgtccctgcaagggtgtgcaggtttctacctccaaccactggtaagcatggatcacgccaaatgccactttggcgccataaacatattcagtgtgaaaaagcttggagatattgctccttcatcacactactgtgacattccgtatgtgaaccggactgagtatcaactgattgatatttctgaggatgtatctgcgagccttcttacttcatatggcaagactaatgatgatcttagactcccgactgatgacactcttgaggtccagattaacgaatggttctaaagcgcgaaggatcttgttgtgactgtcccgtctgcgatgggggaggagcacatctgcgcgttgaatgatgttgcaccctagtaacttacttggctatggagacagaagcctactgtatctcaacttagatcagacgagaattgtatcacctgaaggattgctaccgacacattccc

SEQ ID NO: 130657 - DNA, 110 bp, Zea mays
  Clone ID: MRT4577_50636C.1
ggccgaggagcacttgggcatcccagccttgctgcttgccgaggacatggtggccttgaaggtgcctgaccggctgagcatcttgacctacgtgtcccagtattacaata

SEQ ID NO: 130658 - DNA, 691 bp, Zea mays
  Clone ID: MRT4577_50637C.1
gtattcctaatcatctcgcgcctctacatttcttctctctctgctcctccgcctccgcctgatacatccaagacaggaatacgccatgccgcactcggatgaacaccactttcgaatctgaggccgacactgttgcgcgtccgagacctacccacaagatggtgtcaccgctccgcaagaacggcttacgtcgacatgaagaaccggccctgcaaggttggggaggattctacctgcgagactggtaagcatgggcactccaaatgccactttgtcgacatacacctattccatgggaaaaggctggaatatattgttacttcatcacgcaaatgtgacattccgtatgtgaaccgtactgagtatcatgtgattgatatttctgaggatggatttgtgaatcttcttacttcagatggcgacactaaagatgatcttagactcccaactgatgagactcttgtggcccatattagagaagggttcgaaagcgggaaggatcttgttgtgactgtccagactgctatgactcaggagcatatctgcgcgatgaaggatgttggccccaagtaacttccttgtctgtggagacggaaccctactgtatctcaacttaaatcggaaaagaagtgtatcaccaaaggattgctaccgagacattcacctggtttgagatggcttttgctatagc

SEQ ID NO: 130659 - DNA, 1116 bp, Zea mays
  Clone ID: MRT4577_50638C.1
tacttagttaagtgggcttcttcagtagtagaaagaagggggagaaccgaaaaagcaagtcatctttgaagattcggaacactcttcaacatattgtcttgcatttaaagtgattaatccaagtcatttgcctcctttgaaggagctgcaaaaattgatgagaatccagtcactgcgttgtcatgcactgtataaccatggcgccaccaggttatctgtaattccaattcatgcatcgcgatctcaggctctaagaaaattttctattataggtatttgtctatttgctggggcatagagttgccagatgctgtggtcattgttggtgaaactggtgattctgattacgaggaactgtttggaggtcttcacaagacagtcatccttaagggtggattcaacactcctgccaataggatccatacggttagaaggtaccctttacaggatgttgttgctcttgatagctcaaatatcattgcaattgagggatttagcactggtgacatcaggtctgctatgcaacaaaagcttggtatacccacacgatgacaccaagtgcgatctattttgttattaatagaaagaaacaaagaaaaaaaaatggccaatacaaatatacgatacaaacacttcgtttccattctattggaaatgcccgattttgcctgccagtcgtttaatgtatgtgtgccagtgtgtggtctctgcatgggttatgaatgacattcccttggatccatgcactggaaatttttggagcgaagagcatgtcaatggatacatccagctgtacagaagaaacaaatttgttcaaatgttgatagtgaaaacattttatggaagcattttcagcaacaaagcttccaatatacaaagctcacactttcacatcacttcaaagtggagcttatgattacagagcaaccctctaaacctttttttcctttctaagaggggtgtattatatttgtgtaaatactgtgtcacataatttagcaccaatgcaccatcttgtttcctgaattaatatgggtaagcgtttactctccaaaaaaaaaaaaaaaaaaaaaaaaaaaaaaaaaaaaaaaaaaaaaaaaaaaactcgaagagggg

SEQ ID NO: 130660 - DNA, 686 bp, Zea mays
  Clone ID: MRT4577_50639C.1
tgtgcaggcgctcgatggcggccgtgcggaccatcgcttatcatctgcgcctctacatttcttctctctgtgttcctccggctccgccggatccatcctagacaggaatcgccatgtctagactcggtaggagcaccacttcaaatcgaagggcgacgctggggcgtccaagacctacccgcagcaggctggcaccgtccgtaagaacggcttcatcgtcatcaagaaccgtccctgcaaggctgtggaggtttctacctccaagactggcacacaatggccacgccaaatgccactttgtcgccatagacatattcaatggtaaaaagcttgaagatattgttccttcatcacacaactgtgacattccgcatgtgaaccgtactgagtatcagctgattgatatttctgaggatggatttgcgagccttcttacttcagatggcaacgctaaagatgatcttagactcccaactgatgagactcttgcgggccagattaaggaagggttcgaaagcggcaaagatcttgttgtgactgtccagtctgcgatgggggatgagcagatctgcgcgttgaaggatggtgcccccaaccaacttccttgcctttggagacagaaccctactggatctcaacttaaatcggaccagaaatgtatcaccagaggattgtataccgagaca

SEQ ID NO: 130661 - DNA, 120 bp, Zea mays
  unsure (1)..(120): unsure at all n locations
  Clone ID: MRT4577_5063C.1
tccacgcgtccgagggggtccgaagcaagaggaccatggtaaaatttaacagggacctgattcatncatatgcatggaggccggcctgactcattctttcatgcattagagattgagaga

SEQ ID NO: 130662 - DNA, 492 bp, Zea mays
  Clone ID: MRT4577_50640C.1
cttctttccttttttttccttgttctattggacaaaaaacatactcgcgcttactaaacggctacgcccggcaatgtgcccataccacacgaactgaattaaccagcgccacatagagtaggaaaagaacaaacatgcttagcattacggtgctaataaaatcctgaagccctcgcccagccctaatataacaaggaaagcgcccccgctgctactcccctgattcccaacatatatgaagcaccttgacagaaaattctgaatggcactaagtacgatccagaagtccaccaacttggattcctcctttgcttcttccttcctgccaacaattctgcagacggaacttgcgcccacaccaaaaaaatacgccgaggaaggacatcacttggagacgaagagatgcgagggggacggcgcctagagttagaggaataggggctgccgcacaccatatacgaattatgcgaaggggatggcccgaacccttga

SEQ ID NO: 130663 - DNA, 191 bp, Zea mays
  Clone ID: MRT4577_50642C.1
cctttctttttttgtttttttttttgcgttttacggggatacgacccgtgccattaagattttacagagaggtggggacgccggtcaatggctaaaaccaactgaacatgttgatgaatcctcttgggtaggtagctatatatccctgccgcttagaatatacctcaccctccccaaatgctggaacctta

SEQ ID NO: 130664 - DNA, 348 bp, Zea mays
  Clone ID: MRT4577_50643C.1
gttggaggggtttggtgcaacatgtcgcctcggccatcgtcaagcgtctctccgagaagacggccgctccatgaacgcaccccatcacagacaaactcggcggaagtctcgcccggtcgaagaggaaaaagaagagacgaaattgacttttattcttccacaccatatcccaccaaaccagcgcaggtcctcctaccgcggcccgggattggtcaagattacgcgcttcacggcgcttacggggtctcagatgcgtcttcagtctctactgaaacgtatacagcaacggggccggttgatgttgtaaatcacgaggaacagcggcatcgcgaggttagtgtgaacagc

SEQ ID NO: 130665 - DNA, 359 bp, Zea mays
  Clone ID: MRT4577_50644C.1
gtcagagactcggctacctctcctgcaaaatgggtatggaggcggctaacttaggcgccgtttgataccaccacgagaggcacctggccgccggcctccccttgttcgcgcgagtaggcaagagcttaagccgcactggcgtcaccatctacatgagagcccagaagaagggcaatagagaatctgtgagcagtagcggaggtggcgacgttcgggccagcagcgggcggcgagggtggcgttgtcggaaactgaccaaagaggatgacacgttgcgctacaagttggatcgcatcccttttctagaggagaaagtgagaaaagtaagggagaatgtgaagatcatgagcctggacatt

SEQ ID NO: 130666 - DNA, 227 bp, Zea mays
  Clone ID: MRT4577_50645C.1
ctccgtctccgctgctagatacttcctacggttcagatgctaatagtgtatccgcagggcggccgacagagccggctagcatgccgaacgatcaccgagtcatgtgccgagtccaatgcctagatgtgtctaacctggacttctaaggcatgcggctgaaatgaacatacaacgtgccgattggctaatacgcatggacagtcgcacaggtgcacggctcatgacgt

SEQ ID NO: 130667 - DNA, 722 bp, Zea mays
  Clone ID: MRT4577_50646C.1
acaagaaaacaatacttggaaggggtgggggtgtttaacatacaaccaacaaaagctagacaacatcatctggttctttaccagctaagctagtaataataggactcaacatgacacatacttcaaattgttcaacatgcaaccaacataaacgatccttcattccatactcctacatttatttgactaccagctaagctagtaataataggagctgtcgctagagtaatcacgtccgtcgtcgtagccgacgtagccgtcatcattgtttggtgatttgtagtcaattggaagcacatcatctggatctgcagcgtcctcatcatgacatgggtctatggttcacagctcccacttggtttccagtgctagctgatcaaaggtccttggtgaggtcctcgatctcaactaaggcccagttaaattcattgaactctggtgagttaaatggttggaaggcaccgtgcatgacatctacaatgtcggcacaacgctacagctctcaccaaattagccagggcttttcgaagcatttcgttctccgaatccatggtcttgctcgggtcggatctagagcggacgaccggatcaacgacgatgaagatacgtgcgacggttgcgcttccttttttcggcaccaatcctgacccaaggcagctgatgtcaaagtcgtaaggtgaaggcgagtctccggcgagggactgctgcggtgcctgaaccgg

SEQ ID NO: 130668 - DNA, 399 bp, Zea mays
  Clone ID: MRT4577_50647C.1
aaaccatccttctgagggacctgaaagtgtattacctgaaattacaactcaccgggacagtgtcaacaacatagactggctcactttacggcatactataccgcaggggaaggaccctgaacacctaaaggttttttagcgcgaggctgaactggaaaacgtaaagctccattaaaatgccggctattcgattgtataaaggattttaacgggatgtaatgccttatctactaaagacactcgtgcctgcggggttatctctgcccaactttatatgtatccggtgaaatctatggaaagatgagaaccctcccctgtcatacttggagcctgaagaactagctgacgatctccattaaaaaccttagcgacatgcccgggcacgctttatttaacgac

SEQ ID NO: 130669 - DNA, 1100 bp, Zea mays
  Clone ID: MRT4577_50648C.1
cctcgaggccggccgggtgcagctgcaatccatagagagaaataccgcgctcaggagcattcgagaagccgaagaaaattcgaagacgaggagcagctacactgcggacggacttcgggcatggagggccagttccaggttggcaaggaggaggtcatccaagcatggtacatggacgacagtgaagaggaccagaggcttcctcatcatcgcgagcccaaagaattcatccctctcgacaaactttccgaactaggaatattaagctggcgcctaaatgccgatgattgggagaatgatgagaacctcaagaaaattcgtgaagccaggggttactcttacatggacatttgtgatgtgtgcccagagaagttgccaaattacgaggctaagataaagaatttctttgaagaacacttgcatactgatgaagagatacgatattgccttgagggtagcggctactttgatgtgagggaccaagatgatcagtggatccgtgtagcggtaaagaaagggggcatgatcgttttgcctgcaggaatgtatcatcgctttacgttggatagtgacaactacatcaaggcaatgcgtctatttgtgggtgagcctgtctggacaccatacaatcgtccgcatgaccatctcccggctaggaaggagtacgtcgagaaaatcatcaaccgaggtggaaaccaagccgtcgaagctcgttgagcgtgtccactctacatgtcctcctgccgtctcagcctcttgtgttttacaccctacaactcctagtaccgccgaataagatttgctatctgcaatgtgctcatgccaccgctgtgtgtgccagttaacagtttgcacgaaacccgcttaaaatcttccctagatattttgttgtacgaatgaatgacatgtggtgtttgataaatgatgaaacgatgatggttcaaatccagatttgctatctgcaatgtgctcatgccacccccgtgtgtgccagttaacagtttgcacgaaacccgcttaaaatcttccctagatattttgttgtacgaatgaatgacatgtggtgtttgataaatgatgaaacgatgatggttcccctc

SEQ ID NO: 130670 - DNA, 668 bp, Zea mays
  unsure (1)..(668): unsure at all n locations
  Clone ID: MRT4577_50649C.1
gtaccctcggagnctcgccgggcgcaacgtctcgactgaagactgcattctgcaaacagcaacacgacaagcaggagcagcagctaaagcagcagatatggatcgatcgacggggctgatgacaacgatcaggctgctggcggcggcggcgctgctggtgctggcgtcggggcagcagcagccgccggcggcggcctcgtgcacggcgtcgctgctcaccagcttcaccccgtgcttcagcttcctgaccagcagcaacggcagcagcgggtctccgccgacgcgggagtgctgccggtcgctggcggcgctggtggacgccggcaccggctgcgcgtgcctcgtgctcacgggcgccgtgccgctcggagtgcccgtcaaccggacgctcgccgtgtcgctgcccagggcctgcgactccatgtccgtcccgctgcagtgccgagacacgtcggctcagagcccggccaccggccccgtcgcagcagacacgccgcccgccacgcccgcgtcgccggcggcagcgacgacgccggacgctcccacggcgacgccaccggngacacaggggcgggaggcggncctgcccaccagcggctccgcccgnagagccagcgcccgggnncgccgngacgcccgcgcnggngctgnngtttctgctcgccgnn

SEQ ID NO: 130671 - DNA, 341 bp, Zea mays
  Clone ID: MRT4577_5064C.1
tttttttttttttttatttttttttttttttttggtttgggttttttttttttttggtgtggttttttttttttttttcatttcttttttggggggccacaccccaaagggaatctctccgggaaagaattcctcctttttttttaaaacaaaccctcaacactcacccttttctcattattaacccaacccccctaagaacccgggcaggttttcaaccccctttcgtttccaaaaaacaaaaaggaccctgatcccgtggggacccttgaacctttgaaaagaaaaaaacccctaccaactgcccacattaagaacaccctcatatggccctgggggtg

SEQ ID NO: 130672 - DNA, 246 bp, Zea mays
  unsure (1)..(246): unsure at all n locations
  Clone ID: MRT4577_50650C.1
cttctcaccctcgttcaccacacagtccgccacacctttagtagcttgtgatttgtacatcgacgagatcactggtcgggtggcggacgacgacacatggggaagggtagtgtgggtgcatcatggtgggcgttcctcctgctcgccggcgtgctgctggtcgtagcatactcggccgnagcggangacggagtagtcgaacaggaccgcacagaggaccagcggtggtgcaagcaggcgtgcgag

SEQ ID NO: 130673 - DNA, 242 bp, Zea mays
  Clone ID: MRT4577_50651C.1
tcgtgggtccacacaagcctctaaactgcgtcttatcaagcgagagcacacacacggcagcacctacctaggaccaccagcaccggcggcaatggcggcctccataatcccctcgtcagccctggcgttggcccctcagggcctgccgcccctcggccgccgcccttcttccttccccttcttcggctccaaaagaagattcagaaccaacaaccctaacggaattggggttgccctaacct

SEQ ID NO: 130674 - DNA, 130 bp, Zea mays
  Clone ID: MRT4577_50652C.1
ctctgaatgcatatgccatgcccctgcgcagggctgaagggcttgtactgcgctggcgcccgactgaccacgatgatgggcgacgacgggctgttcccatacgctgagtacctgatgcagccagaatgca

SEQ ID NO: 130675 - DNA, 559 bp, Zea mays
  Clone ID: MRT4577_50653C.1
gcaacggaaatcttattaccaaattttacaggttacaaaattttttacataatattcatcggagtgattaccaaagtataagtttgaaatatatgctagctcaagtgaccatcctcaataagaatataaagatgagggatacttatataagaaggccgagcccaccggcacttaacaccatgaacagcagcacaaaactataaccagcatcaaacgtgactcaatacttgtgagaatgttgataaatcctggttttggcttcgtcgaacatctgacatgtgttctgatactccgcccacatgacccagatggggctgatcacgaggaggcaaaacatggcgaggcgtgtatcggaagagctattgggattaaagacgacgacacgcgtcatgatgaggcggcatatggcgggggaaaataggaatgaacgacgacgagcgaacaacacagttgcgtgggacttagcgataacagcgagctgggagcgttggtcagctcagcagacacgaccaagaaaatttacgagcacacgcgggacgagcaattgagtgacggtggc

SEQ ID NO: 130676 - DNA, 2091 bp, Zea mays
  Clone ID: MRT4577_50654C.1
gcaacggaaatcttattaccaaattttacaggttacaaaattttttacataatattcatcggagtgattaccaaagtataagtttgaaatatatgctaactcaagtgaccatcctcaataagaatataaagatgaggtatacttatataagaaggccgagcccaccggcacttaacaccatgaacagcagcacaaaactataacctgagtaacactaggttagtgtttgttagacgacgtccccttgacgaccatcctttggcttggcactcgttcagattatccatcttccggttcgtccatcagcatcatcctacggattagcccacgcttggggtcgacttggctcttttcctccgcataacatgattaactatcataccagcatcaaacgtgactcaatacttgtgagaatgttgataaatcctggttttggcttcgtcgaacatctgacatgtgttctgatactccgcccacatgacccagatggggctgatcacgaggaggcaaaacatggcgaggcgtgtatcggaagagctattgggattaaagacgacgacacgcgtcatgatgaggcggcatatggcgggggaaaataggaatgaacgacgacgacgagcgaacaacacagttgcgtgggacttagcgataacagcgagctggagcgttggtcagctcagcagacacgaccaagaaaatttacgagcacacgcgggacgagcaattgagtgacggtggcggagcttgctggtctgacacggaaaggaccaacaaggtcgacagccagtgcgactagataatggagcatagtccagcatcaaactgacgacggccaccagaagggcaaagacgaggtcgagcaaggtaaaacgggttcaacggctcgacgccaaacgcgagcacgcgtgaaacccgatggacgaagagcgagtgtgacgcagtgataacgagcagacgcgcgagcgttaacgcgagccagcggcaagcacgagtgctgaggtacaactgacaacactcgtcgagcacgcagcgaggcacataacagcgacgataatcgaatcggcaacagagtgttggcgaactcgacgaacacgaccacggtcgcgtgctgacgcggataggacaacgacaactgacgagttggagcatcagcgaatagccgacgcgggtgagcaaagcaggtaggacgccgggcgtcgcggcaagctagaaaaaaattcggcgcgcgagctcaacgcacacgatttttgtttcgttgctccatgcacaacgcgtggacagcgtcaagcagggacgcgcggcaaaatcgcgggcacgatgctgggaaccggccacggcgagcatagggacacggctgcgcgcatagggactcgacatcgacgaccagggcgaacagacggccggcgagcgtagcaggaaacaagaagccggggcgaactcgagcaggcagccatgggagtgaggttagagccaggggcgcggcagagagagcagaggcgcgaccgagtctgctcctagtcaacggccaccaggacgaactcgagcagggcggccatctggggacagggaagaagggcgcgcagcaggggcacccgacggtcagccatgggagagggagcttggctgcggcgcggcacttggaggagagctcgaggtggtgctaagggagacgagcgggagttggccggcggacaatactcaagttgagctccacggcgaggaaatccactccagggagccgagagcgagaggcagacgaccgagcggaaggatgatccaagctgggggccgaacagggctagagaagagagaaaggagaaggctggagcggaagaggaaggaagccgcgtcagagagctcgccgctcacgcggccgtgacgagcatagcacggtgggccagggcgagcagagagagcagaggagatccggccgacggcgtcgttgggcgagcaggagccagggaggaagaagaacgcagagagcagggacacgcggggctggagagaggtggagggaggagagagatcgaggcgccgagttggaggaggaagaaggagcttgggcgagccgagggagaagctgggagctgc

SEQ ID NO: 130677 - DNA, 409 bp, Zea mays
  Clone ID: MRT4577_50655C.1
aaattaaaacaaataaatggaattattataattattaaattaaaaaaataagggccgctctttttaaaggaccaaagttaacaacccctgtgctagcaagataaaattttttttttggggtaactaaatttaaattaattggccgtggtttaaaaacgctgtgactggaaaaaccttgggtttcccaattttaatcttttggagaaataatccccttttctccggatgtcttaataccaaaaaggcccacaccattctgcctttccaaaaatttgcccaccttaattggaaatgggaactccccctgatcgggcctattaagcccggggggtggggggtttcccccaatgttactctttatattttgcaaggatcatagtgcccgttctttaggatttatacctttctt

SEQ ID NO: 130678 - DNA, 378 bp, Zea mays
  Clone ID: MRT4577_50656C.1
ttgggtccctcgaggccggccgggatcgcaggttcaacaaggcgtgcagacgtgcgtgctgttcccgagagacagagaggtaagggtcatggccatcgtcgctcggaccctggatacttcactccgctatccgtagtcggatctctctgcgcaatgttctagtgctgcctgccctcgatctgatcggctccaggatgctgcctacctatgacaagggtggcatcaatgagctcgttgtcagccgcatgggcccatgcgcgttcctgatcgtctcactgggtgcaatgatggaggttctgccatgacgcctgctaatcgtgtacggatgcatgtgcagactgggcatcaggtatggcatctgtcacggagctgcctgtg

SEQ ID NO: 130679 - DNA, 617 bp, Zea mays
  unsure (1)..(617): unsure at all n locations
  Clone ID: MRT4577_50657C.1
cgcggcgcggccgaaccgcgaagcgccctcctctcgttccctcccgaaaccccggcatgggnaaacaataagtcgaagcggagcaggagcaagaagaacaaaaccaacgccgaccaggccctggccctagactacgtccgcgcctgggtgctccccgtgccgccacccctgaagccctcggcggccgacgtcgacggcttcctgccggtccaggctacacgccggggcgatgtgctgtttgagctccactcccactcaaaccacagcgacgggttcctctccccttccgcactcgtcgagcgcgcccatcgcaacggggtgaaagttcttgccctaacagatcatgacaccatggctggcataccagaagctgtgtcagcagcctccaagtttggcatgagaataattcctggagttgaaatcagtgcgctatataatccaaggtgtgatgagttggacggcatgctattgaacattagagatgggcgatacttacgtgcaaagaacatgctggaaaagctaactacactgaaggtgccaataaagtgggagcatgtgaataaaattgctggtgacggagtggcacctggccgattgcatatagctagggctatgga

SEQ ID NO: 130680 - DNA, 405 bp, Zea mays
  Clone ID: MRT4577_50658C.1
ttcacagcgctttcatcctgctgcgtgttcttgtcctcctccaccgcttctagatccgcatttgcatcgtgaatgacaggaacagatgcgtcatctgcaggtgtatatcgatgcttctctggatgccgcgcgttgtgctacctacgagcattccctgggcaacgcttttacaacctattgcctcgtccctctagcgaaacatcgtcctggactgagagacgataagaagctcgttgcatgtatgacttcttgacctgtctccacggcagaaaacaatgtcgagaggcacctatcccatgaatgagaaagagattcactgtcggaatatcaacgatgactatgtcactcccgtggacaacgagtagggggacaaggccctatatggtggccgcgtgcccagatgta

SEQ ID NO: 130681 - DNA, 584 bp, Zea mays
  unsure (1)..(584): unsure at all n locations
  Clone ID: MRT4577_50659C.1
gccggccggttcggggactcnnnnnnnaaaaaaaaaaatttccaaaaagaaaaaaaaaaaaaaaaaaggaccctaagggacgaggccgcctctgagggtggcggctcccccagaactgaagaatccgccgtgctggagatctataacatcgagctcaaggctgccgccgacctacgagggggccccaggcaccctcttcctactatagctagttggacgacgtttcaccgcgggccggctgttaacaccctggcggctgagaacttgatggtgttgcactaattcctctttttgcacttcgtccttttttcgattggtgccgtagtgatgaagcggcccacgacgttcgctctctccatgggcaatgcatgctggatgaatgaagattgtggtaagcgtcattttgttgttatgcttcatgaactctttttgttaaagcatatgattttatccgccaaaacgccgatggcggaaacgtctatatctaatcaaaataaaccgccgttccagggtgggatgttactcctgtttgaaacaagacgcaattattaaacaaggggtcctccgccgtctatgggggaaaa

SEQ ID NO: 130682 - DNA, 559 bp, Zea mays
  unsure (1)..(559): unsure at all n locations
  Clone ID: MRT4577_5065C.1
nngccggccgggatgaatgtctatcaaacaactgaatactttcgactggtttcctctccctctccctctccgattcgttcttcccatggagtatctgatctgtcattaccgggcaaagatggtagggcgcaggggtacgtggtatgaactacctgcaagtgcgagatccacgtctaccaccttgtggagtccgacctcgtacatgctaggacgtgcagcctactgctccgcagatggaccttgtctcgccgtagttcaagaacctccacatgctcatcatcgatgaaagacttcctcaagaccgtggacctcgcgcccacaatcctgttcctcatctctctgaacgacttggtcataccaaggcaagaatggcgtcgacatcctcgtgaatagacggatctcgatgaatgcaccgtgcaataatacaggtcagcaactctggtatggaatctactaccagcatatgccgcctgggcatcgccacatcctgatgtaattgctgatggattactggcttgaacatcgtatgcaagtactacgtatctgtgatgcctggcga

SEQ ID NO: 130683 - DNA, 1026 bp, Zea mays
  Clone ID: MRT4577_50660C.1
cacaacctctgacttgtgaagcatctcagctcctcctcctcatccacagcaagatctatcccaagaccatcaccgatcaacaccatgaccagcaataccataccacacgatcatcgtcatcatcgtcaggagatggatcagctgcaagccctggctgtgaagccacaggtgaagaggcaggttaggaggaggaggacgcacacgagcaggccgtaccaagagaatctgctcaacatggcggaggcgcggcgggagatcgtcaccgccctcaagatccaccgggccagcagcaggaggcagcagcaacccaagtaccagcgtcatcaggagccgccgctgcgtcaaccaccgtttgcgcagctccagcaacagcaagaagagccgaagcacgtgcaagaggcgtttctggatccaagtcgaagccaaccggcggttgacgaagaagcatctctggcgcatacgacgatgagttacgcctccttcaccaacaacccgttgcgcagctctccacctgcgcactggattgctgcccgtagctactgctcgccaccacccatccttcgtcttccttgtgatatcacgccacctgaactgccgcccactgccgccatggggggattggggttggacttggaccaataccaataccaataccaaggcggcttggagcgtttggttcgtagcctacctgcacagccgctaggactgaaccttagcttccaaggttttggtgtctctgtggacgatggtgccaaggacgactgtgaagatctccttgctcttccattgacccaaccgtcaccggctgcctcgtactcgtgctcacctccggcagtggagacggtgaccacccatgcctgtgccccgtcaccagcgctcagtgcaacggacgcagagaaccactcggtgatcgatgcaccagcaccaccagcagcggcgttggtcccggcgctggacggggagatggcgcagcaggcatcggtcggcggcgagatgcagggcgtggagtggagcgaggcggcggcc

SEQ ID NO: 130684 - DNA, 1648 bp, Zea mays
  Clone ID: MRT4577_50661C.1
cattgggacctcgagccggccgggagcttagtgctaaagctaccccttccggccacttccgcaattgcgaacctccgtcgcggcgcggccgaaccggcgaaggcgccctcctctcgttccctcccgaaaccccggcatgggaaacaagaagtcgaagcggagcaggagcaagaagaacaaaaccaacgccgaccaggccctggccctagactacgtccgcgcctgggtgctccccgtgccgccacccctgaagccctcggcggccgacgtcgacgacttcctgccggtccaggctacacgccggggcgatgtgctgtttgagctccactcccactcaaaccacagcgacgggttcctctccccttccgcactcgtcgagcgcgcccatcgcaacggggtgaaagttcttgccctaacagatcatgacaccatggctggcataccagaagctgtgtcagcagcctccaagtttggcatgagaataattcctggagttgaaatcagtgcgctatataatccaagggaagttgctggtgcgtgtgagactgttcatatccttgcatactatggtatgtgtggtccgtcaaggtgtgatgagttggacggcatgctattgaacattagagatgggcgatacttacgtgcaaagaacatgctggaaaagctaactacactgaaggtgccaataaagtgggagcatgtgaataaaattgctggtgacggagtggcacctggccgattgcatatagctagggctatggttgaaatgggttatgtagagaatttaagacaagcattcaacaaatacctcggcgatgatggccctgcatatgccagaggaagtgaaccatttgctgagactgttgtgcagttaattagtcgcactgggggtttttctgcacttgctcatccttggtcactgaagaacccagatgcaataatcaggtctttaaaaggagctggtcttaatggtatggaggtctacagaagtgatggagaagttaatggatttagcgaactagctgagaagtatggacttctgaaacttggaggttcagatttccatggaagaggtggaaaagatgaatctgatgttggaacagttaagctcgctattacaactttgtgctgttttttgaagatggctaggtctatctggtcttctgctatgaaagacatcctgcttaagtttgcagaggaaccgtctgctgcaaatctaggaaacatgctcaagtttggacgtcttaccaaatttgctggtttttctccaataaacaatggtattcatgttgttgatttctgcttatcttcttggtcaagcaatgatgatatcgaagatgttgagcttgaagaggtaagattgaagcttgctcattatgcagaataaagataacctcaactacatggtcatcttgagcaatgttttcacacttgttcaaattacagtatatgctgttgcaatgttcacttcttttgcggcccagtataactaatgttgaaattagatatgctcaatctggcagctttggcattttattcaagaacatatatttctctactatgataactgaaatggcgtgcatagaatcagagcacatcagcatattaatataccgtttcttatcgtgaggaaaaaaacaacaacccc

SEQ ID NO: 130685 - DNA, 135 bp, Zea mays
  Clone ID: MRT4577_50662C.1
atttggctcaagggagatgaagatgtagattattgatacgagttgctcaagcgatagttgtgtctctcgggatcacatacatgtctctgttgtacgggttgttatgtccgtgactgggagtagggtacatcaggc

SEQ ID NO: 130686 - DNA, 199 bp, Zea mays
  Clone ID: MRT4577_50663C.1
ctcctttcttattcatggagaccgcagggctcacctgccactacctgaaaaacccaacatcagtagctgctgctccccgacatggacagcaggcaaaggtctgatcggcgggcctgtaggactcgcagtcgcgcgccgacggcaggatccgggccctggcttcggaagagagccttaaaccacatcctgtgctccaagc

SEQ ID NO: 130687 - DNA, 596 bp, Zea mays
  Clone ID: MRT4577_50664C.1
ccggccgggagatcagatcacactcgtagatagaacgaaaaatatccccaaaccctagttcccgatctcgatgacgaaccctcgcgtcttcttcgacatgaccggcgaaggcgccccggaggcctcacatcgtgatggagctgtacgccaacgacgtgcccaagaccggggacagacttccgcgcgctgtgcacggacgagaagggagtgggaaagtccgggaagccgctccactacaagggttccaccttccaccgcgacatccccgagttcatgtgacagggcggagaattcacccgcggcaacggtaccgtaggcgagtccatctacggcgagaaggtccccgacgagaagctcgggcgcaagcacaccgcccccggtgagctctccatggtcaacgccgggtccaacaccaacggttccgagttcttcatctgcaccgtcgcgaccccttggctcgacggaaagcacgacgtcttcggacaggtcgtcgaggggcatggacgtcgtcaaggccatcgcataaagaggataccctgaacgtctccaccatccaaggcgagtcaatgtacgcgtgactgcgcacagactctcct

SEQ ID NO: 130688 - DNA, 264 bp, Zea mays
  Clone ID: MRT4577_50665C.1
aagagattctccggctccacctctgggacgttgccactttgagtatttgtggggcccatgtggaggatgaaggtgactattattgttatgtactgggcgcttttgatgagcatggagtcttcggcggggggaccaaggagaccgtcttaggtcagcccaaggctgccccctcggtcactctgttcccgccctcctctgaggagcttcaagccaacaaggccacactggtgtgtctcataagtgacttctacccgggagccgtga

SEQ ID NO: 130689 - DNA, 121 bp, Zea mays
  Clone ID: MRT4577_50666C.1
cgagtgaatccagtggccccgtggcaccctcctttatgacatccatccatctgtggtgaaccaagtgaaggtggtgacttcggtgacatagtaataaagtgaagactcagaacccaccagc

SEQ ID NO: 130690 - DNA, 1794 bp, Zea mays
  Clone ID: MRT4577_50667C.1
atggcggacctccctagtgtgcgcgcgcccccagctgccgacctgacctccaccgcccccggcatggctgaccccggccgccccatcccctacaccgccgtgtccaccaacagccacgccggcggctatctccccaccgcgaccgcagcagcccctgcggccgccacgaccgcacccagcgttgctgttgccgctgctaccgcccgcgctgccgagctcggcctcccgggctacccgacatacacgggagccctcgcactcgccgtggacccagctggcccatcgccgaccagtgtcctccgacagccgccacctggcttccaaaccacgcgcccaccgcttcttctcctcggttgcgacacaccaccacctcctgttgcacccaccctggcgggtggggtgctcgagtacccccatgcctctgggctccacaccgacaccatcgccgcactccacgcccaggctgctggggtccacaacattcggtccctcgtgtccatcgtgttggacccggcgtcctctcactaccttcgctggcgtgctcaggtggtcctcacccttcggcgtttcgccctcgccgaccacgtcctcgacgaccctgtcgccctaccgtctcctacgtgggcccagatggacagcgtggtcatctcgtggctccacgacaccatcaccgtcgagctgcaggacatcatccacgaccagtccaacaccgcccgtcaggcatggctcgctctcgagggacaattcctcggcaatcgggaggcttgggcgctccacctcgacgcccagttccacctgttctctcagaaggaactctcggtggacgactactgccgccagatggagggtatggtggactctctccgtgatctcggtgagcctgtcgccgaccgcaccctggtgctgaaccttctatgtggtcttagccccaggtacggctacctgaaggctctcatcaagcggaccgtgccgttccccacattccatgccgtgcggaacgagctcctcctcgaggagctcaccatgacactcgaggctcccactccggcctctgctctctatagcgccacccccggtgctcaggcgccttttgggggacaggccacccgtactccatcgaccgtgcccccactcgccaccctattgcggctcctcgtccggcttccaccaccgacgtcggtcgtcgccgccacaagggcggctgtgggggcggcagctctacctgtggcggttcctccggccggggtggcaaccaaggctggccctcgatctacaacccctggatcggcaccatctccatgtggccgagtcagggccccagtgccccacgatctggccactaggaccccactcgcccgatgtgacagcatcgggcccctctacgcgctccggccctcttccgccggcgcgtcttcaccgcccatcctggtctccaccaccacctccaccacctggcatcgtcgtctcggccatccaggacctgacgtcatgaccaagctttcccgcactttagattcatcttgtattaggggacattttgagggccactgtcatgcttgtcagcttgaccgacatacacgtctcccttttcctacttcgtattctagggctgagcaagcttttgacctagttcattatgatctctggacctcccctgtacttagtctttctggatacaaatattatttagtaattttggatgatttctcccactttctatggacttttcctcttcagttgaagtctgacacccttaccgtgctcactcacttctttgcctgggtcttcacctag

SEQ ID NO: 130691 - DNA, 494 bp, Zea mays
  Clone ID: MRT4577_50668C.1
atcggcgactgccagttcgtctacatcctgcagggtcatttaatattagcagctgttggacgatgccggcagaatctgcgactagaaggcgatggaggcggagagcttcctgatcaccgcgtaggcagcactgatggggacccaaacactctgtgcgagcaagtgtctgacgctgaaggtagacgctctgcctagcgcatgacccagagagcaaggaggtctgtaagatctgcatcaagacgaacatggtgatggtgctcgacgagatcaccaccatgggcgagcgcggactaccagaagagcgtgcgcgatacctgccacgagatcgcgttcatctacgacaacgagggtgctcgacggccgaccgttgcaatgggcctgagaacatgctgcaccaggttccccgacatcgcccagggcggggacgggcacttcacggagcggcccggggagatgggctccggcgaccacggccaaatgtccggggacgctcc

SEQ ID NO: 130692 - DNA, 1729 bp, Zea mays
  Clone ID: MRT4577_50669C.1
attgggtacctcgagccggcgggaaaaaaaaaaaaaaaaaaaaaaaaaaacagatcaatttggtagtcactgcctattcttggccatacggctttccccacaccccaacacaaacaagagaaaaaaacaaaaactagacgaaagagggaagaaaccaagaaattggcgaatccctgacgctccccactttcaactctcatccgcttgccgttgccgcgtttgtttatcgagccaatttgatcagggcgccacaccgaaccctagttcttgatttaatcacgggttatgtggtcatgccggccgggtcaccccgttcttcttctcttccacgagttcaggaggtagagtgagagagaaaatggaacgacaggggatggaaggcaacaatcttctgcattttcttgataccccgagcgcccattacagaaggacatgcgacggatttgaggcccaacacggcggcgatgaacactctgagacatcagatactgatccggcgaatgcaagggaaatgctggaatatttgttgaaccaaccagcaaacaaaatctgtgcagactgtggctctccagatccaaaatgggtggccctgccttttggcacattcatctgcattaagtgctctggaactcatagaagtcttggtgtgcacatatcaaaggtgatttcagtgaatctggatgagtggacagatgatgaagtcaactgtttagctgaatcaggcggaaattctgttgtgaactcaagatatgaagcctttttacccgaaaacaaaaagctaaaacaagattgctcaacggaggagcgtaatgattttatcaggaaaaaataccagtttcaacagtttgtgtgtgatccacaattttcatgccctttaccacttaacagaaagcatgcaccaccagataaaaatcaccagcagcataatagcagcaagtatggttttggccatacttttaggaatagctggagaaaaaaggattcagatagcaaaagcctaaagaaaatgtcggatgtgggaatgatagaatttgttggattagtaaaggtcaatatcgtaaaaggcacagatttagctgttcgtgatgtgatgtcgagcgatccgtatgtcttgattcatctagggcaccagtccatgaaaacaaaggtgataaagaacacactgaatcctatctggaatgaaagactaatgctttcgatccctgacccaattccgcctcttaagctgcaagtatttgacaaggacacattcagctccgatgaccggatgggggaggccgaggtggacatccggccgctgattgcagcaacgaaggagcacgagaactcgaccatcaccgaatcgacagaactctacagatggtcagccagcgaagacagcaacggtgtgctcgccaaggacagcgtcatctctgttgcgagtggaaaggtcaagcaggagatcacactcaggctccagaatgtcgagcgcggtgaggtcgagatcgagatcgagtgtgtgccgctcagccagtagcagtcccattgttgtgacaaggacactgctttgcaatgcagaaagacctcagcttcacttgtttgattgctccatgcctgtaattcgcgtgcatgtgtgagatgtgtaatgtgttgtacggtagataggcaaagggaaattatctacttatattactttgatgataggcatacggttgaactgtttccagtagatttcctgacctcagttgct

SEQ ID NO: 130693 - DNA, 572 bp, Zea mays
  unsure (1)..(572): unsure at all n locations
  Clone ID: MRT4577_5066C.1
gctttcggngtgatacataaagtgtcatgctaagtgtacaggagtagnaaacaaattctactaatacataaaatcatttcccatcctccaccccatgaatttgagatgggcttatatctcaaccttgaaagtggtggaatgtcgaattccaaactaaataagttactttattgagtgaatttcaattcccctaaaatgaaaggatccaaacgtcccgtgggtaatttttggtatatttttctttgttatttcgaatataatgtagtaaatttgtgctttgtgtttctatttgacgtaaatctgcttaatcttgttcaaatctgacattaactattgtttgttggcatatacaggatcaaaacggaaaaaagcaattattgctggcacgctgtcgtcccttctattcttgtgcctagtcattctcacattcttctctgcttgcaaatacgggatgctgccattcaaatcgaaggacgaaccaaggatcgagtcctttctacaaaagaacgggaacctgtatccaaaaagatacacctacgcagatgtgaaaagaatgacaagatccttcaccg

SEQ ID NO: 130694 - DNA, 1606 bp, Zea mays
  Clone ID: MRT4577_50670C.1
tcttgatttaatcacgggttgtgtggtcatgccggccgggtcaccccgttcttcttctcttccacgagttcaggaggtagagtgagagagaacatggaacgacaggggatggagggcaacaatcttctgcattttcttgataccccgagcgcccattacagaaggacatgcgacggatttgaggcccaacacggcggcgatgaacactctgagacatcagatactgatccggcgaatgcaagggaaatgctggaatatttgttgaaccaaccagcaaacaaaatctgtgcagactgtggctctccagatccaaaatgggtggccctgccttttggcacattcatctgcattaagtgctctggaactcatagaagtcttggtgtgcacatatcaaaggtgatttcagtgaatctggatgagtggacagatgatgaagtcaactgtttagctgaatcaggcggaaattctgttgtgaactcaagatatgaagcctttttacccgaaaacaaaaagctaaaacaagattgctcaacggaggagcgtaatgattttatcaggaaaaaataccagtttcaacagtttgtgtgtgatccacaattttcatgccctttaccacttaacagaaagcatgcaccaccagataaaaatcaccagcagcataatagcagcaagtatggttttggccatacttttaggaatagctggagaaaaaaggattcagatagcaaaagcctaaagaaaatgtcggatgtgggaatgatagaatttgttggattagtaaaggtcaatatcgtaaaaggcacagatttagctgttcgtgatgtgatgtcgagcgatccgtatgtcttgattcatctagggcaccagtccatgaaaacaaaggtgataaagaacacactgaatcctatctggaatgaaagactaatgctttcgatccctgacccaattccgcctcttaagctgcaagtatttgacaaggacacattcagctccgatgaccggatgggggaggccgaggtggacatccggccgctgattgcagcaacgaaggagcacgagaactcgaccatcaccgaatcgacagaactctacagatggtcagccagcgaagacagcaacggtgtgctcgccaaggacagcgtcatctctgttgcgagtggaaaggtcaagcaggagatcacactcaggctccagaatgtcgagcgcggtgaggtcgagatcgagatcgagtgtgtgccgctcagccagtagcagtcccatcgtgagcaggactggaagcagaaagagggaaggaatacatcatgctccattgttgtgacaaggacactgctttgcaatgcagaaagacctcagcttcacttgtttgattgctccatgcctgtaattcgcgtgcatgtgtgagatgtgtaatgtgttgtacggtagataggcaaagggaaattatctacttatattactttgatgataggcatacggttgaactgtttccagtagatttcctgacctcagttgctagctggtactaccaggatggtgaaaagatctgtatgcattttgcccataaaaaaaaaaaaaaaaaagcggccagacgacaatggtgaccgac

SEQ ID NO: 130695 - DNA, 383 bp, Zea mays
  Clone ID: MRT4577_50671C.1
gaattcggctcgagccactcacagaccacaacctcgaaacccaacagggacccgggggccgggggggacttcttccacccgacacgagcaagagccctctaagcgcgagggtgcaaaacgcgcgcgctggcgcggcccgaggccagaggactcccagcctaatgccgcaagcaggacccgcctggccgccgacacacgcaccgcgcctctacagctctcgaccacgcccggaaaggtaaccacgacccgaaactcgcatcagctgctacggcccaccgggcccgtcaactcccctggacccgtgcttcgacacttgacaccgctagctccgtcagagaagcgcggcccccattatcccatgagcggcctaactgacgagagag

SEQ ID NO: 130696 - DNA, 551 bp, Zea mays
  Clone ID: MRT4577_50672C.1
ccaaaataccgtatcatcaaggcgcgatgaccaccatccactcctacatcggggaccatgagctgctggacgcgagccaccgcgacctgcgccgcgcccgcgccgcaagctcaaatggtgcccacgtacaccgacgccgccaagtacggctagctggcgctccctaacctgaaggggagctcaactggatcgcgctacaggtgccgaccccgaacgctggcgctggcgactcattggacagacttcaataagaccttgaagaagaggtgaaccacatgtttcgctactgcctgggacaaagagctcaccgtcatcctcgacgtgtgctaccatcagctcgagttcgttgacttcaggtgcttcgacaactgcttcaacatcaacgactgcgtcacacatgtgtcatggacgacgacatggacaagggcatcttctggtacaacaacgagaggggctactcgaacatggtcaacaacctcattaacatctgcaacataccagtgggatggaagcgttacattggaatagcagtttttaactgcttaccctgc

SEQ ID NO: 130697 - DNA, 304 bp, Zea mays
  unsure (1)..(304): unsure at all n locations
  Clone ID: MRT4577_50673C.1
ccggccgggattccgtcncaagccgagcaccgcagaaaaagaaatatacaagtcaaaggctaacggaatcccaatcaggcaatcaaaaggaagaactagctgctgcggccggagatgacactccatggtgtccacaacgttgttctcctcccgctcgacgagcactggtgagctagacgacgaggatcctgctgccgctcgatgcgccactgcgtgacgatccaccggcgtcggacgacgacggcgagcctgacgcacccccctacggcgacggtcatgacgttccagtcgtggttgggccgaa

SEQ ID NO: 130698 - DNA, 309 bp, Zea mays
  Clone ID: MRT4577_50674C.1
gggggccattgatttattattgcggtatttccagtgaacacactttgtaaatttcctataacgtgaaaaccgttacctcacagtatccggctatgctcccatgagaaaatctagacgacttgcctggccaaagataataatgtttggttgggaccttaaattcttttttacaaccttaagtgccgtgtcttcacaaaatgattcctcccaataaagtgaggggggtatccgcggcgagtagcactattctgtcttcatgtaccaagtttaattgcttcgtaggaaattcggtgaaacccaaacttttga

SEQ ID NO: 130699 - DNA, 2060 bp, Zea mays
  Clone ID: MRT4577_50675C.1
gccggccggatcaagtttgaaaatgaaaaccgtgacatcttgcttgaaattgcatccagctgatgtggataaagatgccccttttccttctaaatcaccacgaatcaatagggctgctccagttccctcgaagttaccttcggctgataaagctactccagttcttccaaaatcatctctgtcagtaaacaaagcagctctggtccgtcccaaatctccagcagttgacaaagcaactccagtttgtcctgaatctccagcagttgacaaagtaactccagttcgtcccagatctccagcagttgacaaagcaactccagttcgttctcaatctccagcagttgacaaagctactcatgtttgccctcaatctccatcagttgacaaggcaactccatccattgacaaagcaactccagttcgcccaaaatctccagccatagataaagtaactccaattcctcccaaatctccaccagttgacaaagcctctccagctccaccaaaatcactatcaggtgctaaagatgtgcctgttccttctaggtcgctgcaaattgataggttcattccagcccccccaagattatcgcaagttgataaagctgctctgccttcttcagaacagtcacatatatctccagctactaattctgaagcccaaggggcaactactaggaaggtcacaaccaccacctcactttcagaggctgctgcagcatggaggccttcaagtgctcctgtgttacccacaccaagatcaaccgggccagctgcttcacatattcaaacttccacattgctttcccgctcgatgagtgaagcagctgggagaaggccagtaaatgatccttcattttctgccccatcttatactccacagacctaccggaatgcaataattggtaagtctggtctgtctatgacctccgcaagccttgcgtatcagccgtcttctctggatcaagacactgctccttcacggcctctatcagcatatgcatcaagtacagtcatgatgcctcctgcaggaagatctgatcagtcatcagctaggcatggattcaagtctgggcctggtaagttagaagcacatgacggctggcagcagtggaaaggtgacaataatgttgatatgcatctctggagggaccacgctccttaccaacaaatgaccaacagtcaagcatatgagcagtctcggagggacgatacttatcagcaagcatgcagcagaggaacagaaaagttcagcaggcatgcaggactgcaagctaggcagcagttccaaaccgagacacccgccagtcatgtatggcatcaaccgcaggggccagtggcagaagaatttccacaccttgacatcataaacgacttgcttgaggaggaccagatcaacggcagtataccggagtcgtttcgtcaagactacaacgtgtttggcctgccattttcaccgagaggaaacgtgtcagacatgggaatggcttctgttagaagtcctgctcggttcaattcacccaagtatgagtaggtggattgtcgggggcttatgacatgaatgctgtcaatgggttgagggaacggcagtttccctcgttggatagctactctaatggcctgtctgacgtgagtgcttctaagccttggctgaatggctctgccagtccatcggtgagccttggggtcaacacaaatggataccacccccaggtgggtgactaccccctgggaaatggggtgaacggggtctccttgtggcgccgccatgccaacggccgctggtaatgcgaggtgcctgtatacaatcatacagtcggaataatgttttgttgtaacaaatggtttcgggcctgagctgatgcgccatgtaattaaaagtttttaagttttaaaagggaaagaaagagatacaccctgtaaaatctgcgcctttattaggataatttgagtgcttttctggttgaagttgaacactgacctaactttgttaaatttcaaagctaaatttggcggtggcctgtgggagagagaaaaaaaaaaaaaaaaaaaaacccaag

SEQ ID NO: 130700 - DNA, 2304 bp, Zea mays
  Clone ID: MRT4577_50676C.1
ccctgcattaggcagcgcataccgttgatcttaaaccttccctcgaggcaggttgggtggataatccacctgatgttccagagatcccggtgcattcatcagaagataccgttgatcttaaagtgaatggaacaccaaagaaggatgcatctgtggtcaaccctgttctggaggattctgtttcaggcataccagtcactgcaaacaatgaacctgtgccttctcccaccacaacaaaaatggacccagtttcaaacaaagttaatggatcaagtttgaaaatgaaagtcaccatggcatctccttgctccaaatcacatccagctgatatggataaagatgcctctcttccttctaaatcaccacgaaccaatagagctgctccagttcctcctaagctgccttcagctgataaagcaacgctagttccctcaaagctaccttcggttgataaagctactccagttcctcaaaaatctccgttggtaaacaaagtagctcaggcccgtcccaaatctccagcagttgacaaagcaactccacatcgtcccaaatctccagcagttgacaaagcaactccagttcgttctcaatctccagcagttgacaaagccactctagttcgccctcaatctccagcagttgacaaagcaactccagttcgtcctcaatccgcagcagttgacaaagcaactccagttcgcccaaaatctccagccattgataaagcaactccaattgctcccaaatctccaccagttgataaagcctctccagctctgccaaaatcattatcaggtgctaaagatgcgctttttccttctaggtcgctgcagattgataagtttactccagccgccccaaggttatcacaagatgataaggctgctctgccttcttcagaacagtcacatatatctccagctactagttctgaagctcaaggggcaactactaggaaggtcacaaccaccacctcactttcagaggctgctgcagcatggaggccttcaagtgctcctgtgttacccacaccaagatcaaccgggccagctgcttcacatattcaaacttccacattgctttcccgctctatgagtgaagcagctgggagaaggccagtaaatgatccttcattttctgccccatcttatactccacagacctaccggaatgcaataattggtaagtctggtctgtctatgacctccgcaagccttgcgtatcagccgtcttctctggatcaagacactgctccttcacggcctctatcagcatatgcatcaagtacagtcatgatgcctcctgcaggaagatctgatcagtcatcagctaggcatggattcaagtctgggcctggtaagttagaagcacatgacggctggcagcagtggaaaggtgacagtaatgttgatatgcatctctggagggaccacgctccttaccaacaaatgaccaacagtcaagcatatgagcagtctcggagggacgatacttatcagcaagcatgcagcagaggaacagaaaagttcagcaggcatgcaggactgcaagctaggcagcagttccaaaccgagacacccgccagtcatgtatggcatcaaccgcaggggccagtggcagaagaatttccacaccttgacatcataaacgacttgcttgaggaggaccagatcaacggcagtataccggagtcgtttcgtcaagactacaacgtgtttggcctgccgttttcaccgagaggaaacttgtcagacatggaaatggcttctgttagaagtcccgctcggttcaattcacccaagtacgatggtggattgtcgggggcttatgacatgaatgctgtcaatgggttgagggaacggcagtttccctcgttggatatctactctaatggcctgtctgacgtgagtgcttctaagccttggctgaatggctctgccagtccatcggtgagccttggggtcaacacaaatggataccacccccaggtgggtgagtacctgggaggtggggtgaacggggtctccttgtggcgccgccatgccaacggccgctggtaatgcgaggtgcctgtatacaatcatacagtcggaataatgttttgttgtaacagatggtttcgggcctgagctgatgcgccatgtaattaaaagtttttaagttttaaaagggaaagaaagagatacaccctgtaaagtctgcgcctttattaggataatttgagtgcttttctggttgaagttgaacactgacctaactttgttaaatttcaaagctaaatttggcggtggcctgtgggag

SEQ ID NO: 130701 - DNA, 1837 bp, Zea mays
  Clone ID: MRT4577_50677C.1
ttgggtacctcgtaaccggccgggggatccgaccgtcccggccagcggcgacggcgagctgccttggggcctggcactccggcagagtcgcagagaacaaacggctgccacagtgccacggcttgctctgcggcgagccttgggcaccgaggcgcctcccatcctctaagctccaggattctcaagttttcaagttgttgcgcagttccttcttctcggggaaatcgatccggagagaatggaagagccggattgcccagaaggttccgttcccgaccgcggaggagagcggcggacggcttccctgccgctgccggccgccttcctcgagttcctcagcgagaacggcctggaccctgcggtgtactcaatggcagccaccatcccgcgctacataaggctaaaaccaggcatggagtccaagatcgcagagattgaagccgagttgaagtgtgcccttgacaaggttttatggctgcctgggttctatgcgattccgccggaaattcagattgctggctccaaggcttatcagcaagggaagatctatggaattgatgccgcttctggagctgctatattagcacttgatgttcgaccaggaaatcatgttcttgacctctgtgctgccccaggtgcaaagctttgcatgctcgcagatacgcttggaaccactggttctctgactggtgttgatgttgcaaagcaccgccttgcggcctgtcgtacaatgttgcagaagtattctcttggtgaccgtactcggctctttgttgctgatggaactttgttttcccttttacctgtgaactccaggatgcaaagaatggaagggtcaattggcgttgaagaaaatggaagcatattcccagaatggacttcaaggagatcatggaaggatcggcagaagactaggaaagcaaatgcaaatggtcaacagcacctactggcagcttcagaacctgaactgatatactatggtaaacattcaggattagttggacagtgtaaatctgatgtcttttgtccatcagttgatgatgaagcttgtacatctggctatgacaaggtcctagtggatgcggagtgtactcatgatggatccataaaacatattcaaaaatttgaattctggggatggaaaagtctagatcgccgcgtacttgatgctgaaagaactgagaaccttcttcagcttcagttacatctcctcacaaatggttttaaattgttgaaaaccggtggatcacttgtatatagtacttgcagcttgacagttgcacagaatgaatgcgtggttcaacaattcctttcaacacacccttctgcagatttgcagaagatcaatttggccgacaattggccctgcagaagtggcggcatccccaaaacactgcgattcgatcctgcagtttcacaaaccagtggtctttttgttgccaagttctgtaaactaccgacttaaagcattttctggtctatcttcctggaccattcatgtcctctcacatgtaaaactgggttttcctgtcagcaactaaattacaagttggttcccaattcccctgcttttttttgtgataaattctcatttaatgtatgcttctaactttggcgagacaaaagtttctgttcttgcagttggattggtcagtcaaatacccaaacgatagcaaaccaggtactcaaatggctgatgttatcggcatgaaaccaaatcagttcaaagagattggtgttctttgtcctcctaaacgatgttctctctcccatgattcaaattatgactcatcaactcgattctctggaaactagtatagctttgaatatctccatt

SEQ ID NO: 130702 - DNA, 518 bp, Zea mays
  Clone ID: MRT4577_50678C.1
ccagtggcatgagtggcggtcacgagccctggatatgacaacaccacataaggcgctagcacaaacagctaagagagggaccaccgcttgcatattggttgtcatggatagggcaatcttagcttcctatatataatgtaggaggtttgcgagacctgacagagccctcgcccgacgggcgatttacagggcaatggccagcacaccgaggggcgccactagcggatccaagctcggcgccaacatgggcatagctgtggcctgagctaaattctgagccaaacacaattccactcacaataccacacaacatacataaccggaaacgtctggggtgcctactgagggacctaacgaacaagctaagtgacatgctcagtgtcgcgcttacagtccgcaaaccagtcgggacacctgtattgccgaatgcatcaacgaaccgggagaggcgcgttgagagagcgggtcgctctttcgctcgctctttcactgactcgctgacttactcgctgcgctct

SEQ ID NO: 130703 - DNA, 315 bp, Zea mays
  Clone ID: MRT4577_50679C.1
ctgtacgcgtgggttcggaccaacaacaacaacaccggcattcgacgcgacgacggcgaaaagcgaaccgcaaaggcccggctcccccgtctaacgggggtaccggcaagcaacggcaacccacccgtaacggcccccccccctcggaccccaatccgtccggcggacttccgcccagtcccggtacggggggggccggggacccctacggcacaggggccaaggctacacgcccccgaccgcctactgtgcccggggcgggtacggcaacgtcgtgcacgtcgcgcacgaggtcggcgacgagagggcttacta

SEQ ID NO: 130704 - DNA, 541 bp, Zea mays
  Clone ID: MRT4577_5067C.1
gggggaggagaaatttaaaactatttatataaggtggaaaaaaggggggaaaaaaggggtggaataggacatttactcgagaggggcttaaaagctacccgcaaccaaaaactttttcgggccctttaaaaaaaaaagcccagctccaaggggggggggggggggcccactgggggggggggcagtctaaaaaacagaaagggccggggggtaaaaagccgccgccgccgttaaaccggagccggacgggccattcttggagcaacaggaaatatgacatttttaccctaaaaacacggggcgacgggggaaaaacgggaagagtgggcttatgcaaaacgaagggggggggttagcaaaaaataaacaatctggagcgggtggcccccgggggacccagggggggggaaacagggaggaggggtttgccaaatatccgggggcccagcagctcaggggagggggccatcaccccatcccgctttttgaaaaaaggcaaaacccccccaggattgggtttttcaaatctgacggggggggg

SEQ ID NO: 130705 - DNA, 283 bp, Zea mays
  unsure (1)..(283): unsure at all n locations
  Clone ID: MRT4577_50680C.1
ggcggcttttttttttttttttttttttgttggaggtctgaggcgttcttttatgcgggggcgcgcancataaagctaaatggaacacaggggcatcatcatgggccggaaccatcggcccatcacgcatctaggacaacgccggtaccataccataccaccatctttaactgggccccgggttcacggttccttattttcagtgtcagtcgggagggggtccaaatccagaggcaccaccgggaaagacgaggttgggggggcgcggacacacacaaacact

SEQ ID NO: 130706 - DNA, 1259 bp, Zea mays
  unsure (1)..(1259): unsure at all n locations
  Clone ID: MRT4577_50681C.1
aattcccgggttgacgagctttcttttcggcggccgcccttnnctttttttggccgcgggttttttttttttttttttgacaaacaatacaggccccttagatttcagtggatatagtaggctacaaacagaagagaagaaacaaagtgcttgacaaacaatacaggcccctcaggtttcaggagcgatagatacagactgtgacaactcgactcagggtaacggtcgcggaggtcccctatccaccgggatacagactcaacttcagccattgccgcctctaccgacaagctagcgaagaactgttgaagctcaaatcgatgttgcgaaatccgaaacgtgcacatacgggcttcacccaatgtcaggacctgtgtatcttcgtaggatcggaccgcttctggtttatttcagaaaacaatcgatcagagtaacaaaaaaaaaacattaggacgatactcgctggctgaagagtttcttcctgatctcggggagcttttgcctgaaggagacgctgagcctggcgtccagcgtgttgtcgcagacgatcttgccgtcctgggacgcgagcaccacgccgccggagcaggacggcccgtgcgcgtcgcggctggtcctctgcggcggcaggtagaccttgccgtcgatgatgatcttggggaggttgaccttggccttctcggcgtactccttcttggccacctccagcaccgcctccaccaggctccggtccgcctctcggcaccgcagcaccagcgccggctccctcagacgaagcaggctctgcacgatgaggcccttgaggaccctcttgtaggcgttggcgtccttggtgacgcggagcagcgcgtcgccggcgctctccttcatcccggtcaccacgtcgtcctgcgcccgcagcagcttgatgcgcgccgcgttcagctccgtcgagtactcgatcttcctgcggacgtccacctgcttctccttgcgctcgtactcctgccgcaccctccgtttttccgactccaccagctgcagcttctcgatgctgaactcctcctcggcggcaacactgatctcgctggctttctcgtcggcctcctgcaggatgaaccggaccatctgctgcacctgcttcccgacatcggcgtcgttcatcttggctgcaaactaactcaagcgatcgacgtgaattcctgcgatcgagagtgccgtccggtcctcgagcgagatccaatttacctgtcccgtgtttttttacccggcccggccgg

SEQ ID NO: 130707 - DNA, 204 bp, Zea mays
  Clone ID: MRT4577_50682C.1
ggactttgtggggaaagtgtggtggttgcggtactggtactgtaacagctgtcagagctactttctcaccaagggctggagccgttttatcaaggagaagggcctccaggccggattacgtcttccgttactaccgttcctcggtcggcgcctacagcatgctcttcattgacttgcaagcatgcgactctgcagaacattcta

SEQ ID NO: 130708 - DNA, 212 bp, Zea mays
  Clone ID: MRT4577_50683C.1
caggagccctttgagggctatgacttgcatgttctctataatgcttcaagtgagtgtgcatgcgtggggacagaaatgattagcccttgtatattcctatggaaaacttagcccttctactattatctaagtgcatcatgtataccaaaatatggacagaaaaaaccatgtacacagacgcaatttttttaacatcatcatatactttaaaa

SEQ ID NO: 130709 - DNA, 465 bp, Zea mays
  Clone ID: MRT4577_50684C.1
aaaacgagggggattctcaaaatcctttacaaacacttgttttgcaaacataaggggtaaacccaaacaatttgggttttaaaaaaaaaaaaaaaacaaatactttttttggcacaacaataattttccttaacagggccaattaaaaggggccgggtgttaaccccccccaaaaaaaaccttttttggggcagggggggcttcttttttttccacccaaaactttttgacaagagggggtaggaccccggcctaaacaaaacatttaaacccgattacgggggggtttttttggtttcggtcctttaggggcaaaacattttttaaaatccccctgaaaaggttttggggaggtttgctgcccccctttatttggctggggccgggggggctacctcaggttcagggtggacttgacgggatttggtcctaatcccagccatgcctggtttttgggctcttttt

SEQ ID NO: 130710 - DNA, 338 bp, Zea mays
  Clone ID: MRT4577_50685C.1
cggaaaaccccggcattggtagcttccggtgggcccatgctttgaccctgggggacacagaacccagcccgacaactttggtccaccacacctttgaacctggacaaacaggcgcggacccccatttaattggggggcggggggcacctacaaggggaacggcagtctgggcctttcacggggggggccctaacccgaaacaaggggctgaaaaatgaacccttttgttttgccggccgggaccagccccatgctccgaatttgggggaacaccttgggggttagcccggttttgccttgaaaacacagcccggggaagaccgggttgaaaaacaaaa

SEQ ID NO: 130711 - DNA, 238 bp, Zea mays
  Clone ID: MRT4577_50686C.1
attcggctcgagccggatcgacatttttaatattcggccatgggccttctttaatgggtggtttctattgaggccggcatgggaacaaaccgcattgaacaaacgttggcgggtctcaaaaagaacaatgggctcttcttaattggggtaccagagaaatacatggggaaggtcatatggctaaaataacccccactggtagatcattatttttgtataaagattgtagactttaaaa

SEQ ID NO: 130712 - DNA, 409 bp, Zea mays
  Clone ID: MRT4577_50687C.1
ccctcttttttttttttttttagtaagaaaggacagggactcaaccaacacaggaacacaacaagctgcagacacggcaggcatggggctaccgcgcgcactgacaccggggcccaccaccattaccacccgacgcacacttttatttagcccacgtgggtagcaagaccgtaccgaaacacgtgacacgtcgacagtcagtgctagctacgtacgcggactacgttcgaacacacacacgcactacacacagagagacgccagtaacacgtacagtactgaacagaacaatcccgtggcatactgccatgtacacacgcggagagactaacccctccacgcgcgcacgccagatccactggggcctggagaccctggccgccgtcgctgagtgcgcacggcctcactg

SEQ ID NO: 130713 - DNA, 329 bp, Zea mays
  Clone ID: MRT4577_50688C.1
ggtaccgaattccaattccgggctacgacgcacgcgtacgaaaggattcaccacgccgcccgttgggaagggagcttcgaggcggcccgccgcggcgcgtgggccgggcgggctgagccaatggcacgggcccttggggcacgaacgccctaacttgggtcggggcgggcggagaacaaaagcgcccgttgctagattggattctaacttagaagcgttcaaatctaatccagcgcacggtagcttcactccactggcttttaaaccacgcgccatgaccaattgagtaaaacaacggctcctactgtgctaagttgaattactatcgc

SEQ ID NO: 130714 - DNA, 396 bp, Zea mays
  Clone ID: MRT4577_50689C.1
tacggtgagccgctgtacgtcgcggctgcgtccagctccgcctggtgccgggactccgtggttttgggcatctgcttcgtctctggtcgatctgcttcatatacttctagatctgcgccatctccgttgctacgaccttgaccccaagaagtttgatgaggacttcaatatactaaactggtggcatgaacataagttgtcctatcctattctatctatcttagctagagatgttatttctgttcctgtctcaacaatttcctcagaatctgcatttagcctttgtggcaggataattgaggaacgacgacgtcgcctagcaccagaaatggtagagatgttactttgcatgaaagattgggaactaagagaagcaagagggcaacactctacaca

SEQ ID NO: 130715 - DNA, 1044 bp, Zea mays
  Clone ID: MRT4577_5068C.1
atggccggcctcctgccccagcatccagctactgtagacatgagtgacagcgtgctcatcagttcctgtttcacacataaattcaagatcaactatgtggagacggagaaggtcgccgtcgagcactcagtcaggtcggagcaaatcctcgccggtgggcacctctggaggatcatctgcttcccgcgtaggatcggaggtatgaaagagagcaacgttgagtacctatctatatacctctgtcatgagagcgaatccaaagacgtcaaagctgtcttcgaggcctttgtaatgtacaaagaaggcactccatctttggcccataagaaaaagctggtgcacgttttctcacccaaggccggcggcaggcacatccatggttggccttgcttcgtggagcgaagcgtcctacagtcgttctacgtgacgaattctggctcgttcgtcatcgtgggagccgtcaaagttttgcaggaggaccctctcgacgtgccgccctccaacctcgggatccatctcggcggcctcctgctgggctccacggacggttccgacgtttcgttcgttgtcggcggcgagaggttcgctgctcaccgggccgtgcttgccgcccgctcgccggtcttcaaggcgcagttcttcggctccatggcggaagccaccatgtcgtccatcaccttgcatggcatcacggcagcgacgttcaaggccatgctccgcttcgtgtacaccgatgcgtgtcctgaagaagcccccagcgaggcgtttcaggacctgctcgctgctgctgaccggttccagttggatcgcttgaagatcctgtgcgcgagcaagctgtggaataatgtctcggtggatacagtttctgctacgttgatctgtgccgaaatatataactgcccacagctgaaaaggaagtgcattgggttcttcggggaggggaagggcttcaagacgaaggctgtgttaacggatggttttgctcagctgtcgcagcagttcccgtccattcttgatgagctgaggaagaaggttggagcatag

SEQ ID NO: 130716 - DNA, 450 bp, Zea mays
  Clone ID: MRT4577_50690C.1
aaaaaaaaaaaaaaaaaaaaaaaaaaaaaaaaaaaaaaaaaaaaaaaaaaaaaaaaaaaaaaaaagggggaagctttttaaggtccaagggtttgagaacggggggggggtaaaaaatagatatttttttttgttaacttaaaaaaatttgggggggggcgttttttgaaattcccattttttaaaccccgttgtctccctactttttttttcttttttggcccccccctttttcctttggggggctggttccaaaagccctgccggggggaaccgccgccttttgcccaattttggacgggccatgggaacccctttttgcaagggggttataaaagaagggggcgggggtttcgcttcttttgccaaattttttgggcaaggtggtggagcccgcgccccttcctttttttgccttttttcgggggggggggggggggttttcccccg

SEQ ID NO: 130717 - DNA, 1621 bp, Zea mays
  Clone ID: MRT4577_50691C.1
tccgcccagcgtccgccccgcgtccgcaccatcccctctctaccttcttatctcttctatccccgctctacctgctgatctctcctcgtgcaccagcaacggcgcaggcacaggcacagagagagctagctttggccaggcgtccacagcagccagcaccagatgtcgacggtggtcatggtggttgatcttgagtgcgagtagtgctacaagaagataaggagagtagtttgcgttcttcagatgtcgacggtggtcatggtggtggatcttgagtgcgacaagtgctacaagaagatcaggaaggtcctctgcaaggtccaagacaaggtgagcatcaggaccatctcctacgacgagaagaacaacacggtgacggtgtccggacccttcgacgccgaggaggtcgccgacaggctcacctccgacgccggcaaggtcatcaccgacatacacgtcgtcgggggcttcggcttcggcttgggcgggggcggaggcggagggaaacaacagaagcacggcgccgtcgcccccggcaaggcgcccaagcaagggaaggccagcggcaacgggcacggccagggcgggcacggaggcggaggccatggcgggcacggcggcggcggcggcggaggtaacgggcacggccatgggcaggccggcgggcacggaggcggaggccacggcggcggaggcaagccgggtaagaataagcacgtcaagttcgacgacatggacatggacatggacgacgacttcgacgaccttgacatggacgagccggccggccgccacgcgcacgcgcacgggcacgggcacggcgacggcaagccgaagatcgtcaggacgacaaacacccccatcgcggcgcggctggaggcgccccgcacgggcccggcgatgtcgatggccgcggcggcgcccgtgaggatgccgatgccgatgccggcgatggcgccaatgccgcagcagcagggcatggggggcgcgccgtccatctggccgcccgcccccgagtggggctacagcgcgcagccatacggcagctacagcggcccgcctgccggcgggtactacggcggcgggggcggccccgccgccgccgggcactggccgtacggtggcggctacggctacggctacggccggaacccgtacggccagcagtactacgaggacgaagagcccagcgctgcgtgcagcgtcatgtgatgccaccggctcgtctccgctacgcgacatctcgtgtcacgcgctctccgtgtccacgaccacgaccactgctgtaaaattattcctagtgctcgtgtatgtatgtatattaagctgtatttttattttcgccagccctattttcactgtttttttatggcgtttggtttgcttcatgtgttgtcagagtatcttgtttgtgtgtgtgtgtgtgtgttttggagtggataaagttcgtcatagattgacggtacggtaataggacctaggacgaacgaagctccctctccagactccagtgtgtatatgtatgctacactctttatctaattatgttcttcttgttaatgcacggacaactgctaaactcaaacaaaaaaaaaacccacgcgtctcgaccagcgtctcg

SEQ ID NO: 130718 - DNA, 837 bp, Zea mays
  unsure (1)..(837): unsure at all n locations
  Clone ID: MRT4577_50692C.1
tgctgctgctggtggtgtggtgtggtggcgtcgtctcaacaaaagcgagccgagcagagtgctgaggcacaaacaagtacaacaccatcccctctctaccttcttatctcttctcctcgtgcaccagcaacaaaggtggcaggcacagagagagctagctttggccaggcgtccacagcagccagcacaagatgtcgacggtggtcatggtggtggatcttgagtgcgacaagtgctacaagaagatcaggaaggtcctctgcaaggtccaagacaaggtgagcatcaggaccatctcctacgacgagaagaacaacacggtgacggtgtccggacccttcgacgccgaggaggtcgccgacaggctcacctccgacgccggcaaggtcatcaccgacatacacgtcgtcgggggcttcggcttcggcttgggcgggggcggaggcggagggaaacaacagaagcacggcgccgtcgcccccggcaaggcgcccaagcaagggaaggccagcggcaacgggcacggccagggcgggcacggaggcggaggccatggcgggcacggcggcggcggaggtaacgggcacggccatgggcaggccggcgggcacggaggcggaggccatggcgggcacggcggcggaggcaagccgggtaagaataagcacgtcaagttcgacgacatggacatggacatggacgacgacttcgacgacctggacatggacgagccggncggncgncacgcgcacgcgcacgggcacgggcacgggcacgggcacgggcacgggcacggcgacggcaagccgaagatcgtcaggacgacaaacaccccca

SEQ ID NO: 130719 - DNA, 647 bp, Zea mays
  Clone ID: MRT4577_50693C.1
ttttttttttttttttttttttttttttttttttttttttttttttttttttttttttttttttttaaacaaaaaaagttcaaacatttttaaatttgggtttgggcccccatccaaatttttacaagttacaaaatccataaaaggggtaaaaacctttttttttttttggttgggggccccccccccgggtaaaagcctcaaaaatctttggggggccaaaaagggttttgttttttcacccctttacaaccaccaggcccaaactgggaacccctggcccccccgttttttcctcctttacctcgttaaaaaagacccccaaacctgtccccagaaaaaacaccggccctttttttttttgaggggaaaaacccttcttccccttaaaaataaagggggggcacaaaataatttcccttgggaaacccccctggggggctttgttttccccacttttggacggacaaaatcggctccttttttgggtaaaccctctccttttttttttaagccggaacctcctttgtttttttccgggactccctagccttcctccgctcctaagtttcctaaatcctttttttttttgaaacaacccccccttgattttgggcatgggggcatcagtcttcaccatctaaggg

SEQ ID NO: 130720 - DNA, 430 bp, Zea mays
  Clone ID: MRT4577_50694C.1
ccccaacaatgtttttcacaaacctgtactgtatcatattgggcaaagtacagggaacatgataattcatttcacttggactacaaagcaagcgagcaccctgcagcccggctctatactactggtccaggcccccaacgtccggtaccacccctcggaggcgactaatactcacctatattgagacgactaaactcctggggctgacagtctgtcatataaccttcctgtgcgaaagagtttttccactgcaaacccgcacaatatactggcgcggcttcatggatagaatagccagtgcggccgattgagtaatctaactcacattaagttagttcagctcacagctcactctgcagcttgaaaaccagattgcaccaatcttgtactaaataaaccaatccgaccagagaatagactggctgatacg

SEQ ID NO: 130721 - DNA, 1831 bp, Zea mays
  Clone ID: MRT4577_50695C.1
ggcacatggtttctggcaagttatcctcaaagtcctgttataatgccttcttcttggggtccatctcctttgagccgtggaaacgattgtggaagacttgggctccgcctaaatgcaagtttttcctttggttggctataaggaataaatgttggactgcggacagacttcaaaggagagggttgcaatacccggtgtgttgccccctatgtgatcaggaacaggaaaccgtccagcatatcctctgcacctgcagtttttctagggatttttggcatctcattttgtcgtccatcgggcttggtaacctcactcctattgctgctgaacagtcatttgctgtgtggtgggaaaaggtctctaaaagagtgcataggtgcaagaggaggggtttcaatagtgtcattatccttggagcttggtgcttatggctctctcgtaatagggctgtttttgatggagtgagcccttccattagtttgactaagagcttgtttctaaatgaattgatcagttggaataaggcgggagcgaagcatttagacagtttgggaattattgtcactttaagggcttgttcggttagctctcaatccatgtggattgagtgggattgaatgagtttgaatcccaaacaagtcaaacttcttctcaatttttttcaatcctatccaatccatgtgtattggaaataaccgaacaagccctcatatgtttacaggtgaaacggaaacagcatggcgcagcttgattcccccattttattgtgcagagaagcgatccacaaatcacttgctgggaatctctattgttttacggcactagttactggttttgctaagacacatagagcggttcaggggccgttttcctttgtatccagttgtcttcggaccatttacatccttcagtatccactacatgtaagctgaatgcatgtcttgacgctggagaaaggttctcaaaactctgatgtataagatctccatgtatcaccaccaaagcaccagattttacttccagcggtacaaattctttctgatcatagactggggagggccgatcaaaatgtgtaccattttcatctctgaccatacgtctcaccaaaccctttttatgtgatcctggaattgcccacaggcaaccattgttgattgttgcatcttcaagtgcaagccacagccctgtgcatgtacgaggttccgtgtaaaggaatgtattatcctggtgcggcacgacctcaccaccaatacctggttgcttaaatatgtacatagattgaatgactgcaggcctcttgtagcctaaagaagagaacaagcttgcaacactctctgagaaagaaaactttttgaacaccggatcaagttcatgtaatgcttgttgccaatagcgcgccccaagccacgtggcactgcagcagcatcaacatcaccaacatgtggcctaaggtcattcgttgcccatgcaacaataagtagtcctgccactgccttgaaccaactctgtggaaggatatcccctcatcaagtgttttgccaatactgcctatccaccactgcccattggcactgccttcaagccctacctaaggccataagagagcttggcatcggcggcgacacgtgcggaggggaggaactgggcgttgccgcattgggcgagccgagctaaggggggcggggccagggccgccacggaccccaccctgtccgcgtcgaacaggaaccagtcggcggaggcgtcctgcagcacccgcgcagccgtggccgtgtgcggcgggtactcccgcatctcgctggggaaattccatgtctcctcgtgccgaatt

SEQ ID NO: 130722 - DNA, 725 bp, Zea mays
  unsure (1)..(725): unsure at all n locations
  Clone ID: MRT4577_50696C.1
agtctcaagggtgccgtgcttttaatctagggcctaaaattgggtgattaaggggctgtttggttcgtggtcatactttacctaaggttagtcgtttgaactgaaaaactaatcttagtcagaaaagttaagcaaagtgtagtaagttagtcatcaaaccaaacaggctctaaaagcaagttaaaatcccccggaattgactgcattttgtttgtcttgttttcatcaatccaccggaattcagtgattaaatctcgcaagttaaaatttttcttaatttgctcaatatttttcagcgatatccgttcttttgaatgggtctattcacagaaggtttggttgtgaacacgaatattcaattgatatatgtgtactttttaaaggtattttatggttatttaaatgtagctgcgtctgctcgttgaggtgtggatctttcctcaacacggtgaggtcatccgtttgactgctagcctaggcgtgctgtcccggatggatggtggttcaaatccaccaagattctttagtagtcggaacttattgctcaccaaagaacttaccattgctttaggatgttttatttttgtatataggcttagccggttagggcctgtttggatcagtttataagaaactgttttttggaaaattgaggtggttccaaaaatctccctagcctttcaaaaaaaaaaaaaaaaaaaaaannnnnnnaaaaaaaaaaaaaa

SEQ ID NO: 130723 - DNA, 962 bp, Zea mays
  Clone ID: MRT4577_50697C.1
agctgaattccgtgctgtcgccccattttattgtgtaaggaagcgatccacaaatcactgctaggaatctctgtggttttactgcactactgattagctggttttgctaagacacatacagcggttcaggggccgttttcctctgtatcctctgatgtataagatctccattctccatgtataaccaccaaagcaccagattttacttccagtggcacaaattctttctggtcataggctggggaggggcaatcaaaatgtgtaccattttcatctctgatcatacgcctcgccaaaccctttttatgtgatcctggaatggcccacaggcaaccattgttgattgttgcatcttcaagtgcaagccacaaccctgtgcatgttcgaggttccgtgtaaaggaatgtattatcctggtgcggcaccacctcaccaccaatacctggttgcttaaagatgtacatagattgaatgactgcaggcctcttgtagcctaacgaggagaacaagctggcaacactctccgagaaagaaaactttttgaatagtgaatacgggatcaagttcatgtaatgcgtgcccgactttattaattgaaagttcttttggttgtttcaagcatccattatctccatatgccttttcctcaaagaagaatgagatattctctgcactcttaaaaaagtaaacatccttcaactgccgatgatccttggtagagaagacgccggagttggcgccatcgaacccagcgacaagctcggccatgcggtcccgcatctcccgcaccttcccgcgctcgagaacgagtccatcacgaggtacccattggtctcgaagaagatgagctggtcggcagtgagggtactggctggcggcatagcagcggacggaggcggaggcgaaggcaaggggagaagtgttgaccaaaagtccggaatccggcccggccggcctcgagg

SEQ ID NO: 130724 - DNA, 379 bp, Zea mays
  Clone ID: MRT4577_50698C.1
cggcgaattcagcttcaccgccccgatacattcgcgcactgcatgtctgaggatcacttcctcgccgtggttcgtgctattcgccaagagctccggtcagcattattcgcagaggattctcacataacaattgtctccatcacacaggtcaactcgatttggtcaccgacaacggcacagtttgctaagacctcatcttcatatcacctcccgtatcacttcccaggatccatattgatgctggaggaagagtccacagggcattcagggtatgcctgagttcatcgacgactcaacgttgatcgtcaatcacgacttacgaatcactaagctcttccatagtttcccatcatgatgtgtcaccgttagtctcaccatt

SEQ ID NO: 130725 - DNA, 377 bp, Zea mays
  Clone ID: MRT4577_50699C.1
acgaggagcactgcatgcgcgacagctactggaaggggaggccgtttgaggcctacgtactcccctaccataactactcatgtcagccctactacttacactctcaaccagagtaagaaactgccatagtaaatttcctacgcattgcgccagacaatgccaccaccggctgtaactcgtcttccaccgaagcggccttcgtgggcctcgtcgagttccgcaccctcatgatgctaagcatggcggaaaacaacaccggcccgcccactgatggtggcgttgcgcaccgccttgagcccaactgcgccgtgtacaactacgccatggaggccaatggctccaatgtgcttccgcacaataaggatgccaaaggctcc

SEQ ID NO: 130726 - DNA, 333 bp, Zea mays
  Clone ID: MRT4577_5069C.1
ataagtcttcgatcccaagcggcccagggggggctttttgaacacctgggggcctgtcaccaatggaggaggtgggcggggtggccttagggctgggttcaccgagcttgataaaaaagaaatagatgagcctaaaagacctcccaaagaggctgaggatgataatggacataactctcgctcattcaaggagatggataagagattccaatataaaggttagcatacggaaggtgcgcccttcatcaatgagcatctacagacctgatgggaagatgagcactggaatcctattgaagggcaaatcagatggaggcacatggatcttgttat

SEQ ID NO: 130727 - DNA, 242 bp, Zea mays
  Clone ID: MRT4577_506C.1
cataccacgttgagggtaaaaacaggggatgtgtaatgcacggcgtgtatacacccatacaaggaattaccaggcatgatgacaggatctaagataattaaccattacaccttgatttatacaaaacaaagatgtccttttcatctcccacgctatcatctcataacactaacccgatgatatgccctcaataaatcaatcgccatgcctcgcattctttttatgagctattcaatgacttt

SEQ ID NO: 130728 - DNA, 341 bp, Zea mays
  Clone ID: MRT4577_50700C.1
ttattttttcccgaacacaaaaaacacgatccgagaagttttaaaaaatcatgaggcatgtacccccaaacttcacaaagccatacaacaacaattaccctacgaccacatcaaagcaacatgaacaacccaaaccccgcactcaagaaaacccccctacctaccaacaggaggcaaagctaaaaaaaacactcgggacaatttacccccaagaaaataggttgcccaacaaaaaagacctccaccaaaagggaagggcacccccggagggtgaggggaaaacccccgcatttggactttcctgggccgatggaacaattctggggggaccaacacccccc

SEQ ID NO: 130729 - DNA, 751 bp, Zea mays
  Clone ID: MRT4577_50701C.1
ccggccgggatctcatctcatctcatctcatctaatcacactcacactctcactctcaactctctcaaccaacaaacaactctcttcctcaaactcaacaccaaaaccaaccatcaccatgaagttctctgccctcgccgccgccgccgccgtcttcggctctgctgccgctgccaacaaggctgtcgtcatcaacgactgtgacactgccatctatgtccagtccgttcccttcaacggcggcgctcccggccccttgaccaccctcaagcctggccagcgattctctgaggacctccgcacctctggctctaccatcaagattgccgacacccgaactctcaacaagcctctcttctttggctactcctccgacgccaacaacgtctactacgagctcaacactcagtacggcaaccccttcgccagccagcacaacatcctcaaccctggtgatggctgccagaagttcgactgcaaggctggtgacgccaagtgctacagcacccccagcagcaagaagaactacagctgccctaaccccgtcaccctctacgccaagatctgcgccaagtaaacgtctggccaacaaaagtcgatgctctttacgaagcatagttaatgactggttcttctttataattccgacattcagtatatatataattagacaacatcaaagtttaccgacaaggtagccttttgtacattgcaatacaagcacatacatttctcttcataacccactgac

SEQ ID NO: 130730 - DNA, 424 bp, Zea mays
  unsure (1)..(424): unsure at all n locations
  Clone ID: MRT4577_50702C.1
ccccccttaaataacgcccaaagacacgccccacaacacagcccgccgaagaaggaagagcacaacaccgcccncnnnaaagagaaaaanaaagggcgcaaccgggagagccccgacacacgcacaaagcacccgaacccgagccaaaagaccgccccagaaacaccacctcgccaaaaagtggcgacctacacacaaaacatggaaaaccgggaacagaactcgcgcccccaggcccagccgagccagcaggcagcagacacaccactcaaacaacaccctgatgccccacgacggctgcagcaccaagaggaccactgtcacccaccaagctccagcgacgcgccccagaacaacacgcggcagagggacgcgcacaccgccccacgagtactgacgagacgtaaccccccagaccacccca

SEQ ID NO: 130731 - DNA, 530 bp, Zea mays
  Clone ID: MRT4577_50703C.1
aagagatttaattcaagagcatatagcattcagagtatggccgcttgtagaaagttgggaaataccaaaggagaccatcaccaagtctagcgaaggtgacctggtccggctgaagtatacattcaggtatggggataagttcgatgaaccaaacgatgactggctgaaatgcatcgaagctacaagtgatgagctgcttggagcttattccaaggaagaagataatgcgctatctgcagccttcggaggtcggggaagaaagagaatgaacagagtttttgacgccatcgactttgtctaccccgactaccgctacccgctgcggggacaggggaagaagagaaaagctgctactttggccgccccagctaagcttgtgccgaaggctgcgggcaaaaagatgaaggttcttaccccaccgccgcgttatattgaaccggttgtggtgcctgagtttggcggtgaggcctcttcagctgctgaaacaagagaaactattcctcccacgcagaggactaaagagccggcta

SEQ ID NO: 130732 - DNA, 366 bp, Zea mays
  Clone ID: MRT4577_50704C.1
tcgcgatctagaaccggacgcgtgggccgcccttttttttttttttttttttttttttttttttttttttttttttttttttttttgggccgaaacacattatattgacaccggtagccttttaacagggagcaccactaaatcaaatcgcggaggggccgggatcgcaaccgccttggccatgtttattttcttggggaccacccctttcggtagcttccagtcaaagggaaacaacaacgccccgagagcgagctcaatgtgcgccaacccgaacgccatgccggggcacattctcctttccgcaccgaacgggatgaacttaaaatccatgcccttgaagtctggaccacttttcttaaacct

SEQ ID NO: 130733 - DNA, 408 bp, Zea mays
  unsure (1)..(408): unsure at all n locations
  Clone ID: MRT4577_50705C.1
ccccccttgacgtgagtcaacccactgaactccacctctattctcacgcgctggtggtaaggacgcatctacctgactaccttcttgcacccacagctgtcagaacttgcccaaatgcccgttctgcggtaggtgctccgctatcactcacgctccagaatggcatccgncagagcgaggggggctgatagacctgcgatttagcgaacactgcgctggatagggctagggcctcgaggggtcacgctaaggggggagcgcaacatggggctggcgataggggtggctgaggtcagcgacgacgacatcgggcacagggtgtagcggatgagagactcgcagggcggggatgcgacggacttcatttcaggctccatctggggagctggatagggagggggcaagaag

SEQ ID NO: 130734 - DNA, 211 bp, Zea mays
  Clone ID: MRT4577_50706C.1
cggccgacccacgctttctaaacaaaatacaattacttttttttaatttttacaaccaaaaacaaccgacattacgcaaatcttacccggtaaacgcaattttataaactttttacacatatacaaaccaacccacacaacctttacatcattcttttatcaatgatcattaatgtacatctcccaacttctttctcatctccaacttatc

SEQ ID NO: 130735 - DNA, 442 bp, Zea mays
  unsure (1)..(442): unsure at all n locations
  Clone ID: MRT4577_50707C.1
cngnnnnnnnnnnnnnnnnnnnnnnngnnnagaacacaancnnnannanananagaggcgagcaaanccaaaananncagcgagaacaccncgggggnnnannacaaaccnccaggccacccagcaacgcggnacaaaccnccaagagcaanaaacggggcgcagggaagcacggaccacaaggggaccgaggcganncagnccccccncggaagcccgggcgggaaggcccgaaggggnaggagcaccnncnggggccgcccccgggnnncagcancgaccagannnccancgcgggcaaaccgggggggccgcnggaaggccgggacgcacagnncgggccgggnggngaaagggggacccaggaaaaccccgacccggcggagagggggcggcgaccncccnccnccaaagccgccgccggcgcccacgancgcagcag

SEQ ID NO: 130736 - DNA, 416 bp, Zea mays
  Clone ID: MRT4577_50708C.1
caagcggatgctagagatgatcaagatattgatggagagtgatctcaaccaaaaagggaaaaaaaacacaagaggacactaaagacaaacaggcaagagtaccataacgccaaccgagctctctacagcatgctgaagaaggagcagcaccagctgacaccaccgaagccatcaaacaaatgtgaaaaaatcatcatgcacgacgaactcataaacaaccaattgctacgacgcgaaccccgatggatcataagaacaaggacgaacaacaacaatgaagaccaacccgctgcagcacaacgatgacaagatcaagactcaatgacaaaagctgccgaactacaaggactcagcggctagaagcgcacctgtactgcaaacacatcgacaggtgcactctgagcaagatgcggaga

SEQ ID NO: 130737 - DNA, 339 bp, Zea mays
  Clone ID: MRT4577_50709C.1
cgttcatatacaaaaatgtctcttcactcttctctcaccatgtcattgctgtctttctcctttttgttgctgcggacttttagtgccaaagctattgttcctccatctgaaacttttaggtttgtcaacgacggagaatttgggccgtatgttgttgaatatggtgcaaattaccgcgtcataagcatagctaatgcccccttccagcttgcgttttataacaccacctgtaatgccttcacccttgcgttacgcatggctacaacgcgttccgagtcgctcttccgatggtattgggaggccaacaggggcaaccccgttcgcgagaatgccacgttc

SEQ ID NO: 130738 - DNA, 244 bp, Zea mays
  Clone ID: MRT4577_5070C.1
gtagatcgatggaagaggggggaagaccttacatgagaccaagcgctttcaacgctttcaaggggcgtgtaccggctgtgtcgagtgcaactgtgtacataactctagtgcggatgctaacgggcacgctccgaattcaccggctaacgctcgaggccatgcgcttccgtccttctgacgcgtatcgacgagcaccgcaccacgccgactctgcttagaatgatcacccacttgaagctcctcg

SEQ ID NO: 130739 - DNA, 135 bp, Zea mays
  Clone ID: MRT4577_50710C.1
ccgagaccagaattccttcggcgacgcggttgccgtttgacgaaggaaactgtcgcgtgacagcgaaatttgtatacttgtaactttgtttaataatatggctattactcacaaaaaaaaaaagattttttttta

SEQ ID NO: 130740 - DNA, 334 bp, Zea mays
  Clone ID: MRT4577_50711C.1
ggagcaccaacggctgagtgggcagctgcgaccgccgctggctcatgatccacggccactgctaaagctgcatctccgggaccatccagtaaccgaggagcccggctgacatgtgctcggagatcatccccaaggccaaggacggcgggctcagcaccatcaagacctactggacctgcaacatgacacaagcccgaaaagacagagtgaagctcgaaagggcagaacgacgtggcgaggttgtttcacctgatccaggaccacgacatgtacgccatggtaccggtcgggcccttcatccaggcgcaggtggaacgacgcgtcgactgcccta

SEQ ID NO: 130741 - DNA, 783 bp, Zea mays
  unsure (1)..(783): unsure at all n locations
  Clone ID: MRT4577_50712C.1
ccggccgggaaacgccgcgtccccgtgcatgcgttcctcgaataggcattacacgctcaagcgacaagaggcaacaacaacaatatcacattcggccaacctaataatggaaggatgccggcgatgtttgctttttttcgccatggatttacggaaacgcgatacccatctgagagtttgctggagtgtaaagagtcgccctctccaatctcatccagtccagtccagtccagaccagaccgttgagattgaatgtgtccaagtgacagaactcaaaatgacgtctaaggccagccagcctcaagtcaaggctgatcctttcgactttcgacttcgactttcaattgccgatcactcaatctggacagactagacaagagtctttactcaaatcggaacaactctcttcccccgttgcaattttggatctggttcccgctcactcccgcttctggtcgcggaacaattccctaccaatgctttgcctttgcctaccaacactcgctcactaacgatagttatgccagcatcaatcatcaagccagcgccgcatatctcggctaagtcctttcacagtatttgtaaatccatattctttctaggctcgtccaccgccacagcccttttagtgaacatcattcctctgcggatcccgcggcggctcttctccttggcggtggaggttgtccatgctttcgtgcactagggaggcctcgaggctgaaagctgatgaagcanagtctcttggccttttatcacggacagtcacgtaagcgaactaca

SEQ ID NO: 130742 - DNA, 383 bp, Zea mays
  Clone ID: MRT4577_50713C.1
gcaaatattacatgcgccatcttctaaagttggactgattggtatgtaagggcgctgggtggtgttggaacggataccgtgtactgttttgttgcttttttttctctagtattaatgattatgatgacgaaagtccaaaaaaaaaaaaaaaaaataaaaaaaaaaaaaaaaaaacataaaaaaaaaaaaaaaaaaaaaaaaaaaaaaaaaaaaaataaaaaaaaacaaaaaaaaaaaaaaaacgggggggcccctccttatgtgttttattacccccgataataaatcttggccgggtccttgggggctcccaatttttctttttggggggttttatgaaatttggggaaaaaaagggaaaaaagtttcccgtgggaaaaatt

SEQ ID NO: 130743 - DNA, 252 bp, Zea mays
  Clone ID: MRT4577_50714C.1
ggggggcaaactttataaatccccaggcaagcccaatttaacagggggggggggagccctggacttaaacatttggggacaggaaactttcaacgaagtttttttgcgaaaagccattattacaggaccgactccccataaaaaaaatttgcaacggggccttcctccaggggtttaaggggggggagggggggatctcaaccccctttttgccaagcgccaacaacgggggcgcctcttaggccctaaaaa

SEQ ID NO: 130744 - DNA, 1026 bp, Zea mays
  Clone ID: MRT4577_50715C.1
gtcgacccacgccgtccgattttttctgggtaagattagaatctactggaagaacagtgttctcaaactagaccttagataaaaaaaaagtggagtgaataaaagatcctgtgtttcataacgaacggcacgaattgaaaagggcagcgacgagtttcctgtactgcacgacgccatggctgccctgcccctcacatgtcgatagcacgtggaaaacgatgggcacgtgttcgagccacccgcaagtcgcgccgtggctgtttccatcatgcatgaattattagtactagcactagcaggaacacaacaaatctattttccacatgcttgatagcgactggtccgagtcctacgccgtcgccgggcacaaactgcacgtgctcggctatctcgcatatgattagtgtgtgtgggttggatcggatgcgagtgactgattggcatttttagcatcgataatattttactatttttggatgaaaaaaaagagacttacaatcctgtggttttctttgccaggtggattcggaccagacgaatcgtatccagatcaagcacatgatcgaggccgctctcgcccagctagatgatgcctccgcgagcccgccgagcgtgatgagctactattagaatcggacaaccgtcacgctgacatgcacgagccggcctagctactgtggccgaccggtactgttccgtgcgcgtatataggaactaggaagaagtgggtgctttgtttgctatatatgaggcactaggtcagggggttttgtgatggggctttatgcaactttgatgtaatggaccgccaccgacagattgagtgttggcggctagctcccatatgtttagagtctagggaaggaataaataatcgagacaagtcttatccctgtatttttgtagagaggtatttgaaacaagaagttcatcaaatacaaggggaaaatgtcatggcgacaaatatgttagaaatctatggagttctatgtttaatttaatctgaaaatagcataatatgtgccg

SEQ ID NO: 130745 - DNA, 389 bp, Zea mays
  Clone ID: MRT4577_50716C.1
cttcgagctttatacactactaaccttaagcacttttttgctttcaagcttaattttattacaaacttttaatttactctaatcaattaaaatgttcaaatttgttgttctcgctgctttgctcgccatggccaatgccaatggtttgttgcacgctggttatgctgccccagctttagctgccgttccagctgtagctcactctcaagctgttgttggatcagctgttgttggacatcaagttcattcccaagtgtcttatgtaccaaaagttgtttcgcaaccattgtccatcgttaagccagccacctaccaaatcagctctggtgcttccatcccagccaccggcaaaattatcgccgctgctccattgttggccaagccaattt

SEQ ID NO: 130746 - DNA, 518 bp, Zea mays
  unsure (1)..(518): unsure at all n locations
  Clone ID: MRT4577_50717C.1
aacacaaattattagatagattatgtaatatagatgtctagataatccataagccaccaatatgtgcttatataatctataaactgaattatataatcttcgaagaaaacaaacaaaatcttactaaaaactatctccgtatatgcaggaaggcatgctgcaagctgctaacgaagttcttcaggagaaggtaccgccctgagctatatatataaaaacttttgaggttttgttccatgcatgccatggtaagcaactgacggtgtgaatctgatgttgtgtgcagatagtagaacagagtagtttgcttgacgtaggcatggttgtagcggatcaacagaacgggcattttagtacagtcccactggtagaagagatgatcagtaacccgctgactatactgagtggctattctaactgtaggggctattccttctgacactgtcatgacaccctggggggctaactctctgttgattactactactagtgngtaatactaccagntaataaagctt

SEQ ID NO: 130747 - DNA, 383 bp, Zea mays
  Clone ID: MRT4577_50718C.1
ccaggtcgaatgtgcgctatcaatgcggaaactaaaaaacccacgtgtatttgtgtaacggaatgttctaaaaataacgatctgcgacgtaaagtatgctcaaactacaacactacctggcagtcggattgtcatttacacaagcatcgatgcttatgcgaagaaaatttgtcagaagattgcactgaacagcacaagcacatgcatattgattactatggagaatgtacagaagacatcaaatgcaaaccagaggttttagtcgattttccacgtcgaatgcgcgaatggctctacaacatcttgacctcagaacacactaaactaaattcaatcaatactgaagaagatttagcccacaaatgggtcgacgctgttatttg

SEQ ID NO: 130748 - DNA, 363 bp, Zea mays
  Clone ID: MRT4577_50719C.1
tgccgcctgctgaccggtccttacacggtcgcccatcttctttaaacgtgggaagcgctggtattttaaacttggctcgaaaaggctgacattactatctctataggtgcgcacagatttgatgggcacatttacccctataccccctcaaagctctacaagccgctattgcttgaaggacacgttgatcactggggactataagaggcagtttttattgcactactcatgacatactttttcaaacctgttcttgattgatggacaacatggaggaagcgaattgcttaaagaggcttcgcatgagaacttatgtgagcgtttggttaccatgggttctcagatcaatgacacactaacttt

SEQ ID NO: 130749 - DNA, 791 bp, Zea mays
  Clone ID: MRT4577_5071C.1
actctgtatgtcccgaaggcccgaaccttaggatcgccggcgaaccaccggagctgagccccacaaacatcactgtaccacacggtttggtggtgtggcgactggcgacgaagcgcacaagaacagaacaagagggcgagaaacacagggagaaaggaggagaggaacggagagctggaaaaggcaggaaagacccggcttttgaccccaagtaccctgttgagggcaatggcggccacctccgaggaggcaatcaagcagttctcggcgctcatggagcagcaatgtgcatcaaggaaatctgagagggactttgatgcgttttctgaaggctagagaatggagtgtgcctaaagcttataaaatgctaatggattgcttaaactggagagtacagaatgagattgacatcgtgttagctaaacccattctgccatctgatatatatagagttattcgggacacgttacttgttggattgacagggtactccaagcagggacaacctgtttatgcatttggtgtgggtcttagtacttttgacaaggcctcggtgaactactatgtgcaatcacacatacagatgaatgaatatcgagatcgtgttgtcctgccggctgcatcaaagaagtttgggagacagattaatacctgcttgaaggttatggatatgactggcctcaagctgtctgcactgagccaaataaagatgttgacgatgattactactgttgatgaccttaattatcctgagaaaacggaaacttattacattgtaaatgctccatatg

SEQ ID NO: 130750 - DNA, 270 bp, Zea mays
  Clone ID: MRT4577_50720C.1
cttattgtttattttaggtcaaacccaagtcagttcaatcctgattcatatttaatttgaagatagaaggtttgcagatattctctagtcatttgttaatatttctacgtgatgacatatcatatgtcagccactgtgatagaggctgaggaatccaagaaaatggccagtaagatcaatgtgacggcagggagatgtatgtgtgtctatttggtaactgtaaagatgaatgtcagttgttatttattgaaatgatttcacagtgtgtgg

SEQ ID NO: 130751 - DNA, 300 bp, Zea mays
  Clone ID: MRT4577_50721C.1
aggcgccctgtctttttttttggtcgtttttgaattagactgttgttaggctaaagggcgaggcgccagagccttaagccaacgtcgggttatagtaagaaaatctggtggagctgaccaagccggctggcccgccggcaaatgtgttcaggctgaaggccgtttaaaaagccagagggaccagagggtcgggcaaggccaccaactcagatgatttcctttcgcacttcatggtcaacaaagcgttgaacttcgacatcagagagggccgccaattaaggcgattttgctcgcccctac

SEQ ID NO: 130752 - DNA, 1733 bp, Zea mays
  Clone ID: MRT4577_50722C.1
tgtttttcttctcccggccgggccgggggtgcaccaactagaaacgagccatttaccgcgcggacaagcaagcaaactgcccacaagaacggctctccacttcacacctgtttgctgtttttcatctcccgttcacctcgcgtgccgcatgcgcgacaactagagcgaccgccgccgctctacgcccagctgcccatgtcttcgtcgggcccttcgccggcgacgggaacccaccacaccaggtcaacaccgttgcaagtaattcatgttttgggaaacttcatgagaatttggtctgtttactccttgtatagctacctatccaacagtggagattcaatagttggctttatcttcagttgtcttgtacccacttcagtcatattcttggtcttacagaagccttggaaaggccgacctttgcccaactcacaggttgttcctacagttgtcaatggaggaatcctggcattctactttgtattatggggtaaaggacttcttgcttgtggtccactagttgctctactggcagagtatgcaggtgctgttcttggagttctctctgctgctttatatggaaggaaatttaacatctggaaaaagattggtggacttgctgctatgttagtagcatattatctattgtcaattggatggtctacaagaacacattctcctttatatagctttggaagtgaaccaattgagaaggcaagacaaacatttggagtgaaagaaatgatggtgccaattactgctgggatcttatctgctctaaggagagtattagctcggcgtgtttctctcaagaatcaacttaaaaggcggctccatgctataactattgcttctgctacttgtttcctttttccgtttgccatgtgggatacgatcctaggttcggcatctgacagcattgttaaattacaactaccaagttgggcatactttagtactgttttatttggaatggtgcttatattctatgttgacaatgttgctgaagaaaagttgcatctggtcttctcttctccaaggcacttaatggtctcaacaggttgcatcatcgtgttggaaacagtgtaccaaatggatttctcccttttaggatttctggtctgttctgttattttgggattcggtatttctgaagcaacctccttggaacgctcaaagaaaagccctttagagacccatgaactatcgaatggggtgttccacaatcaattgcctatttcagaacttccaagctgaagaatatatgacctagctacgacgttgtgaatggctgcggttgcacacctcaagctcaatggttcgattctttgcgtgaaggttttaacgagacagaaaacacggatgtttttgacctgccaatgcccaatgtgtctttgtaatcctccattattgttggccacctgcatcctgtacatgtgaacaactcaagtagatgtgtatccgtattccccttgcagatattgcaattgtcacagcatcctgtttaactgcttgggtagtttcgaaaatttgtttttctcacttggagacgcagatggttcaagctgttaacagaagtgcactgattgttctttttcagaggctgaaacctgtatgtaacccgtccatgatatgattaacaagctgactttatctttgacctattcgtgaatgcgtaagaaaaaaaaatgtccaaaaaatgattaaaataaaaaaaaaaaaaaaaggtgcct

SEQ ID NO: 130753 - DNA, 264 bp, Zea mays
  unsure (1)..(264): unsure at all n locations
  Clone ID: MRT4577_50723C.1
accaagngaacacaaggggcgcgacctgtctttttgtttgagctcnacanaattctcttcagagaaaaacacccgccttccaaagagcaagacagaaacgccaagacaccgaacctttttgtgtgtaattacgccccccaagcaactatacttctgtggcttcaatccctttcctaccacaacccacattctacttatgaaaaggggccaacctacgctggttcttcccccacccaaaaggtagttggagcaatgtataaaaac

SEQ ID NO: 130754 - DNA, 283 bp, Zea mays
  Clone ID: MRT4577_50724C.1
aaaaaaaaaaaaaaaaaaaaaaaaaataaattaaaaaaaaaaaaaaaaaaactaataggagagcatatataaaacaatctaaagaaaccaaactaacatacccttgcatgctactaaataactcttatctagtttcaccaaaattcatttcattggccgtcgtttaacaacgtagtactctgataaaaccctgtctttacataccttaaatcgccttgctacaaatccccattttgccaactggcttaatttcaaaaaggcattcaccgatcgacctttccat

SEQ ID NO: 130755 - DNA, 1647 bp, Zea mays
  Clone ID: MRT4577_50725C.1
ttaaatcaaacaccttattattaatcaaggggttcaaaccatttcccataatggtatgcctacaggtgcattctgtcgagcatgcaggagactcgctgattgcagcgcattttttttttttttttttcaccgacaggtcaaagataaagtcggcatgttaatcatatcatggacgggtcacatacttacatgtatcaatgcacttcggtcacaactttaatccataccggcttctactacttctacaatattttattcctgtggattgcaccacagctacagcagtcaaaacagccgccttttaaccatctgcgtctccaagcgagaaaagcaaaatttcgcaactacccaagtcgggagacaggatgctgtgacaattgcaatatctccaagggggataccgatacacatctactggggctgggagtagttggcatgtacaggatgcaggtggccaacaagaatggaagatcacaaagacaaatttgcaggtcaaaaatatccgtgctttctgtctgtggttctaaaccttcgcacaaagaatcgagccactgattttgaggtgtgcaaccgcggccattcaccatgtggcagctggggtacaagaatagggaaaaggggcttaaagtctattggttgaggggctatataaacatgtcaggaagaaattcttccgcaatcgatactaatgctcaaaccgtaacagtccaccattgaaacatgctatctaatattaacttgcaccacaatctcgacctaacagataaatcattcaaaaatcatacttaagcaaacacaaatttttttcaatgcatctcactcacccaggtcatatattcttcagcttggaagttctgtaattggcaattgattgtggaacaccccattcgatagttcatgggtctccaaagggcttttctttgagcgttccaaggaggttgtttcaaaaatacctaatcccaaaataacagaacagaccagaaatccaaaaagggagaaatccatttggtacactatctccaacacgatgatgcaccctgttgaaaccattaagtgccttggagaagagaagaccagatgcaacttttcttcagtaacattgtcgacatagaatataagcaccattccgaacaaaacagtactcaagtatgcccaatttggtagctgaaatttaactatgctgtcggacgctgagcctaggattgtatcccacatggcaaacggaaaaagaaaacaagtagcagaagcaatagttatagcatggagccgccttttaagttgattcttgagagagacacgccgagctaatactctcctcagagcagataagatcccagcggtaattggcaccaccatttctttcactccaaatgtttgtcttgccttctcaattggttcacttccaaagctatataaaggagaatgtgttcttgtagaccatccaattgacaatagataatatgctactaacatagcagcaagtccaccaatctttttccagatgttaactttccttccatataaagcagcagagagaactccaagaacagcacctgcatactctgccagtagagcaactagtgggccacaagcaagaagtcctttaccccataagacaaagtagaatgccatgattcctccattgac

SEQ ID NO: 130756 - DNA, 525 bp, Zea mays
  unsure (1)..(525): unsure at all n locations
  Clone ID: MRT4577_50726C.1
gggggagagagagangcgagagaagagacgtacgacgaggagggcaactggggatgggcagcgacacccccgcgctgctccccttctcgcaccagcaccaccggcacggctccgtggcatatgtggagccaccgacggcagacacaggaggatataattaaacacaaatcaggacttaacggatgtcagggggaacggccacaacggtcctgctgcacaagacccttctggtgacacggggcacatggtatcacgcaagtaggaactaacaactataactccatctccaacaaaccggactcagactggcacaagaaactgaaactggcaaacgtgcctgtgggagcctacatcaacacatctggtcgacaagttctgctacggcacaaacttcgagataaccgcggcgaaacgtggcggcacccttctagtgcgatccaagattacctgcagatgactgaggaccaatacgcgtacaatctcgtgacctaaacgaaggcatacctcgccgatgtgcaactgcgg

SEQ ID NO: 130757 - DNA, 363 bp, Zea mays
  Clone ID: MRT4577_50727C.1
aaggtattgagtccttttcttttaacaagtcaattaacaaacgcatacaaactatcattgtaccgagttgccgagccagtcaaggtggccgggctccgacactggttttacctaattaccgaatgatccatcagcatcacaaccgcaaagatagtctacaacactgcaggcaccctgacaaactggagatgatcaagagcatcagggcttgggtcgcacacatgaaacatgcatcacatatagcctacagggggatttgaactctactgattgagtggtatccactccagcttcagttccaccttccccgatttcacgttctgcagcctcagagagacctcctgcttgaccttgccaccaacg

SEQ ID NO: 130758 - DNA, 206 bp, Zea mays
  Clone ID: MRT4577_50728C.1
catcaagatcaacgtcaccaacatgaactaagtcaaaatcatcaaactaactcactacaactcctagcaccgaatatactccaactacattatctattaatcaaaccaagcttactattctgtatcactcccaacatatcaacttctctctatatatctattctatcttcatttccaaatccactctttcaccttgctggtattat

SEQ ID NO: 130759 - DNA, 884 bp, Zea mays
  Clone ID: MRT4577_50729C.1
agcagtggtaacaacgcagagtacttttttttttttttttttttttttttttttttttgcaattataagggctggtaatcccataaaatcataaacgccagtgaattgcttaggaacaaaattctagcaaatgtctcggaaatgcaagatatcattcctccgattagagctgctccttgaagtaaagctaggcgtggaacgagcgccagccgagaccgatggtcgacgcacgccaccgtcctccagcgcctcatgcgctggtgctgtcgtagcctgcacatgccatgtttcaatgtagtgtgtgagcgaggggaattaaaagaaagggagcgaattagaggggcagtgagacatcacacataggcacgcgtggacaccaaagagcaggcgaggcatgggtgtgcaacgacgagagaagcagacgtagattgttgcgaaatggacgagatttgttgctaggggcgacgaaggagagaacgctgttgtgcgaacaaataggatagagatgtcatctgatttggtctgcgagggagaagctggtggaggttgttgcgaaatgaacgaaatttgtttctagggcgacgacgacgagaacactgttgtacgaataaataagatatagattacatttaatctgggccgcgagttaatttcaaagatatataaaacatttttttaaaaataacgcaggacaaccgcagaagctttaatatagtaagaacgatggatatagaagaaaataagatagctgctgaaaagttattttgtaatttattattgatttttataatccttttatattatagaacagatagataaatttggcctatccgttgaaaaaaatccggcacctcccccgcgtactctgcgttgttaccactgct

SEQ ID NO: 130760 - DNA, 426 bp, Zea mays
  unsure (1)..(426): unsure at all n locations
  Clone ID: MRT4577_5072C.1
ctgcatctgacatcgccacacaatgccatcctgcttccacactgctccaccggaccatttgcacatgatacgacaccacaccatcactttcgccgccgattctcgttggactgtccttaccacttccatcgaccgatcgagacagctcctcaggatttctatcgtagtcctgctgtctgagctgctgggcggggagagcgcgagcgtgcatatggccgtgcgctacatgggcggccaccggtgtggttgtggttgtttcggccggccgngacggaagcgccgcccaagcgtgcccaaaggctggcggagggccagcgcgcgttggccgggacatgggcgggcgcgggaggagggcaagcagaggaaggatgacgattcgatcgaggacctcgcgctagccagggtcgcggtcgacatcatgtggcc

SEQ ID NO: 130761 - DNA, 192 bp, Zea mays
  Clone ID: MRT4577_50730C.1
ggggcaaaaaaaaaaggggtgggggccccccttcaagggaaccatttttggcccggcccctggtttccaccaacaaacgtccccggtgggtgcacccaccctttgttggtgggcccggtaaaacatgaaaaccaacaaattttttgctttccactgccaaaaattccccaagtttggcccccccggccaaaa

SEQ ID NO: 130762 - DNA, 707 bp, Zea mays
  Clone ID: MRT4577_50731C.1
gagatgaacaaggatgcagtcacaactgatgctatcggcagtatcagaacttgatggtgcttgtagactgttcatggtgcttgtagggatgatgtatgtctatggcttactgagctccaaccaactatggcaggagcgttagctaggacagcagtcagtctaacaattgtggacaaagttcagtctaccatacactgaagcgcacccttgttgctaaaggtgtgaacaactttgctcagcagaatggaggatcattgtcactagcagcaagacctcgagcccaggcagttaaccatcagtttctttccttctttctttgggccgagagagcaaagaaggatgatgcactttccaacctgtgtagcacgttgggacaactcaagaaatggcagtggatatggacatagaaattgacaggcaaaacaaagcgctggttcctttcagcgacgacatcactgaactgaattttagactgaaaggcgtgaatcagtgtggacaccagttgctgggcaagtgatatggagccagaattcgggcagttcggagactatcgccttgattgcagaatttaagaacattgttgttttacatgtttttttgcagtgaatcaggccacacatgttgtattagtgagagaatgatgatttattttatattattatggatttcatagattattttagttttctactaactgtttcttatat

SEQ ID NO: 130763 - DNA, 692 bp, Zea mays
  unsure (1)..(692): unsure at all n locations
  Clone ID: MRT4577_50732C.1
tacgcaaccctacgacccctgactcgattactgcagccaggcagccgagtcgcctccctcgatgcgtaccgtcaacctgctagacgtgatgaacatacaggatgcgacggcaaggtgcgataggaccgtagtatccagcatcgatgtctacatcacgcagtcttgggttgactagtggcatgacgaccgcgtcgagatcattgcctacgaccatcataaccgcaccaagacctcgctacgtaagcttcaccgactcccagggccccatcggatgatgcaaacaagaaccaggtctgcactgaagcccatcaacaccgtctttgatggcaagcgtctctgctgaaggtcgactagcgctgctgctgcccagagtgatatcaagttgtggtcctgctggaccactctctgcggctggcagagacagccatgattgctgacactaaaagggtgaggcgaagacgtttgcagctgaagagatctcctctatgagtcttatcgagatgcgtgagattgctgaagcttaccctgctacgacgatccacaatgctgtggtcacagtccctgcctacttctatgactcagagaggcatngcacaaaggatcgctagcgtgattgctgcccttcatgtggtgcgcatcctccacgagccaacaggtgcagctatcggctatgcgcttgacaagaatgctac

SEQ ID NO: 130764 - DNA, 664 bp, Zea mays
  Clone ID: MRT4577_50733C.1
cttttcggtctgaaacaactttccagctctcctccgacaaagactcagaccgccggcggcatgctcctcctcgacggcgaccttgtcctctcctcctccggaagcaccggcgctgcctctcgcacgagcgacagcgggagggagctcgtggcggcgctcttggagagccccgggatccgccacgcggtcgaccggctgaaggtcgcgccggagaggcggatctcggcagggcaggagggggcgccgaagcacgtctacgtgttccagcgggagtacgccacggtggatccggcgcgcgtcgagttagttggcacagatgaggctactacatgcattggtgttgtaattcgcaacaacaagactggaatgtaagtgaaaaagaagtgagcatttatctgatcctgacctctgttagccatatggattttccagaaattgtggagggagggatcaagcagatgttagaattacttggttcaccttattggtggctttgctgatgcttccacaaaggttgttcgttcctctggaaagaaacacatcaaacaggaagggtattcctatccactatgctgcaaaatagttgaagtgctgcataagtcccagctacaattccaccttcgatcattttgtgtccttgagaataacacgaagagtgactcat

SEQ ID NO: 130765 - DNA, 1692 bp, Zea mays
  Clone ID: MRT4577_50734C.1
aagaaacaaaccttctgaaaaaaaacttgaaacgaggtggtgcgcatacctcgacgaagcttggaagttggttccctctgcaccacttttcgagtctgaaacacactttccagctctcctccgacaaagactcagaccgccggcggcatgctcctcctcgacggcgaccttgtcctctcctcctccggaagcaccggcgccggcgccggcgccctctcgcacgagcgacagcgggagggggctcgtggcggcgctcttggagagccccgggatccgccacgcggtcgaccggctgaaggtcgcgccggagaggcggatctcggcagggcaggagggggcgccgaagcacgtctacgtgttccagcgggagtacgccacggtggatccggcgcgcgtcgagttagtgggcacagatgaggctactacatgcattggtgtttgtgtaattcgcaacaacaagactggaatgacctctgttagccatatggattttccagaaattgtggagggagggatcaagcagatgttagaattacttggtgatgacaatgcaccatttgatgttcaccttattggtggctttgctgatgcttccacaaaggttgttcgttcctctggaaagaaacacatcaaacaggaagggtattcctatccactatgttgcaaaatagttgaagtgctgcataagtcccagctacaattccaccttcgatcattttgtgtccttgagaataacacgaagagtgactcatttggaaatgcgctacctataattggtggatttgtggttgaaacctcatctggagttgtgataccagcaacctttgatatggattcaaggtgcccagatgaagttgtcaggagaattcgtgtgagcgttagctcttatgatccaacttggcaaggaaggttgctggagacttacgatactcaggacgatgttttccaaattgcacctgcctgctggatgccagattgggccgatatagcgtcctcactcaaccagctctcggactccgaagtcctgctgcggtgctccacctctccagccgcagaaccacctcacttcgtggaaaacgaaagaaggatctggaaatacctgatcgataacccggactgggaagagacgttcccaaaacacaagccccgggtgttccatagggcaagcgacggaagctggtcaaggtactcgtagtgcaagccaagggcttccatcgtctgctgttatcgtcggtgctcccacacatggaacgaaccagaagggaaacccccccccctcctctccgttgatttgaacagtggcatattaagtttgagtgcaaagttttctgcgcactgcgattagcacatccgtggacgcttggagatgggagtaaattttataaagtctcttggagatggcagctgctctaaggaccagctaaaaactaaaaaaacgcatgctcttgggccgaaaatgatgagcgattcctcacaactccgttctttttctttatcgaaattttcatttctacgcagttttgtatttttctgaagttataaggttcgttgttttgtgcacaatcttataatgcaactcccccaaaactcatataacaccactttctgcataaactttactgaggaacttgtgggtgtaagtttatttactcgtgcataacttttctctgatatatttaaatttgtctggac

SEQ ID NO: 130766 - DNA, 306 bp, Zea mays
  Clone ID: MRT4577_50735C.1
cgtttgaccttgcaacaccctaacgccgcgccgcgggtgttcgcgcacgccgcctccgtggccatggcgttcctgtggctcgagttctcgcagtcgttccaggtgctggcaatcctcgcgtccacgcgcacgcacgccgtcgcgctcggctacaggttctgggtcggcgcggggctccccgccaggggagccgcccacgtcgcgctcgcctgccagctgggcctcctccggtgcaagctcgcctgccatgtcggggtcctgtggatgcatcttggggccgtcggcggggggtgcagcggcatgcgg

SEQ ID NO: 130767 - DNA, 310 bp, Zea mays
  Clone ID: MRT4577_50736C.1
agtaaaaattgtcatgggcttaacaacttaaacaataaattatagatctgcacaatacatcaccatattctttaacagcatcctccgctgctgctcttaggagcgggaccattattcgcagggagcttctttctatccaatttttggaagtcattggcctttttgtctccaccatgaatagttctgtccataatgactttggcaatcgatgtaaaagcagagtcgatgttatgggaactcttagcagatgcttcaaagaattgaatgccatattgtttagcaaggtcttggcctttttcggtgctgacct

SEQ ID NO: 130768 - DNA, 414 bp, Zea mays
  Clone ID: MRT4577_50737C.1
attcggctcgagcggggaagcctgtgtttttgagcgaatactgctctttatgatcaacgattctaagaagcagaaccgggtccctaaccgtagagagaggcacaaactcccgatacggcctctgtggaatgctcacctactgcatagccatttgatgacattgctgtccatgacgaagcaatttacgaagattgggtggtcgctcaatcattgttcagtgtggcacttgtgaagtcactgtatggaagcgaggcatgtgtagagccatgacaagacaatgctgcttgtgagaaaccagggcaggactacgaggggaatgtcaagttatcagaggacagtgcatgtgctgagaaggcacaacaggtagatgatgactacggcggtagggtattagatgagggcgcgtcccctgag

SEQ ID NO: 130769 - DNA, 561 bp, Zea mays
  Clone ID: MRT4577_50738C.1
ctccccccccccccccccccccccccccccccccccccccccccccccccccccccccccttttttgggaaccggaacccaaaaaaccccggaatggttttccttaaattaaatttctaacaggacttcggcctttttttgccaacttcccaccccaaaaaaggggagggaaacctttgcggaaaagggttaatactttaatttccccccgggggaaaaaaaaaaaaaccttgcccggttgggaccagaaaaccccaaattttttgtttgggtaaaaaaaaggggccaaaagggacccccccccctgaaaaacccccaaatgggattcgccggaaaacctgggggggggcaaacaaaaaaacttcccgggaaacccccctttttttgaacgggattgtttcggcccggccccggaatttaaaaacctgtttttgaacgggagggttttaaaaacccccggggggaaaagggcccccagggcccccccaatgagggggcccccccaaaaaaccaagggtcgttccaggcgggaccccttttgaaaataagggcccccccaag

SEQ ID NO: 130770 - DNA, 125 bp, Zea mays
  Clone ID: MRT4577_50739C.1
cttcctctacgatcgcatagttgtgccgagacatttaacagggctgtgggatcttgatctatatggaatggtcattggtgctgtgcgtaacctgtggcgagactcttcaccgtgctgacaagtat

SEQ ID NO: 130771 - DNA, 602 bp, Zea mays
  Clone ID: MRT4577_5073C.1
ttttttttttttttttttcttttttttttttttttttttttttttttttttttttttttttttttttttttttttggggaagggcgggggaaaaggggggcccaagacaccaaaagcaaaaaaaaacaaaggaccccaccgccatacccaagcccacaaaaagggaacacaaacccaaaacacaccccccaaaaccgcaaaagcaggggggggaaggaatgggcccaaaaaccgcctccaaaggggggggcacccttggggggacacagggggggggggcccccaccgggggcccaaaacaaggggccaaaccggagccccaaaaaccgggcaaaaaacaccaaaaaaaaaattgggggaaaacgcccccacagggggggggccacgcaaaggcccccggggggggcggggcttttttaagacagaggccccaaaaaagagaaaaggggaaaggggccccacaaggggtacaccgaaacggggccccaaaaaaccacactggccccaaaggcatgggagacccgggaagcaaaaatttgagggggggggaagaaaaggggcacccccacggggggagaaaaaaccggcccccaacctccaag

SEQ ID NO: 130772 - DNA, 487 bp, Zea mays
  Clone ID: MRT4577_50740C.1
ttttctttacatacttcaattaactatatattaatgctaatattatagcttttctagtcttgaccaacatgtgatgacatcaagccctacaatgaacaggtctccataaataatgcgcacgatgctctggcccactggcagatgcctgcctggccgactgagtgagaaccaagacattacacgggagccgcgcactgtcaaatttcctagctggaaagctgaccccacctcttttgcgaccaatcatacaacaatgctgcgcaaggaaacactcgcatatgccgccttgcacggtccaacttgcacaaagatagacggacaccacattattccccagtcatctctcttcacactttaagatgggcacaccatgggatcaaactaaacttggcacatcttatgaatatcatgtacaaacactgaatatggggacaaacaccatgaactgtacttcaagtatatgcatatcactggagctaatgcactg

SEQ ID NO: 130773 - DNA, 295 bp, Zea mays
  Clone ID: MRT4577_50741C.1
aaagtaacatcaatgaagcaaccacagattggtgcctgaagtgtatccgctatgagatcagtatgttgttttgtcctatttaatcatttgagctataattttctaatgtgttggagatgttataacccctacactgtcaaatttaaaacattagatacattgacatttgaaataatgcatgtatagaagctccctgcccggtcatggagtgccgatgtctgtaaacccaagcacccacgccgtgaaatgccgtcggagcatcaagtcgattcaaactcttgaagttgctttcccc

SEQ ID NO: 130774 - DNA, 604 bp, Zea mays
  Clone ID: MRT4577_50742C.1
ctcggccacccccccccccccccccccccccccccccccccccccccccccccccccccccccccccccttcctttctaacccaaggggcccctttttttttttttgaaccccaacccattttttaaagacatacccgatcgaaattcgaaaaagcccagacgttgccaaagggaaagttcatttcgaccgatttaaaggggtttttgaacacaaataacccaaagaaataccccccttgttggttgacccacatttttttcaaaaaaacaagggcacaagggcccgttaaacacccaggggggccggggccggggaattggccgggccttttgcctcgggagccaccagttgggggatgttttccaaagaaaatatcctgccgttggccagtccggccgtaaggtcctcaatttcctttttaaccaaataagggggggggcaaaaataaggtgaatacctggtcgggcagaacaccccgggggccataaccggcatccaataaatgttcggggaaaccaagcggaagggggtcaaaaccaccggggggagaggcccaccgatgatggagatagcctgcccgttttgcccaacaaccccttgtt

SEQ ID NO: 130775 - DNA, 323 bp, Zea mays
  unsure (1)..(323): unsure at all n locations
  Clone ID: MRT4577_50743C.1
ccccccgactacaacatccagagggatgagcccctccaccaggcgctccgcttgcgagggggtatgcagatctttgtgaaaaccttgactggcaagaccataaccctgttatgagagagtttctacaccatcgacaacgtgcttttgggggagcaaaacaaattgtcctttcaaccacaccagcnngggcngacacaacggcggggagggggtggaggaacaccccccccnancanacaacaaaanananaaagagaacacncgccaccaggggcaacaacaacaaaaaggacagaaagccanggcngaaagaagccgccgaa

SEQ ID NO: 130776 - DNA, 316 bp, Zea mays
  Clone ID: MRT4577_50744C.1
ggataccgcggtggatgttacatatgattcattcgattttacagacgacacgcgacggttgagccccatgtctattgtagagggccccaccattctaaactttttcagataaccttccacccctgctggggtgaacttagtggtggcgactttgtggacgaacctttttagggcaagaaacccctccatatctatgggaaggacgccccagaatatgtttcggggggactctacccaagggccccatagctgcctttccaaaaccgcctttatgttgttttggggacaaaaaggacaaggctggaggggtttttgc

SEQ ID NO: 130777 - DNA, 1637 bp, Zea mays
  Clone ID: MRT4577_50745C.1
gacctcctaaaccctagccgcctctgcttctctcctccgctccgcaccctctttttcactccccctcccccgccggagtttcgtttcatttgaataggcgagcggggaagcatctcgtaaaccacctccgcactccccaaccgccccgaacactcgcctccattccgcgccgccgtcacctcgcgtcgccgtccggatctcttgggctcgtgtgcggcagggatccattgatttctcctctgcgaggatacaaccatggatatcactcaggttctgctagccgctcaatctccagatgctaaccttcgaacagtagcagaaggcaacctcacacagttccaggagcagaatcttcctaacttcctcctctccttatcaatagagctctcgaacgatgaaaaacctcctgagtctagaaggcttgctggtattatccttaagaattctttggacgcaaaggattctgcgaaaaaggaactactgactcagcaatgggtaagcgtggacccatctatcaaattgaagattaaggagtcgttgctggtgacactaggatcttcggttcatgatgcaaggcatacctcttcacaagtcattgctaaggttgcttcaattgagataccacgtcgagaatggcaagatctcattgccaaattactggagaacatgacttctccaggtgcatctgctcctttgaagcaagcaacactagaagcattggggtatgtgtgtgaggagatttctccacaggacttggagcaggaccaagtgaatgctgttctgactgctgttgtccagggaatgaaccaggcagagctcagccctgaagttcgtcttgctgcagttaaagccctatataatgctcttgactttgctgagagtaactttgcaaatgaaatggagaggaattatataatgaaggtggtttgtgagactgctatgtctaaagaagtggagatcagacaggctgcatttgaatgccttgttgcaatagcatccacatattattcacacttagacccttatatgcaaaccatattcgacctgacagctaatgcagtgaaaggcgatgaagaaccggttgcacttcaagctgtcgagttctggagcgctatttgtgatgaagagattgcactccaagatgaatatgagggatctgaggatggcaactctactgtacactttcgctttattgaaaaagccctccctttactcgttccgatgctgctagaaactttgttgaagcaagaggaagatcaagatcaagatgataatgcttggaatatttctatgagtggtggaacatgccttggactcatttctagaactgttggtgatgcagttgtccctcttgtgatgccatttgtggaggccaacatcacaaagcctgattggcattgtcgtgaggcagctacctttgcatttggttctatccttgaaggtccctctgttgaaaaacttgctccactggtccaggctgggcttgatttcttgctcaacacaatgaatgatgcaaatagccaggtaaaagatactactgcttggactcttgggagggtatttgagctcgtgcattcgccagctggggcaaactcaatcataaatgattcaaacctttcccgtatcatgtctgtatt

SEQ ID NO: 130778 - DNA, 137 bp, Zea mays
  Clone ID: MRT4577_50746C.1
ggcctaaacgcattgcgtgtaccattgcaatcattgccggagtctacttcgtctgaaggctcaagagcttacattgcatcaacgcgagcgtgcaacacttccatggcaacgtcgaagacgcaacgtgtggcgcaaag

SEQ ID NO: 130779 - DNA, 273 bp, Zea mays
  Clone ID: MRT4577_50747C.1
ggggaggggtacattaggggagggggtgttacacaaaataacaaatcaggtacataggacattcaagccaacgccaacactagatggggatatattattttacaggttcttccatatatagaagatccacgagggccttaaaaatgcgttcaacgtcatgagctcaaatccatgggcatccgttaataccggggggacaccaaccctttttatttattgcattattagggggaggcgggcatggcgccccctcacatacatatttgggtggga

SEQ ID NO: 130780 - DNA, 367 bp, Zea mays
  unsure (1)..(367): unsure at all n locations
  Clone ID: MRT4577_50748C.1
gggaataattggcagttgagaaggggattcatactgtctgtacataagcaactctccagttcacgaatacaatctctccagttaccaaaagatcatcaaaacagaacgccttttgctacattatttaaagggtattgtcaaaagtgttggtaggaggggggggggggaacangactacaatgcatgtgttcttatacatgcaacagtttcaggccgttcaccaccttcaagccactctggaacaaaacatatttcacacggttggcacgcttgcacgcaccagccagagactggcttagccaacggccataatatccttggtatttgatggatctggatgggcacgcttaactaatgtatggcccat

SEQ ID NO: 130781 - DNA, 277 bp, Zea mays
  Clone ID: MRT4577_50749C.1
cccacgcgtccggtgaaaaaaaaaaaattaaaaaaaaaaaaaaaaaaaaaaaaaaaaagaaaaaaaaaaaaaataaaaaaaaaataaaaaaaaaaaaaaaaaatgaaaatagatataaaagaatactagattaagtactcgtgcatgctacgtaatggtttttatattttgtatcctaaattaaattatagggccgtagttttaaatagtttgttctgataaaacatctgatgttactcatataaatggatttgtactaaatctgcttttcgcaatt

SEQ ID NO: 130782 - DNA, 3082 bp, Zea mays
  Clone ID: MRT4577_5074C.1
aaggaaccaaacgggcccaagggaaattttcactatattggagtaaaataaaagatgagcattctaagtaattagcagggagttaacataaactccatccagttggccgttatatatacatacatacagggatagtacaagcatggcgatacacactcacttggttaattagaaatcacaacaatcgcggatacagttattagaatcccgctctctattcgccccggtcaagcctgcagccagtgactgcaagcaggaggcacctggcgcgcgccctcatggaccttcgatctggatgctgctgaatgaatgagcgagaccgccggttcccctcaaattctggagctctgctttgatcgtctccgcaatcttggcctcctcaaggccaggcgagggcacatccacgtggaccgagccttgttttctgggaccaacggagtcctgattcagagattgctgctgcttcatgtagttgtacagctgctggtggaaagggtggtcgtaggagtagcaatctactccatccagcgagtcgctggatgaacctgacccttctctcttgcagaagtgcggaagtgactcgtagtccatgaccttcagtaactcatccctcccagagccatacaggacttggatcttctttttagttctttcttgtaagagtggcttcacaaccttccaacacgctgaaaaaacatatggagcatttacaatgtaataagtttccgttttctcaggataattaaggtcatcaacagtagtaatcatcgtcaacatctttatttggctcagtgcagacagcttgaggccagtcatatccataaccttcaagcaggtattaatctgtctcccaaacttctttgatgcagccggcaggacaacacgatctcgatattcattcatctgtatgtgtgattgcacatagtagttcaccgaggccttgtcaaaagtactaagacccacaccaaatgcataaacaggttgtccctgcttggagtaccctgtcaatccaacaagtaacgtgtcccgaataactctatatatatcagatggcagaatgggtttagctaacacgatgtcaatctcattctgtactctccagtttaagcaatccattagcattttataagctttaggcacactccattctctagccttcagaaaacgcatcaaagtccctctcagatttccttgatgcacattctgcaaacatatttcaaccaatcactttttggtgatattattcgtattttaaaatattatatcaagtgtctacagaaaaaaaatgatgtccactgatgaaagaacaaggtcgatagaacttaacaacaaattgcaatacacatgtccaaaacacataagctaacagaatgcatctagcaccagccttctgatgccagcatgctgacgtaaaaaagaaagaaaaaaaacattgtttcttagtggggcatattgtgattccagagtggttgcacaaccgcacacgtcctcggttctgagaccaaccatgggccttgtcacacttatcatgagtcatgacaaggacttaaggaccaaataaaaatccgaatctacaattgaaacatctccaccaggaacagtccaggccacagatgtcaggaacacgtcaacatccaggtccaccatcagcacacgtccaactacaggcttggacagagtcatatcatgggttaaaagactaatgcagcatgcaacccaccaaaccaatactttatataatctcttgtcttgggagtgtctgacgctaaaatatttctagtattcctacacctgcttactgggtggggcgtctagacggcctccgaccgggcagccccgacaagaattggtggccagccaaactcgactaggagtttttggcctcctaatggtgaactgggaacagcacccgacatcaacaccacaacttgtaccaaaattgcagttgcagtgaggacccaaccagagtactactttcatctatatacctcgtgacatatcgaaacaaatatctcagtatgcaacccaaacaaaaaaggaaaagttcattttcgaaatcataaaggtgtttctaaaagcaccaaattgattattccaaaaacactcagacacaagaacaagtttattaagctttacggcaacaaaaagacgttctttacagaaccaagttgagagctcaaaatcacttcaatccacaacacaagaaagtcgagggaaaaggccaaaattctacctctgccgaaaattcgaaataatgagcacagacaaaaagtatactcgagcacaagccgtaaaatgagcttctctcatgaaaagaatcaaaacaacaagtctaagatccaaatttgatgtacgccagaacaaataacagaaataagtagcgggagcaggaaacgaaagaaattaaagcatgcgcaattttcaattcgatggaaattccaacgagatcggcagtaaaaggtcagcgaaattgagctctggacataatgaaaaccaaagatctaagccctacgcagctaacagggcaacagactaactcgcagttcttcagatttttttttatgttgaagcgctcagcagcaccccaagtccacaaaaaatgcgagaactaaagcaaaactcgactttgaaaaacacgcgcaaaatctgccggggtattcgttcagaaaacaaccagaatcaaatcaagcacaaaacggcagatatccaacaggaacagccgaacagcgagcggagcagatcgacacctggaatgtgctctttagcggctcctctagctgctccatgagcgccgagaactgcttgattgcctcctcggaggtggccgccattgccctcaacagggtacttggggtcaaaagccgggtctttcctgccttttccagctctccgttcctctcctcctttctccctgtgtttctcgccctcttgttctgttcttgtgcgcttcgtcgccagtcgccacaccaccaaaccgtgtgaaaacaaggaatgcggtggccacccaactcatcgccattggtgtcagtttagtaacaggctttcggacgcgtgggcggacgcgtcgtcgacccgaaattcc

SEQ ID NO: 130783 - DNA, 354 bp, Zea mays
  Clone ID: MRT4577_50750C.1
gttggcttttactccccctccggatcgggttcggccacgagaggctatacagggttcggggacgtgggcgagcggatcgtgatggtctcttcgcatgtatagtaccgctgcttcttcggcgggctcgcctgggccacggacgaccactacctacacaacgtcttcagcacctactgtcaggtactcgagtgcaagatcatcctccatcgcgagacacatatgtcccgctgttggggctccgtcaccttctccacggaggaggctatacgaaacgccatccagggcattaacggtaagtgatctggacgtgcgcaccatcaccgtcaacgaggcccattcccgcagcccacgtgg

SEQ ID NO: 130784 - DNA, 502 bp, Zea mays
  unsure (1)..(502): unsure at all n locations
  Clone ID: MRT4577_50751C.1
agcagtggtaacaacgcagagtactttttttttttttttttttttttttttttttcaagtctaattaatgacatgaacaagtcacttgcaggggggataatacctgtatcctttgttttggcttccgctcgatgggaatacagtattttgggagtactgaaagctacgtttttgtccccgggtactttgggttgttaccactgtttaagggggaattnaagaaaattgggggncgttattaggggatnggagttgggtanaaaggttggggtaatgatggtaataggtgttttttgggggaaattgttattgggttaaaattggntagaanataggagggggaaggataaagggtaaaggttggggggggtaagggggggggtaatttaaattaattgggttggggttantggggggttttngggggggaaatctggtgtgggagttggttttttgaattggntaaatgtgggggagagggggtttggggtttggggggttt

SEQ ID NO: 130785 - DNA, 162 bp, Zea mays
  Clone ID: MRT4577_50752C.1
cgaatttcctcgtgcaggccggccgtgtgacaacatcatatcgtctatctacagcttatgagataagacgaatatacggcactatatatcttatatactacatacgtacaaatgaataaagtaggatgcatgctattatcataaaaaaaaaaatttgtgagc

SEQ ID NO: 130786 - DNA, 283 bp, Zea mays
  Clone ID: MRT4577_50753C.1
gtctagtaacataatttcgaaatccaaaacttttgattcttttactaatactgactgtgctttcttctcaacactccattcactggtgggctggtgccattgctccttcgccaatggaagccaggcacagaggcacttcatggtcacattcacatgcagatcatgttctggaactaatgtgtcatagttctccatgttatccacattttgtgtctgttgctactcttattcatctctagcaccttgtggcagctcttttttttttattttttttttcattttt

SEQ ID NO: 130787 - DNA, 3141 bp, Zea mays
  Clone ID: MRT4577_50754C.1
ggagggaaccggaaccaccctcctgcatatagcttcccgccatagactataacttttgcattaggctaagtccctctcatatgcatttcaccttctaatgcataccctattagagacatgccattgtgctactgtgacaaaaaaaacatatagtatagattcctccaacagatcatgcatatgcaaatcaatactgtattttgcatatcccctctcatatgcattttacctcctaatgcataccctattagagacatgccattgtgctacagtgccgtgcgataccctattttgcattttgccttctttgctggatagtggatatagcctcagtgctcacgatgtctgaactcactatcaccccagttgagaagtaccttgtaagaaaaattgtaggttacacaaaacagcaagtaacaggtagtcttaaacaacccctgtcactagaaaattatcgccgccaaacccatgggattgataaactcctctggtctatcaaaaatttcatcagcacccggccggttgggagaacatataacgagggtgcaatacaatagtccagatctctaatctagttctgtagttttctggttcaccaacctagcgcacttgatctaccaacaaagtatcaggtaaatgacactattggtaacttcatctattgccacgggttctttcgccctgccgcaagtgtggaactagttttggcactggccttcaacttcttcagcttgcctcgaaccctgttcttctggggtttcagtttatatatgcggaccatccaatggtgggttgtaaatacctcctcaaaatgtgttagcttgaaatgcttctttcctatttcatatcctcttactctgtcaaagccttttccatcagtctccacaaacctgtagtaacaaagcttgtacatgaggcaattcagcatagttggagtggcttgagcatcaacgcgatattgaccatccctaagataatctggctccttaatgtgagggaacacaccacctcctattcgtaccatccaaaggaacttattgatatcatcgctagggtatccaacaagtcctccaaagacaacaagcacatatttgacatctaaagaattgaagatttcccaagctgctttttctggggacgacattgctgtaccaactgttgctatatgagtgttgttccaggtgttattgtctacaatcacagttctgttggccattgcagttgtttggtaaccatagtcccaccaggaagcaaccttgtcatcaacatctgtgttatggctcagccatgcgtaagcttcacggaaatcatcaaaaacatgcaacccatctcgtgaacgagatgtcaacacaattgaaggcgcggagtacgcttcagctgccgcccatacacaatggaccacatagaaaccacctaatacgatgagcaataaaatacccataacagataattcaaaaggcagaaccaaaggcctattttcctttttaggctttacaggaacactctctgccacttctttctccttcttccggttcttctttgatgttttttcctttggagctgtttcgtgtttttcattcctattttcattttttgttgaatttgtagaactctctgggctactgtcacctgaagaagtagggctatcatcaaataattttgacagctgcaatttaatggatcgtgtgagcacactgaaaacttcagatagagcaatcccagataaaatacacgcagcaggagcaaggacaagcataagccgtaccataactccagaaaaatacactgcagtgactaagtacaagaccatgaaggagcttgcatcagacagaggcaagaagcatgaaataatcccagcaggaatcaggaaggccaacacattaatgtccataaaatacgagggccaggtaggaggttggtgttcactgacactagcaatgatggggatgtacttgcttgcataagttgggtcaagtagactcaaactgcggccactccagcctttcgttggactagatgccaccaatgcaacaagtatggctactactgcaaaacaaacagctaagccaacagatatgacaagagtcatagcaactttgaacagcctaggagtcaaaagccctttgatataatacacaagagcaaccacgtgaaggattatgaacaccagaaatgatgcgaagtgctcagaggtcattactgcattaaaaccaaccacaggtactaatgctgccagaagcgttccaagtacaacaaggggagcatatgcaatgtagagacgcgaagaataacgaccagttacaatgcacaagaggacatgcattgggataagattgataatgaatgtgtagcctccccaagagcagaccatgtagaaatatgagagagcattgagtgttgcataaaagagtgatcccgtgttcagcgtctttacatatagataaaatgtaaatatcaaggcaaatattgctacagcttcattatcatagctgcctgcaacagatcttgaaatatatgaggggaccattgctaaaatggctgctgccattaatccagctccagtacctttcgcttcctttgttagcaggtaggtagcccatgatgcatttgctgagaaaattggagctgtgaacacacaaactgtctccaccgacaatgggatgttaagagagttcagcaaccaccacatagttccagcagtcaatgtcaacccaggatacacagtgccaccaatcacacggccaagggggtaccatgtcctatcatcaaaccagttccagaactcataaattccattcttggacagaaactgagtgacgcggaagttgaagtaggggtcgaactcgtggatcacgctctcgtacttgattacggagaagagacggatcgagaaggcaacgacgccgatgaggagaagcgtgaaggcgcagagcacgcccccgaaggcgttgcggagccgcccgccgccgccggccgctgcgggggagacctcggactccgccattgcggcctgcgtccttgggtgtgtgtgtgtgtgggtggaagtggaacgcgcggaaatccgagtgctggacccaggcggagacgaagacctcgcgatcgtctcgtgcggcacgaggcctcgtgccgaattagggtacc

SEQ ID NO: 130788 - DNA, 1053 bp, Zea mays
  Clone ID: MRT4577_50755C.1
tgtcgtcgagctccgcctccccggcgccgggctcatgggcaacctcccttcgggcgtgctcggcaacctgtcggcgctccgcacgctctccctccggtacaacgcgctcacggggcccattccggacgacctctcccggttgtccgagctccgggccatctacttccagcacaacagcttctccggcgaggtcccggcagcgctgttcgagctcaagaaccttgtgaggctggacatcgcggggaacaagttcagcggcaagatctcgcaagacttcaacaagctgatccgcctcggaacgctgtacctcgacgggaacagcttcaccggcgagatccccaagctgcagctgcctgcattggagcagttcaacgtgtcgtacaaccagctcaacgggtccatccccaacacgctccggaagatgccgaaagactcattcttaggcaacacgggcctctgcggcggtccactcggcctgtgccccggcgagtccgcgcccacgccggccggatcgccggagtcgcagccaggcgcgggcggtgcagccgacgtcggtggcggcaagaagaagaagctctccggcggcgccatcgctggcattgccatcggctccgtgttcggcgtgctgctcttgctcgccctgcttttcttcctctgccggaagaggtctagcgcgcctcggtcggcggcggcggtggagaaggggcgggaactcggcatggggccgatggatgtcgagccaaagggacagaacggctcagcaggcggccacaacagcgttgcggcggccgtcgcagttcctaccgccgccgctgccgctgccgccgctacggctacggcggcagcgaagaccggcgggtcgaccgggtccaagaagctcatcttcttcggccccatggcggatgacccgccgttcgacctgtaggacctgctgcgcgcctcggcggaggtgcttggcaacggactcgttcgggacggcgcacaaggcggtgatgtagaactggtcctccgtggctgtgaatcggctcaaggacgtggacctcccggagccgg

SEQ ID NO: 130789 - DNA, 1916 bp, Zea mays
  Clone ID: MRT4577_50756C.1
ccttttcgagatctgcgccgctgttgctgtccccactcggcctcccctctctctccccttcttccagacccttcccttctcccgtaccgccgccgccgtcgtacgatacttcgggtgtaggggagcatgcggaagaaagggcgggcggtgccggagtggctcaacagcccaatttggtccgctaccccgcccgcgcccgcccagccggacccctacggcgccgacctcgctccgccgccacccccaaagccgccgccgccgccagctactgcctctcccgtacctccgacttcaaggccgcgctatcgaagaaggtggtgaacatgggagagctgcggcgcttagcctgcctcggcgtccccgacggcggtactggtgtccgacccgtcgtctggaagcgctggtggtttgtttggtaaatggggaatggacaatactctgttggtgccctgttacgtgttacattttcaatgcggtcatggaaatggaattagatgttgctgttgtgaagagagatgaccttggaaagaaaagatgtattttcccaacccaccattgtgcagcttcttttggggtatttgccaactgatcgttccttatggacttatgagttagaaaagaagcggagtcaatatagtgcatacagagaagagtttcttctaaatccttcagaaaaactacgaatgattgaggaaacaaagctgtcaagaaagaaagacacaagtattgagaggattggctttctttcgagattcgaagttactaatgaagagcatcctttaagctctggtaaatctagcttgtggaaccaatattttcaggattcagagttactagaacagatagaccgagatgtaaagcgaacacatcctgatatttcatttttctcatcaaagtctaaccaggaatccttgaggagaattttaattatattttcaaaattgaaccccagtataagatatgtgcaagggatgaatgaagttttggcacctttattttatgtattcaagaatgaccctgacccaagcaactcagcgtcagctgaagcagacgcatacttttgctttgtcgaattgttgagtggctttagagacaactattgcaagcatcttgacaatagcagcgtgggtattcgatctacactttcaaaattatcacaactcttgaagcgacatgatgaggaactatggcgtcacatggaggtcaccacaaaggtttacccacaatattatgcctttagatggatcacactgttgttgacgatggagttcagctttaacgtgtgtatacatatctgggatgctatcttgggtgatccagaaggcccatcggacacattgatgaggatatgctgtgccatgctcatcctagtccgaaagcgtctcttagctggagacttcaccgccaatgtccagctgctgcaacattacccagccaccaacatcgatcacctcctccacatcgccaaccggttgagaggaactgtacccggctagtgttttgttgcctttcctgcatacctgtacttcagttttgcccatgtgaccttcgtctggttaagtcgctaaatgcaatgttggtagcttgaaatatcactctgctccttgtgttctgttttgcctgtttcggtgtggccggagccggacgatgaatatcggagacacttcatgtgtcacagctctgagtagcgcttctgttttcattcacatggaaacacactattggagctccttccagcttgtagtacctgggaaagggaagaatggatgcattcctgaattgtgaaaactgaatatgggttctgctggatacgctcctctgtaccaaaagtcatatcctttgtagtgtactcttttaatgctttatgaattagagtatgtagaatgacttttgcaagaaaaaaaaaaaaaaaaaaa

SEQ ID NO: 130790 - DNA, 450 bp, Zea mays
  Clone ID: MRT4577_50757C.1
ctagttctaggacgcgagcggacgcccttatttttttttctctctcttggggctctctgcacaaaaaaggggtcacaagagagacggcggatatggagaagaggcttctcccatctctacaccgggcgctgggagaaaagctggcgcaccccaaaaagacccccgggggtcttcttctcccggacacatacaaacatgtgagtgcttataaaggggggggtggtgcccctggagagcgccacggggcacgcaatctgcccccaggtgctctgagagagggagactctgctcttctcccagagtgtgggggcactgaatataatctcgcatctgataaagacaccttctcttcagagagcaccacattttgcgcactcttggggtctgattcagagtatcagcacgcctgactctaggcggtggctctacacttatagtgagagacgcgta

SEQ ID NO: 130791 - DNA, 1382 bp, Zea mays
  Clone ID: MRT4577_50758C.1
acgatacttcgggtgtaggggagcatgcggaagaaagggcgggcggtgccggagtggctcaacagcccaatttggtccgctaccccgcccgcgcccgcccagccggacccctacggcgccgacctcgctccgccgccacccccaaagccgccgccgccgccagctactgcctctcccgtaccgccgccgccgtcgtacgagcaggccgtaggggtgggtggtggccggagggaggaggaggacgacgagggcgccggggcggtgatacgggcacacctgctctcggacttcaaggccgcgctatcgaagaaggtggtgaacatgggagagctgcggcgcttagcctgcctcggcgtccccgacggcggtactggtgtccgacccgtcgtctggaagtcagaaaaactacgaatgattgaggaaacaaagctgtcaagaaagaaagacacaagtattgagaggattggctttctttcgagattcgaagttactaatgaagagcatcctttaagctctggtaaatctagcctgtggaaccaatattttcagagttactagaacagatagaccgagatgtaaagcgaacacatcctgatatttcatttttctcatcaaagtctaaccaggaatccctgaggagaattttaattatattttcaaaattgaaccccagtataagatatgtgcaagggatgaatgaagttttggcacctttattttatgtattcaagaatgaccctgacccaagcaactcagcgtcagctgaagcagacgcatacttttgctttgtcgaattgttgagtggctttagagacaactattgcaagcatcttgacaatagcagcgtgggtattcgatctacactttcaaaattatcacaactcttgaagcgacatgatgaggaactatggcgtcacatggaggtcaccacaaaggtttacccacaatattatgcctttagatggatcacactgttgttgacgatggagttcagctttaacgtgtgtatacatatctgggatgctatcttgggtgatccagaaggcccatcggtacattaccaccactggaataaatttgtggacatcttacagtgctaaaccgttgcatattctaatgcaggacacattgatgaggatatgctgtgccatgctcatcctagtccgaaagcgtctcttagctggagacttcaccgccaatgtccagctgctgcaacattacccagccaccaacatcgatcacctcctccacatcgccaaccggttgagaggaactgtagccggctagtgttttgttgcctttcctgcatacctgtacttcagttttgcccatgtgaccttcgtctggttaagtcgctaaatgcaatgttggtagcttgaaat

SEQ ID NO: 130792 - DNA, 425 bp, Zea mays
  Clone ID: MRT4577_50759C.1
gcagttgaacaaatgttatggattacaggctcagcacatttaaaagatatttacatggtgggttgggaaaatacatcttttctttccaaggtcatctgtcttcacaacagcaacatctaattccatttccatgaccgcattgaaaatgtaacacgtaacagggcaccaacagagtattgtccattccccatttaccaaacaaaccaccagcgcttccagacgacgggtcggacaccagtaccgccgtcggggacgccgaggcaggctaagcgccgcagctctcccatgttcaccaccttcttcgatagctgcacgcaccgacaagagaatcaaacaggaaaaaagctagtgagaatccaagcgataaccaacaccgcacttttcctgcacgcaccgcggcctttgagtcggagagcaggtgtgcc

SEQ ID NO: 130793 - DNA, 321 bp, Zea mays
  Clone ID: MRT4577_5075C.1
aaaacagaaccagaataaagggccccaaaacagggaacaccgggcactggccaccccaccacaagagcccaaccaacaactaaacggaaaaaaaggcgaaaaaaacccggaaaaccgaccccggccataaccaacctaacgggcaaaacaaccagggcagaggaccaattctcccgggatgtaaggtcaacaaaccgggcctgggagcccttaaaagaaccgcccaattggcaaaaaagtccctcgcactccagggggaggaaaaaacagcgggggaaaacagaatacggtgccccaagccaccctgataaacatcccacc

SEQ ID NO: 130794 - DNA, 818 bp, Zea mays
  Clone ID: MRT4577_50760C.1
ggagagaactagtctcgagttttttttttttttttttttttttttgcgtttccggccgggtactatcccacggcggccaagctgtggaaacgagggagacgaggaggacaagggaaagaaagcctaccggctcggcggctccggctcacctcccacacccccaaaaaaaatctcgcgtgccgccggcggccaccaccatcactgccatgatcagcatcctcgcgcaggagcgcctcctcgggttcgccctgggttccgtctccatcggcggcttcgtcctccaccagcgccgggccatctaccgttcaatcgctgaagccgacgggtcgccctacttttaccagcctggtgaaattgccagtcgaagaagctcaactgaactggctcatgtatggaacaaggcagtggacgagacccttgggcgacttgttgtgtaccttagttcgcgtgggtggtgattcaagctccatgttgaacatggtaaccgaggaagactctttttcaagccactgatgtgctcatactcgatacttccctgtacccggattgaacatgtatttttttttaaaaaaaagagatacttccaatgaccgatttatctgaaattctgaaccgagctgattgattctaccgatgcttccctgagcaggtggatgttacttcgaggtcattgttgtagccctgtgaaaggcaggactcgtctaactatttttacatatatgtattggtaataaagaatgtatgttactttgctgacgtaaaaaaaaaaaaaatggaaactatgctcattctctaaaaaaaaaaaaaaaaaagcggcc

SEQ ID NO: 130795 - DNA, 447 bp, Zea mays
  Clone ID: MRT4577_50761C.1
gtttgctctagattatgagttctacaggtgccaaaggttcacaacaaaccaatacaaagtcaaaagaaagggttcaaatcaaaggagcaaagtaacgcaccggacagtgtccggtgcactaggaagatcgactctgaacttgccagtttcgggaatttgagaggccgctcctctataattcaccggactgtctggtgtaacactggactatccggtgtgccagcggagcaacggctacttcgcgccaacggtcgtctgcagagaacattaaatgtgctacaatgcgtgcctgcgcgcgcagaagtcagtgcaggcgtcagaaggcgaaccggacagtctacaggacctgtccggtgcaccaccggactgtccggtggccccaattgtcagagctccaacggtcggaacccaacgaccaagtgatgtggctagcgcaccgcacagtgt

SEQ ID NO: 130796 - DNA, 517 bp, Zea mays
  unsure (1)..(517): unsure at all n locations
  Clone ID: MRT4577_50762C.1
ggcgcggcggccatgggggggcactactcgcccacgggctccgccgccgaggcgggcggggagcggggggtccgcggcgtgcgggagcggccgtggggcaagtgggcgggggagatccgcgaccctcacaaggggggcgtcgtgggggtcngcacgttcaacaccgcggaggccgcggggcgcgcctactacgaggccgcgctccgcttccgcgggagccgcgccaagctcaacttccccgaggacgcgcgcctcaccacggggccatccgctgcgggcgctccggcgggggggggatccacgaggacgatggccgtggcgggctctgggggcgggtcgtaccagcaggaggccagcgccgncgtcntctttgcagactacctgcagtaccagatgatgcttctgcaggggggcaccagcgggcaagggagcagcagtcatgggggggatcctntgtactactactatggggggcaccggggggctggcgctggcgctggtggtggggccatgagca

SEQ ID NO: 130797 - DNA, 2094 bp, Zea mays
  Clone ID: MRT4577_50763C.1
atgctagctggcttgtctgaagattctgacgttagcgaaggctttgatgtggaaagtgaagatgaagatgccgaaaatcggccctggcggccgagccataccatcttcggaaaatcatccatcaagcagagtcagattgatgcgatgaaaggaagatattttcgagatatgtccattgtgagaactggaggggatagcgcgacccctgcacccgaagtagatgaagtggttgtttacaggagcttcatgaaggcagggcttctgttcccattaagtaaatttctggtcaaagtgttgaagacctttcaaatttttcttcatgagattatacccgatgccatcaggatgggggtttttatttgggctgtgagaagccaaggactggagccaagtgcaaaatgtttctgcaatatgcatgagctgtcttacgaaacgaaggctactgggaaggaacagtatcataataattttggttgttatggcttcgtgccccgctctgatgtgagctatccagttccgacgtttcggaagaggtggccaggggccttgatggaagaatggttttatgtgaagaatgacttagttgccagggaagatataaaagggatcatccaacgccctattcggtctcgcttcggcatcagaagaccagccactgcgcttggaaatgaaatagaaacatgtcagaggagttttaacactgtgtgcacttttattggcacaagagacttagtccaagagcacattgcctatagagtatggcctctcgtgaatgattgggagatgccgaaggaagctgctgccgggtctagccaaggcggcctggtgtatctaaaatataccttcagatatagagagcaatttgacgagccaaacaatgagtggctgaattgtattgaagcgactagtgacgagttgcttggtgcttataaaagggccgaagatgatgccatgactgtagccttcggagagcgaggcaggagaaggctaaacagtgtttttgatgttattggttccgtctacccggattatagctatcccttgcgaaaacaaggaaagaaaaggaaagttcccacttcggccatctcagttgtgccgaaggctacggtgctgaagcttgttgaaaggacttcttccaccaccgagccagggcaccctgctcctgccggctccaaaagagaatcggctgaaatgccaaaggtttctgcaatcgagtcggccaaagcgccgagacatgctatcgaagctaaaggaaaggcaaccgaagaactagagcgagaggaaacagcagggccaccaaaaatcttgagtccgccatcggaactagaattgtcgaagactgctgaagctgctacagttcgcgctaaacccgaagctgggcccacggtgcccactgaagcagagcctgctggcgctgagcagagaactgaacaagaatcttcagatgttggtttggctctggagaaaaaagacgtgcctgagaaagttaaatctactactcccgaagcaccttctaaagatattgactttattattcgacatgctttgggtaaaaggttgtctgaagaggaaattgcggaagccaaacactacgcccgggagttggagtacccaaagggggccttggtgtacaatggcaccgacgaagatgattttctatattgtctcccaaacaacaaggaaatatctgtctgccgggagatggcgaagaatatgggatttccaaagcttgaagttggcctctctgctatgtcgaaggatgacctcgcagacagccttgcgtacaatagtctgatgggcttaattctgagcaacgctttgagagcacagaagaatgctgaggatgaaagtttccagatagcacttagcaaccttcggtcagaggttatcagactgagaaatgaagttacagagaaagacaaaattctgctttccttgctggatagagtcaaggctagtgaagccaatcttgctgcgcagtccgaagctcatagagccgaaattgaagatttaaagaaaaagcttgccgaaaagaatgaagatttcgaagtggctaaggcaaagcaggaaataagcgagtggactagcgcatga

SEQ ID NO: 130798 - DNA, 271 bp, Zea mays
  Clone ID: MRT4577_50764C.1
cactcatctaaccccaactgctatgcaaaggttattctgatgtctaccaaccctccacttgtatctatgctaaagagcatattgaggctagtgaggaactcttctatgattatccttatggtcctgaccaggctccatcttgggctaatataccctaacgtataaagaaagactaatcattcctctctcaccatcgagcacacatacttgctctatatcttaatatcatctccggatgatacaatatgccttaaattatatatttaataca

SEQ ID NO: 130799 - DNA, 458 bp, Zea mays
  Clone ID: MRT4577_50765C.1
cgctcctcgtccaaattgactgcccagcgcgctccgtcactactttgcgctcgcgtagctgcttgcctcttgcactggcatgtggcgttcccagctcgtggctgcctcctctttgcatggcagttctcccagccgtcgtctaactcacgcaagcatgaaaccgctcagccgtcaccctcctcgccctgagctcgcacggtctcgtcgggactgcgccgctatctcctcttgcagctgaacatcgtgccgttcctgctccttgtcgcagcttcccatcgcgcgcccggtctcgtcctggtgccgatctcctacacgccacgctcaggacttcaccggtgccgtctgaccgtgctcatcgcgctgcaagtcttaatgttcctacgtgtcgatctcgcttcgccgaggcaacagcagcaccagcatcctctccgagcttgtgtttgtaaatttcctcgtcg

SEQ ID NO: 130800 - DNA, 648 bp, Zea mays
  Clone ID: MRT4577_50766C.1
ccggccggaatggattgaccatcgatcccaaggtgggaaatcgatcgagcgatggaccatggcccagtgatctcaccctctgctgctgcttgctaccgcatcacctctgctagtgataccgatcactacggagggactaccgcttgtgtctccactacatgtcggccgtccacatgcgtacgagaggcaatttccatcaacgcgcgcgcacgacgaaagtcatgtagataggacccaccgacggacggcagtgatgtaggcatgcacgacggaatacaccgccgcgtagaggcaccacagcattgcacgctgcgatctccaagctgcatgacggcgcttctccattgcccgagcgcagccttagcctcgcggcgtcatgagtcgcgcggtccgactctgctaatgagagaggtggaagcagaagataccgcacaaggggccccgagggctcatcatcaggacagcttcttactcgggcgcggagtaggcggacgatgattgatcgtgcgatagtcatcgcgcaggtagagtctccgtcaacagagtattcctcctttaacgctgtagccgcgagaaacccgatcccatcctttgtggattattaatcattgcgacatggatgactgatatgactctctctttctctat

SEQ ID NO: 130801 - DNA, 2168 bp, Zea mays
  Clone ID: MRT4577_50767C.1
aaccaattcggggtggttccttgtggccttcgtagaaggcgcaagtcagagacccttcgtgctcagtatattgatgtcagggagctcaggatttgtgctggaacatggaatgttgcaggcagacttccacctaatgatttggatatccaagaatggttggatatggaagagccagctgatatatatgttcttggatttcaagaaattgttccactaaatgctgggaatatatttggcgctgaagacaaccgccctgtagcaatgtgggagcatattattcgtgaaactttgaataagatcagcccagataaacccaaatataaatctcacagtgatcctccttctccgtcaagattcaagccatctgatgatgcttttgttatggaagatgaacttattagtgagtctgatagtgaaggtgatggggaggtgcacccattgaacgaacaagatttggtcgactctgttgatggcattcatggtaacaaatgtgaacctcaaacaattttacaagatgacgagttcagcaggttgccttcagtgaagacttttgacagatccaataacctaagttttaaagaatctaatttggagtagaagatctgccagaagatattaactaaaacattcagtcactcagagaggcttgggatgatttggcctgaaccaccattggatatgttggcccagtgtcttccagacagcacaaagtcatttgcttcaggaaaggttttaagatcatatttgtctttcaagtcggtaaatggagattctggtccatttgctgaggacaattcagttcctgattttcatatgagctgtgcagcagttaaaagaaaaaggccatactttgtaagaataataagcaagcagatggttggagtgtacctatcaatatgggtacgaagaagcctccgaaagcacattcagagtctgaaagtatcaactgtaggggttggtgctatgggctacattggtaataagggatcaatatcagtaagcatgtccatataccaaacacacttttgctttatatgttgtcacctgacctctggagaaaaggaaggagatgaactaaaaaggaatgctgatgttcaagaaatccaccgaaggacaatatttaatccagtttcgagagtcaacatgcctaaaacgatatatgaccatgaaaggattgtatggctaggtgatctcaactataggatcaacttaccatatgagaagacacacgaactcatatccaagcaggactggaacgaattgtttgggaaagaccagctgaaagtagagctgaagaaggggcatctgtttgaaggatggaccgaaggggtcatcaactttcctccaacgtataagtacaaggttaactcagaaaagtacataagtgatgataacaaatctggaaggagaacacctgcatggtgtgaccgaattctttcccatggtaagggtatgagattactgtcatataagacagttgatctcagactatcagatcaccgccctgtgactgctgtgtacatggcagatgttgaggttttctcttcaaaaaagctgcagagagctctgaccttcaccgatgcagaggctgaggaacagctctccttcgaggaagacagtgcttctggaatatacaaccttggactatatgaaagttcaaggtaatcttggacacacattgaaacagactttatgcttttctcaagtatccaaggaagaacaggcaagttggtagtaggtagtcctgtacaattttatccaaaatatggtcagagattacgacttagtcctgctgcccagcatgtgcctctctatttttctgagaccagcagttggtagtaggtagtcctgtacatttttatccatgctctgaccatattttgaaatcagatgacatgcatttgctgcttttgagtactgtgtacctcatatgtgcaaaaataatctctgaccatattttgaaatcagatgtcatgtattttgctgttttccccctccccctttttgaggtggtgtgcctcatatgtggaaaccttttagctgtaattaaaaatgttggatacagtaaatatttcacacagattgtgacattctgtaatttcacttccagtgtaatttttctttcctctttgacacccctacagcaaatgttgatatcagcttaactt

SEQ ID NO: 130802 - DNA, 712 bp, Zea mays
  Clone ID: MRT4577_50768C.1
gatcaatatcagtaagcatgtccatataccaaacacacttttgctttatatgttgtcacctgacctctggagaaaaggaaggagatgaactaaaaaggaatgctgatgttcaagaaatccaccgaaggacaatatttaatctagtttcgagagtcaacatgcctaaaacgatatatgaccatgagtgagtaatagttgacaggaacaaagcattatctttagccattcttgaatattgcaatgctattagaacttttgctttcatagtttaccagttcagttcatggtagctagatttggtgacgcattgcagttcagcttgtttcatctaagattttataagtttagcttgtttcagaaggaatgtatggctaggtgatctcaactataggatcaacttaccatatgagaagacacacgaactcatatccaagcaggactggaacgaattgtttgggaaagaccagatgtgatctctagaatgtgctttgtaagcggctacatcaaaggaaaggaaatctttatgaagaccagagaactctagcagggtgtctgaagacaaatgtgctagctgaaatgactggcctaagacctgtaaattgtaaaattaaaggtgatgatttggaggccatggttcatgtttgtgagctcgttgcagaatggcgacagccatttcattcaaatgtagtggtgcacattgtatgctactgac

SEQ ID NO: 130803 - DNA, 418 bp, Zea mays
  Clone ID: MRT4577_50769C.1
tcttgcgtccggtgccacaggaactggctggggggattgaacggcgggggcccaactctgtcagaccttatgttgaagtgcgaagactggatacatgcactcatcggacatggaaacacttggacgagccttataggtgcgagaaactgcaccagtagactggtcttctgctgaaaaaggatcaccaaccatatttggcaaaaccaagggcaaggccaaggataaagtgaagaaacctaagaaacacaacgagaaagatagactcgaggagaaggagcacaagaaacacaaacacctggataaatatcggagttaagattagagataaggataggtcaaagacaaagaaaaggaaaagggcaagagtgggaatgatcacttaggccgtgatgattcccaagaacacgaggagaagaga

SEQ ID NO: 130804 - DNA, 1748 bp, Zea mays
  Clone ID: MRT4577_5076C.1
atcgcaagccaccatcgccattgccagagccacagccacagccaccacagatgctgatgacgtcaacgaaaaagagagggggcaaatggaagtttgtattgaccggggtccttggtggtgctgcaattgtggtaacacttggccttagcgttctggtattttgcttgttgagaagaaaaggaaggaaaccgagagggagaggagtggagcagactgaggagggcattcggtctgggcggagaagtagtagtgtgaatcccgtcacaatgtcacccatggcatcccccagagccagtggttcaccaaagggcgttcctattatcacagatgaattcacctatgagcagttgcaccatgctgcagggggctttgggaacgataacctcgtcaagcatgggcactccggtgacatgtactatggtgtcctggagagtggctttcaagttgtcataaaaaagattgatctgaagaccagtaagaagtgccagggcgaattgagcttccttacaaagcatacccatgggaggatcgttccattgctgggccatttggctaaggatgaagaggaattgcttgtctataagtacatggcaaaaggtgacctcacaaccgcactgcacaagaagtcagtggaagttgaacaggggttgcgctcattggattggataacgaggctcaagattgcaataggtgtggctgaggccttgtgcttccttcatgacgaatgcaatcctccgttggtccacagagatatccaagccagcagtgtgcttcttgaggacaaatttgaagtgtgccttgggagtctgagtgaaatatgcactcaacaaagtgcaggaagccaaagtttcttctctcggattctaagatcatcgaagtcccttgacaagaacataccaggtccaccagctagctgctcatacgacatttactgtttcgggaaggttctactagagctaatcactggaaacttcggtgcgagtggctcaaccaacgcagattcagaagagtggttagcaagaacattagattacatcaacgcaaatgacaaggagggtgtctcaggtattgtggatcccacccttgttgtggatgatgaccatctagaggaagtgtgggcagtgtccatcgtcgcgaagacatgcctgaatccaaagccctctaggcgtccactcgctcgatacatcctgaaagcactggagaacccactaagggtggtgcgggagcaggaagagttccaatccagtccatctcacctcagaagtaccccatcccagggctcttggcgtttcgctttccatggaaacaagtaccacagctgggaggccatgccaacgtcggggcaagcacttgctcggaaaaatacagcgaagtctcaggggaccgaggggagtgacgaggacgaagagaactcgttctcgttcaagagggcttctcgggacgattttccggatcccatagagtttgaaggaggtgttgttgtgaaggagtacccgcagactagctagcgatacttgatgtgcatctctttgatgtctctaggtgaaaagctgtgtatacagaatagataaatttttcccctcttttctctttacttgtttatctcagtcgattgaaatggaataaatggcgcactgggtgtgccatccttgaaatgcaagccagtaaagttctcagatagagccatttgccattcaaaaactgttaagaaattttagtggttaaaccagggggggcccccctttttt

SEQ ID NO: 130805 - DNA, 527 bp, Zea mays
  Clone ID: MRT4577_50770C.1
cccagcgtccgctttattcaaaagtcctagctcatctttccattccctttaatgatagctgaaagtagagctgaagaaggggcatctgtttgaaggatggaccgaaggggtcatcaactttcctccaacgtataagtacaagggttaactcagaaaagtacataagtgatgataacaaatcgcaaaccctctcttctaacaatgctggaaggagaacacctgcatggtatattttgttctacatgatttacgccctgctagttattttcttttattaatgaaattatcattgtagaagttatgttcgtatatctaaagttactggtggcgtgcagtaacaaggtgtgaccgaattctttcccatggtaagggtatgagattactgtcatataagacagttgatctcagactatcagatcaccgccctgtgacagctgtgtacatggcagatgtggaggttttctcttcaaaaaagctgcagagagctctgaccttcaccgatgcagaggctgaggaacagctctcct

SEQ ID NO: 130806 - DNA, 324 bp, Zea mays
  Clone ID: MRT4577_50771C.1
tcgtctagacaatgtgtctcctgctgccgctataccctaatgggcgttagggccgagcactgagcgagtgactggacgtaaagcttgtctgcaggtgacccgactgccgaaagatgaaaggctccgaacatgatggagcgtctacaaggcggttcacacaagaggaccaattccacggtcagtgatacagagcaaagccaactggttctgcgaaggacaatattacacacatatctctattgttaaccctccaagaccatactgttttgatgcttgatacatggaagctacttgacagtggattcagccgtgatgcaccatgta

SEQ ID NO: 130807 - DNA, 197 bp, Zea mays
  Clone ID: MRT4577_50772C.1
ccagaagaaaaggttgacccggttaattgaaaaaggaaacggccggcaaaacaacaatcaatccgttcaacccaatgggttacttggccaaaattgcaacaacttccggaacggcggttacttcggcgaagggccccaaaaaaacggcggcaatcgccccggggctcttcttaataaccttacccccggcttcttca

SEQ ID NO: 130808 - DNA, 1036 bp, Zea mays
  Clone ID: MRT4577_50773C.1
cctcgaggccggccgggaattcgtcgcaactgctcactgcgcgtgctcgagctcgccacacacacacacacggctacctcctccagctccgggtcgcgtcgcgcgccatggctcttcctaaacattcacagggggcgggggcagaggtggcggcggacggctccacctccacctccacttcgcccgtggaagacgatggcggcacattagatgatctgggacaggggcagcggcaggggcgcatcacgaagaagacaacgacgacgaccatcacttctcctcgtcctcgtccaccgggaataagcataagcagacgagctgcctcctgccagcacgcagcctgagatcaacagatgaagcaagccatagccagcaagcagactgcggggtccgttcgctatccttctccaagatcttgagcttcagaatgtgggcgcccggcggctccagctcccccacctgcttggaggattacattgctggtcagcatcaactagagcacgatgatgatgaggccgacaagctgatgaagcaggtatgtcggtcgcagtccgtgccagctacgagcgtggccaggcggcgatccagcggcaccaccgcaaaagggaaagggtcgaggagagtggcagactccagctccctcaggcgcctcagagtggtgccactgcgtgttcctcttcctcctcctccacctctccaagatgaggccgcaaggggcaccgccgatgctattgctactaccgttaccaccggagaagaggaagaagatcaagacatcgcggctgaggaggcggtgtgccgcatctgcatggtagccctgtcggaggaggcggtgttcaagctggagtgctgctgcaagggcgagctggccttggcgcacagggcgtgcgccatcaagtggttcagcatcaagggcaacggcagctgcgacgtgtgcagccaagaggtgctcaaccttccagtcaccctgcgacgcctcccggaccatccgtccgtcattcaggcggcggcggctctggcacaggcacaggcgcaa

SEQ ID NO: 130809 - DNA, 1288 bp, Zea mays
  Clone ID: MRT4577_50774C.1
ccccgcgtccgccccgcgtccgcgtggcgtccgctccaagctagctttgctttagcctcggtcttcgccattcttaatccagtgctccccaccacgccaatggaggctccgctcctcctcccaatctccaccgcctcatcctgcatcgagatcgccgagggcgccgtgccatcgggccctcgtgctcgctcgtcctcgtccatgccttcggcccagagcttcgtcctccgcgtggtgaccgtggtcgccgtggcgtgcgcgtccctgttcgcgcagcacgaggccggcaaaggcttcgccgtgtccgtcgcgaacgacctgccgcggggcagcgccgcggcgcggcgcttcgacctcctcctggtgtccaacggccgcgccgagcgcgcgctcctgcgcgccagccgcgccgtggagcgcgcgctgttcccggacccgtcgttcccgcgcaggcaggtccgccgcgtcaccgtccggatggctgcgcgcaacctcaccggcgccgcggtgcactccgcggcgcccggggagtacgtggtctcgctgggccccggcctcgcgtcctccgcgcccgccgccgaggccgcgctgcgccgcgccatcgcgcgcgtgtggctctgggacggccgcggcgccgccccggcgcgcgtcaccgagtccatggttgactacctcgcctccgccgcggccgaggtcgaggtcgaggtcgaggcgcctccatcggctgccgggtgcggcatgtcggcgcggctcctgaggcttctggaggcgcggcgcgagggcttcgtggcaaggctgaaccgggcgatgagggaccggtggagcgacgccgctgtggacgcggcgctcggcgcgccggcccggctcgcctgccacgaccagaagaagggagcgacggcgctgaccggccgcggcaccaccacctctccacgttggacgccggacgccgctcgtgggtccagcgtggcaacgtgaggctggaaagggcagttctggtattggtgtcttagattgaaattaaaactggtcccgcgggtggtaggcgtgggccatggccgcggccctaatggtggctggaggtgagtgagtggtcgttgtcatgcatgtaaaaatggtagatggctgggacggggaggatgagggcccccccggtggcttcatcatttggcttgagcatgagagcatccatccagatccatagtggattgtaaatgacaggtagtgctataaaaatatggttccattccatgccatagcaaacgcgatgtgagaaatagattttttgttt

SEQ ID NO: 130810 - DNA, 393 bp, Zea mays
  Clone ID: MRT4577_50775C.1
cgctggtggtgaaggagacgctgcggctgcacgtgcccgtgccgttcctgctgccgcgggagtgccgcgaggcgtgccgggtgatgggctacgacgtggcccggggcaccaaggtgctggtgaacgcgtgggcgatcgcgagggacgccgcgtactggggcgaccccgaggcgttccggccggagcggttcgagggtggcggcggcgccgtcgacttcagaggcgccgacatggagttcatcccgttcggcgccggcaggcggatgtgccccggcatgtcgctggggctcgtcaacatggagctggcgctcgcgggcctcctctaccacttcgactggacgctcccggacggcgacggggaggtgctcgacatgagcgaggcgttcgggatca

SEQ ID NO: 130811 - DNA, 236 bp, Zea mays
  unsure (1)..(236): unsure at all n locations
  Clone ID: MRT4577_50776C.1
ctgtcagattcggcacgaggcctggggggggtgatgggcctgcccgctcttgcggcgggcccgtgngggcggccgggcgcttcccggggctggccctcgtggcctgggtggcccgcgggggggccctgggccctccggtggtgcctctccggttctgctcgcccccgnttttgtgtgtgcggggggtttctctccgcgtcggtggggctccggctgcgcttcgggcgcccgtgcct

SEQ ID NO: 130812 - DNA, 213 bp, Zea mays
  Clone ID: MRT4577_50777C.1
gggctcacaaaacgcctgcatgggtttattgacttattttgttcatcaacaatttaatcatcggaatataatggtttaccgagttgccaaccctttttataatatgcctgcctgctgaagttaatattaagcgtttttttatttaattgtagtatgcctgacagcctaataggggcttttgccgacgacgttgcccggggcccaccccttccg

SEQ ID NO: 130813 - DNA, 373 bp, Zea mays
  Clone ID: MRT4577_50778C.1
ccccccccccccccccccccccccccccttaaaaaaacagggggacatattccatgagttaattgagttggaattttggtttttggagccaaaacatcacaggtcaaataaccaaatctatggcacccgaaaaatgaccacatcttatactttgagttataaaaaaataccctttttacaaggggttaaaaaaacccccaaaaatcgatcttatgataaaatcacagccttgcttacttatttaaacaaaataccccaccaacatcacaaacatttcagcacatcaagcaacttcagggccctcaggggccattgttgaccctcctgcagtttttcctgatctcaccttggaaccctgtcaggggcgaaatgt

SEQ ID NO: 130814 - DNA, 686 bp, Zea mays
  Clone ID: MRT4577_50779C.1
ttgagggagtgaggctggagctgtgcacgccagaccgcccgggactgctgtcagacgtcacccggacgttcagggaaaacggactgctcgtggcgcaggcagaggtttcaaccaagggcgacatggccaccaacgtgttctatgtcaccggcaccaccgccggccaggccgtccagcagaacgccattgaagccgtgagggagaaggttggcgtggactgccttgtcgtcgaggagcaccggccgcagctctaccagaaggcccgcggtcaggatgaccgggacgaccgcaacggcgccggcattgggctgttctacctcggcaaccttgtgaagaggaatctctacaacctgggcctgatcaaatcttgctcatgaggcagaaacctgacaacgatcgagccaggctctgctcgtttgggcaccctgcttggttcaacgtccattccacaatcatctcttgtacagtggctgaggaagatccgggaaagcaagatcagggtcgggatcaggaagaagcaggatgatggaaccttagcagtagaccaagtgcagacatgtacataagtggatccgtttacgattagatgttgctatttagcagtagtactagtgccggtgtgtagtgggtgccattcatgatgatttgttctctgtacctcgctgttgttgcctccatctttagct

SEQ ID NO: 130815 - DNA, 273 bp, Zea mays
  Clone ID: MRT4577_5077C.1
aatattttatggtaacttttactttcgtattccaattacaataaatggggtgaataaagagggtttaatcagagcctatgaatatttcaacaattgtttcaaggatccattagcttttacggtggtaatagttggaaaaatagacccagccatctcacttccactggttctgcaatacttgggtggaatacctagggtacaggatgctactcaaccacttagtcgtgatgatctaagaggattgccatttaagtttcctgcaaccatcattag

SEQ ID NO: 130816 - DNA, 358 bp, Zea mays
  Clone ID: MRT4577_50780C.1
atccctccttcgtcttaaaccctaaacaatggcctgtcgcaccatcattttggccggcctcctacttacactcgcctacactctgccccactccgcctgcgcttcttctgtacctccgcctccccgctccgatgggcgtattccacggcggcactgcttgccatcgtttcactcgtcaccgccatctgcgctatgcccgacgccggcgccggcaccaacatataagccgatgccggcaccttgcggttcgagattgaagcgctcaagctaaaagtcgcgcggctggaatctcttctacaggcaaataccaaggcattagacattaaagctagtatcttggaagaggacaacacactca

SEQ ID NO: 130817 - DNA, 604 bp, Zea mays
  Clone ID: MRT4577_50781C.1
ggcattcaatcgtttgatcctgttccacagatattattgtcatatatgatatgccatgtaacaagttatgccactactagttttcggtcacttagtacagggatatggcacaagaggataccaactctgcggtggataagatgggaacatctcaagcaccaaggcagcacttgtcacaaaatagggcctcactgaccagcaaggtgacagcaaaaattaggaagattctgttgaaagctaaggcacccaggaagaagaaaactactatgtatccggtcctagcagctgcactcaaatttcataaagatgatgacgtttatcctgcagctgctggagtgaagcagcagcagcagcacaacaaggagatgtagagatctattatgaatgcacctcatgccaacatcgatctaccttagttatgtattaatttcctagtacctattgtcatctcaagctatctatctttacattatatcgtgtcatcatgtcagttcgctattatgttgtatggcttggttcaaaatgagttataacttaatctcctaaaaaaaaaaaaaaaaaaaaaaaaaaaaaaaaccaaaaaaaaaaaaaaaaagggccccta

SEQ ID NO: 130818 - DNA, 124 bp, Zea mays
  Clone ID: MRT4577_50782C.1
aaacgcggcacatgagacctgcattcatgtgccattgcgaaacagcgtcgcacccacactactaccttcgtccccagcctaaatcccctgatcgatggcgtcgacgaagcagactgcgcgcaag

SEQ ID NO: 130819 - DNA, 419 bp, Zea mays
  Clone ID: MRT4577_50783C.1
gcacaatcctcgcacctatctgacacatttctcattatcacctcctatattactcgaagtgcttcaaaaccgtgctgtgcactcaaattttgctatcacaaacactacaatgaaacaccactcatccatagaacacactattgctcctgaccaggctccagctgcttcatacacctaccctcctcctgcgccagcatccatgacatggccccatctaactcctgaacatacacaagatgttcatataaaaacacttattacaaatcccacctacatattgtaccactactgtctaccatatatccttactcaacaacgcaacatcatctaaatctactaccacccacgattaccaccagatatccacggatcatgccttaataattccctacgactatattctatcaatcgttacctct

SEQ ID NO: 130820 - DNA, 228 bp, Zea mays
  Clone ID: MRT4577_50784C.1
ccacgtggttaaccacggcagcgccggagccagacagcggggccaaaaaaaacacgcggggtccccaaacaccccacaacacccaacaaccgacacaccaaaaggaaccccaacaacaaacaaccaagacccccacgaaccaaccccgaccgtgcacaagaatacccccccaacggaccagcgcaagaaccccaacctaccaaaccaggccaagagaacccacccaca

SEQ ID NO: 130821 - DNA, 524 bp, Zea mays
  Clone ID: MRT4577_50785C.1
ttgaattcggcacgaggcgagattcttcaagaggaatctgctgaccttctctttacctaactcaccactacgtctaaacctcactgccaaaatcgatatagaggccgaaccttttggaaagatcggaaggctggtggacgggaagggcctattaagccacgaatacgaactggacagcgtgatcaacccgatcataatcaccccacacatgacctagatcgtgcttatctagactgggcgcatacagaatgagcaccattaactgtatgaaaaagactcctggctccttcatttttactagatagatgttgctatcccagcgtactgaaacacttgcgagatcgctttagggttggccaagcactgaaagtgtcggttatcatacgtgaaccatgacaaaaggttacttcggctgaaggcacttgataaccagtgcacacaaccgattgtatatgagacactagaaccgaagtcctctgtgtttgggcaagcggggcagggagatgtggttgggggggcggggg

SEQ ID NO: 130822 - DNA, 274 bp, Zea mays
  Clone ID: MRT4577_50786C.1
atagaaaaaggggtgcgcaccctttacttcgggggtgtacaatcaaaaagaggggcaaacaacgtgccccaacaaacttggctattctacttagacctggaccggtcagattaacctattcgaacggccatggtaactggtgggaaagttcattcatgatgcaacaacttttttttatagtctaaaactggaaaacgggacaatttaagggttcaaaactgggcatagggctatcggacaacaaaactggcatttcttttcgtcgggaaaaata

SEQ ID NO: 130823 - DNA, 260 bp, Zea mays
  Clone ID: MRT4577_50787C.1
aatgtgtttcagagaagggcggcgtcgcggtcttcaaggacaaaacgctaggtatccaggaagacggcgtcttgcctggcttcttcaaacggaacgtctgaagcatcaaataataatgcatacctctgcacacgatacttaagtgcaagtctgcaaatcacgattggagcacacagctgcggcgatctgaaacatgttcactcaagtttggaggagtacacttctctgtcctcctccgcagatctcctgaattcgaatgg

SEQ ID NO: 130824 - DNA, 556 bp, Zea mays
  Clone ID: MRT4577_50788C.1
cccggtcgcccagcgtccaaaaatccgaacattttaattttgctagaaaatatgtcgcgcgcatcgtcgctcgtttacctgattagctggattggggttgtttgattgacctatggaaccatgcaaaagttctcatgtttaaggggagttaattaaatgtacatcattggtcgtgacattgcttaattgccgttggtttgtttcttaaaaaaaaaaaaaaaaaaaaaaaaaaaaaaaaaaaaaaaaaaaaaaaaaaaaaaaaaaaaaaaaaaaaaaaaaaaaaaaaaaaaaaaaaaaaaaaaaaaaaaaaaaaaaaaaaaaaaaaaaaaaaaggggggggccctttttaaagaaaccaaattttactcccccgtttttgaaagaaaaaatttttttttaggggccccaaaaataaaataaatggcccgggttttaaaaacgtcgaaattgaaaaaaccttgggttccccaaattaaatccctttaaaaaaaaaccctttttcccaagttgggaaaaaacaaaaaagccccaaacaaatcccctttccaaaaatttc

SEQ ID NO: 130825 - DNA, 350 bp, Zea mays
  Clone ID: MRT4577_50789C.1
gaaaagatgaagctctaagattgatgaattggaacaacagtgatcctcatttcagccctagtatagccttttgatgtgttcacccttagactgaaacgggtctaagagtttttgagtgggtcaaacatctgaaattgaaggtggccgctggaggattatggtttactcaagaaatcgctgaaaggaacatcatgggaccagcattaattgtaccataaagacatggtagaatctggttccaacgaactgaagaatgaagaatgtaaagaggaactaggatgagcttggtttttgcctctcctggctggaggtgtcccaaacatcatgctcatttacgccgaaggatgaga

SEQ ID NO: 130826 - DNA, 325 bp, Zea mays
  Clone ID: MRT4577_5078C.1
ggcggcggcgtactaggtgctcgtagcaggcggggaggggctgttcctcaagaccaagcccccggccgccagatccgccgtcgaggcgctcccgtccgccgtcgtcgcggccggccaggaagtccagggggatgagtgcgctgtgtgcaatgacggggtgatgtggagtacatgatcataaagccagattgtttggaacacgttgtgatgggaatcaacggccagttgccaggcccaactattatggctgaagttggtgacattcttgacattgctctcaccaacaagcttttcactgagggaactgttattcactgggatggaa

SEQ ID NO: 130827 - DNA, 2050 bp, Zea mays
  Clone ID: MRT4577_50790C.1
attggtacctcgaggcggcgggattctcatacaaccttccggatccagtgccgcacgcctcactccccgtccccgacacccatgacacgcaagaggcggaagcacgccgccgccgccgccgccgcctagggttccgatcccttcctcatggattcgctgccgcggaagcgcaagggcgcgcgcgccgcgtgctccctggccggatcccgccacgatgcgcctgccgcccgcaagcgcacctgccgcgagcccaagccgcggcccgagaagaagaagccctcttccgccgatgagggctccgcttccgtccgcggcggcgcctgatagccccgggcgtgggctgaagcgcaagctgggctgcatcgactccgccacgcggatggggcggaagaagcggctcgagagcgagtacgagctcggcgccgagatcggccagggcaagttcggctccgtccggatctgccgcgccaaggtcggcggcgacgagttcgcctgcaaggagctgcccaagaacggcgaggagacggtgcaccgcgaggtggagatcatgcagcacctctcgggccacccgggcgttgtcacgctcagggccgtcttcgaggatgccgacaagttttacctcgtcatggagctctgcagcggggggaggttgctcgatgagatcgccagggaggggaagttttccgagcagcgtgctgccattgtgatcaaggatctcatggcagtgctcaagtactgccacgagatgggtgttgtgcacagggacgttaagccggagaatattttgcttaccaaggctgggaaagtgaagcttgctgatttcggactcgctgcacgggtcactaatggtcagaaaatgtttggtgttgctgggagccctgcatatgtggcacctgaagttctttctggaagctattcggagaaggttgatatatggggtgccggtgtgctactacatgtactactacatggttcacttccatttcaagggggctctctggacgcggttttcgagtccataaagacacttgaacttgatttcagcagcaccccatgggaatcaatatcagttcttggacgggatcttattgggcgaatgctaaatcgagatgtctcttgtagaatgactgctgatgaagttcttagtcacccatgggtcgtgttttacacagaatgccccctgaaggtggtagctgctaatttgtgtctccctaacaaggttatagcacccaaaattccatggggcagacacaaatcagaatgtgactcattgtcagacgcaagccaaaggtcagaggatcaggatgagtgtggcatagttgacgcattggcggcagcaataacacgtgttagaatatccgagccaaagagaagtcggctttgtagccccgcaattaccattcagcaggaatgctcgtcaaacttgaagaataatctttgcacggctttctgacctgacctagtttatagcacctgatcggagtggcgtctattcttctcgctgagaaggtcgttctgatttaggtgttgtagaggcgaggataataactcagcttttccagccagcaacaaacgtctggtatttagtgtttctttcagttttcctgatgaaccccgcagttgtagctgctgtaaaattctgtaaatagcatggtcctttctcaagctgtgcctgggttgctaatttgtgccaccaaaaccttttcacgcaatgttcataattcatgatcgagttgtgcaaaaaaaaaaaaaaaaaaaaaaaaaaaaaaaaaaaaaaaaaaaaaaaaaaaaaaaaaaaaaaaaaaaaaaaaaaaaaaaaaaaatgcgttttttgggctcatttttgccaaaggtcagcggatcaggatgagtgcggcataagtgacgcattggaggcagcaataacacgtggcagaatatcccatccaaagagaaatcggctttgtagtcccataattaccattcaggacgaatgctcgtcaaactcgaagaatgatacctgcacggctttctgacctgacctaacttatagcacctgatcgtagtgacg

SEQ ID NO: 130828 - DNA, 756 bp, Zea mays
  unsure (1)..(756): unsure at all n locations
  Clone ID: MRT4577_50791C.1
tatcggtctcttttcatatgtttcatgtattgtttagtaaatagtcttggtctttggacccaacttaactagatatatagataattgcatctcacttaaatagaagaacaatgttcactatgcaaatcttgtatataaggaggtcgtggagctgtaaatgctttagatgcacctgtaaatattctcagttatacaatgtgatcatagtacaaaattactggactttcaatgcaatagatccgactaagacataaaatagagttaaattcaagcaagaattttccttggctgtccatagaactaagggtagttatctccctctcaagaaccaatggctagaatccttgtaattttttgtgttgtttctttgctttcctgtttcctaatattgtactatgaacccaatgaactttttgtgtgttcctaataatagagcaggaaaatgaatctctgtccttcgtttttctcagctatgtcttttttttcttttccaatttttattttggtctgtcattttggatcactgcagagggggtaaaaaacattatttgaatccatgtggtaatgcttgggcattgcactacgaaagaatgatgtggcaattttttcttgtttgggtgcctttgtacccaaacatattatttacaaaaacatattatttagattattttncctcttggtattttgtttgtttcaatgcannaatattgatgagcagnattctttttttggatctaccatttaacgcaagcaaac

SEQ ID NO: 130829 - DNA, 214 bp, Zea mays
  Clone ID: MRT4577_50792C.1
tgcgaagtcgtcgccggagcaggaggaagatcgagcagcaagatgtcgtggcaggcgtacgtcgatgaccaactgctgtgcgacatcgaaggccagcacctcagcgcagccgccatcgtcggcacatacggcagcatctgggcacagtccgagaacttccccgagttagagcctgaggaggttgctgcggatgatacaggactttgatgaacct

SEQ ID NO: 130830 - DNA, 617 bp, Zea mays
  Clone ID: MRT4577_50793C.1
ttcttcagcattattgcataaatggcacaagtccagaatcttagtctacatgaacacacgtgggcccaattcggcaggcagttctagctggtgctatggctatctgcctcctcacatgtcactgtagcgttgaactagcagcagcggttgatacaaacgacacaaagcaccgaaccatatgaaagaattttattctatatagctttataagtttatatagctcctaggcatgcagaaacgaattcctgggtgcattgatttgattatgatgttatgtgctcagctatatatatgctattctgacactgcacacaagatgaaaaactgttaacaattccccattgcttgctgcagtggatttccacaaccaggaaatggctacaaattccatgccatcctaacagatgaggcagcacaagtagcacctcttttgctcgctcagcagctcgcgtcacaaaaacaagagggaaaagtgaatcgattcagtccactatccactgttccatggcaacaaagctcggcggttcgtttcacgcccaaacttccgtccagcgggataaacgctttattctactcatggagcctatgaacacagaaaatcggacgaaatcgaagcg

SEQ ID NO: 130831 - DNA, 805 bp, Zea mays
  unsure (1)..(805): unsure at all n locations
  Clone ID: MRT4577_50794C.1
ccggccgggaagaaacggacaaagccccgccgccccgcgctttctccggttccttctctcccctgagaccaccaacgccggggccggaaaaaagggaagccagagcacagagccagacctggcggcgctggacatccaaaaacgccgccaaggatccttttctctctctctctctctctctcttcgcgtccatcgacctgaccgcggaggcgcgtgcttcttcttcccgctctccactgtcatgaagattgagggaaacttgcatgtttgatatacccagctgctttctgtaacgaaaaactcgtgatcattttgttgaattggtcactgtcagggagggatctacttgtcagtttttggtattaaggctgctggccttcccttgcagggtatctgtagaataaatgggagaagcacactcggatgaattttgccattgccaggggtgtgctggcaagtatgcactactcagagacgaagaaaacccacgattggcaatctttgagaggcggctgccttgctgtggttgtgggataggatggtctacgctctcatcttcacagttctggcaattatcgctctctctgtggcactgataatctgtgtatacaagtagtacccaaagcgaggaaaacgcggtcgctggacctggaattcagagaaaactgtatttgagtgatagtagcatgcctttgcagtcatcctacatgcatcagtatcactatagcaagttgttgaatttaatgctgctaccgtccccgntgaccagtcgctgccgntgttattcacgaggatgntcattgcc

SEQ ID NO: 130832 - DNA, 1364 bp, Zea mays
  Clone ID: MRT4577_50795C.1
cccacgcgtccgcctgaaaccagcgtgctgtgccgcccgggacgatggcgccgcgccagccgctgctccccagtttcctctacgcggcgtcgtccggcgtcaacggcagcagggaggcgcctccggtggtggcgggcgccccgagcgagccgctcggcaagatcgagatgttctcgcccgcatactacgcagcgggcgccttgggaggcgccgcggcctgcgggttcacgcacgccgccgtcacgccgctcgacgtcatcaagtgcaatatccagatcgaccccgccaagtacaagaacacctcgtcggcgttcagcgtggtgatgagggagcagggcctccggggcttcttcagggggtgggcgccgacgttcgtgggctacagcgcgcagggcgcgttcaagtacggcctctacgagttcttcaagaagacgtacgccgacatggccggccccgagcacgccgccaggtacaagaccctcatctacctggcgggctcggccaccgcggaggttttcgccgacgtcgcgctctgccccatggaggccgtcaaggtccgggtgcagacgcagcccggcttcgccagggggctcagcgacggcttccccaagatcgtcagggccgagggctacgcagggctattcagaggactggttcctctttgggggcgacagattccttacaccatgatgaagttcgcgacgtacgagaacatcgtggagatgacctacaagcacctcatccccacgccgaaggatcagtgcagcaagcctctccagctcggggtaagcttcgggagcggctacgtcgccggagttttctgcgccgccgtctcgcaccctgcagacaacttggtgtcgttcctgaacaacgccaagggagccacagttggagatgctgtcaagaaccttggcctgttgggcctcttcactcgtggcctccctcttcgcatcctgatggtcggcaccctgactggcgctcagtgggtgatctatgattccttcaaagttatgattggactgccaacgactggcggagcgcctgctcctgctactgtcccaatggaaggactcggagagctaaaagcctctgcctgaagttctaaagtttgacagagagtatgcatgcttccgtccatagcgtatactggtgactgtaacagaccctcacccccaccagaaaatattgtctcaagctggtgatttttttttgaataaataagttattactgtatgctatgagtatagaatacgacatgtagaagactataagttactagtcacaaagttgataaatcatttttgggtgaaatttatttgggttcgtactggattgtgttcctccaatataaattgtgttcctcc

SEQ ID NO: 130833 - DNA, 997 bp, Zea mays
  Clone ID: MRT4577_50796C.1
ggctcgaggccggccgggataatcccatggccggattcatcctgtggggccgtggcccgtgggctggccaagcaaacggacaaaagccccgccgccccgcgctttctccggttccttctctcccctgagaccaccaacgccggggccggaaaaaagggaagccagagcacagagccagacctggcggcgctggacatccaaaaacgccgccaaggatccttctctctctctctctctctcttcgcgtccatcgacctgaccgcggaggcgcgtgcttcttcttcccgctctccactgcagtgtcatgaagattgagggaaacttgcatgtttgatatacccagctgctttctgtaacgaaaaactcgtgatcattttgttgaattggtcactgtcagggagggatctacttgtcagtttttggtattaaggctgctggccttcccttgcagggtatctgtagaataaatgggagaagcacactcggatgaattttgccattgccaggggtgtgctggcaagtatgcactactcagagacgaagaaaacccacgattggcaatctttgagaggcggctgccttgctgtggttgtgggataggatggtcttcttttcttttaggtttcttgtgtcctttgatttggtactttgcagccatactttactgctgcaagtactacaacaaggatcctcgagagcgccctggtctagctgcatcagctgttgcggcactcatcttcacagttctggcaatcatcgctctctctgtggcactgataatctgtgtatacaagtagtacccaaagcgaggaaaacgcggtcgctggacctggaattcagaagaaacttgtaatttgagtgatagtagcatgcctttgcagtcattctacatgcatcagtatcactatagcatgtcgttgatttaaatgctgctaccgtcccggttgaccagtcggctgcggttgtttatcaacgaggatgttcattgctctatctc

SEQ ID NO: 130834 - DNA, 580 bp, Zea mays
  Clone ID: MRT4577_50797C.1
cagcgcatgctcggaatacggctcgtgggtgtttttaaaaagattttagggaaatctactggctatttgaatgatcaagagagccaaaaggcactggttttctgctgtgaattcattaagctatgtgtgcctgcaacagttatgcatgctgtgcttcagctcagtgctcgcttgacaaaaacacacgcgcttgctgctctattctttgaaagtggtgggttagcatctctcttaaatctcccaggcacttgcatctttcctggctttgagaccttagcatctgctattgtgcggcacctctctgtctttctccttgtccttcaacaagactacattcaatctccctcctgaataatccaattggcagactgaagttgcagccttcatgaagatcacaggatctctagatatcagtggtgccatatttgtaagaaatgagcttggagtacgactgccatgggtacttaatgactgtcgtatctccaattccatggcactctgcaagggctggggatcctcaatgtacttaacaatgaagttgacgataaagcgatgatttgagaactgagcccctggcttg

SEQ ID NO: 130835 - DNA, 415 bp, Zea mays
  Clone ID: MRT4577_50798C.1
gcgggccgggtctccaattctaatgccctggttcattctcagaccgccgacgatcccttcccatgttccgcagaactgtgaatgataaaaacagatgtgcgacaagggatcatggcccggtctatccgcatcgatctcgtgacgtcggactcttgcgtcgagcgagtggcagaacgaccgcgacaaggatcttgtcatcgaccagggaaaccggaccgctgcctcggacgagctcttcgccgactaccagagcctcctgggtgatgcgtacaaaaaccaagtggcatggacccctctatggggcttttatgcctacaggctcatcaaggaggagggtcagtgatgtgactgtccagaaagacatctcgatgaggatcttcgagggattttcagtgacttgagcaaaatctgtgat

SEQ ID NO: 130836 - DNA, 156 bp, Zea mays
  Clone ID: MRT4577_50799C.1
taggagaaaagacaaggtttgatgtgttgtgattttgtcaataaggttctatgtgcgtttgaattttatttcatatatgcatgtgtttgatgtggttttcaattttgttcaatgtaatcatagttatggagttaatgcaagttttaatttattgtc

SEQ ID NO: 130837 - DNA, 262 bp, Zea mays
  Clone ID: MRT4577_5079C.1
gggccgacacacgcgtccaagcggacgcccattatttttttttttttttttttttttttttttttttttttttttttttttttttttttttttttttttttttttttttaaaaaaaaacccaaggcattaaaaaaaaaagcggggtaaaaaggttgatcgatgggaaatgagaatgaagaacaaggcaagaagatacaaacaaagacccaccaggaggtcagacccggcattgacgactcaactacaagcctaggagaaaaa

SEQ ID NO: 130838 - DNA, 407 bp, Zea mays
  Clone ID: MRT4577_507C.1
tgattaatgctcaaatccgaggattagctgtgtcgggagagatggaggagcaaaaagatccatccactgcacctggacttggactggccgcccccatcaaatctttgcgaattggggaggagggcctgctgcccatcgttgccagcgaggagatcgtgccaggcgcgctgctgggcggccgtgccctgcgcgagtggcgccgtgctgtcgtacacggcaccgacgtcatcgtgagccgccagcgtagagtcgacaacccgcccgccgcgactcgacgggccaacctgcacgcctacgccctgctgcgccacccccacatcgtgaccctgctggccgccaccacccacggcgaggtcatcaccgtggtgtgcgactacgacctcctgcccgcgcctggaccaaaccct

SEQ ID NO: 130839 - DNA, 824 bp, Zea mays
  Clone ID: MRT4577_50800C.1
cggccgggccgggctgctctgccttccagtctccatccctgaaaacctcacaaaaccctcgctcgctccccaccaccccgccgcgccgccgcctgtaccagctgcgtcaagatgagtcggcaccctgaggtgaagtgggctcagaggatcgacaaggtttacatcactgtacagttacctgacgcaaaggatgctaaggtcaatttggatccagatggtgtcttcacattctctggcagtgctggtacaaacttgtatgaattgaaactagatctgaatgacaaagtaaacgttgaggctagcaaaataagtgtgggggtcaggtccatattctgtatcgtagaaaaagctgaagccaaatggtggaagaaactcgttcgagatgatcaaagggcacctcactttgtgaaagttgattgggacaaatgggttgatgaagatgatgatggtatgctatgtactttcttatagtcttggatactactgaaggaaattaactagggtgacacacaaattgatacatgcacaagacatgatgtcaatatgggtagatttgttttaagtgtttaacattcccaagtttagtgaacagtgatgaaccatgatcttagtaaaccacagacaccggcaagagctttgttacttataaatgtacactatggagtaatggataaacctgcaactgcttgtacttcaaaaatgtcatgagcaacacctctgccttagactataccaaaaaaaaaactcgacctgcaggggataagacagcccccggatgttatattaagaagactttctcatgtaggtcgagaaaacaccaaccc

SEQ ID NO: 130840 - DNA, 186 bp, Zea mays
  Clone ID: MRT4577_50801C.1
aattccaatccgaggcacaggagaggccatgtatgctgttccggagctcccccttcgggtccgggtggccgccgccgccgcggttaagttccaatggggctggcccggggctgcggatcggggcggccagccagttgacggggcggttggtgccaacacaaggcggccaagacggccgggggggag

SEQ ID NO: 130841 - DNA, 326 bp, Zea mays
  unsure (1)..(326): unsure at all n locations
  Clone ID: MRT4577_50803C.1
tactacgtccgggcggggcgcttcaagactgccgagatcctctttggtgaggtctaacaaaacatgtttgctacggaatcaagaagctttgaacagtcgtttttgtaggctttccacccaaaccccgtgcacattctttgtgaaaccacccaattcaattctctggggggggggggggaatcttcaccgnacatcttaactgtgcgtccctaagcagttggtctggcaatgctcttccaaatatcccctgttgtacgcttcggatttcttcggcaaacttctttctgaggtcagtggatcctgaccgggcgggcgctcaagggctt

SEQ ID NO: 130842 - DNA, 608 bp, Zea mays
  Clone ID: MRT4577_50805C.1
taaacttccatatggcaatagcagcaggggttgcagttggtgttgttttgcatgcaggtgctcatctgacatgtgatttccctctcctgctccatgcaagcgatgcaaaatacgaaccaatgaagcctttctttggggagacaaggccgccaaattactggtggtttgtaaaaggaactgcggggtggacaggtattgtcatggtagtgctcatgtcaatatcctttgtgttggcccagccatggttccgacgtaacaagctcaaggacaccaacccactcaagaagatgactggtttcaatgccttttggtttacacaccacctgtttgctattgtgtatgcactgctcatcgtccacggaacaagtctgtatctaaccaaggagtggtacaagaaaacgacatggatgtacatcgcttatcctgtcttcttatattcatgtgagcggatcgttcggttatttaggagacatgactcagttaagattcagaaggttgcggtatatcctggtaatgtgttggctctttatatgtccaagccacctggtttcaaataccggagcgggcagtacatcttcataaattgcggcgctgtatctccatatgaa

SEQ ID NO: 130843 - DNA, 473 bp, Zea mays
  unsure (1)..(473): unsure at all n locations
  Clone ID: MRT4577_50806C.1
gcngcgagcgccaccnccacgcanacaagcggcggcggcggcngccagccaccgccgccggnncaacaaccgccgccggngcaacngccccggggggggccngccaccnccnnngcancncccaccnccnnnccaccngccgccgccggnccaagngccgccgccggnacaacngccgccgccaccaagccacnacccaacacaaccgccccgaccacagccacaaccccagccacacccangcccgggccaacagccgcaaccaagcccgngccagcngcagggaacccgcagcaaaggcaacaccccgaaccagggccagagcaaaaagaacccgaggcaaaagagcaacccgacggcgacgcccaacngcacaacaaaaagccagacaaagcggccaaaangacgccagcaacacaggcaggagaagccaaaagaccggaaccagacgaaaggaaaaaaagaaacaacaa

SEQ ID NO: 130844 - DNA, 437 bp, Zea mays
  Clone ID: MRT4577_50807C.1
ttttttttttttttttttttttttttttttttttttttttttttttttttttttttttttttttttttttttttttaatcccaaaactaaaacccccattttttattaaaagcattacctaccattacaaggggtaaaaaaacaacgaccgggaagggggggttaaaagcaggggggaccacccccaaccaggggggggggggaaccatggggtcggcccccaaggcggcaggagccccgggtatctttgcagggaaaaaaccctggagcgcatggggccccttttcctcggaaaaatccccctttagctgggggagaaacaccgatatcattggggaaaggacccttcccaagcccaggagcagcaaagtttccggggggaagtaacgaaaaaaacacttgggcatccaccccctttttggtttccatgacgcaag

SEQ ID NO: 130845 - DNA, 132 bp, Zea mays
  Clone ID: MRT4577_50809C.1
acaaaacgtctatcagtgcttattcaacaattcgtgcgcgaccaaggcaataatggggtcgtcctcccgtgctgacggggtgggcgaaggcctaaagcttgccaagtcctctttcgacgacgttagatacga

SEQ ID NO: 130846 - DNA, 205 bp, Zea mays
  Clone ID: MRT4577_5080C.1
gaaaaactagaacgagagcgccaggacaaagaaaggaagaaaaagagaacaaacatagaggagaactgagagaataggacgaagacaagacaaaggagcagaaaagccagagaggaaacagaaacccaaggggaagggggacacgacataactgaacgacggtaaaggagaaaactagcaagcgaggtagctagacagacggctc

SEQ ID NO: 130847 - DNA, 419 bp, Zea mays
  Clone ID: MRT4577_50810C.1
gtcacccattaccatgcacggcagggggagcacagtcctaacagactcacagcaatggctagcaatatattatacctacatgcgcttattgcgctttttgcgagcgcaacaaatgcgttcattattccacaatgctcacttgctccggggtccattattacacagcaagtttaaccagttacttaaatgagctttgaacacccagttgtgcaagcctataggctacaacaggccattgctgtacagcgtcttacacacaaccaaactcccaggtgcaacaacataatcttggtacatctaacactacataccatcgcatcgcaacaaaaacaacaattcctaccagaactgagtcacctagacatggtgaaccctgtcggctacttgcaacagcagttgcttgcatcaaacccacttgc

SEQ ID NO: 130848 - DNA, 941 bp, Zea mays
  Clone ID: MRT4577_50811C.1
ttgcaatgttttcatagacgtaacctagaaaatattttgtttgatgcttcatgcaagaagattgctcattactttgggcatggacatgtaaatttttatgttgatctatctcttttttaaccgcctacttgactcctcccgtccacatctctgctctgccttcccagtctccgtggccgactcctgaaaacctcacaaaaccctcgctccccacaaccccgccgcgccgccgcctgtaccagcggcgtcaagatgagtcggcaccctgaggtgaagtgggctcagaggatcgacaaggtttacatcactgtacagttacctgacgccaaggacgctaaggtcaatttggaaccagatggtgtcttcacattctctggcagtgctggtacaaacttgtatgaattgaaactagatctgaatgacaaagtaaacgttgaggctagcaaaataagtgtggggtcaggtccatattctgtattgtagaaaaagctgaggccaaatggtggaagaaacttgttcgagatgatcaaagggcacctcactttgtgaaagttgattgggacaaatgggttgacgaagatgatgatggtgctgatatcaacatggatgggatggacttctcgaatttcggtggcatgggtggtatgggcggcatgggtggcatgggtgatatggctggtatgggtggtcttggtggcatgggtggtatgggtggtcttggtggcatgggcggtatgggaatggatgattttgaagatgagagtgatgatgaagaagaagtgtcgaaacctcaagctgcggacaaggctgttgaggctgaggagacggagtcagcggaaaccaagattgaggcggctcagagcagttgaagatgcttatgatctaagctagattgtatcctcatgttaattctgctgaatcggaggacaaaccttacattt

SEQ ID NO: 130849 - DNA, 132 bp, Zea mays
  Clone ID: MRT4577_50813C.1
cccactcgtacaaggacgccggccgacacaccttaagaagatataccgcgggggtgcgcactaagaacattctagatgaccgttaccttcgtactgcccggctctcttggggtgtagatgcaaagtgaggag

SEQ ID NO: 130850 - DNA, 781 bp, Zea mays
  unsure (1)..(781): unsure at all n locations
  Clone ID: MRT4577_50815C.1
ggtacgcctgcaggtaccggtccggaattcccgggttttttttttttttggtttatgcaactttattgaagaaaaataaatcaattactaggagagctattagttgatcactcatccattgacaactcgcatcatttattcagtgctatattaaacagtattggaagatagattaactaatagctccaagcctcctaacaatttaaatgaaaattacaaaatgttttgagaccctattttggaatacaaagggtgtttgacttccaatttccattctctgtagaacaagaacaggtcattcctttattgacatgcataaaatacatcacattttctgttctgctgatgctataattcaataccaattctccagccacatcagttatgagcataaagtatatcatgtaacctcaaacctctaacagtggaaggtttaaacaagaacggatgctgctagaataatgctgcttcctttgatgtgacagcatccatctccctccccctcagatggcttcttcagcatgttagagcagtgaggattggtttagtctcataaccaagttagagtgaagacattggccacataatacacatgctccagtttttaaaaaaatttctgaatcttgggcaactgttctcgtgtaactactttacagtttctaaaagcagttattgtccaaagctggaagaacttaagtcttctcagatgagcatgtgaatgaatggagggaggtaaacanaaaataaaattaaaaagatgaggtctgataggggagcagcc

SEQ ID NO: 130851 - DNA, 391 bp, Zea mays
  Clone ID: MRT4577_50816C.1
acggttaggatagtgcatagaaaacgattaaattatcgttcgatatgtgaataatggtaaaggggcaggcgattttaggtgatctgtacatggatgcttcactgctgaaagagtgttttaaagataatttacatgtgccgatttaatttatcattggacaatatatactctttgacaaaacccttgattcatcaaaattcttgggtttttatctctggcatattctaaaatattaaacggatattttaacttatgtattgtctatttaatattgatagaaatcaaccgttttattccaaaaactttgcctttgctttttttcattaccttcctatatagatgcacaatatgcatctaaactttctataattttacatctatagctttattg

SEQ ID NO: 130852 - DNA, 413 bp, Zea mays
  Clone ID: MRT4577_50817C.1
acggtcaagattgcacatgaatggaaatttcaacgtacgagtatatacgtgcactgttataaaacaacaaatatcaattttgtctactcagggttcaaaaagaaagtggaaatcctctgtaaggaactcgagcataaggtgcatttggtaaaaaccatcttacgcttaaacactcgttcagaaccaaaactatctaaatgcactctgctgcttggattttcttggtgtacgctattcacactttgagactagctgacgcactggccttttgctgaagcaactgcatgtaaagcaggcttgcgctgacacactcgtacacaaccaaagctaacttggagcgctgttctgctagcgtttctcggtgtgcctattgcaactagtggacacactggcctggtccttagatttgtgct

SEQ ID NO: 130853 - DNA, 353 bp, Zea mays
  Clone ID: MRT4577_50818C.1
aaaggggaagatcgaggcccgcgaggggcacaaccgctccaatgaggctggctctacggtcgggggtaagggccagacactctcctgtaagcaatatgctgagaaggcgtatatgaacatgaccctgtaattgcacaatgaatcaaatgtggatcagaaggttgatgatgatgttcaacagggtgatctacatgcgtgtgttcagacacatgatcatacacaactggctaaggtactcaagcacacaatgaaggaaaagaggatggaactggctgacccagcggatgacacgctgccaaaggacagacatgatgctgaaaaagagctgctcactgtgctacgaactagcaagc

SEQ ID NO: 130854 - DNA, 1073 bp, Zea mays
  Clone ID: MRT4577_50819C.1
tcgaggccggccgggaagtagggaactatagcgtcttgtatgcagcagccacaagcccacaaccattattcttattccactgcatcaggtccaagtccaactctccaagcggcaagcgccatgccttcttccgcgcaggttctgctctgcctcgccgccgtgctggcggcggcggcggccaccaccgccgaggcgcactcgcagtgcctggacaacccgccggaccggtccatccacggccgccagctggccgaggccggcgaggtcgtccacgacctccccggtggcctcagggcctacgtcagcggcgccgcgagctcgagccgcgccgtcgtcctcgcctccgacgtcttcgggtacgaggcgccattgctcagacagatagtagacaaggttgcaaaggcagggtacttcgtcgtcgtgcccgatttcttgaagggagactacttagacgacaagaaaaactttacagaatggctcgaggctcactctccggtgaaagctgcggaagacgctaagccactgttcgccgctttgaagaaggaagggaagtccgtcgcggtgggaggctactgctggggagggaagctgagcgtggaggtggggaagaccagcgacgtcaaagctgtgtgcctttcgcacccgtacagcgtcactgccgacgacatgaaagaggtgaaatggccgatcgagatcctgggggcccagaacgacacgaccacgccgccgaaagaagtgtaccggttcgtgcatgtgctgcgtgaaagacacgaggttccctttcgccgtcaagaccgcagagacggccctcgcctacatggtcagctggttcaacaagcacctcaactgaatgaagcctgcactgcacccaccagactgaattcaataaaccacagcagtgctgtgatattttgtttcgattcgtggctccccagattgattttcatggctacgacctcttctactactgtaatttccctcattttttttgtctctatgtatttcttttcttttctttttgcttttttatgatcgcaataaagttcagtaggggtaaaaaaaaaaaaaaaaaa

SEQ ID NO: 130855 - DNA, 782 bp, Zea mays
  Clone ID: MRT4577_5081C.1
gccggccggtccggggagattttccgcaggatctgcgcggccgtgccccgagctgcgcgtcgcgatttccccgccacagagcggcccggatgccacacagtgttctgcaccgtgctgttccccggcagcgccaccgtcgcgtagatggtgtacgcgccgcccgagtactccgcggccggcccagtgggcacggcgaccctgagggtgttgtcgccgtgctctccaggtaggtcatcaggacgggcaccgcgctgttgccgccctgggagtgcgaggcgatgaacaggctcctgccggccattgtgctggcgagctcggtgttgacgccccccgcgacccagccgctggtggcctgcggcgcccggaacgcgttcgccgcgtggttcgtccagtataggttggcgccgcgcacggggaggttagtgcaccgctggaacaatcgccctggcggagaacatggcggacgagcaattctctgctgctgcaccatggcggtggacgcgaagagcaccagcacggcaacgagaaggagcagcgccgactggcgacgagaagatgctcttactaccatgagttctgttgcaggacacacatggtgaacttggtcatggtttttgtattggggctagttctttatgaatttcgtttagtgtttggttcgttgccacaaccataaactgtaatatgcatatgctttattcatctccggtaaaattgcagacgtgacatttttgtggatatttcgtttggttttttccaaaaaaaaaaaaaaaaaggcccta

SEQ ID NO: 130856 - DNA, 737 bp, Zea mays
  unsure (1)..(737): unsure at all n locations
  Clone ID: MRT4577_50820C.1
ttacttgccttggccgctcatgcatctgatcccaaagaggccgagcggctcagacatctagcatctcctgctggaaagaaggaatattctcagtggataatcgctagtcaaagaagtctcttagaagttatttcggagtttccatcagcgaaacctccgcttggtgtcttctttgcagctattgctcctcgccttcagccgagatactactcaatatcttcctcaccaagaatggcacctacaagaattcatgtaacatgttcactagttcatgggcaaaccccaactggaaggatccataaaggagtttgttctacttggatgaagaattcaactccctcggaagagagcaaagaatgcagttgggctccaattttcgtgaggcagtcaaacttcaaattgcctgctgatcctacagtgcctattataatggtgggccctgggactggccttgcacccttcaggggcttcttacaggaaagattagctttaaaagagaccggggtggaactgggccgtgccatcctgttcttcgggtgcagaaaccgccagatggacttcatatacgaggacgagctgaacaactttgctgaatcgggagccctctccgagttagtcgtcgcctttntctcgtgagggtcctacaaaagagtacgtccaacacaaaatggcagagaaggctgcagagctgtggagcatcgtttccagggcgggctatgtgtacgtctgcggcgacg

SEQ ID NO: 130857 - DNA, 559 bp, Zea mays
  Clone ID: MRT4577_50821C.1
ccattattcttgttccactgcatcaggtcgtccaactctccaagcggcaagcgccatgccttcttccgcgcaggttctgctctgcctcgccgccgtgctcgcggcggcggcggccaccaccgccgaggcgcactcgcagtgcctggacaacccgccagaccggtcaggcgccattgctcagacagatccatccacggccgccagctggccgaggccggcgaggtcgtccacgacctccctggtggcctcagggcctacgtcagcggcgccgcgagctcgagccgcgccgtcgtcctcgcctccgacgtcttcgggtacagcagacaaggtcgccaaggcagggtacttcgtcgtcgtgcccgatttcttgaagggagactacttagacgacaagaaaaacttcacggaatggctcgaggctcactctccggtgaaagctgcggaagacgctaagccactgttcgccgctttgaagaaggaagggaagtccgtcgcggtgggaggctactgctggggagggaagctgagcgtggagggtggggaagaccagcgacgtcaa

SEQ ID NO: 130858 - DNA, 293 bp, Zea mays
  Clone ID: MRT4577_50822C.1
caccaccgaccctttcgccgtcaagaccgcagagacggccctcgcctacatggtcagctggttcaacaagcacctcaactgaatgaagcctgcacctgcacccaccagtcaccagactgaattcaataaaccacagcagtgctgtgatattttgtttcgattcgtggctccccagattgatttatcatggctacgacctcttctactactgtaatttccctcattttttccccgcaccttttttgtctcttcaaactctctgtatttcttttttgcttttttatgatcgctat

SEQ ID NO: 130859 - DNA, 324 bp, Zea mays
  Clone ID: MRT4577_50823C.1
aaacgacgaatggaaaccccatgcggcgaaggcagcaagttcatcttatccagatgacactatgtttcaacactccatcctgctgagacagatgcatgcacctcatcttacaacacctacgttggggcctactcctcctagcacaggcctaaatttgacaaagccacctgatcttaaccgcgccctgcctgatcataacacgatggccctcggtgaccccccctgaacaaatgggatacggggaaaaaactctagccactcatgccggactatgctcacccaacaccggatctacctagaagagatccctatcttccacaaaca

SEQ ID NO: 130860 - DNA, 1292 bp, Zea mays
  Clone ID: MRT4577_50824C.1
attgggacctcgaggccgggcgggagccacaacacatcccacaaccattattcttgttccactgcatcaggtcgtccaactctccaagcggcaagcgccatgccttcttccgcgcaggttctgctctgcctcgccgccgtgctcgcggcggcggcggccaccaccgccgaggcgcactcgcagtgcctggacaacccgccagaccggtccatccacggccgccagctggccgaggccggcgaggtcgtccacgacctccccggtggcctcagggcctacgtcagcggcgccgcgagctcgagccgcgccgtcgtcctcgcctccgacgtcttcgggtacgaggcgccattgctcagacagatagcagacaaggttgccaaggcagggtacttcgtcgtcgtgcccgatttcttgaagggagactacttagacgacaagaaaaacttcacggaatggctcgaggctcactctccggtgaaagctgcggaagacgctaagccactgttcgccgctttgaagaaggaagggaagtccgtcgcggtgggaggctactgctggggagggaagctgagcgtggaggtggggaagaccagcgacgtcaaagctgtgtgcctttcgcacccgtacagcgtcactgccgacgacatgaaagaggtgaaatggccgatcgagatcctgggggcccagaacgacacgaccacgccgccgaaagaagtgtaccggttcgtgcatgtgctgcgtgaaagacacgaggttccctactacgccaagatcttccagggagtcgagcacgggttcgcctgcaggtacaacaccaccgaccctttcgccgtcaagaccgcagagacggccctcgcctacatggtcagctggttcaacaagcacctcaactgaatgaagcctgcactgcacccaccagactgaattcaataaaccacagcagtgctgtgatattttgtttcgattcatggctccccagattgatttgtcatggctaagacctctactactgtaatttccctcattttttgtctcttcaaactctctgtattctttttttttgcttttttatgatcgcaataaagttcagtaggggtatacccctcatgtttgcttcaaaaaaaaaaaaaaagggcggccgccaccgcggtggaggctacgccctcttctactactgtaatttccctcattttttccccgcaccttttttgtctcttcaaactctctgtatttcttttttgcttttttatgatcgctataaagttcagtagcgtatgcccctcccccaaccc

SEQ ID NO: 130861 - DNA, 266 bp, Zea mays
  Clone ID: MRT4577_50825C.1
cggacgcgtgggctgacacgtgggcgttaacaatacaagtgcacacaaataaatacctggctcgctagattgccaagagcgggggcctttaagttattcattctgctcgccatggtggcgctggctacgctattctcggacggctcatgcaccacccctgtcaccttacaagccggcaaggtctacaagcctggccacttggtccccacccccaacgttgccaccatctatgacatgtagatcaacgagcacggttgtgactactt

SEQ ID NO: 130862 - DNA, 1902 bp, Zea mays
  Clone ID: MRT4577_50826C.1
gtcgacccagcgtttcgttctcgccatatatgccctactactataccgacatgccgtaacagattcatggtgaccatcgccacatctctccgacggttaaatatccctcccagaacgcccatcatctgcggcgtcatccaacatgcaagggaaaacctcgatgatgggctcgaacgcgcgcccccacgcggtgctcatcccgtacccggcgcagggccacgtcacgccgctgctgcagctggccaaggtgctgcactcgaggggcttcttcgtcacctacgtcaactccgagtacaaccacaccgccgcctgctccggtcccgcggcgcggactcgctggcgggcctcgacgacttccggttcgagaccatccccgacggcctgcctccgtccggcagcgacgacgacgtcacgcaggacatccccgcgctctgcgagtcgctctcccggagcggcgccgcgccgttccgtgacctcctggcgaggctcaacggcatgccgggccgtcctcctgtcacctgcgtcgtactggacaacttcatgagcttcgcgcagagggtggccagcgagatgggcatcctggcggtcgtgttctgcaccatgagcgcgtgtggcttcatggggtacctccacttcaaggagctcatggacagaggctacgtgccactgaaagatgagagctacctgaccaacgggtacctggacacggtgctcgactgggtgcccgggatgcggggcatccgtctgcgagacatgcccagcttcatccgcactacggacccggacgagttcatggtccacttcgacagcggggaggcccagaacgcgcgccgcgcgcaggggatcatcgtcaacacgttcgacgcgctggagcaggacgtcgtgggcgcgctgcgcggcgtcttccctcgcgtctacaccatcggcccgcttctcacgttcgccagagccatggcccgtcccgacgcgtccgcgatctgcgggaacctctggaaggaggacctgagctgcctcgggtggctggatgcccagggtcccggctcggtcgtgtacgtcaacttcggcagcatcacggtcatgacgcccgctcagctcgccgagttcgcgtgggggctggcgaactgcggcaggccgttcctgtgggtcatcaggccggacctcgtcacgggcgagaaggctatgctgccggaggagttctacgctgagacgagagagagagggctcttcctcagctggtgcccgcaggaacaggtcctgtcgcatccgtccaccgggctgttcctgacgcactctgggtggaactctacgctggagagcatacgcgccggcgtgccgatgatctgctggccgttcttcgcagagcagacgaccaactgccgatatgcctgcgcgaactggggcattggactggagatcgacaacaatgtcacgagggacgaggtggcacggctcatagaagaagccatggacggcgagaaaggcaaagacatgaaggcgaaggcaacagtgtggaaggagaaggccgtggcagcaacagaaagcggcgggacctcgagcgtcagcattgatcgtttggtcgagttcctgcttgaaggaaacgttcctacagctgcaggctaataatatgaacagtacgtgcatatgaaaaccgaagtataatgttaccagcaaatttgtaatatataagtataaatactgaatttgtttctttcatgacggtcagcttcacagtagaaaatatggtgtcgcatgaacatgacaatttcagaattcagagtgaagatgcaagcttgctgtcagtattttcaggtaggcctgtcagctgtggcttcacctgccatgctacagagcgaactgcgaaccattttatgattctgtgagcaatagaacagcagttgaaat

SEQ ID NO: 130863 - DNA, 365 bp, Zea mays
  Clone ID: MRT4577_50827C.1
cccatctgcggatctgaccgcacataacaaaatcaaacatggaaagacaaaccggaggagcaatcaaacaaaaaaagaaacaagaaacaaacaaacacatcaaaatacgtagaccaaccaaaagacgcaaaaacatgaagagatacacatacacacaagtggacgcccattctaaggagccaacataacgccacggacgcagtgctctaccactacatgaactggcgcagcaaattctactccaaggtcaccctttatcaagtcaaggatctgaaaaacccccaggtgaccaaactaaatgccttaccagacttaccagttcataggcctgagtatggcactcacaagggcacgacacacacctt

SEQ ID NO: 130864 - DNA, 470 bp, Zea mays
  Clone ID: MRT4577_50829C.1
ttaaaaaaaaaaaaaaaaaaaaaaaaaaaaaaaaaaaaaaaaaaaaaaaaaaaaaaaaaaaaaaaaaaaggggcgaccaaaaaaagagggaaccgagctcacggccccgggctcccaaccaccgacccctcccttggggccccctaaattcaatccccgggccgccgtcccccaccgccgtgacgggaaaaccccgggggaaaccccacgtagtcgcccagcagcacaccccccgttcaccccccgccgtcacaacgaggaggcccgccccggaggccctccccaacagctgttccaactgaatggcaaaggggaccccccctgggccgcccccctaaccccggcgacaggggcgggtccccccagaggcaccaccatacttgcccccacccaaggccccgctcctggccccgactcccctgcatttctcgcccagctcggcggcctcccccgacatgcttggagggggg

SEQ ID NO: 130865 - DNA, 443 bp, Zea mays
  unsure (1)..(443): unsure at all n locations
  Clone ID: MRT4577_5082C.1
tggtcgcccagtaatatctcaacctcatttcatatctgtctgcatttcaaattagatggaaagaaaaaattattgctgcagaatagcttatatcattacttgcactatagctgatagtagtcaaatacataaacttaaatttcccaatagtagttccttttttattatatctgagagcatagtagctctttcgctaatacatcgatcacccctatactaatttctcaggttggagcagcagattatatagcactagctaggaactaccatacaattttcatatcagaaattccagcgatgagtatgaagattcgtgacaaggcaagaaggtttatcactcttatcgatgagttgtacaaccaccactgccgccttatatgcctagctgcctcatccattgatgatctttttcaaggaactgangaaggacctctttttgattt

SEQ ID NO: 130866 - DNA, 561 bp, Zea mays
  Clone ID: MRT4577_50830C.1
aattggccgggaagaaaacacgagggaaaagatatagcagcagcgtctttcatcagagtttagatcatcgcagagcgcaacgctaggccaggcgacgacgacatgggccgttggttgaagccagatgtttacccgctgatcggcgccatgtcgctggtgacggggatgtgcgtcttccagctcacccggaacgtcttcctcaacccggacgtcagggtgagcaagagcaaccggcagagcgcggtgccggagaacgaggaggagggcgagaggtacagccagcacgccttccgccgcttcatcagcgcgcaccgcccggaggtcttccccgccatcaaccgcttcttctctgggttcagcgccaagtgatgtgtccattgcatgtgtgtgtacgtgtatcgcgtgtgaatatgttggttcgtgattgtgtcattagcgtggaggcgtgccatggatatgtgctcctagacacgcctcaggtgaataaatggtgtgttggaaatataagagcagctctagaagagttgccataatttgaatcgtgaataagtggtgtgttag

SEQ ID NO: 130867 - DNA, 312 bp, Zea mays
  Clone ID: MRT4577_50831C.1
gttaccaccattttcaattcgctttcaaccaaatcagaagagcgggtgttgtacaaaactcgaattttcaggcgagtgaaaatgaatcagaaaaaaaagaaaaaaacggtcaattgattagacaaccaccccattggcgccgttgtttccaaagaaagaaacaaaatcagttaaaccaacgagcagccaaagctgtcctctcaatatgattcatgacggtagatggaaaaaaccgtttttggttgcaacaatacaaacacagaggtcttgggctgcccgggcaagtgaaacgggggcggcaaaataaccggg

SEQ ID NO: 130868 - DNA, 268 bp, Zea mays
  Clone ID: MRT4577_50832C.1
cggctcgaggtaccccggaccgcgccggctcgcaaactccacacaacatacgaggatgcgagatgatcaagcgctgtcactgccatgggtatattccgcaagcttgcatgcagttactcccaacgcgtctgcatgctcaggacgatggtggcgcagctggtgaagcacgagcgcatcgagaccaccgttgccaaggcgatggaggttcggcggaaggtgtatcagatgaggcagctagagaaggaggttctcagcatgcagcaagacg

SEQ ID NO: 130869 - DNA, 835 bp, Zea mays
  Clone ID: MRT4577_50833C.1
ggccgggaccccctctttcctacctaattccttagaaatagccgccctgcagcttctccatatccttctctcccccaacaccaacccacaccgaatcctcgcaagagtactcccctcgcaagcatgagcagccatggcgatcctcgattactctacacgattggaggcatcaaggcctaccacatccagcagggtgaggagacttccctgactccctctgggccacagacactgtcactattgatggtgcctacaaactcgccctttgcagacagcggcgcgcgcggccagaacgaagaagacttttacctacaccttaatctccctcccgagcttgacctccctctccctgcgacgacgcagatttaccaccagccgccgcgaagctacctcataccgcgatgggatctgggtccagacagccacgccttcacgcgcattgagttcccgccgattggcaagggttccaattccgtcacgcaagaagatattgacacgttcgagactatcttggcgcagtgcacagccttcctcgagcgtgcgcaagcgccatcacacgagaagggcaagggtgatgtcaaggcatacaaccctcaaaactacaggcctggcgagggctacgcaagctctggtggccagggtgaggttgtcttggtagacgaggaaaacggcagcatcgtaggcgagctggccgagggtgcgcaagtccatgctgatccagcaatcaagcaagggtccaagaatcccgtcgagattgtggtatctccagatgggcagcgtattgacatcaggccccttcgacgaagattacccttgacatggcccgtcatcccgc

SEQ ID NO: 130870 - DNA, 391 bp, Zea mays
  Clone ID: MRT4577_50834C.1
cctttgtttttttttttgttctctttactggtgaagagaattgtttgcttctcttaacaaaaagtatgaaccaaagggacaaagcaaagagtgaaataacgcacacgctatatataaccaactgaaccgtagctagcacgtcctgtactgtgtacacaactacatacggatcgatggacacgtacgtacaaattgaatcattggacccggccacaccagtttacgccggacgtacaggttcggccgatgattttaagcacatgacatttacaggaacgttctcatgggtgagctaactagctagccaccctgcacttggtccggacggagccggctgtgccggagagcacctgtatggcacccatgttgatcatggaggccaccaactgcg

SEQ ID NO: 130871 - DNA, 603 bp, Zea mays
  Clone ID: MRT4577_50835C.1
gcaagcatagacgacagcatggaatggttcgaggacaaggtcaggacagtctcccttctggaggcaaatggattcagtgtgcaatctatacagagcgtcttgaccgaactgatcgagatcaaatctgagcgcgcccgtatccatggagagatcggcaagctgagttcaaagctagcggagaacacggcttcctcctcccgagtcggtgcactgctcgatgaaaaagatggagccgcagctcagctcgagcaagaactcgggcgcatccgccaggaaagccagaagatggcacaggagaaggagaaaatagatgcagagggcgtgagtatcaagacagcatgcagcgggtacgaggatttgtgcagcgacgcggaacgcaagttcaaagaagtcttggctcagctgcggcggaagggcgccagggctgtagttttatctatgtatcgcagtgggctcagatcgatgtgctgtggttacttttgtgcaagccgttcggtatcgtttatgtatctgtaggtatccatctatggcttaggaagcctgatgaagtctcgactctttataattgctactcctatattaattgccagctagttggaccgt

SEQ ID NO: 130872 - DNA, 1091 bp, Zea mays
  Clone ID: MRT4577_50836C.1
ataccgacggtatgaacaacagccttattgaacctaatggaaatgatgacatgtgcacagaccatgctgctaccaaattagctaaaagcaaccatgttatggaaacagctaccctacctattgatgggagttcacagtgcatcattgacatttctccattgaggagctgctctgctttggagagatctttgccttcaccaccgcaggcttcgttcgtcaagaggtcacctgtgtggcgtgtagttgacgcaaaacatgtgtttaaggagttacctcaacaaccacatttccttccactccaaaaataccccccaacactgcgtgaaggaatagcattaggtatgatggtgtcattctcggaattggtgaagtttacaatggaagcaagcatagacgacagcatggaatggttcgaggacaaggtcaggacagtctcccttctggaggcaaatggattcagtgtgcaatctatacagagcgtcttgaccgaactgatcgagatcaaatctgagcgcgcccgtatccatggagagatcggcaagctgagttcaaagctagcggagaacacggcttcctcctcccgagtcggtgcactgctcgatgaaaaagatggagcggcagctcagctcgagcaagaactcgggcgcatccgccaggaaagccagaagatggcacaggagaaggagaaaatagatgcagagggcgtgagtatcaagacagcatgcagcgggtacgaggatttgtgcagcgacgcggaacgcaagttcaaagaagtcttggctcagctgcggcggaagagcgccaggtgatgcacaagctttgggtatcgtttcgctgcttctaactctgacacctgtttatgctgtagggctgtagttttatctatgtatcgcagtgggctcagatcgatgtgctgtggttacttttgtgcaagccgttcggtatcgtttatgtatctgtaggtatccatctatggcttaggaagcctgatgaagtctcgactctttataattgctactcctatattaattgccagctagttggaccgtacttagttgcttgtagcatatttagggtgcgtttggaccctt

SEQ ID NO: 130873 - DNA, 160 bp, Zea mays
  Clone ID: MRT4577_50837C.1
cttattacattttaaaggcggattacttaccctgatgggtggagccatatgacaacactttcatgtcctttgacatcactactaacaacccaaagcattattggcacatcatcatcactttttgtttgagccgagtgacaaccaccacatgataattgac

SEQ ID NO: 130874 - DNA, 689 bp, Zea mays
  Clone ID: MRT4577_50838C.1
aaaagatgggagagtggtaggcttgtaatcaagtttttgatatcttgtgcatgttttatttagaatttagaatttctttttttgtagatgagtgcatggctcaaacactctgttgactcaattaggggaaacagcaaaaaatctgaacaatattggtcggatgtggcacaagagtacaacctgactactccaaagaacagacagaggactaaaaatcaggttaaggagaggtggcagtggcacaagataaataagtgggctagcatgttcaatgactgttatttgaaggttaggacttaggaggatatacaccggtgggtattctgatgaaatgtggttagagaaagcaccaactatatgagcaagagactaagggaccacatttcattttaatgaatgtgtggaacatggttcggagtttggcaaagtggattagtataacaacccaatccagactaagaggaaggagacacagaaggataacaatgtagagggatgtggacttgatgatattgatcttcctcggtcaatgggacagaagaaggctaaacatgctgcatgtgaaagaaaaggaaaaacaaaagatagtgccatagacatcgatgagcttgatagatttgagaagatccagaatgatgttcgtgctaatcggcttaagctactagaaatgcaaggaaagttaaataacg

SEQ ID NO: 130875 - DNA, 753 bp, Zea mays
  Clone ID: MRT4577_5083C.1
gatccatttcccatccatcactgttagctagcgcacatacgaataatctcttcttcacctcactacctaacacctgctagcagctcgatcgctctgtcctgcaataatgggcgatcgctcctcctcccaacatatgggcgcgtcggcgggcctggtagcggtgctgctgctgctggtgcagggggccggcacggtgcccgcgggggcgagctacgccgaggtgacgatccgtcgggggctggcgctgtctcgccacacgcacatgggcagcgctcgtgctccacctccgctgcggagctgacagaggggagggctcgctctacagccgcgcgccgtcggtggcgtgactcgctaggacacttgcaactgactcaatagtatgacggttccgctcgcttgcgccgtcatgatgagcaacgccgccaacatccccgggaaatgcagaaactccggcaacgagaccatataccccaccgacgactgcaccaacagcttatgatctatggaaccatagcggaggcagatcatctctctggatggtgaggaacgtggtcatcaatatgatgcatatatctaactatgcgaaatgatctatctacgagtgtgccatgaatcagactggcacataataaaaaagtatatcctgcacccgctactgatctcttcgtctagtgtccctccgaacaatgaacaacaacaacgtcgggtaccttaccagacttggtgcactacatacgctagcaaatgagcacc

SEQ ID NO: 130876 - DNA, 530 bp, Zea mays
  Clone ID: MRT4577_50840C.1
ggttcagctgcttcctttattagaaacaagtgagatgtaaccagtggaactacaatgcatttggtacttcctcccccaccctggaaatggatgtccctcccacagcccagagaaaagctcagacaaaaagtgaagcttccccctcctgttcccaggttcggcacaccttgcctgcagtcagtatctctgaatttaactgaatgagaacgtcccacacaacctcctaggagacagcctgttggcaggcctgccttcactttgctgtagggcaaaaccaaagatgatttgcgtctcctctggttccggagcaggtgggtcaggccacaagaaggccgccccctgggggggtgggcactggccagggatatgctcatgcatatgctcccctggcctgacaaccaggtcctcatcctctcccagattgcagcttcgtgaagctacaggcctttgggccatcccttcagttggttaaatgctggtcatctttaggcaaagaattcagactgcagggacccccatgcctgggcttc

SEQ ID NO: 130877 - DNA, 567 bp, Zea mays
  unsure (1)..(567): unsure at all n locations
  Clone ID: MRT4577_50841C.1
aagcccaaatcctwktwatcscckkttgtktgasctccactatvmsccccctcttctacccsctcaaaaacctgbcccctctgcgcatctcgcccaacaacaaaatwtccdgcatadacctracccwmcactgccttcccctacttctaccacaacaawaaccctwgcaacaatccctktttttttgtkttcatgctcaagtccscgcaaaaccttttcgaccccccggcggckktgccgccggcgaccagcasccatttttaaaaaaaaatcatgagcaaattwaaaccgagctaaatttacgtgcttccctttttcakttttttttcscgtatcactttcgagttaratcttatctttctccchktacgcattttttascaaaatacttggctacttggrattcgcaaraaattktktaaattatagaagaggatggcgacraagcacccatttkttacttagttngwktttgtgtgcacatgttggtgggcaghggctaggaggagagbttttatctttgggttattttcgtagtggaataaatcttatgatcggatatccatc

SEQ ID NO: 130878 - DNA, 338 bp, Zea mays
  Clone ID: MRT4577_50842C.1
accaaacattttttaaacttggttttatttagattgggcggcacatatatatataccacaaaatgttgaggaaaagagtttccagcaattaaacacccattatatgatcattacagctaccaacaactttaaacatggttagcttcacaaaacatgaaatagaaaaactgtttgtggttatatcacaaccaaaggacggaacctaactaccattaatttaaatgcactttttctctacaattctactttgaaaaacaaagtcagaacataattcctggcgcgaattaagcaggatcaggaaaagttacaattcctggccggcaagccaaaccgatcca

SEQ ID NO: 130879 - DNA, 333 bp, Zea mays
  Clone ID: MRT4577_50843C.1
ccgcaacaaaattttttttactttacccaaacggcctaagaagtggccacccctgcaaacaggcataagagttttttttattcgccgatgcccgatagaagaaacaggtctactatgcggtttctaccccctgtttaagcccagatgggataacagctcctaggggcggaattataaggaccgccaccgtttttccataaaccaaaaccccttacggcctaggtggagactgcaacggggagggctcgacagggccttccaagacaacaggctgatcaagcggggcaggcttttaatcctttagggccttaattttttaatcttccaggccca

SEQ ID NO: 130880 - DNA, 206 bp, Zea mays
  Clone ID: MRT4577_50844C.1
aaaaaaaaaaaaaaaaaaaaaaaaaaaaaagcttgaacctaaaaacaaaaaaaaggctaaggcctagatgcggcacaactctatgggactaattgtgcaaatatccatcaatctggagggcccaataccatctatatagagggccaattcagcccaatggggagtggtttaaaaattcatgggggggaaatccataacgttaccaa

SEQ ID NO: 130881 - DNA, 645 bp, Zea mays
  Clone ID: MRT4577_50845C.1
attccatcgctgcctgctgcttcctccaccccaaccctaaccctagcggcgccgccatcctcgatccccaaatcccttctccctccaccaaaccctaatccaaagctagctagccgccatggcccgttccatggttctgctcgcccgcgagattgatttcagcccccacgacgagggccgacagttccggtgggggttctatgaaggaatgctgccaacccgcaaagcgatgagggaggatgtcatcaggtacctgcggaccttcaaggcccgcgcagtcgtcgacaatccgccggagctctccttcctccacatactggtgccgccgcaatcccgaccgctcccgccgacatgcatgggcctggactcggcccgcatctccagcacggacaagaacctggtcgccctttatgccggagggtaccgccctggctccgatttgctgggaggctatctcatctacgacgccagcaacgactccctctccgtcatcccccctcttccctccgacgacttgcgtggagccatggggcaccagtcggccgtcatcatgtgcgacccccatggggagggctaccttcttgccgagctcatcaagaaaggcgggggtctggctggggtctggctgtggaagtcgtccgcccc

SEQ ID NO: 130882 - DNA, 292 bp, Zea mays
  Clone ID: MRT4577_50846C.1
agaaaactaactgtcatttggacctgaaagaattaagagctgcccaaagttgataccttggaaggaatgaatacatgatcgcgctggacaaaaccatcaacttgtgaccgaacatggacttgaagcttgccttatgtctatccatgggcagatatgaacataactggtacagagagtggtggggttgcaaccaaaacatggggctgtaaggaaatattggagggctcattaaagcgccacacggacgccagagctagtacggggactgatggcgcttgaactgggttggaca

SEQ ID NO: 130883 - DNA, 272 bp, Zea mays
  unsure (1)..(272): unsure at all n locations
  Clone ID: MRT4577_50847C.1
cgtcctcccacgnncgtccgcccacgcgtccgcggggggcggggggggacgcctaaatcggaatcctccctggtcgactagagttgggtgtggcatctgcatctcaacaagggtggtttggtcctgttgccttagttaattttgctgtcctgtctgttttatctttaanaactcttnntaattgttggggggggggggggggantttatntnanaatttnatatnttntttnnaaaaaaaaaaaaaaaaaaaaaantctacctttctaaaat

SEQ ID NO: 130884 - DNA, 677 bp, Zea mays
  Clone ID: MRT4577_50848C.1
gcttcactatactacacacctctccttcgaatcgactactcgacatgtagtctcggatcgccgctccctcctcctcctccccatcctccctctcatcgcggacccccctccctcgaatagtctctcggcgcggcctcgacgtggcctgatgcatccatggcactgcatccgcgtccttgtctcctcatccagcgacacaacctcgagaaaggctgagcacattggtcgaacgaggccctggatgaggagctcaatgtttaaggccgcgtgcgaatgtctaacaaggaagctccgcatccccaactggaaggctcctctgcccagaaagaaccgacacctgatgatcgcttacacatgtctgttccctgaggacgatcgatctcgacggtacgccatatgttgtgctgtagatcacctcaatcgccattgcaccagatgttgatgtacctatgactaatattgacgattaacacgtactccttcacaatgcataagccttccagcggagaagatatttgccattcctagaggcaacttgtgtactacattaatgcaagtgtttcatatcatggtttactagtgttatccacagctcgcgaacatggatgctatgctgattgcaaatgatctctcctaatgcttgcctgaaaacggattaatggatgcccctagaaaac

SEQ ID NO: 130885 - DNA, 432 bp, Zea mays
  Clone ID: MRT4577_50849C.1
tttttttttttttttttttggaactgctaaaaacctccagagtgaagtgtcagtacacacgtacagtaggatcacactcgagcgacaccagcgtatcattgcgttgcgctcccgggggttggcgccacacacgcacgcatcattaacacgtacagtaggtggtggactacggcatggcgctcttacagcaggttaattaaggcgacgagcatcagcagctcaacaatgcatgatgcaggtgcagtgcagctagctcgatcgctggccgggacctcggttaatagcgtctcggcctcgcgtgagctgtgcgtgctttcgttaatggtagaaataacagtagccagtaggacaagacagactgacagagactaactagctagctaggagcctaggagtagtacgtggttaatacagcatgcaagcgtacgtgca

SEQ ID NO: 130886 - DNA, 354 bp, Zea mays
  Clone ID: MRT4577_5084C.1
ggccggacagcaccgtcgcatagcagagcagagcggtgagctgcagagcagggtagccgaggtcgtcgtcgtcggcgtcactcggcagccatgagcaaggacaagcaccacaagcacgagcaccacctgcggagttgctgcgggtgcatggagtcgtgcctcctggcgctggtcctcatcggggccttcgtctcgctgctggggtacctgaacctgcgcccctcgaaggcggccttctacctggaggacctgcaggtggggagggccatcggggtggggaagccgtcggtgacgggtgcgtggtcggggaacgctgccctcccggaaccgcaacgacgccggggggatcttcta

SEQ ID NO: 130887 - DNA, 266 bp, Zea mays
  Clone ID: MRT4577_50850C.1
ttcgtcctcccttaataattatcccccacagccagcactcactagggggaacttacacgcgagaatattgcgagcccacgtcagagctacgccattctggatttgcacgcgcacagtacacatgctgcgccttgcacgttgcgccgactcactcttttttttttaaccctggtagctagtactggacgccgccggagaagatgctggactcctggggctccgacagccggtacatcatgggcaaccccggggcgaactcccgggcc

SEQ ID NO: 130888 - DNA, 842 bp, Zea mays
  unsure (1)..(842): unsure at all n locations
  Clone ID: MRT4577_50851C.1
ccggccggggtctctttcttctattttcacgctgttccgttgctgtctgcctccagcctcctgccgttacgggcgcgtcagggtttttccttggccagccggcggcggccgttgcacctcctccatccacccctagtcgaaggtcgccagttcattcatccaggctgctgcgcccgagtccctggccaccgtcgctgggcacctgccgtcctcggaagtcgcaaccggaggtgggatttattaaatttctgagatggcagaatgtcggatacaagactggaagcgcgcttcaactccagagtcagtttctagacatgaaacatcaataccaagaacaaagcaaagaaacatttttagtctattagctcagcgggagctctcacctcgaacaaaaaaccaagcaaaaaatctttggaccaaacctccaagacttgatgcttgtcctattgaatcgaaattttggggcacctatgctcagcatgatctcctttcttgggctgaagcagagttcttgcattggtggattcccaaatattgccctctcacgccttcttcgaaggcaactattgcagctgcatttagtacagatgggagagtacttgcatctacacatggtgaccatactgtcaaaataattgattggcaaactgggaaatgcttgaatgtactgcttggacatcaccgcactccatgggtggttagattccatcctcagcgttctgatattcttgctagtgggaagtttggattgtgaagttcgtctctgggatgctaaaacatctcgctgcacagcagaactagtcttctataggccagntgcatcatttgcatttcatgcaact

SEQ ID NO: 130889 - DNA, 1301 bp, Zea mays
  Clone ID: MRT4577_50852C.1
caaataccccgaacgtccacagcgagcgagaggccgcaaactcccgagaccgtacgaaccagacgattcaccaatcaccatggcggcgccggcgcggcgcaggtcctgcatctcctccggtggagccggagcgcctccttccgctgctgcttcgcctcttctccgccctccgccgcccgctgcgaggccggtccaaggccatgctcaaggggatggactactgactactccgaacccgagataaggacatgatttaagacatgtgtgtgtttcaagtagttcgttgattgggtgcaggcgcaggggtttcggccaggccaggccttgatgctgtggaaatgcctgtacgggaacaacgtttgggctcatttttacgacgagctggctggtttaaacaaggatttcaggaagatgataactgagcatgctgatctcaaggcattaattgtgaaggacattcatcggatagaacccgatgttacagatactggtttctattgaagatggttcagtgatttaaacagttatcattccttgcactaggggcaggacaactgtctgtgtttcaaatgaagttggttgggccatgaaatgtcagtttcccttcactagaaggggatgggtcaaccatttcacaatatcgacaatgtaataaaagcctcagcaataatggttcatgagcaaggccattttagccctcgcaaggttactgtctccacaagtggttttgtccctcagttaggaacccaattgcttgctgccgccagtcttaatgcaaggacagatgaggttagaaactggataatgactataaacagaaaggagaaccttaacttgcttcttggcactttaagaggtgaacttaacctcagaaaaaaaaacaaatagtgctatctgaatatgccatgctttctggagtgaacggcagtggatgatgccaaaagtcttttgtagagctactccaagggatcccatgcaagcaagataaacctcatctctttgagttccctcgacggttcccaatccaagcccacatcagacgataaaatgattgagttcggcaaacttttaattcaaggtgggctcactgtctttgttcggtcagcagaggggatgatcagatcagatggctgcctgcgggcagctcagagagcctggagactaccagctgcctctgcaccgtgcacctgagaaaattttgaggtcgtcttgtgatgctagacagtgcattacagtaaactggtcctgaggcctgagaaaattttgaggtcgttttgtgatgctagacagtgcattacagt

SEQ ID NO: 130890 - DNA, 490 bp, Zea mays
  Clone ID: MRT4577_50853C.1
acgagcacaatgtgagtggtgctgtacatctcatttcacagggaaaaatatcgaagaagagttacatgctggatacaaccatgcgaccctctatctatgtgtctgctgccaagatcgacgagcatgtagggcgtccagagaggctgccgcagccgactgtgcccaaaggcgctgcgttacaccacctgccacgccagaacgcatgacacgggcgctttggttgcttgtacaaacctgaacagatcaggatgataaacgcttgaccacaagagctactccgatgatcgcaaaaaaccccatacaccggaaaacccatggtatgagactccatcacttgtgctagaccaggaacctaagactaaagggttcaattcgatcgccccctagaaattaacggctgcaaaaatgatggatccgcataggctgaatcgaccagcgaatgcaatggcaaacgagttatgccacacgaaccgaggataacacaactgac

SEQ ID NO: 130891 - DNA, 366 bp, Zea mays
  Clone ID: MRT4577_50854C.1
aacaacaaaaatttaaatttcaaggggaaattttaccctaaagaggaccccccccccttttcacaagaatactctgggggggggggttttatttgccattaaaaatttttttatacaaaatataaaaagggccatacttcccacaggggcaaaggggcaatcacttggagttaaacaaaaccgagttaattacctgcatgaccacccggatactggggccatttgatgcggccgggggggggagggccccttgggggcccaatggggtgaaaacttgctaaaaaatgggccccacatgccccggaaaaatcgggccgggtgggttgattgccatggaaacatctggcatccattgaaccttccggg

SEQ ID NO: 130892 - DNA, 587 bp, Zea mays
  Clone ID: MRT4577_50855C.1
ggtcttgtgttgttacggagcgggccgcagcacacagccccatcccaatcctaggcgatcttcttgctctcctcaggggaagcaaagtaacgctgagccacgggcgaagagaaggtcacctgctaagccacctgctaaaaggcgggtggacaagcgagacactgagttttgctgctcattctgcagccgccggagtcctgttgagtgccgaatagacgtgaacaatgtactgggcgaaccatcctgtgtagtatgtcaagaaaacttgaccacaactgtgaatgcactcactgagcctatcgctctatatatagaacggatggatcagtgctagcgtgtcaccactgtagaaggcgaccatgatccttgagcttgtcccatgggatgaaactggtacctacaatcgtgatgtactgtgctaggattctcgaatgccataccccatagtcagtcatggcttggaataacgtatgggctgactgatttgccagctggcaccttatctagtacttacagaactacaaagagttggtactatacatatatggacatccttataagtggctatgagtgtacctatcctaact

SEQ ID NO: 130893 - DNA, 269 bp, Zea mays
  Clone ID: MRT4577_50856C.1
gaagcggatggactactatgactcggatcaccacgaagacttcgaatttatttcaggaaccaggatgcgcaaactggcacgtgaaggccagaaacctccagagggcttcatggcccccaaggcgtggactgtgctggtggagtactacaagtccttagagaaagcctaacttcctgagccaggcactctgccagggatgcagggctgagcaacacaggggaccacgcgtcactgacagcacttctctgtgggtgtctgtctggacacac

SEQ ID NO: 130894 - DNA, 212 bp, Zea mays
  Clone ID: MRT4577_50857C.1
gtcgaccgacgcgtccgggaaatgatcgagtacatggataaggtcacgaaaacggttgccacggaggagcacacggtggaggaccccatcgacgagtccgttgcctagacgatcgtcattggaaccctccgtgcatcatggcgtatcacatcgtccatcgagccgacggacgagggtcaaggcgatgatgaccgtattacagacattatgga

SEQ ID NO: 130895 - DNA, 215 bp, Zea mays
  unsure (1)..(215): unsure at all n locations
  Clone ID: MRT4577_50858C.1
gtttgtacatggaataatttctcattngctcttcatacctttctcccttgtttctcagatattcaaggntccaaggtgtggctaacctaactctgcatttctctgacaaccttggtggggatacaactaaaatttattacattggacnacggggtgaagccactcaagacaaaaaggatgtnggtggaacaattgtattataaggcatgcccaat

SEQ ID NO: 130896 - DNA, 229 bp, Zea mays
  Clone ID: MRT4577_50859C.1
ggaaaccaaccaaccccaagcaaaaacccggggggggttttatttaatgaaacaacaatccctattacgttttcctggtttatgggacaccagtacaaagccttttttttgatcaagatcgttaacagcacacacattattttttccccacaaggttggggttaaccagcgccaaatcaaagggggtgaaagagtgaggggcccacgtgacctggatttgttccggggg

SEQ ID NO: 130897 - DNA, 624 bp, Zea mays
  unsure (1)..(624): unsure at all n locations
  Clone ID: MRT4577_5085C.1
ccccgcgtccgccggggccagtacttgtagcaaccagtaatcacgctccggnagaattgaatcaggatgggatgcaaagggacatcttccttgattattatcaaaattggatgaaaactgcaatgagattcttgtgggtactgaaaaggattatcgccgcctaattccgacagaaggctcaactgaggttcactatttttggcctgccacttctgatgctcgcagcatgtatgaggctatgtggcatgacataactgaccaatcaggaggaaatattgtttctgtcaccattcctgtaatgtttgggaggtctattgagattcctcaaagctgtaatggtgtcgcaaggtcggagcagcagattatatagcaatagctaggaactaccatacaattttcatatcagaaattccagcgatgagtatgaagatccgtgacaaggcaagaaggtttatcactcttatcgatgagttgtacaaccaccactgccgccttatatgcctagctgcctcatccattgatgatctttttcaaggaactgaggaaggacctctttttgatttagagagttttcagtttgaaaccgagtccgaagggacaaagctgaggaggggatgttttggc

SEQ ID NO: 130898 - DNA, 176 bp, Zea mays
  Clone ID: MRT4577_50860C.1
attcaaaacttgttttctgaatccatttcatcaccaggtcctaacactctctgccaaatatttggattacacaaatctgtactactgctagagccctagagaaacagatagagaaccagagcagcatcagtaatgccatttaggcctcagctcacacgcgtccgcacgcgcgtggg

SEQ ID NO: 130899 - DNA, 352 bp, Zea mays
  Clone ID: MRT4577_50861C.1
cttattcgtccgcttacacttccgcgtacgcgggtgggttttatgggtgcttgagatgaaatcgtggtggcggatgagatgcggttgctatgcctatgagcatcatgagcatgagaccaaggccatacttcagcggcacattcgtagctgccaggctctgacgcgcatggtataggcataggtccgctcctcatgtgtgacattagaagttgctagccctagtgggcgttcgagcacttaacagctaccagaatttccaggggcaggccacggttatgatacgacctacctgaccggcatcggggtcggcgcttaaggctgtgggggcgctcctaaggtctaagtactcacg

SEQ ID NO: 130900 - DNA, 317 bp, Zea mays
  Clone ID: MRT4577_50862C.1
gtgccgggcaaaatttaatttttttttaaaaccaccctacgaaattggggcaattgggaaaaagtgggtttaaaacaacattttgcaaattttgttaattgttggaacccgaatggggggggtggtcttaaaaaccaaataaaccgttggggcaccccttgtagtgcttttaaattccggggattaatcccttcccccacggccttaaggccaattgggggcaaaaaaaagaattggggaactaattttgaacccttccggccttctaattaaaaaaaagatgggggggaacgggaaatctttacataaattgcggg

SEQ ID NO: 130901 - DNA, 158 bp, Zea mays
  Clone ID: MRT4577_50863C.1
gcgaacacgcgtccgacgaaatagagctagaccatccgcacatcaaccaaaaccaagaccagtgcggccaaggtcgcggaggcggaggagaagaataccgaggacgccatcgacgcggccattacctgggtggacgccaaccagatggccgaggcgga

SEQ ID NO: 130902 - DNA, 533 bp, Zea mays
  Clone ID: MRT4577_50864C.1
cagttacagaagccatgtgtaggtgttctggctccagcaaaagtcttatctgacaacatcaactacatgttagtggcctttccttgaaattgctggagcttgtgcatcatcaaaataatggcataaaccaaggaagaagaaaacaaaattgaggaaatgggatccaacacaaaagagagacaacaggattaattgagtgttggtgaaaagccacagcctgtaaataatgcagttcgaactgaaatagaccaggaggctcaaggagagacttcttcaagaagataaaattgatagaatgcctaaggagtttgagtgcattgagaatagattcatatcagttctggagaactgggtggttacattaatgttaagtacatagaaaagttaaaaatgaaaaaaattctcaattctagggaaaataatcatagtaaactacatgttttagttaccaatagtgtttacgtagtcaatataaacaatgggcattgatataaataatgtatgttgatctgctataacaaggtaaaatgcta

SEQ ID NO: 130903 - DNA, 366 bp, Zea mays
  Clone ID: MRT4577_50865C.1
aatttcgaacaagtacttaaaggatccagttataattgaccttgttggtgactcagatcagaaattacctgaaggaatctctctctattccattgcatctgataacttcgggaagccttcaattattggtcctttgattaaagagcatgccaatggtggaaaatgcattgtgtttactcaaactaaacgggaagcagatagattggcatatgtcatgggaaggagttatcagtgtcaggcactgcatggggatatttcacagaatcaaagagagaggacactttcaggatttcgtgatggtcgttttaatatccctgtggcaactgatgtcgcagctcgtggattggacataccccacgttgatct

SEQ ID NO: 130904 - DNA, 531 bp, Zea mays
  unsure (1)..(531): unsure at all n locations
  Clone ID: MRT4577_50866C.1
cccacgcgtccgcccacgcgtccgcccacgcgtccgcccacgcgtccgacgacgactacgactacgagcagcggcagcaaggcggtgacgacaacgacgacggcggagcatgccatctgcctgcaccacatgcagggggaggaggaggaggccgcgcaccggcggaagcagcagtacgtgcgcctccgcaggggctacggcggcggcctgaagacgacggtgctgacgacgacgcgggcggccgaccctgacatcaggtgcccccgccggaggggcgacgggtgggccgaggtcgagatgggtgagttccacgtggcgggcgacgagggcgacgcggcggcggtggaggtcagggtgcaggaggtggattgccgccgctggaagagaggactcgtcgtgctgggcgtcgagatcaggcccaagcagcacacgccgtgctagcgcgcgcgctatagctggagtggacttcatctttcttttcttcgttcttttattcagtgattaattaacaaaaaaaaaaaaaaaaaanaa

SEQ ID NO: 130905 - DNA, 524 bp, Zea mays
  Clone ID: MRT4577_50867C.1
atctcctctcctctctactatttatatcgatctccacagctaatgctgatctaatgatgacagcgagatgagcatgatgtgatcgactgatccattgcatacctttcctatgaggaacacttggctggcactttgccttgcgggcgctagccgtcttctgctcatgatcgacacacgcacactcgtggatgtggaagctagatgtccgtttctacgagcactgctgcgcacaggccgaggacatggtgcgcatcgccgcgcgtcgcgggatcatccagtgagcccggcgtatgcgcggtgcttatgcggatgcacttacaccactgtttacagcggggctgagacagcttcatgcttatcaactacacgcgggacaacaaggccgacatggattgctggtacaacaacccaagcatgcgcgggttatacggaatcaacgacgacagggacgggctacatgcgtactgcaccagcacggggttctttgcaatgctacgatctgtcttgatgtctgatcagaacca

SEQ ID NO: 130906 - DNA, 133 bp, Zea mays
  Clone ID: MRT4577_50868C.1
acgcccctgtacggccataagcgcgcggtgtggggtaccgcacgtgccgtcactgccaggcctaccccgctctttgttcttcttcttttgcacgtcgcggtttccgcagcttaatcgggtccttaggtcgata

SEQ ID NO: 130907 - DNA, 248 bp, Zea mays
  Clone ID: MRT4577_50869C.1
tcgcgcttggcgttcgactcagcccgccgtcaggagagccgactcggtcggtttggggaagaggcctgatctggtgtggcacgaggtatttcggcgggtgttgactctctaggggtagcgagccaagttcaggagagtttcgagatgctgaaatggctcctaaagctggtcctgccaagaagggtgatgccatgacccgtgccttgaaagttgccaaggctgtgaaggctgtgtcaggcaagaagacc

SEQ ID NO: 130908 - DNA, 238 bp, Zea mays
  Clone ID: MRT4577_5086C.1
ctagttctgaaacctgcagaggaagccgggttaatctattctccttagagcacaccaacaggcaattggtgcgccgtcttcttcgttcgcggcggccatcttggtagcggcccgcattccctaggtcctccaaatcaacgaaccagcgctgtcccgctccttcccacgccacgggaaacttccagcaaaaggtcacgccatctataaggggagaaaaggagaagtgtcgccgtccccg

SEQ ID NO: 130909 - DNA, 250 bp, Zea mays
  unsure (1)..(250): unsure at all n locations
  Clone ID: MRT4577_50870C.1
gcgccgccgcctccgccgccacccagcgcgggagggcggcgcggccngcgagcgcgcnccgcaacggcaccangaagnncaacancgcgaacccngccaccgggggccaaaagaagcnggaaancgaggacgaccagaagccgcgngccngnnacgaccgaagggaancccaggaggncannggggagggggggggggaggagnncaagggnnacgncnncaagaacagggggggangnganaagcaagg

SEQ ID NO: 130910 - DNA, 672 bp, Zea mays
  Clone ID: MRT4577_50871C.1
attcccgggctggtcctgtttgagtttggaataatgcagagttaagatcgctgactgaaacacttcatatatttcagaatgtgtgctaaatcattgagcatgtgacatgattggatcacagaagctccaacagatttgtgtttgatctaatggtgcagttcaaactgtaatctacagtctgaattgaattatttatgtctctgttatgaagaaatgctcaagttcatgtatttcacatacctgtttatgtagcatctctaacaaactattggaatttatacaaattgtattttattgttgaatattaaatgtttttctatctgtcagctattctctatgatgaatacatacatgtctctgtgatgaagacatgctgcagttgtgtgagccaactgaacgcgaggtacggtgtccagtgttgtacgtagaacgggggtttaggctaactccaaatccccaacaataccatctatttctagggactcattcgaagaacggagcatatgaagtattgtgcggtctagtccttggggtgattccgaagactctcgaaagtataatgtatcaacctgtctgtaatgtgttctacgaaccttttttcctagagaaaatcaaatgaaacgagaaaagagagaggaaataccacataaaaaaaaaaaaaaaaaagcgggc

SEQ ID NO: 130911 - DNA, 111 bp, Zea mays
  Clone ID: MRT4577_50872C.1
cccccatggtaatttgtggataacactaattgcttatctctttttgaaaagaaacctctagggctatcgtcattattggatgaagagtctactttcccaagggcaacagac

SEQ ID NO: 130912 - DNA, 182 bp, Zea mays
  Clone ID: MRT4577_50873C.1
accaaatctaccactagctcacacccactagctaatccataacataccgacaccttgctatcgggtgcagaggaagcgcgtgcccatcggctgcttcaggcgtgagccacctgccagcgtgccagctccacctaggcctcgggttccgcccgaccgcgttcgaggctgacacgggggtgggg

SEQ ID NO: 130913 - DNA, 255 bp, Zea mays
  Clone ID: MRT4577_50874C.1
atggcgctccagaggtcgctcgtgctcgccgtcagcatcgtcagcgaccgcagcgtgcggaggcgcagcggctgtggccatggctcgtcgcaaaaggagcaagagctctgctttggccaggaacaggaggtcggcgccatggtttatggggccgttatggacaagaagcttccacgagaagctgagaaggcaagagggcagcatgctcaagcagtcaagcgtccacgagaagcttcggcttttgtatttatgtaa

SEQ ID NO: 130914 - DNA, 352 bp, Zea mays
  Clone ID: MRT4577_50875C.1
cccccagcgtccgggagacaacaacatgccaccaaggtaattgttctagaggtacacaaccacttcttgcgtggccatttctgatgcaaatcatagcttccctcgctgttgtcaatcgagagtaggaccttggtatcaaggtgatgcacgagcggatgcccttgtttagacacttctagccgcacgacgagagattgtagtgatctacaaggttcaagtctggtgtctggcccttgctaaacttgaagacgaaggcgaggatgacgaacttgtagttcctggatacacacatatttaacaggcaccaatggagccaatcttaggcacatgcctagatagggcaagccctgcc

SEQ ID NO: 130915 - DNA, 408 bp, Zea mays
  Clone ID: MRT4577_50876C.1
aatccactctcatccagccgccccatgtgcatagactctcgtcatctcttctaccgacgaagaacccccagtcgcccagccagatcggttgttagccttctgtgtgtcggggtgatggctcgtatctttcgtaaccgtcgactccgtaggcaggcctaaaaaagcttgatgatcaccttctcactcgcagctacatcactgcctaccaagcttgcaaagatgatttgcgtgtctatacttccttttcggatggtccctcgtctgactatatcaacgcaccaaggtggcctcaccacatcgatgcgctcggtgaggctgagcgcaattactgcatagagacaatgggtgaagggatgaatcctgcagacgttccttcaggcccaaatccagattgttgagtgaagcaca

SEQ ID NO: 130916 - DNA, 312 bp, Zea mays
  Clone ID: MRT4577_50877C.1
gtaatgttaaaaggctagattgagtctcctttgctgcattctttcgtgaacaggagaccccgcaaatgctgcggtttcgtacgcttttgggagggggaagggacccaggccaaatgaaaactggtttccaatttactgaaatgaggaacgatgccttatccgtgttatacaaaagtacacgggctattgttgaaactgccacgaggagagggggtgcgtgcaccaacgcaggaaatgtatttaaccacacaaaaaccagctctcataagggagtctcacaaaacctattcacgtcgggggaagcaccagggg

SEQ ID NO: 130917 - DNA, 210 bp, Zea mays
  Clone ID: MRT4577_50878C.1
gatcacccttctattttaagggggcagggagtttatctttcattgtggactccaaaacccaaaaacaatgggcgcaaaagcccatgaatacgccagttgtgcggacgcaaactcatcagggcataccagtggcatcagaggcgcacacagaaaaagggagaacggacgcgctgctatcccggcaggaaaccagaatttcaggtgacgagc

SEQ ID NO: 130918 - DNA, 647 bp, Zea mays
  Clone ID: MRT4577_50879C.1
cctcgagccggcgggcgggagatctcctcttcctcgtgatcccctcctcgcgcctactgtctacatcacgtgccgtccgaaagccacaccaaggcctgctaaatgttatcttcacatcaagaaccagccgaacactaagttgattgactggccggtcggctgtgaacccaacaatcggatgtacgatgtacggaggaacaggaatgcagctgatgaaatcccctactgggtgccccttgtcgctagtgagaaagaaaatgactcctaggaggagctctaggatgtccgttattgctcgtgctgctacatcgtgaccatggctgccagagagaatgtctcaccccatatgatccgggaatctgcctatacatgtgctcaatattaatgagatgcctgcctgaggaattaatgagactgtccataatgatgagttcgctaccattgttgatgatattgaaagctgtgctagaacgcactatgagaatgtactgctttccatgaaacgattatagaatcatgatgtccatgactctcaacctctacgattcgttatgaccaagattcttgatccacacatgattactaatagcgaaatatgtggatacaccctgaacaaccattgtgactatatgcatgacaatagacat

SEQ ID NO: 130919 - DNA, 2322 bp, Zea mays
  Clone ID: MRT4577_5087C.1
gtggtcgcccagtaatatctcaacctcatttcatatctgtctgcagttcaaattagatggaaagaaaaaattattactgcagaatagcttatatcattacttgcactatagctgatagtagtcaaatacataaacttaaatttcccaatagtagttccttttttattatatctgagagcatagtagctctttcgctaatacatcgatcacccctatactaatttctcattctcgctctacgcgctgccccgccaccaagctcgaccgaccgatgatcctcagccgcctgcatgtccgcgtcacccgccgatcccccgcgtccgccgccctccgcgatgcggcaacgcgcgccttggcctccgcgggcctcttccgtggcctccacggcggcgcggcgggggacggcgcctcctccgagcacggccgcgaacccacaggtcctcttacgctctacaggaagctagtgagccaagggaagctcacgcatgatagttaccaggaaaatgtagcttccgaattagacaaccttcttagtaggcttcaacggtacgagatggaaatggaggattatcatgacaagctgtacttctgggagaatagcagggagaaagagcggcgcaggcttcttgtcgaagaagctgaagataagcagcgtggtggtgtatggattgatgagagaaggggatttcttgacaaattggttgcgcggagaagaagaggaagcatagaacctggagttggtaagtgggtctcgtacctgaaccgagagaagaaactagatacattggtaggccatagaccagtcgctcctgttgctcctaaaggattgtatctctatggaaatgttggaagtgggaagacaatgttgatggacatgttctatggggccactgaaggtgtcatcaaacacaggaggaggtttcactttcatgaggccatgcttgaaatacatgatcatatgcatgatgtatggaagagacgtgatgatgacaaatctattcactcaagtgctttcagttggatatcaagccttccttttgacacgaaaattaaggagtggttgattggcgaagagaagtacaaacaacagacacaggaaaagcacatccttttggcagttgctgacaagtttttggttgatagacaggcaaataaaactggagcaagcattctatgctttgatgagatacagaccattgatgtttttgctgtggtagcactttctggcattctaagcaggctgttaagcacggggacagtacttgtagcaaccagtaataaagcaccagaagatctgaatcaggatgggatgcaaagggacatcttccttgagttatgggcaaaattggatgaaaactgcaatgagattcttgtgggtactgaaaaggattatcgccgcctaattccgacagaaggctcaactgaggttcactatttttggcctgccacttctgatgctcgcagcatgtatgaggctatgtggcatgacataactgaccaatcaggaggaaatattgtttctgtcaccattcctgtaatgtttgggaggtctattgagattcctcaaagctgtaatggtgtcgcaaggtttgacttcgagtatctatgtggtcgcccagtcggagcagcagattatatagcactagctaggaactaccatacaattttcatatcagaaattccagcgatgagtatgaagattcgtgacaaggcaagaaggtttatcactcttatcgatgagttgtacaaccaccactgccgccttatatgcctagctgcctcatccattgatgatctttttcaaggaactgaggaaggacctctttttgatttagagagttttcagtttgaaaccgagtccgaagggacaaagctgaggagggatgttttggcggaaggcaatgctggctcaggaccatctactaccggccttgtggcgatattgtctggtcaagaagagatgtttgcgttccgcagggcgatatcacggcttatcgagatgcagaccccgctgtatctggagcgtgtgcaggctgtacatccctcgttccgtcgtcctggtcttgcaagcaataacaggcctgcagttcctcagcctgctccggtggtttgacagcctcgcgctgtaccattgctttatttcgagtttcgtgtgagaaggcaataaaaccaaccagagatggtaacagtgagacattgtaaatgattgtagaaaggttgtgattattaataagttaaaatttcctattttaaacttcaacaggttactcatcctatctctcatttcatcttaaaccactcaaataaaaaaaaaaaaaaaaa

SEQ ID NO: 130920 - DNA, 856 bp, Zea mays
  Clone ID: MRT4577_50880C.1
attgggaccctcgaggccggccgggagtccccgtacccctctccccgccttcgattacgccacgataaaatagctaaactactagcatgcgagtgggcgtgtccatgtgattgttcagcgtccaggtcaggacttatctcccctgcatctctctctctctctctttcctcttcaatcatcttccgcaacccaccaaccgtggttgattcaacgctccaatccgctccgctcctagtattcgccgccgtctcacggtgacctgttcgtggaaattccttcatttatacgtagagataggttcagatgacacgagcaattatttttcgctaagacgtcgagataggcagcagagcagacagccccgagcccggaattactagtcggattaggtgggcaaccacggagctgagcgcgcgatggagaaggggagcagcgggccgtcctgccgcgccgccatctgtggcatcgtcgtgctcctctgcgccgtcgccttctcctgctccctcgccgcggaattccgcaaggtcaaggagaaggacatgaagctggacggcagcctctgctcgctgcccaggagctccgcgttcgagctgggcgtcgccgccatcgccttcttcttcgtggcgcagctcgtgggcaccacggcggcgccgtgcaccgcgtgcgccgccgagcccatgcggagccagagctccgccgcccgtcacggcgtcgcgttcgtcgccctcccttcattctcacgtagagatatgttcagatgacacgagcaattatttttcgctaagacgtcgagatgctgagcttcgcggtgggcgtggtcctgctggcgacggccgcgagcatgaaccacgggcag

SEQ ID NO: 130921 - DNA, 609 bp, Zea mays
  Clone ID: MRT4577_50882C.1
catgtcctggggaataatgtggccattgatcagcacaaagaaatgaagttggtaccccgagactcttccggatagcagcctgcatggactgcacggctacagagtgtttctaaccatatcagtaattcttggggatggcctgtacaacatcttgaaggtactttatagcacaatcgaagccttcgtatcaaggtacaggaatagaaaagcaaacacgcttcctgtgtcgaacgatggcacccctgctgatgccaccactgaaaccgagtctttcgacgacaagcgtcgtcttgagctattcacgaaggatcagattcccaagacagttgcgttgggaggctatgtcgttctggcagctataacaatcggttgtctccctctcataatcccacagctcaaatggtaccatattttggttgcgtacatcgtttcacctgcactggccttctgcaatgcctatggatgtggcctaacaaactggtccttcgcaagtgcctatggtaaacttgcgatctttagcttcggtgcgtgggcaggtgcttcacatagtggtgtgattgtggcactggctgcgtgtggtgtgatgatgagcattgtgggaacagctgc

SEQ ID NO: 130922 - DNA, 288 bp, Zea mays
  Clone ID: MRT4577_50883C.1
cagaaagaaaggtggcatcagcaactacaagaagcttcgaactgcagaactgtaatacccctcttgcttgagttggaaagcaatatccgtggagtagcattttctgcaagttggttgaagccaatagacgattggcctttggaatctcctggtccatcaacgggcgcatctcgtcctgcacaataccaaaaacgtggggttggtggaaggcgtggcagaagacgttcggttgcatctgaatctggtactgctactgctactgatgaggacaacagctggacttggtgg

SEQ ID NO: 130923 - DNA, 326 bp, Zea mays
  Clone ID: MRT4577_50887C.1
atgaaatcattctttgtaaatgttttttttagttgttcgaaacacatacccaaactgacattatgacagtgtatgccgaacacatgcccccgggtgaccgtattaataggtacatgcgggccccttggctacacggtaggggcggcctcccatgatcgcatccgacgcgagggtaaaccccccgccggggggcccaaagaggtgtgatttcttttatggcacggcaaaggtaaaactaaaacatcccgttggggcgggaacccaaataattctagtacagggatataggctccttttttttgagaggcagggcgccctgtgtggcc

SEQ ID NO: 130924 - DNA, 255 bp, Zea mays
  Clone ID: MRT4577_50889C.1
ctaaaacggcggtcatggttgttggcgccgtctgtgtcatgaaggcgcggggatacgagttcgtgacggggaggaacggtagcgccaggcttgacattgcgggtctgttctgtggcggtggtggaaagcatgctgcggcggcaggcgtccgagatgagcggcgcgctcctctgcggagccctccccgcagagcgatggttgtctagaacggcaggacgcgttgtgtcgtgactgaaagggtggaggtgccgttcg

SEQ ID NO: 130925 - DNA, 138 bp, Zea mays
  unsure (1)..(138): unsure at all n locations
  Clone ID: MRT4577_5088C.1
acgtangctcgtgattcggctcgaggccgcttggggcggcaagctaacgatccacacctcaacacaatatgatgtggtggtgtttcaaggctctgttcctcctcgccatcctgctgctagcgacgtcggccgccgtgc

SEQ ID NO: 130926 - DNA, 300 bp, Zea mays
  Clone ID: MRT4577_50891C.1
aacgaattgggacttccctttttacgggccaaaacaataaccgtgtacccgagttttaaaaactaatttgagacccaagcgtgccgcttatacaaacaagaggtttaacacaggcaaacccggggtaccacgtatgcctgtagaattgttccagcctcaagaacatgtaccaacgcaccaacggtgggtgaaagaagggtcaaacgggtaaataaattaaacagcacgtcccctgaaacagatactgggctactatttaggcgggcgccgccaaatggaacagatccaactttccaaagg

SEQ ID NO: 130927 - DNA, 242 bp, Zea mays
  unsure (1)..(242): unsure at all n locations
  Clone ID: MRT4577_50892C.1
ccctcctcttcattgcctcccccgcntctctggggtccgtcgtctcctccgtgtttccgcggcnagctcccaacgcgggccggctccgccctcttgctccgcgaggtctcgtcgtctgcagactcgcacaccctctaggccgtcctgaggaccccgggcatgtgcgacacgctcttttacctcttccggaaccccgtctccactcatgccaccaaggccgcgctcgtcacggcctactacct

SEQ ID NO: 130928 - DNA, 446 bp, Zea mays
  Clone ID: MRT4577_50893C.1
attattgagaagttgtcattttagtttggggaatttattttttcagtttaaaggtttaaaaaatttggaagtttgggtttaatcgggggggggggggagggtttctggaggggtaccagtttttcgttttgtgggtcgttttagaggttggggttattatgggtataggtgtttcctgggtgaaattgttatttgtttagaattggaaataatttaagagcctgaagcttatagggtaaagtctggggtgtctaatgggggaggtaagttaaattaattgcggtggggttagtggccggttttcagtggggaaaaatggggggccaggtggattaatgaattgggaaacgtgcggggagggggggtttgcgttttggggggtgggggggtttttgttttaaacggtgagaaggggaaaaattgattggcttttaacgtttgggctt

SEQ ID NO: 130929 - DNA, 720 bp, Zea mays
  Clone ID: MRT4577_50894C.1
cgggcctctcctcgagtttttttttttttttttttttttttttttttttttttttttttttttttttttttggaggggccccatatatgttaaagttgatcacggctttccatcaaatccgggcttttacataaatacgtaatatttttgggccccagtctaaagtccttatacgttaacacccatcattttgttttcattcataaaatcacatgcccgggggctttccaaaggcaacgagctagttgtcatcaacttgaaaaaagcaaaagcacccccgttgccataattcgtggttaccttgggaaacaaccttttgcatcgtttggacgggccaaaccaaaatcatttttgtttaaacaccctgggtttcgaaggggtttttttagccttttttgaaaatttctggtgggggaacctaccgaaaagccattcgccaccatggaagccttccaggggagggttgcaaaaatcggaatgcgtccggaccccacagccggaaaattggttcctcccgtcgccgccgaacaccagaatgggcacttcccggttgtttgacccacaagcggaacagctcccgggagcatcttttgggttcttaatgagcttttgcagggacctttcggccaaatcgggcatgttgaaaaggacgtgcttgcccaaggggggcccgggtttgcacacgtactccaccaggtaatctgccctgatgcaggggat

SEQ ID NO: 130930 - DNA, 323 bp, Zea mays
  Clone ID: MRT4577_50895C.1
agaatcattcgtcagcgactacacaaatcttgtgtctggactgctcttacacgtaaggcgcgagcatggaacgccggatggagaccgtagtgacgctaagcgaatagagctggacgtacgccaccactaagcctgaccgacgatggtagatcatagaccaagaactgattacagcccagagagagagcggcagacagatgggacaaatcttatggacgaagctctatggacaacattaatatgacaaggcctacgtttaggacgatcatggtctaacacgaatacgactgaggtgccaatacagatggctgtgcgcacctaga

SEQ ID NO: 130931 - DNA, 674 bp, Zea mays
  Clone ID: MRT4577_50896C.1
ttcttgggggtaccctccggttcggccgggaagccacgagtcctatctgcttcactgggtgcctggcccgatatccgtcggtcgctgaacctacgctaggcggctgcaaatgccgtggaagctgctgttcgagccacggacaatgggatcatctccacgatggctcctcgatggagaggtgctagctcttacggctggacgcactggacaacaccgccggtggtggctgtggctaatcgtgtcccaaccattccaacttcacgcatgctccttggtgtcgcggatgaccggacgtcattcctgctgaataatgctggtccgggaggctgaggtggtcagctgcgctttagtctcaagaagggcaaggtagccggtgcacctgtgtttgcaggcgacgaggaggatgaggatgccgacaattcagatagggaggagcccgccatacgccagaagtctgtgcaagctgatgctcctgcagagctgcccgccgaggctggagccccactcctccaccaaatgattcacagtgactacatgtgctgacaactgatagctgctgtgacaaaaacgggagacagatccgagaatatcacacgactgatgaatatctggagatacaccattcaagttcctatcatgcaaacactgtccacactacagatatgatgggtttc

SEQ ID NO: 130932 - DNA, 303 bp, Zea mays
  Clone ID: MRT4577_50897C.1
cctcctggacgaggtgcatgcgtccatgggggccaaggcgggacaccggcgtggggtgctggatctggaggcgcatttcttcttcttgcgttgcgcagtaccggcactctgtgaacgcggcggcgcacgttctgctcaccaggcccatccttttaccaaccttttgatgctccacttcctgccgctgccggtgcccgtctcccccgcgctgtgcttcgcgctcgcatacgccgccgcctacctgggtgactaccggttgagccgtcagtaggcgcggcgcctgcttttactagaaggatgggc

SEQ ID NO: 130933 - DNA, 395 bp, Zea mays
  Clone ID: MRT4577_50898C.1
ttttatccttcctggagctctgtcacctctctcgctctgggacgccgccgccggcctaagccacgtgctgaggattccgatggtctcttcgtcggcgacgagcacccagatctgtatacaacggctgacgccgaggacatccagcctcttgcctgccacaatggcactggaatggcccacgctggttctgctgcccatgatgcaccaagggcggctccccctatcattgttggtcgtcctcgcaactctgagagaatgctcaggatgcgacaaaaggacgcatatgctgccgttgaggcacagcgcaagagaggtatccttacgcatcagaaccccattgaccactgctactgcgagcaacctgggattggcatggacaaaccctggcatcatac

SEQ ID NO: 130934 - DNA, 303 bp, Zea mays
  Clone ID: MRT4577_50899C.1
aaaaaaaattttttattaaacccgccaagcttggtttacacagggtttcccaataccttaccaccccatgcatgctaaagggacaaccatagggggttttttctaaagctagcttgtttaccctgggtttgcatgaaatgctttttttttggggggttttttttttgatgattgggcgactgacagtccatggaaaaatagttttagttttttactacacacgacaatttttgcggagggcccttttttttttgggggcgggccacctaaaataatggccaacgagaccaccactggcggatc

SEQ ID NO: 130935 - DNA, 431 bp, Zea mays
  Clone ID: MRT4577_5089C.1
cggacgcgtgggccccaacgacgtgtctcatcgccatcacgaggaagaagcccaagtggagcaagatcctggcgcacttccgctcgtccagctccgacatgaaggagctcgtgctgtccctccccaggacggcgcagtctgactccggcgaaaccgagaccgagccgtccgtgaccgccaaatcccgagccgagccgtgagtgactagctcccggtcgcggtctcgttctctcatgtatagctgctacatcccttagctagctgcacacagagcgaggctactgtatagctactacgacgaagaagtcgccgataagcaagtgtgcagtgcaggcacgcgtccatcgatcggcctaaagcggctgcagcagtcggtcggtcggtcggtcggcgtggattaaatgatcggacatatacgaatggtgcacacg

SEQ ID NO: 130936 - DNA, 225 bp, Zea mays
  Clone ID: MRT4577_508C.1
ctaactcaccaaggaaggggaatttatagggttaacggcacaaacctacgttcttatgggaaccgccgggggcttcaacccacaaggtaaaaatgaagcgagaggaatgtcggtatccctgattggagaacaaactgccgaatcgaacacaaccagtacgaggtggaagaatgccaagaaatgggcccctggaatcgcggaggggacgtttcgaaccttgatttg

SEQ ID NO: 130937 - DNA, 168 bp, Zea mays
  Clone ID: MRT4577_50900C.1
caatatctaataacatctcctcgaacgccatgttccttgcaccactatatccaggagcgacaaaatgatcctcccgccagccatggacatgaacaaggcgctctgcaccgtccttgtcgtggtcatttggtccaccgttttgctgccctcatgggattccaagaggcc

SEQ ID NO: 130938 - DNA, 188 bp, Zea mays
  unsure (1)..(188): unsure at all n locations
  Clone ID: MRT4577_50901C.1
ataggagggntgcctgcttttttaaaantctgcggggnantccatttccttttatttgtttcaaatggcaggaacaatacttagggggaacaaaaaattttaccattaagccggctttagaagcattcaaaccacaagtcttttaaagctagaccacgggaccaccaaaaaggaaaccgtacatgcaa

SEQ ID NO: 130939 - DNA, 317 bp, Zea mays
  unsure (1)..(317): unsure at all n locations
  Clone ID: MRT4577_50902C.1
atcttttattttcaaattttaaatcttccatgcgagctcctatagtaattgttcagaatcctatnttccaggctctcaagacttatgaaactttttagctaacaactttctcattagaaatcattcgatcatgcaaaactatatttcaaattcaaaatcttagattttcaaactacctcaaatgaaaaaacaatcactatgaaagttctacatctcaaaaagtaatttaacattgtagctcacaacttttataattaaatcatcctattatttataaatacattcaaaatttctcaatctaaaaatcaaatgttata

SEQ ID NO: 130940 - DNA, 368 bp, Zea mays
  Clone ID: MRT4577_50903C.1
gtgacccttatcaacctggaggcttgtttctttctagtgggcggctgacagcacggatcgatcgaggaagacgagacacgctttttattctggtgtctccttcgccaggtctagctcaccacgtgttactctccaatctgacaccgaccgcacatggtgcagggcatggagcaacttcagctccacgtgaaccaagtgcaccgactggcaacactgtgaaagcaccaagctgggcatgtcaagaaggccctggagctctccgttctctgcgacgccatcgtgtgaatcatcgtattctacgggcacggcatgatctacgacctagccaccaccgtgaccatagaggagctgatcgagatgtacaaggc

SEQ ID NO: 130941 - DNA, 369 bp, Zea mays
  Clone ID: MRT4577_50904C.1
ggattcatgacaatgagccattgatttctaaagttttccaagctaacctatttgctttgtaggcaagaaggtgagcaaggcacctaagatccagtgcttgtgaacccttgaccctacagaggaagcacactagaatcattgacaagaagattgccaagaagaagtctgaggctgtcgagtaccaaaagcttcttcccataggctgaaggaatagagaccgccacaacgagagcttggccaagagaagatccaagctttctacctctgccaaggcttcctctcgcacctccgcttaagaatgttcagtgcttttgagttgttttcaagagctatcttattacagcttaagtaccttatgctgctctagct

SEQ ID NO: 130942 - DNA, 686 bp, Zea mays
  unsure (1)..(686): unsure at all n locations
  Clone ID: MRT4577_50905C.1
ccggccgggaactcgcgctcatgcatccgctatcgtctctcctcctgttccgttccgccgcgccgcccagcgcgctcccctangcggcggcggcggcggagtcacacgccagtgcgagcatgatggcaggagctggcgggcgtgctggtgatttccgtcatccccttcactgcagtcaaggccctcgccaacagtgctgtgagagcccgcctctgcaggaggctatgggaaaggaaggaagcttaagttagaaatggtagtggtctctgtagattattacaaggagggatgtaataatacgtgtgcgtagaaaaaataatagtgagaatgaccatgtgaagatgggtcagtactacacgttagagcttgagctgaagagacctttagatctacgaaaggaaatttgagattggttagcacttgagaccattcagcaagcatgtgatactgntgcaagtgctgatctagcaggtattatgatgcatgaaggacttgnccacctattcctaattggcaaaagcataacagnaacccgggcacgtattgaaacattaattcctaggaagcatggccctgcaattgttggctacaagagggaccttaagaagttctttgagtatgtatttgaaggaattttgaaacacaatgattttgaaggttgtccagtgtaatgtaattttaagccc

SEQ ID NO: 130943 - DNA, 560 bp, Zea mays
  Clone ID: MRT4577_50906C.1
ctcgatgtatgcgtctgagcgccgaaccactggccctcaaagcccttgtacttctgtactgctggtgcttgtaaaatatgtatatatatatttcagatgtggcgatcgcatcccaactgtgcgccgtttcgaagcgcatagcacggtttccacgcccagatttctgcgtaatcggttggcagcacaaacacggtctacatcagcttggtccttgaaggctggcttgtgggattctctcagatctggccttctgaagaataatagcagtacagagacagtagagccaccaccagcaccacttgaagaggaagagcctttgcctgtggaaatagtactcctagaaagaacactacctgatggaagcacagagcatattttattttcttcagccggagatgttgatgtatatgatctccaagccttatgcgataaggtaggatggccacgcatgcctctttcaaagatagcagactcattaagatatagctactaggctgctacactatattcaatgattagatcttcagaaacaggtacttgcctcattgtctgatcatcat

SEQ ID NO: 130944 - DNA, 223 bp, Zea mays
  Clone ID: MRT4577_50907C.1
actagtacttcagcttgtttcaagctggtctttctggcttggggccacacataaaagcttcttttaagttgcgcagatttacaaatgacttggtgggtgagggcttcagctttttttggtacaacaaactcccaatcccattctgtttgggatgttctagggaggctgaaacacgctagtgtgatctggttccgcaacccatattgtacatactaatactgta

SEQ ID NO: 130945 - DNA, 200 bp, Zea mays
  Clone ID: MRT4577_50908C.1
cgccatcatcaacgcttactataactcggattccgagaacgactactctcatctcttcagtgcgggcacatatgacactcaagtgacaagaatgcctgataaaactatggaccagaatgagttacattgcactgagaagacatcagacatctgcttcgatctatgaaataattgctatattacgaatatgccaacctacg

SEQ ID NO: 130946 - DNA, 1391 bp, Zea mays
  Clone ID: MRT4577_50909C.1
ctttatgtaagcgtctgagcgccgaaccactgggctgaatgaactagtacttggggactgctggtgcttgtaaaatatgtatatatatatttcagttgggaccctcgaggccggccgagaccttatccacaacctccggtccacggtgactggccgcaagctcctcctctcccgcaaacacccacgcccactccattgctcctctcctccaacatcgctcacgcggtctcctctccccgctcagctccgctccgctcccggagacacgcaagcttcccgttcccgggaacgcgcactaaagatgcctccagccttcgccgccgcaccttcctcctcgatatgtggcgttcgcatcccaactgtgcgccgtttcgaagcgcaaagcacggtttccacgcccagatttatgcgtaatcgggtggcagcaaaaacacggtctacatcagcttggtccttgaaggctggcttgtgggattctctcagatctggccttttgaagaataatagcagtacagagacagtagagccaccaccagcaccacttgaagtggaagagcctttgcctgtggaaatagtactcctagaaagaacactacctgatggaagcacagaacaaattttattttcttcagccggagatgttgatgtatatgatctccaagccttatgcaataaggtaggatggccacgcaggcctctttcaaagatagcagcctcattaagaaatagctacttggttgctacactatattcaataattagatcttcagaaacaggtacttgcctcattgtttgatcatcacaggctcttctgtggtcatatgcattagttgaggcacgggtcctaatctgaaggttatttgcagaaattcatttttctagatgatgaacatcttagtgtacttgtagaagttatttgacagagggagaagagaagaacagctcattggggatggcacgagcaacctcagaccatgccttcaatgcaacgatttgggatgtccttgttgatccttcataccagggtcagggtcttggtaaagcgctcatggagaaagtaattcgtactttgctccagagagacatcaacaacattacactgtttgcggataacaaagttatagatttctacaagaacctggggttcgaagttgatcctcaaggcatcaagggcatgttctggtaccccagattttagcaccagcagccagatatatcgttcgaggggttgttgtacttgaagcatctccccgttctgaaagggtaattgcaggtcagattgacaggtcaggggctccacgccctgatggatctcgcacttaatatttcatccttggtgagaagctgtaattttcttcaatgctaaagcgaccatgtgatcggctcaactc

SEQ ID NO: 130947 - DNA, 247 bp, Zea mays
  Clone ID: MRT4577_5090C.1
tgtgcggcgctcaggcggcggttcggaggcttgtactagcccggctcttccagccattctgttgtgtttgattagtcacatttagcaagtatagctacagtagacatatgtttggtaaattgtacaactcagtggcttgtattgcgcagagaatatttttgtaattggtaaactgtatacacatggttagtagttataactgccaattttccttactgttcaaaaaaaaaaaaaaaaaaggccccta

SEQ ID NO: 130948 - DNA, 311 bp, Zea mays
  Clone ID: MRT4577_50910C.1
gggcacgggaaaacaaaaggggtatggcgcggcttagaaataacacgcggggggagttcgagtaaataaacgcgaattcttgcgggggcaaaaaagggtggggtattctcgtggacgaacgctaacaaataaacaaaacccgatacaattgcggccaaaactgagaatattccctccccctcttcctcaaaactacgccactgaaacgcccgctaagatagcagcagcttctaaaacctccggtgaaaactataggggccgcctccccctgtcgccaccaccacctttgtctctttcgccggacacgtggg

SEQ ID NO: 130949 - DNA, 570 bp, Zea mays
  unsure (1)..(570): unsure at all n locations
  Clone ID: MRT4577_50911C.1
tttttnttttttttnntgggggacaagaacatcaataagttcacaaaaacgatcaacataatcctggaccgaagatgtctgacggatatggaacagcttgcgaataacaagctcgtgctgttcacgcccaaaacgatcgtgcacagcttgacaaaactgttgccatgaccaggaagacacttgtggttcaatagactgaaaccaacgcccagcaaccccctcaaagtgcatggacgctactctgacccaaacagtgatttcagtggcatacatagcaaaataatcctcgcatcgtttctgccataattttgggctagtgccatcaaacttgggaaatgaaagcttgggcaaaccccctaactgacggtgcaagggaacatggccactatgatcatactgagtaggaaacgtaaacgaaggaggagaaggattgttccacgcacccgtgaccgggcagcggaaattgggttgattatacccaataccactgtcccggtgagagattgcagcgccgggcccaaaacgtgagcaatcggtgttgtcgaaggtagcaggggaacgcccaatcac

SEQ ID NO: 130950 - DNA, 391 bp, Zea mays
  unsure (1)..(391): unsure at all n locations
  Clone ID: MRT4577_50912C.1
naatantggncngnaanatgggtccccaactgggtgtcatttttacgcgctcaatttgttggaaaaaaaggactgcccaaatttgtgtgcgtgatgttatttccatttgccacatggcaaaatgaaaagattgaataatcaggggaagcaacttttttgccacttagcgtctaaggaaattttcccccaatccggccttttattggggggacattcttgaaagtaaaaagtacaaaaactgtgcccaaggtagcgagcaacaagcacgaccgggatcccatcccatagatagtgatttacgcacctgctgatacactgagcctatacaccaccaagaagcccccttttctttcaataaggaagctaatgactcgctttcttccctttggag

SEQ ID NO: 130951 - DNA, 560 bp, Zea mays
  Clone ID: MRT4577_50913C.1
cgcaaatcctcataccgtcggcaggaagctaaccgcacttcccgctccagaatggatgctcatctctcacgttgctaccacaggctgaatccctaatacagctagtacctccataaaagtggcattgatccagctgctgttcatcaagctgcgggcgaaggcgaccctcgacgtgtggggctcgcgtctctcaagataccgctgctaaagctcgacgtgactagtgatcaatcggatcaagcgcggccaccacgcgcccggctgagacaagacggtcgcgaggcgatatccttgacctgctcacttcgacgctggacggaatgacacggatatacggcagcatgagcgactccgactccggcgacgtgcccacgtgccaccgaccaattgctcttctcccgtcacctcatggaggagagcctcctgatgtactccttatttcatgctctagagactgaacgtctccaccaatacatctaagatatgagccgagtacttgatgactcagacgctgatctgaaacataatactgtggagtgcgatacaaaacttgataactc

SEQ ID NO: 130952 - DNA, 412 bp, Zea mays
  Clone ID: MRT4577_50914C.1
atgcgtccaaatgcatctccaaatctgaaacctgctgctattgctttcatcacttgcttaaaggcggggtgatgttatcactcgccacgcaaatgatcttctcgtgactgacaccatcttactcgggtaagcactgactggctataccgaacctgacattcctcttaaacgacactgcctcatctatcacatatgcttattaatccatccaaagtacagaggaagccatacactatatgaggatcataccacaaccataagggaccctcggacattgggagcagttgaatctaactcagcatcatgatccatgcttgacatccttgtgaggataacgacgctaccaacaagctgttggaggcctaggacaacaattctcctaagcagttgttactcatgaaagtttgccctg

SEQ ID NO: 130953 - DNA, 375 bp, Zea mays
  Clone ID: MRT4577_50915C.1
gaaaagcttccttcaatgtagttgtgattcttcaataccatatattctctttctctttcttgatttgtgttgtgaaacagttaaaagtggtcttgatgtctgaggcattggaagaggttgttccttcaatgaaaggagggtgtgaagaagaagggttgaacctggaggctactgagctgaggcttgggttgccagggtgtgagtcaccagagagggagggtgtgtttaagagtgtggtgtgtctggggccaagaggggtttctctgatgccattgatggaaactggaatggtggaggatctgaaaaagatgccgctgccttgttttctccaacttcaaggggtgcttgtagtgttagtgttagtgctgccaagtc

SEQ ID NO: 130954 - DNA, 2360 bp, Zea mays
  Clone ID: MRT4577_50916C.1
gggttccccttccggtcttcttgtgcctcgcttccttccactcgccattttcctcgactcgcacacatcgacgtggtctccgcgccgccgcacccccatcacagccaaccagcacctccgatccatcctccaaaccctattaccaccgctcccgccgcccccgactcgcgctcggatggcagggcaaccccgcgagcgtggtagccgctcgtcccggaagggccggtccgcccgcgcggggcttgcacaggcgcccccgccggcctccgatcccgatctgaccgtcggagaggatgccgcgccgtggctccgcgccacggcggacgagcttgaggagcgcctgctgaagaggctggatgaggcgtacgcggcggccctggcccgcctcgccgacctcggccacggcgaggaggcatccctcgaggccgttctccactcgggccactgttacggcaagctcaacgatcccgtttccaacatcgtggccaacgcccgcgcctacctctccgatcctggccacgccagcgcggccggcggcttcgccgacctccgacgcctcgaggaatactccctcgcggggcttgtctgcctcctccagagcagccgccctaccctcacccgcgccgaggccttgtggtgccttctctccagtgacctccgtattgaagaggcgatcgccataagcagctctttcaatggtgaaccctcatctattgctgagagtgaggagcacctcccagccgtggcagagaccgcacagcgtggatacatccactatcataacaccacagccacagctgctcaggaccccactctttttgacccagaagccttcatgagacttgcgatatgccagggtcccgctgcagccaccatctcctgcctgaaggccgccgggtggtcacgatctagtggcgccgcaccagaagggcagcccagggaatcgtttaccaagaagctctccactgaggaactcatcgagtctgttgttgcggagcttgaggcactggacattgacaagaaggatccaccagatgcgaaccctgacccaaagaaccagatggcgcgtgaactcattaagcagacaagagagatggagacgcagcttaaggagcgaaaggaatgggcacagggaaaggcgatacaggctgctcgcaagcttggtgctgatcttactgagctgcgtgtgctgcggatggaacatgatgagaaccagcggcgtaagaaggaaaaacaggtgatggaggatgacacaatgaagcgccttgctcatctggagaatgagctgaagaaaaagagtgggcagcttgacaggagtaatgcaacagttcagaggctggaaatggagaatgcagagatacgtgctgagatggaagctgcaaaactgagtgcatcagagactgaaaaacaatgccagggtctcttaaggaaagagaagaaggatagcaaaaggcttgaagtctgggagcgccagaaagcgaagctgaaggaggacattgctgaatgcaagacaaatattacacaagctgaaagggagcttgctgaggtcaacaaggcaataaaaaatatggagaagaagatgcgagaagacacaagggtcaaagaagaaaacatggtgcttttggaagatgagcgcaggaagaaggaagctgcaaaagcagacaatgaccgccgacttgaagagcttcgtcgcaagaaagaagtcgaatccgagtgctacaaggatgacctacacaggctccaggatgaactcagccgcctgcagaagtcagcaggtgcaactcaaacagctgtcccatcagccaactttcctggcacagctaaccgaagcgcggcgcaggcagccaagcagcaggccatcctgcggccacaacctgcatctaaccggtcgctgccaccaccagcccagaagccaagccgccgccgggactgtgttgcctgcaagaaggcggcggcgtgtgtgatcctactccagtgtgcccaccaggtcctctgtgttggctgcaataagctgcatgaagataaaggcatcactcgctgcccctgctgcagcgctgaagtcgaagagagaatcagggttttcggagcgagctccaactgaggcaccaggtcggggtgaactgcaacttgtggttgagttttcctttttcttttacctccgttaatgtgaagaaagggttatagccttataggtgtcgcctgagcggttatactttgctacagcatccatgcatgattgcttagctgaattgcgacttatcttgggtattatatgagtataatcgagacctttctggagacaggcaatgatgcttagtctggatttattctctaaaaaaaaaaaaaaaaaaaaagcggcc

SEQ ID NO: 130955 - DNA, 387 bp, Zea mays
  Clone ID: MRT4577_50917C.1
accatagccgcctccctgcatccctctcgtgtctggctccatcagtctcgagtcgattccatccaatctccccttactctccaccatgcgcgacaacatgcatgagcgacgacgatcgcagtcctcgaaagccctgcctatcttggacacgcctgggcaaccccaccgtccatgctgatgagtgctggtcacacgcaaccttcgcctatcgccgcctctccgatcggagcatcgactgacagcctatgagccttcggagatgtcgtacttctggcatctgtgtagttgtccaaggccgcttccaagggtagccactacgaggacaccatgattgcaaccacctttggtcggcaaggcaccctaccgactactcattgaggctcgaca

SEQ ID NO: 130956 - DNA, 256 bp, Zea mays
  Clone ID: MRT4577_50918C.1
ggctcgagtgtttatgatccgagaacgagagcactgctcaacgtgagaacgtccgcgtacgcatggcgtggtgcttgcagcgttcgcgtggctgcgctgcgattcggaggtcgtggaggactgctcgagcttcgtgcgtgggcacggtatcctgacgcggagcgttagctagttgggcgcggatccgaggtacgtccgggtgagcattctggatctggacgatgcctacggcatcttcgtcaagcgcgtctcctcc

SEQ ID NO: 130957 - DNA, 234 bp, Zea mays
  Clone ID: MRT4577_50919C.1
ctaacgcaaactgctatagttattttagagactggagtcaacttgagcattataaataactaaggcaaactgctatagcttgctgtaatagtgttatctactatagcttcagcatgccttgtatctaggactacttttaggccttgttcagctacgttgaatatgaagggattaaatccccaaaaacataaagaaaaggaaaaagaaaagaaaaaaaaaaaagataaaatgaat

SEQ ID NO: 130958 - DNA, 715 bp, Zea mays
  unsure (1)..(715): unsure at all n locations
  Clone ID: MRT4577_5091C.1
gggtaccctgagtcggccggccacgcgtccttattcctcctcctacttccctctcagaaacacatatagccaagacagatgcttgcgaggctaaagcgctcaaacaacagcatcaggccctgcccattcgttcatcaaggggaagtgtggggcccgcatgggcggggccacagaaccatgcatgcctgagacttgaaaccaggactgagaacgcaaggtgtgaaggaccaaaaccgaaatcctggcagtgctcgctggcagcaccgacaaacacgacaactgcttccactcttccgacgcttttgctacctttgacattggctgccacaagcagggcaagagcaacggcgcctatgtaaccgtaaagccaggcagcaagggcactatcaagtgggatacctggcccgacagccacgtcggtcccgtccaagagtacattgctccttgcaacggcgactgcggttccgtcaacccttacagccttcagtggaccaagatttcatccaaggcatggaagtcgggcagcaaccccggcaagtgggctaccgatgacctgatcgacaacaacttctcctgggacattaccttccctaacgttgctaccggcaactacgtcgttcgccacgagatcatcgcgctgcacgccgncggccagaccaacggtgcccaagcatacccccagtgcgttaacttcaaggttgagggctctggaacc

SEQ ID NO: 130959 - DNA, 354 bp, Zea mays
  Clone ID: MRT4577_50920C.1
ctagggagaaaacactcttttgaaaccccaaacagccggttgtccagaaacaaggccacgcctttgaacagccatatacatggacagcaagctgggactaacaacttaaaagctaggaaaaacattaagtttggaaacaagagagggttcgggggggccggacatccaaggataacccagtgccagggtccagccggtttggggctcctggaaaccctttttaacgaaaacctttaagacttgaccacttgggagagccctggaggaatcccaaatttataacggggcgccctacaaggcttattcttcaggaaaaccaactggcccctgaggttttttgggccccccctgggt

SEQ ID NO: 130960 - DNA, 767 bp, Zea mays
  Clone ID: MRT4577_50921C.1
ctcgaagcgtcaagtggctctatcgtgtcaaagccatcaaggacccgtctcgagcaccggtccagagcgcggaatatctgtacttcccgcagcaggtcggaaagcacaatttgaaaatgactgacggcattcaaatccaagaaatgccagtcagctctggaatcatgttcccgtggacaaagcaagttgtcattcacaacggcaagattcgctgcaagggctgggcctattctggaggaggccgatggccagagcgcgtggaattgtctgccgatggcggctttaactggtacacgattcctctggagaatctatccaagaaacggaaatggacttggcgaacatggcattatgacctgccctgcgatgttgagggctgggttgagattgttgtccgctgttgggataatgcaatgaacacccagcctcctgagattcgtacagcttggaactggggcttgcatgttacgcactcttgccaccgcatttcggtgtatagtgtcaacaggacccgaccaaagactgacgctcgtcttaaagagttcgaagacaggggcatcccatttggccctatcacggtgccacttgaattcccctcgcagacttgggaagattatgagaagttttggagggggcatgatcctcgtgatgctgaagatgactgatctttctgggaaattggtaaatgtgttaccagataagtttttgaagtttttttttcttctctctttgaagtgatggaacagaaagggggggaggaaaagaag

SEQ ID NO: 130961 - DNA, 363 bp, Zea mays
  Clone ID: MRT4577_50922C.1
actgcaacaacggcttctgccattccaagtgggagctgtggcaaacattggtgctggcttgaaacaacaacattggttggcattttacccacaaggggcgggaaacattgatgccttgatgcagcagcaacaattgctaccattctacccacagaatgtggcggacattgttgggcttcttacaacaacgacaattgagtgccatttgaccacatactttgacaagtcctaccaccttattgcaaccgcccaccattggtggagccatctactagattttttatgattcatacagtaataataaaggtatcatgcatatatgggcgacctctcagtattaaagcgtgtgaagatcgatattgg

SEQ ID NO: 130962 - DNA, 449 bp, Zea mays
  Clone ID: MRT4577_50923C.1
gaaccaaactgaacttgaagataagattcaacttatgacccttgaatatgcacactgaggatgtaagaataccaatactggtgcaggacatacatttgacattgttaacaagacaagtatgggaccattcaacttaaagattactggaaaatgcacactggtacatgacatgcggacaaagatatgtacggaggaactattgacaaacttattttgtggaaaccagggactattgggagaccattatgccagagaactgtcaatggcagtgttgttttaatcgaacaaggtgaaacccatatcttaatcaaactcttgcttatcttaaaccttttcttccttgtttgcctcttcagcaggtgctgcgccaccgacagttacagttgctggagctcccatgtcaattgcaccaccacctgtaaggtacataggataacttttcccttccg

SEQ ID NO: 130963 - DNA, 1213 bp, Zea mays
  Clone ID: MRT4577_50924C.1
ccggccggatgataccagccgccggcgccggcctactccgcccgacgcccctcctcccccaccggcgacctccgcccgacgtaccttcttcccgcaccgccgcccaacgtccgggtcgcccccacgtatccatgccttaggtgccggctatcccctaggcaaggcggtacccctccgcccagaggcgcgcccagctgcgcgaccgaggaccgaatccgtgaaccatgtcgaccagcaagggcagcgcagccaagggcggcggagggaagaagaaggaggtgaagaaagaaacaaagctcgggatggcgtataggaaggacgacaacttcggggagtggtactctgaggttgttgttaacagtgaaatgattgagtactatgacatctctggttgttatatattgaggccatgggcaatggaaatctgggagctaatgaaagaattctttgatgcagaaattaaaaagctgaagctcaaaccatattatttccctttgtttgttaccgagaatgttctacagaaggaaaaggaccacattgagggctttgcacctgaggtagcttgggttactaagtcagggaaatctgacctggaagcacctattgcaatccgccccacaagtgagactgtcatgtatccatacttctccaaatggataagaagccacagagacttacccttgaggtgtaatcaatggtgtaatgttgttagatgggagtttagcaatcctactccattcataaggtacctcatttgttggcttgccaatgtagttatgctattctccctgcctgccttattatctcatgttctgcaagacgctcccatactgtctacctagcaaatttgtatagttcattgattgcatgttaatgtgttggcgataagagcacgaccagatcattgcctcacttgtcagctctcaatcaaggaactcgaattttcatttctaagcataagataatgaaatagcacttccttacaagcattattatttattctagaacatttgaataagtggtccaatggaaagattggtaataaaggcattgactacttgtcaccctgactccctgagtaattaaaatgttcaatatgctttttttacagtatccacaacacccaccatttgaactgatcttcttccttatattataagtttgagaactgcctacatctatttttcattaggtacagtctttaaaattaaac

SEQ ID NO: 130964 - DNA, 528 bp, Zea mays
  unsure (1)..(528): unsure at all n locations
  Clone ID: MRT4577_50925C.1
ccccttgggttgggggttttaaaaaaaattttttttttttttttttttttttttttttttttttttttttttttttttnttttaggccctcaaatcaagtgggcacccccataaaacacttcccccttttttttatttttttccaccgtttggcaagaaagggttttttttttttttacaaaaannnccacttaccccaaatgaaaacactatacatacacaagtgtacatttccctatattctttcccggtccaaatctcaaaaaccattataacaaactataccgcaaaaacttgtcccttaatcacctcttggcatacttttggggccgcgaacaccactaccacaaaaacaagccccaaaacacccttccctcccccttttcctttctaaaccccttcaacacctcctttttcaactcgcaaaaacccaatcttttaaccttttgctcatcggctttccccctttggaagtaaaacatgtccaaacctttccgcaaaacctcctccaaaaacttgtccaacacc

SEQ ID NO: 130965 - DNA, 2468 bp, Zea mays
  unsure (1)..(2468): unsure at all n locations
  Clone ID: MRT4577_50926C.1
ctcgaggccggccgggcccgtcccatgcggccttcccagcctccgacgccccacctccgatgcacgccttgtgacgtcacccgtgaaccaggcccacagatcccacccgcgcgcaatcccgcgtcgtgcccctacaccgtcctgtcccattggcaacttgcgcgctactctgactcggagtggccgctactctaccccacccacacccttccgcccgccgccactaaaccctagcgggacacccgccttgctcgcgccgcctcatcctctcactcctctcggacccccggtggccggtgcagagctgcgcgaccgagaaccgaatctgtgagccatgtcgaccaacaagggcagcgcggccaagggcggcggagggaagaagaaggaggtgaagaaggagacgaagctcgggatggcctataagaaggacgacaacttcggggagtggtactccgaggttgttgttaacagtgaaatgattgagtactatgacatttctggttgttatatattgaggccatgggcgatggaaatctgggagctactgaaagaattctttgatgcagaaattaaaaagctgaagctcaaaccatattatttccctttgtttgttactgagaatgttctacagaaggaaaaggaccacattgagggctttgcacctgaggtagcttgggttactaaatctgggaaatctgacctggaagcaccgattgcaatccgccccacaagtgagactgtcatgtatccgtacttctccaaatggataagaagccaccgagacttacccttgaggtgtaatcaatggtgtaatgttgttagatgggagtttagcaatccaactcctttcataaggagccgtgaatttctgtggcaagaggggcatactgcttttgcgactaaagaagaggcagatgaagaggttctccaaatattggaactgtaccgaaggatatacgaagaatttttagcagttccagtttccaaagggagaaaaagcgagatggaaaaatttgcaggtggcctttataccaccagcgttgaggccttcattccaaacactggtcgtggcatacaaggcgcaacctcacactgtcttggtcaaaactttgccaagatgtttgatatcacttttgagaatgagaaaggtgttagggaaatggtttggcaaaactcttgggcctacacaacccgctcgattggagtgatggtgatgacacatggtgatgacaaaggcttagtattaccaccaaaggtggcaccaatccaggtaatcgtgatttcagtgccttataaggacgctgacacaactgccataaagggagcctgcgaatcaactgtttacacactcgatcaatctgggattagagcggatcaggacacccgtgaaaattactctccaggttggaagtattcccactgggaaatgaaaggtgttccattgagaattgagattggtccaaaagatctggcaaacaaacaggtgcgtgttgtccgccgggacaacggtgcaaaggttgacatccctgtgaccaatttggttgaagaggttaaagtgttactggatgagattcaaaaaaatctgttcaaaacagcccaagaaaagagagatgcctgtgttcatgtcgtgaacacttgggatgaattcacaactgctctgaataacaaaaagttgatcttggctccatggtgtgatgaggaggaaattgagaaaaatgtaaaaactcggacaaaaggggaacttggagctgcgaaaacattgtgtactccatttgagcagccagaacttccagaaggtaccctgtgctttgcatctggaaagccagcgaagaagtggtcgttctggggccgcagctactgattgcctgtgctgggattatttctggattcagttctagtgagttatgtagctttgaagtgtcggatacaaatccaaaaatccatttacattgcgttttacatcgacttgcagttctcatgtcatcactgctgacaaaagccatcgatttcctgtggaccatgctattcgagtttgaatgttgcaaggatgagaatacgtacattcttttactggcgtgcagtgttataattagaaaaaaacgcttcatatttgattgcaacacataattctgatcggaatttaactggatctctttatctcttattaaagtagaatttgttatgaaattcctgctcgcatttcactaggtccctagtttagcctgtttcaccttttggttttgtaataatattgcattaggaatggcctacggttttaccaaattacaatcgatgtctccagtgtaggtcccactcgacaatgatcggtgaaagtgtgataaagattcctttaggcatgccatagtggtgcagaattgagtgtataactgttgacgtctttttttggccanacactaataagaaccggtggtggtgctctttgcacggcggacggtccatggcccggg

SEQ ID NO: 130966 - DNA, 819 bp, Zea mays
  unsure (1)..(819): unsure at all n locations
  Clone ID: MRT4577_50927C.1
gtctcggagtggccgctactctaccccacccacacccttccgcccgccgccactaaaccctagcgggacacccgccttgctcgcgccgcctcatcctctcactcctctcggaccgagaaccgaatctgtgagccatgtcgaccaacaagggcagtgcggccaagggcggcggagggaagaagaaggaggtgaagaaggagacgaagctcgggatggcctataagaaggacgacaacttcggggagtggtactccgaggttgttgttaacagtgaaatgattgagtactatgacatttctggttgttatatattgaggccatgggcgatggaaatctgggagctactgaaagaattctttgatgcagaaattaaaaagctgaagctcaaaccatattatttccctttgtttgttactgagaatgttctacagaaggaaaaggaccacattgagggctttgcacctgaggtagcctgggttactaaatctgggaaatctgacctggaagcaccgattgcaatccgccccacaagtgagactgtcatgtatccatacttctccaaatggataagaagccaccgagacttacccttgaggtgtaatcaatggtgtaatgttgttagatgggagtttagcaatccaactcctttcataaggagccgtgaatttctgtggcaagaggggcatactgcttttgcgactanagaagaggcagatgaagaggttctccaaatattggaactgtacagaaggatatacgaagaatttttagcagttccagtttccaaagggagaaaaagtgagatgggaaaatttgcag

SEQ ID NO: 130967 - DNA, 349 bp, Zea mays
  Clone ID: MRT4577_50928C.1
aacctgggaggctaaggtaacgttgttgtttgttaggcggttgctggtgtggtggtgggggtggaggaggtaccatttgaacttcctgatggtgtctaaaagcgtggagcggtggttctccgaaactgaaaactattttttgccacaaaaatttgtgggcagtattggatttaatagtgaaaacatccctatcttcaatacatttggaaaattattctaccgctactaaggcgaacataatgttcccactgacggcgggcaggggcccagacaatgtccagctcccagccctatataggccatgtatggaacgacatcttattatattgtgaggggttgcctgaccgag

SEQ ID NO: 130968 - DNA, 651 bp, Zea mays
  Clone ID: MRT4577_50929C.1
acttccacagcctggtagcatatctgtctcgtggggcatcgtgtcaaccagacaccaccgtgcgtgtcagccatgtcgctcatgccttggttcggcggtggccggggagggatggaccccttctcctccgacctctgggaccccttcggctctccttggcccttggaccgcagccgccgcgaaggcggcagccgggacgacgcaaccgccatggctcgcaccaacgtcgactggcatgagaacgacaaagagcacattttctccgcagagatccccggggtgaggaaggaggacgtgaaggtggaggtggaggacggcaacgtgctcaagatcagcggggagaagacgcgggaggaggagcacaagggcgacgcctggaaccgcgtggagcgcagcttcgggtccttcatgcgccggttccgcctgccggagaacgccaaggcggacagcatccggtgcaccatgctggacggcgtgctcagggtcgtcgttcccaaggacgaggaggcacagaagcagcgcaacgtccgctccatcgacatagcataaaggctaaaagcaccgcgccgtgacaatgccatctcctcttttattagcgtgtactcgtggtagtaatctgtatcgtgtgttctactttagcagtagtgctag

SEQ ID NO: 130969 - DNA, 251 bp, Zea mays
  unsure (1)..(251): unsure at all n locations
  Clone ID: MRT4577_5092C.1
gccaggtctatctttttcttgcaaccttacccttctctccgggagagcctttttcgccttcagacgctntgnccttacacgccacgccggcccaggctccaaaagcaaacacctcgccactacctggcaagggaacttctcacgggagccttgctttgccaccgcgtcttaccagagggcggacggccttgccactacaaccctggaccatgcccgtaatccctctcccgagccctctccccacgaggacc

SEQ ID NO: 130970 - DNA, 2827 bp, Zea mays
  Clone ID: MRT4577_50930C.1
caaaggttgatcttggctccttggtgcgatgaggaggtacttgaagttgtcctttttgttaccagatttgcctcctctgaatttgttcttaaccttggcaacaattaactaataagagttatcaacactattgccactgtatacttctaattgtagaggtaggagtgggggacacaaaagataattgggaaactcttccatagccttttttgcctggattgaggctaggaactattcaagctgatcattgttaatacgaacaagcctattgttccagctagaacagttccagggaaccatcacggagtaaaagagcccttaaaaggttgctgtcattgtcatcacctttggttcttggcttgccacaaaattataagtattttgaaaaatgttgcagatgagagacaattggaagtttatcaccatgaactagcattttacctaccagttgtattgtacttccgcctgccatgcttgtaaatttgttttccccatacataaaagataaggagtgtctctcctccatcctcctctctttcagctaactccccctctctttttcttacattcgcagctcctcttttttctttcgcaagtagcaagctcgaggccggccgggaacttatctaggtcttctctatctctgtgctctcggtctctcccgcataccagccgccggcgccggcctactccgcccgacgcccctcctcccccaccggcgacctccgcccgacgtaccttcttcccgcaccgccgcccaacgtccgggtcgcccccacgtatccatgccttaggtgccggctagcccctaggcaaggcggtacccctccgcccagaggcgcgcccaggcgagcgcggaagagcgccttgttgaacactgaccaggacaccccgcctcgctcgcgcctcatccttctccctgattcccggtacacagttgcgcgaccgaggaccgaatccgtgaaccatgtcgaccagcaagggcagcgcagccaagggcggcggagggaagaagaaggaggtgaagaaagaaacaaagctcgggatggcgtataggaaggacgacaacttcggagagtggtactctgaggttgttgttaacagtgaaatgattgagtactatgacatctctggttgttatatattgaggccatgggcaatggaaatctgggagctaatgaaagaattctttgatgcagaaattaaaaagctgaagctcaaaccatattatttccctttgtttgttaccgagaatgttctacaaaaggaaaaggaccacattgagggctttgcacctgaggtagcttgggttactaagtcagggaaatctgacctggaagcacctattgcaatccgccccacaagtgagactgtcatgtatccatacttctccaaatggataagaagccacagagacttacccttgaggtgtaatcaatggtgtaatggtggttagatgggagtttagcaatcctactccattcataaggagcccgtgatttctgtggcaagaggggcatactgcttttgcgaataaagaagaggcagatgaagaggttctccaaatactggaactgtacagaaggatatatgaagaatttttagcagttccagtgtccaaagggaggaaaagtgagatggaaaaatttgcaggtggactttataccaccagtgttgaggccttcattccaaacactggtcgtggcatacaaggcgcaacttcacactgtcttggtcaaaatttcgccaagatgtttgatatcacttttgagaatgagaagggtgttagggaaatggtttggcaaaactcttgggcctacacaacccgctcgattggagtgatggtgatgacacatggtgatgacaaaggcttagtattaccaccaaaggtggcgccaatccaggtaattgtgattccagtgccttataaggatgctgacacaactgccataaagggagcctgcgaatcaactgtttacacactcgatcaatctggaattagagcggatcaggacacccgtgaaaattactctccaggttggaagtattcccactgggaaatgaaaggtgttccattgagaattgagattggtccaaaagatctggcaaacaaacaggtgcgcgttgtccgccgggacaacggtgcaaaggttgacatccctgtgaccaatttggttgaagatgttaaagtgttactggatgagattcaaaaaaatctgttcaaaacagcccaagaaaagagagatgcctgtgttcatgtcgtgaacacttgggatgaattcacaactgctctgaataacaaaaagttgatcttggctccatggtgtgatgaggaggaaattgagaaagatgtaaaaactcggacaaaaggggaacttggagctgcgaaaacattgtgtactccatttgagcagccagaacttccagaaggtaccctgtgctttgcatctggaaagccagcgaagaagtggtcgttctggggccgcagctactgattgcctgtgctgggattatttctggattcagttctagtgagttatgtagctttgaagtgtcggatacaaatccaaaaatccatttacattgcgttttacatcgacttgcagttctcatgtcatcactgctgacaaaagccatcgatttcctgtggaccatgctattcgagtttgaatgttgcaaggatgagaatacgtacattcttttactggcgtgcagtgttataattagaaaaaacgcttcatatttgattgcaacacataattaaaaaaaaaaaaaaaaagcggccctcgagctccatcttgaaaccctttgtgaggttaatgcgcgc

SEQ ID NO: 130971 - DNA, 520 bp, Zea mays
  Clone ID: MRT4577_50931C.1
gaggtaataccacacactataattggaaccaaccagacatgtcactgaccaaacgctcgcactccagagtatggaactacacctacaactggaactgcactactgcaacgagtatcgtcaacgaagactagctaaaagaactcgaagtctaggaacttccctccgcactcagcaccggaagaagccccagaaatcctcttgctgccaccgccgccgctgttgatctccactctctccgctggcgccggcgccggcgccggcttcggctttgcctgcgcaggcagtgccactgccaccgtggcgggctcgacggccctgggcacgccggggggagtgctgcaccggatgagcgcccagttgacgccctcgaaaaaggggtgctgcttcatctcggccgcgcccctctttacgcccagccggctttggggctccttggccagcaggcctctgatcaggtccctgctggcgctgctcgtgccggggcagtccgggaacttgagctgctggccgacgacgtttg

SEQ ID NO: 130972 - DNA, 358 bp, Zea mays
  unsure (1)..(358): unsure at all n locations
  Clone ID: MRT4577_50932C.1
agcaattctctccacgcaccttttgtactgaatgtggattgtgaccactatatgaacaatagcaaagcgctacgggaggcaatgtgttttctgatggacccagtgttgggagagaagatttgttatgttcaatttccgcagagatttgatggcnttgatcaacacgattgatattcnnaccacggtggggtgttttttgatnttaacatgannggtcttgntgggatcnctggaccnntttntgttgggactggttgtgttttctgaagacctgctttgtntggttntgatgcccccnctgcgnnctaacctcctttcnngacttgtttctgctggcccccgtcntgctgcttgtgtt

SEQ ID NO: 130973 - DNA, 910 bp, Zea mays
  Clone ID: MRT4577_50933C.1
ggttggcgccggtggtctccgcggcctcggcgcacacggtggccaccagcgcggcggcggacgcgagcaccgtgcccagcctcctgtcgccgccagcgccggccgaggccgcgggcctcaggtcgcacgccgacacgatgcccgcgaccgccgcagcgagctgcgccaccgacacggcggcgtgcgcctgtgccgagtgcagccggagctcgtccctccgccgcctcctccggctccccgtgactggcacgctgtccaacaggaaaccacgcagcatcgccttcatgtttccaactctgagccaggcaggctggactagcttgtgccggcgctgtccgcagttaggcctgccgccggctacaagtctacatgtctgattaaacaactggttcgtccccccattgagacgaaccgtgccaagatgtttctccttgtcgtcgtcgtcgcctccgtctcctctcgcttcatcttgctctgggtcctccagcgacgaccccaggctactgggggagagtatttggaagagatccgtggaggaggggctccacgtccgagagaggaactccatggcctgctcagggatgacgggcatctcttcgaggtggcagtggcagcgcttggaatgccgcgacttctctttacagcgggtattatccgccttctgcgcatcgaccggcgcgctctctgccatttgacatgacagcggatggcatctctggaaggaggccatcccgaactccacccctcgcctgaaatgctccatcaggaaggccgctaaaaccagggctcctggctgcgtgctgatcaacgaaacagaaccggatcagtgagcaagaaacgatgggaaaaaaatcaccctcacaccgtctatttatagcggatatttgaggaggggggaggggggaagggg

SEQ ID NO: 130974 - DNA, 2545 bp, Zea mays
  Clone ID: MRT4577_50934C.1
atgtcgcctcacatacgtgcgcccgaccatgacaacttgtcagatctgtcctcactgccatccctatttatcgccttattgcgattccctgccctaaatgggtggtcaaggctatcgacaaaatcagaaggggttttttgtggaagggaagaaaggatgtcagaggtggccattgtgttgtggggtggaataaggtggctgtggctcaagaaaactcagccagacaggccttgggttgagtttgatgtgcatgtccatcctaatgttactgccatgttctcagcctcagtatgctccatggtaggggatggtgctggaacactgttttggactgaccgctggttgcatggccaatgtatctcagaaattgccccttccctattaaatagagtttcaattcgattgaggaaaaggaaaacagttcagcaagctctcaaggataacagttgggttggtgacatctctggcagtttaacggcagaagtgattgtcgaattcttaataatttgggatttaactcaggatattcatttgcaacctggagtacctgatgctttccgttggcttccatgtgtttcaggggagtactctgctaaaacagcctaccaacgtttcttggctggttctgtggaatttgagccaggtaaaaggatatggaagagttgggcgccccctaagtgcaaattcttcatttggcttgcttcccttaataggtgctggacagcggaccgtctagcacgtagaggtcttgaccacccgaggaaatgcgttctctgcgatcagcagcaggagacaattcaacatatcttgatctcatgtgtcttctctaggaatttatggtggcagatcttatgcaaagtggggctgcagcttgtggcaccagggctggagacatcaattttccaggattggtggagtatggctgaagatcttgtgccagctttgcacagggaagggttcaacacattggttattctcgtggcttggtggatctggaagcacataaatgcttgtgtttttgatggtgtctccccaaattcgaatgcagttctgcaacagatccatgaggatgccaggctttgggagatggcaggtgctaaggctctgagaaggctgtggccttaatttaggggcttggttcacttgtttttttgttctttctttttcttcctttttctcctttattttcttttgtatagctgttgttcttggtcttctttagaccttctctctacttaatataatgatgcgcagttctcctgcgtattcgagaaaaaaaaagtgttgttgcatgcctgaatagtatttttagcaaataatttaggtagaagggagcattaagataaatcccataactggaggtttgcagaacttttaacataaacccacttaatttggtattttttgaaatctgctagtgttaagatcgtgtccaacttggcaaactttaggatggtacctaggtaacactgatagatgctgttcaggaggccttctgattgtaggatgactggctcctgctgctgcctgttttcactgtagcgttcatttcagagatatttacatttctactatcccataatgtctactgatctactcaatcccacggattgttgggttttagttgtgataaaatgatctatcatgtatcttgcaccaataaaagccatctttgtaagtttgagtacgttcttccatccatagcttcaattgaacaggtgtcattcacattgaacaggtagattccctgtttttgttaatgtgcatctttggtttgcccctactaaatttctaccacagtaaagccatctggagatattatacaaagtacttttgagactaaagaattgcagcagcacggataaatgcatgtgataaatatcagaagacgacagacttttgtaactgggaggagtaataagaaactaagaatgtgaaacaacctccagcctgagtggttaggtgatcaggtcctgagttcgaattccaatgagagtgaggtcactcgttgattctcctggttgtgtgcacacgagacggactgacatatgggcgtggatccttatgtaggtgatgagaggactcaaagtacgataaagatctagcttataggggtggacgaccctcatgttgcggagaggtcaactttcgtgacttttctgtattggagctccgattaaactttttcttaacataataccgtgggagcggtttttcccctatcggctgagttttttttaataaactaaaaataggtcagatagaacaaaagagttatggtaaagaactagattcgtatttaagaaagaaaacatgactcgaacaggtttttctatctctattttatatgtccaaaagctttagttcatctttaaaccaaatatattaacacaaaagggtaactttctagcatttccattacaattcagtgcttgcactataatgtaaagttttattaaagttgtaggatgattagaaagatacgagagaaacacttcgttttttggcaataataattctttgaaaaaaaagcttggaaccagaa

SEQ ID NO: 130975 - DNA, 391 bp, Zea mays
  Clone ID: MRT4577_50935C.1
cccacgcgtccgcgcagacatacgcgtctacgtactcgcctacctccgcggctcatacctgtaactcttgtcccaattccatccagcgatgcatcccgttgcgcgacaccatgagggagtgcatttcgatccacatcggccaggccggtatccagttctgaaacccgtgctggcatctgcactgccttgagcatgacattcagactgacggtcacatgaccattgacaagaccattgatggaggtgacgatgctttcaacaccatcttcactgagactggcgctcggaagcacgtgcccggtgctcttgatgccgacctcgaacccactgtcatcgatgacgcgaacactgggacctaccaccagcacttgcacactgagcagctcatcaa

SEQ ID NO: 130976 - DNA, 2151 bp, Zea mays
  unsure (1)..(2151): unsure at all n locations
  Clone ID: MRT4577_50936C.1
aagcaagtgcccccactgccccggcggctgccgaacctctgctccggcgactaggttcccgcctccccgactctgccccaagcgagcgcggcacgcgtgtcgccttggcttcctctcttctgcttcagtctcgcgccgccggtttctatcctgccgtcgcccggagctcatcgtgctgacctccagtgacgcgctgaagggatctgggaacttcgaggatgctttgctgtgctggccaccaggcgtcccttctcctcttcgctctgctctctgtctcctcccttctgctcgtcgacggatcccatcaggaccaggaattcggtgaagctgttggatccagaattcttcaaacaaatccagacgcacatgaggtgcattgctcaagggaaaggagccgtgcagcttgggaagctattgatgagtatttgatgcccttcgtggaaaaagaaaaatatgaactcccaagcaaatgtagacttcgtcctgataatgacatgtttcgggagcaagagcaacataagattcattttgatattaatgagtggcactgtggcttttgcaagaaagctttccgagcagagaagttcattgatcagcattttgaaaatcgccacaagaatcttgtggataatagtgaaggaagatgcatggcagatctatgcggcgcactacattgtgatctgatgatgcagttcaaaaaaccaaaaagtaaatgcaatgcagctgcagctacaaggaatcgtcatctttgtgagagccttgcagacagttgctttcctattaatcaaggtcttgctgccagccgtcttcatgaatttttcttgcgccagttttgtgatgctcacacttgcagtaagggaacaaaacctttccccaaaggtggcaggaaacaaacaaacaggttatacctcgctctctccattttgacgctgatacttttgccgctgttctatctaattgtgttcctgcaccagagggaaatgaggaaaggtacccaagatctaaaacggttttcgaaaattgggcagaagaaaaagccatcctagtgtccaacagtcacaacgttctcgagctcatggagccaaggatgagctggataaggaacgtggtatgcagtgtgaaatgtttttatgggcagggaagaaatttccctcatttccaggacgggaacaatgtccgcaggtcgaggaatgctggcttcgaccttttcttttctttttctttcttttttgtttcgacatgtagatgcaaacttcgagaggcaagcatgtgtggtctttgtgagattacggcgatattctatatcgtcaaccataaccgaagtcctattgataatttaaggatttttgggaggcctcaggcttaaaaaccaatgtcagtgaatgtagtatgacttctatccaatgtaatgatcaatgtgttggtgaggcacaatctttattcccttgcaacattgttggatttccttgcaaatatttggagcttcctctgtctgttaagaaaatgcctagaaatgtgtttttggaacttattgataaagttgctaacaagctgccaggttggaaggctcctttaatcaaccaagctggaagactaacacttgtcagatcttttttttctcgaacacttgtcagatctgtcctcactgccatccctatttatcaccttattgtgattccttgccctaaatgggtggtcaaggctattgacaaaatcagaagaggttttttgtggaagggcagaaaggatgtcagaggtggccattgtgttgtggggtggaataaggtatgtaaacccttaagtctaggaggtttgggaatacacaatcttgaaattcttggttgggcattgaacctgaggtggttgtggctcaagaaaactcagccagacaggccttgggctgagtttgatgtacaagtccatcctaatgtcattgccatgttctcagcctcactatgctccatagtgggggatggtgctggaacgctattttggactgaccgttggctgcatggccaatgtatctcagaaatntgccccttccctgttaaantagagtttcaatacgaatgaggaaaaggaaaacagttcagcaagccctcagggataacagttgggttggtgacatctctggcagtttaccgacagaag

SEQ ID NO: 130977 - DNA, 219 bp, Zea mays
  Clone ID: MRT4577_50937C.1
ccgccatcgtggtcgccggcatggggttcttcaccgacgcctacgacctcttctgcatctccctcgtgactaagctcctcggccgcatctactacaccgtggaggggtccgcgacgcccggcaccctcccgccgcacgtgtccgcgtcgaccccgccggttccacgccgccgcagtcgtacttcgtgtggcggatcatcctgatgctgggcgcgatgcc

SEQ ID NO: 130978 - DNA, 170 bp, Zea mays
  Clone ID: MRT4577_50938C.1
ggaaattaatggggatggcagtgcagataatataggaaagcaatattaaaagggactttcaatcacttcaaatactttggaaaagaacaaataaattctaaaattcactcatcgattaactacaacagaatgtctcaagttttttttaaaaaaattgacaacatttttca

SEQ ID NO: 130979 - DNA, 199 bp, Zea mays
  Clone ID: MRT4577_50939C.1
aaattattatacttatttattttcttgtgtttcatgttccacatacattatacatgaatgatacaaatttctatccaatatagtcttttggtccctaccgagaatcatacctggctatttgggtaaccttacagttttttttttccaaaggcagaggcaaagccctatagcttggcacacctttgttttacttgtttat

SEQ ID NO: 130980 - DNA, 645 bp, Zea mays
  unsure (1)..(645): unsure at all n locations
  Clone ID: MRT4577_5093C.1
ctcgagggcctggccggggaagncgccggatatcctgcgcactctgacccgacttatctcctctagttgaactgagctgacttgtactgccattgtccccgatgcaacgccggccatgagagacgaagacgaacgagtggtcttatgtagctacactgccgctggatcgatatcatggcgaagatcaagcaggttcaaacccacatgcggcgtacagaaggggaaaagatgcgcgcctacattactttgaaggaactcctgcagttggcacatgataccaacacctacccgactcgacgcaaactggttattatgcagacgctgttgcatctggtcaatgagaacgagcaacggcttaatgacagtgagagtgtgataaatgtaatgcacactaccttgagaaacagcacctacataaggcgaacagtcttactgagctgcttgagcaggacccaccatttgcgcgtgatatcctctaaatgaccgtgcaatgagagtagttaatctactgcattcaatgctctagataattaggaatgtcatgaatggatcagagatgctgaggacgcgacttatatgtgagacatgagcgaggtgtgactgctgatatgcatggatggtggaatgatgtggtccatcattatc

SEQ ID NO: 130981 - DNA, 475 bp, Zea mays
  Clone ID: MRT4577_50940C.1
atttcatctgggtgcctcggccgatttctaattctcctcgcgaggccataaccctaaagctaaagctttcacccggcggcggcgccaacgccgggactgccactccggcatcaccgtcaccaagtgccctcccaggggcgtcaactgcatctcctgttgaagaaatgccatatgacgatgtacgctcctgcgcacgagaaggagctgcgacctctctctctcaccacgttgtaagactacacaaggctgccgccgaaatactcgactcacgctcaggagatgtggagcgcctcagagccagccaaaagtcacagtattcgtgacctttgcgagaagggtcgactctttcatatgagagcaactgggaatgttgaccagaacgcaaagaggacaagtgacaggggtattgcttctccaacctgtgtatccgtcaatgacacagtttgccacttctcatcgattgctacagatgatg

SEQ ID NO: 130982 - DNA, 131 bp, Zea mays
  Clone ID: MRT4577_50941C.1
gaaaaaagggatcaaggtgttacctgatggtcgggttactaagattcctcaagggatggtgacggaccaatttggaatgattggtctgttaagatatatcagggcagcagagacagacccaggaatggtac

SEQ ID NO: 130983 - DNA, 290 bp, Zea mays
  unsure (1)..(290): unsure at all n locations
  Clone ID: MRT4577_50942C.1
tttttgtttttanacaataactgcagagacttgcctggaaagcttatgatgccaaagtgggggagtggtgactcgtgtgttactgtcacttccgcatatagggcctctagccttcttgactaaagcctccgagctaaaatacgggggggggggggggtgattaaaattgtgagaccggccgcatgagctgttgccgctaaagcttggctagaatcggggagctataagagatctactattattgggccatgctaggcgcgctcggctagatcttacaagaggtggtctcc

SEQ ID NO: 130984 - DNA, 264 bp, Zea mays
  Clone ID: MRT4577_50943C.1
ggtggagtaggttagtcaggatacggtacatgtctatgatctagatggctgagttctaggatcaagcaattgccactggcatgggacgtattcagaacctttacgagaacgtagccgaacctgttgcgaacaatgcttgggcttatgccactaactttgtccctggacaatgaggatgcctacatgcaatgcaatcttctgctcccttttgcagatcccttgtgtttaactccattttcactaatgaactacacctgtgagcag

SEQ ID NO: 130985 - DNA, 104 bp, Zea mays
  unsure (1)..(104): unsure at all n locations
  Clone ID: MRT4577_50944C.1
tccggaatctcccgggntcgagcccagcgcgtgccggcaacaacaattggtgacttcaaaccagtggatgatgtccttctacagtgtacaatgatgctccagaa

SEQ ID NO: 130986 - DNA, 467 bp, Zea mays
  Clone ID: MRT4577_50945C.1
tctggttggatgattctataatttgcttactggccaaaaaaaaaaacttgtgaaccatattagttgtgttgcattcgaaagcagcatactaggagttgaaaattaaactcccgcataactgatttggttggggtcgctcagtttgtttcggggccactactgagggggcacgagatgtatggctgctacatgtttaataactaagcacaaggagctaacgacctgagcttgaacggcacgtaggtcttgagcgagattaccgccccctgcacggaggccgatcaggaggcgggggggactaggaaacacacgaagctgaggctttgcggggctatccacttggtgtttgaaccttcgcacctgccgatgccgaatgtacatctggaccgggaagaagacggtgagcgtccaaaaggcgatgctgaccgtgatgcccatgatgctgttgaaaaaggtgctgaggatgg

SEQ ID NO: 130987 - DNA, 1254 bp, Zea mays
  Clone ID: MRT4577_50946C.1
agaataaatatgagctccagtgctaggaatgtgatgttctttaagaattacatgcggtgaattctcaggggaactgcacaagttattgtcatgcacaccaatttgattcatgtcttggcaattgtcgccatgattgctgcatcttattctttttgactttagtgatgatgacgatgttttgtacatgcatttctttggctcttgctcagataatgaactttcactataagcattgctgacttcatttgttgccacctttgcagtatttctaacaacacgacgtttatatgtttggaggaccatgttctcacatgagacattggtatcaccaggagagatactatctggtactacagtatggagtgatgtctggggtttctcccatgtttgcatgactggcaattctttattaaggtgggcaaccataagtgttgatcctcctggaaagcataatgctctctttatatcagcccttactggaatctttcgaatcttacctttagtattcacttctccaacagatacaaaaccctgttttagccaaaaaccctcagagaccttatctgcccagcagaaaatggatgtaacaccaacattctgaagcctctgcgatagttccttatataagagcttgccaatacccacacgttgataagatgatctcacaactgccagaggtatttcagcatactgagtgtcagctggcacaatctgatacgatacagtagctatgacctcttcatgctgtgctgcagagctagacatcagaattagagtcttgtatttcccattagttgtgcatgtttcaagaaaccctgactttctcccagtgtctgcagcatagtccatagtaggaagttctttcttataaagcattagcacttcctcaagcaaggacttggtttggctatctgcatcgcttggattgagaaggatgaactgagagccctcaccgacgccattcgaagcgcccttctgatccccagaaacagagacgacgaccttggcgcccctgggtccggagattgtcagaccctgctctgtcgtctcgcaccgcagtccgctcccacggatctccaccttgcctcgtgccgaatggaaggcgggggctggctccggctcggccttggtcttccgcggtctccccatctgatctgggaaggaatctgctatgccagtcgctgtcgaggatggatcggggtctgcggaatctggaggagctaagacgccggggattggatttcgagttcgaaa

SEQ ID NO: 130988 - DNA, 374 bp, Zea mays
  Clone ID: MRT4577_50947C.1
cctggcttcaaatatgggttttacaaagaaataacgccggtcttttgtaacaatcggggacttttttaaaaatgaatttgggggcgataaagttttgagaaccaagggtatttttaccaacaaaacatggcaggtcgaacctaacgaatgttaacacgcggggccaagggggaacttttaatggccgcattccaatcacttttgggcctattgtggatcgaagatttcccataatgcttggggtaccccgggtgggatctaaaggccggggaccccaggttgggccgggaactcacgggtttgggcccccctttgtgaccccctgtggttgcacggttaaattgatcaaagggatctggccccggaaaccaaaa

SEQ ID NO: 130989 - DNA, 3334 bp, Zea mays
  Clone ID: MRT4577_50948C.1
cattgggaccctcgaggccggccggccggcacgtaatttcctccgaaacgctagaagcggggcccacccgaaacgcgagacctatcctcttcttcccgtggcacggccaattttgcttccggctgccgctcttctccgccgccgccccgatccccttcctccccaagcccttcaactatccactcccgcgtccccggagaagcggcgagatgtacggcatcctgacctccccctgccctcgagccccgcttctccgcgctctcccgagcccatccgcccgcgcattccccagaacactagccttccccgcgaggcccctcccccgcggtctccgcctgacccctccgcacgccgccgcggaggcatcggcggcagccacggcgttgggcgggcttctggcgtcgccgctctcgactctggaggccgccctgcggggcctcaacctcgcgccccttcgcgcccccgtggcggcggcgatgtcggcggccgtgcggtggctgggagtgtaccgggaggtgctgctcgtcggcgtgctgctctcctggttccccaacatcccctgggaccgccagcccttctcggccctgcgcgacctctgcgaccccttcctcgccctgtgccgtgaggtcatgccccccgtgttcgggcgcaagctcgacctcagcccgcttgttgcattcatggctattgacatcatcatcatgatcctgcgcccgcagccacgcatgtgatgactccctgcagcagtgggtttggacgatgtatgttggtatgttaggctctgactgcaggaacaaggatctaaggctgttttcggtcatcagatggcaaagaaaggtgctgtgccgctcacctgtatcagtacacaagtgcggtggttggttggattagttttgcgatcttagcatagcggttatggagggtgtaatgcaatataaatgatttcgatgtggcttcattgccaaaactttctttttcgcgtgtcctgtggttgttgtagtaatatgtgttggctacgtttacgtattggttatcccagttttggtctgtgctcacccaaaaaaaaaaaaaaaaaaaaaaaaaaaaaaaaaaaaaaaaaaaaaaaaaaacatgtaccgcccggcggggcggggattactgacaagcgccagagcagagagggagagatagaacacacaaggggagaggggtggggaagggaaggcgaagggaggcgcactcgtcccgtctggtgctctggtatcgtctccccccggcagggaaggagtagaaggaaggagagtacgtaggaggaggaggggagaatgcgtgtcggcggcgggcgggacgacgacgacgaggtgtcccggaagctcaagagcatggacgtggacaagctggagaacggcggcagggaggagagcccgcggcccgccgtcaagtaccacggctggaaggccatgccgttcatcatcgggaacgagacgttcgagaagctggggacgctaggcacgtcggcgaacctgctggtgtacctgacgcaggtgttccacatgcggagcgtggacgcggcgacgctactcaacgggctcaacggcaccaccagcctcgcccccatcatcggcgccttcctctccgacgcctacctcggccgctacctcgcgctcgccatcgcctccgtcgcctccctcatcggcatgttcctgctgacgatgacggccggcgcgaacagcctgcacccgccggagtgcagcgtgggcgagacctgcgagaaggcgacgtcgtaccagttcgcggtgctcttcgtggccttcgcgttcctggtgctgggctcggcggggatccgcccctgcagcatgcccttcggcgccgaccagttcgaccccaacacggagtctggcaagcgcggcatcaacagcttcttcaactggtactacttcaccttcacggccgccatgatgatctccgccaccgtcatcatctacgtgcagagcaacgtgagctggcccatcgggctgggcatccccacggcactcatgttcctggcatgcgtgctcttcttcgtgggcacgcgcctatacgtgcgggtgacgcccgaggggagccccttcaccagcgtcgtgcaggtgctatcggccgcgctcaagaagcggtcgctgaagcagcccaaggacccgaagcaggacctcttcgacccgccgcacaccagcgccatcgtcaccaagttggcgcacacggaccagttccgctgcctcgacaaggcggccatcgtggcatccccggacgaggtgcgttccggcggcggcgcgcccgcggacccctggaggctctgcagcgtgcagcaggtggaggaggtcaagtgcctcatccgcatcgtgcccgtctggtccacggggatcatctactacgtcgccgtggtgcagcagtccacgtacgtggtgctctcggcgctgcagtccgaccgccacctcggcggcgccggcttccagatccccgccgcgtccttcaccgtcttcgccatgctcgcgcagacgctgtggatcccgttctacgaccgcctcctgctgcccaagctccggaagataaccggcaaggaagaggggttcacgctgctccagcgccagggcatcggcatcgcgctctccaccgtcgccatggtcatctctgccatcgtcgaggaccggcgccgtgccatcgcgctcagccagccgacactcggaaccaccatcaccggcggggccatctcggccatgtccagcctgtggatggtgccgcagctcatgatcctgggcctatcggaggcattcaacctcatcagccagattgagttctactacaaggagatcccggagcacatgcggagcgtggcgggggcgctcgcattctgcaacctggcgctcggcaactacctcagcggcttcctggtgaccatcgtgcaccggaccacggggtccgggcagaactggctggcgcaggacctcaacaagggccgcctcgacctcttctactggaccatcgcaggcatcggcgtctttaatctcatctactttgtcatctgcgccaggtggtacaggttcaaggggaccagcaactgatccgccaggttcatggttggacaggttggtggggttggataattatgttatggcctctctcttttttgtttattactttatacctttgttactggtcctttcatttgaatctataggatgatcaagtggctgatgaaagaggagaaagaaacaaaatagttggtttcttgtaatttgtaagtggttaaactgaaatacaaatggatgtaagcttgaatgaaagaaaagcacagcggccaaaaaaaaaaaaaaagcggccc

SEQ ID NO: 130990 - DNA, 549 bp, Zea mays
  Clone ID: MRT4577_50949C.1
aattttgcttccggctgccgctcttctccgccgccgccccgatccccttcctccccaagcccttaactatccactcccgcgtccccggagaagcggcgagatgtacggcatcctgacctccccctgccctcgagccccgcttctccgcgctctcccgagcccatccgcccgcgcattccccagaacactagccttccccgcgaggcccctcccccgcggtctccgcccgcggcggcgatgtcggcggccgtgcggtggctgggagtgtaccgggaggtgctgctcgtcggcgtgctgctctcctggttccccaacatcccctgggaccgccagcccttctcggccctgcgcgacctctgcgaccccttcctcgccctgtgccgtgaggtcatgccccccgtgttcgggcgcaagctcgacctcagcccgcttgttgcattcatggctattgacatcatcatcatgatcctgcgcccgcagccacgcatgtgatgactccctgcagcagtggggtttggacgatgtatgttgggatggtaggctctgact

SEQ ID NO: 130991 - DNA, 287 bp, Zea mays
  Clone ID: MRT4577_5094C.1
gaagaatgcgccattgccgcctgcggtacaaactctgataggcatgggcctggctataagaaacacaaactcagctgggaccgatcgccttgacacatacgacgacaccctacgcgcctcggacgacgacaccccattcgcccgccagcagcggagccggacaaccgagccttgggtctcccttctataggatccaacgctccttacccttccatccgagcccttatctcttctatagagggacataacttcaattgagcgcccctgtggttacaacgtctgacccg

SEQ ID NO: 130992 - DNA, 679 bp, Zea mays
  Clone ID: MRT4577_50950C.1
aataccctctcgctcgtatctgtcctacaggatacgtgagacttcaaagccgacactgcatctgccatgacatctttcgcgcctgccgatcccgccacatagcttcaagcacatgtccaaataccaggcacgtgagatctcgcaagagtactgcgcacgcgaggcgatgaggctgatccacgtctaagacaacaactcttcctgctcgtaggactcaccagtgggagatgaaaaataaggtcggtgacggcgcgagcacctatggtcctcgactacaacgccaccggggtcagactgagcctgtcggaccatctgaaagactgtatgccctccgtctacagctcgcctgatgccggacgccttccacgacgttaagggaatcgccttcctccacgttaagtccggctcgttgctgcagggtaatcacctcgtgatggagctccgtgtgatgaacgccatatggtcgcgactctcgacttctaccgaccgcctgatacatcccgtgcgacaacatgccgacacaagcttacactgaaattgcgagagaaaactatttccagactcttccgtgagtagtgacaaaaccactctaagacattcaaggagagtgacccgtgccaaggacgagaactgtgcgtcaaatgtcggtatctctggctacactacaggcttctgcatc

SEQ ID NO: 130993 - DNA, 2266 bp, Zea mays
  unsure (1)..(2266): unsure at all n locations
  Clone ID: MRT4577_50951C.1
cattgggacctcgagccggcgggaacattgggtacctcgaggccggccgggcttcggattactgacaggcgccagagagagagagaccacaactcctcgagacaccacaagggcaagggaggcgcgctcctctcgcctcgcctcgcctcccccggggaagaagaggaggagagggagctgagcagcagccggccgacgcgggaatgctcgtcggcggcgggcgggacgacgaggaggtgctccggaagctcaagagcatggacgtggacaagctggagaacggcggaggcggcggcgacgcggagagcccgcgccccgtcgtcaagtaccacggctggaaggccatgcccttcatcatcgggaacgagacgttcgagaagctgggcacgctgggcacgtcggccaacctgctggtgtacctgacgcaggtgttccacatgcggagcgtggacgcggccacgctgctcaacgggctcaacggcaccaccagcctcgcccccatcgtcggcgccttcctctccgacgcctacctcggccgctacctcgcgctcgccatcgcctccatcgcctccctcatcggcatgttcctgctgacgcttacggccggcgcggacagcctgcacccgccggaatgcggcgtgggcgaggcctgcgagaaggcgacgtcgtaccagttcgcggtgctcttcgtcgccttcgcgttcctggtgctgggctcggcggggatccgcccctgcagcatgcccttcggcgccgaccagttcgacccccacacggagtccggcaagcgcggcatcaacagcttcttcaactggtactacttcacgttcacggcggccatgatgatctccgccaccgtcatcatctacgtgcagagcaacgtgagctggcccatcgggctgggcatccccacggcgctcatgttcctggcctgcgtgctcttcttcatgggcacgcgcctctacgtgcgggtgacgcccgaggggagccccttcaccagcgtcgtgcaggtgctgtcggccgcgctcaagaagcggtcgctgaagcagcccaaggacccgaagcaggacctcttcgacccgccgcacaccagcgccatcgtcacccagctcgcgcacacggaccagttccgctgcctcgacaaggcggccatcgtggcgtcccaggacgagttgcgccccggcggcgccgcgcccgcggacccctggaggctctgcagcgtgcagcaggtggaggaggtcaagtgcctcatccgcatcgtgcccgtctggtccacggggatcatctactacgtcgccgtggtgcagcagtccacgtacgtggtgctctcggcgctgcagtccgaccgccacctcggcggcgccggcttccagatccccgccgcgtccttcaccgtcttcgccatgctcgcgcagacgctgtggatcccgttctacgaccgcctcctgctgcccaagctccggaagataaccggcaaggaagaggggttcacgctgctccagcgccagggcatcggcatcgcgctctccaccgtcgccatggtcatctctgccatcgtcgaggaccggcgccgtgccatcgcgctcagccagccgacgctcggaaccaccatcaccggcggggccatctcggccatgtccagcctgtggatggtgccgcagctcatgatcctgggcctatcggaggcattcaacctcatcagccagattgagttctactacaaggagatcccggagcacatgcggagcgtggcgggggcgctcgcattctgcaacctggcactcggcaactacctcagtggcttcctggtgaccatcgtgcaccggaccacggggtccgggcagaactggctggcgcaggacctcaacaagggccgcctcgacctcttctactggaccatcgcaggcatcggcgtctttaatctcatctacttcgtcatctgcgccaggtggtacaggttcaagggaaccagcaactgatccgccgaggtgaccatatatcgtctctctcatggttggacaggttggtggggttggataattatgttatggcctctctctttttttgtttattactttatacctttgttactggtcctttcatttgaatctataggatgatcaagtggctgatgaaagaggagaaagaaacaaaatagttggttttttgtaatttgtaagtggttaaactgaaatacaaatggatgtaagcttgaatgaaagtttagcacagttaccgaccagcttatgattgccaaaatatannt

SEQ ID NO: 130994 - DNA, 2278 bp, Zea mays
  Clone ID: MRT4577_50952C.1
gagagatagaacacacaaggggagaggggtggggaagggaaggcgaagggaggcgcactcgtcccgtctggtgctctggtatcgtctccccccggcagggaaggagtagaaggaaggagagtacgtaggaggaggaggggagaatgcgtgtcggcggcgggcgggacgacgacgacgaggtgtcccggaagctcaagagcatggacgtggacaagctggagaacggcggcagggaggagagcccgcggcccgccgtcaagtaccacggctggaaggccatgccgttcatcatcgggaacgagacgttcgagaagctggggacgctaggcacgtcggcgaacctgctggtgtacctgacgcaggtgttccacatgcggagcgtggacgcggcgacgctactcaacgggctcaacggcaccaccagcctcgcccccatcatcggcgccttcctctccgacgcctacctcggccgctacctcgcgctcgccatcgcctccgtcgcctccctcatcggcatgttcctgctgacgatgacggccggcgcgaacagcctgcacccgccggagtgcagcgtgggcgagacctgcgagaaggcgacgtcgtaccagttcgcggtgctcttcgtggccttcgcgttcctggtgctgggctcggcggggatccgcccctgcagcatgcccttcggcgccgaccagttcgaccccaacacggagtctggcaagcgcggcatcaacagcttcttcaactggtactacttcaccttcacggccgccatgatgatctccgccaccgtcatcatctacgtgcagagcaacgtgagctggcccatcgggctgggcatccccacggcactcatgttcctggcatgcgtgctcttcttcatgggcacgcgcctatacgtgcgggtgacgcccgaggggagccccttcaccagcgtcgtgcaggtgctatcggccgcgctcaagaagcggtcgctgaagcagcccaaggacccgaagcaggacctcttcgacccgccgcgtccttcaccgtcttcgccatgctcgcgcagacgctgtggatccccttctacgaccgcctcctgctgcccaagctccggaagataaccggcaaggaggaggggttcacgctgctccagcgccagggcatcggcatcgcgctctccactgtcgccatggtcatctcggccatcgtcgaggaccggcgccgtgccatcgcgctcagccagccgacgctcggcaccaccatcactggcggggcgatctcggccatgtccagcctgtggatggtgccacagctcatgatcctggggctgtcggaggccttcaacctcatcagccagatcgagttctactacaaggagatcccggagcacatgcgcagcgtggccggggcgctcgccttctgcaacctggcgctcggcaactacctcagcggcttcctggttaccatcgtgcaccggacgacggggtccgggcagaactggctggcgcaggacctcaacaagggccgcctcgacctattctactggaccatcgccggaatcggcgtctttaacttcatctacttcgtcatctgcgccaggtggtacaggttcaagggggccagcaactgatccgccgaggtaaccgtcgtctcaggatcacgacgagtgcgggcatgaatgggactcagctctatgcggtcctgatgacagtttgcttggtggcttgggtaattatgttatggccttggcagagcaacaggaaaaaaaagggccttaaaataaggtcatgataattattttgtatctaccatagtagttgtttgatatcgacgcctctctctctctctctctctgttattactttatatttttgttactgtcctttcatttgaatctataggatggtcaaagtggctgatgaaagaggagaaagaaacaaaacagttggtttcttgttacttgtaagtggttaaactgaaatacaaatggatgtaagattgaatgaaagcttaagctaaattaccacactaatagttgaacaggttggtggggttggataattatgttatggcctctctcttttttgtttattactttatacctttgttactggtcctttcatttgaatctataggatgatcaagtggctgatgaaagaggagaaagaaacaaaatagttggttttttgtaatttgtaagtggttaaactgaaatacaaatggatgtaagcttgaatgaaagtttagcacagttaccagcctataaaaaaaaaaaaaaaaaatataaaaatct

SEQ ID NO: 130995 - DNA, 2410 bp, Zea mays
  Clone ID: MRT4577_50953C.1
ctcgaggccggccggttgggaacctcgaaaaaagacgagattactgacaagcgccagagcagagagggagagagagaacacacaaggggaggggtggggaagggaggcgcactcgtcccgtctggtatcgtctcccccggcagtgaaggagtagaaggaaggagagtaggagtaggacgggagaatgcgtgtcggcggcgggcgggacgacgacgacgaggtgtcccggaagctcaagagcatggacgtggacaagctggagaacggcggcggggaggagagcccgcggcccgccgtcaagtaccacggctggaaggccatgccgttcatcatcgggaacgagacgttcgagaagctggggacgctaggcacgtcggcgaacctgctggtgtacctgacgcaggtgttccacatgcggagcgtggacgcggcgacgctactcaacgggctcaacggcaccaccagcctcgcccccatcatcggcgccttcctctccgacgcctacctcggccgctacctcgcgctcgccatcgcctccgtcgcctccctcatcggcatgttcctgctgacgatgacggccggcgcgaatagcctgcacccgccggagtgcagcgtgggcgagacctgcgagaaggcgacgtcgtaccagttcgcggtgctcttcgtggccttcgcgttcctggtgctgggctcggcggggatccgcccctgcagcatgcccttcggcgccgaccagttcgaccccaacacggagtctggcaagcgcggcatcaacagcttcttcaactggtactacttcaccttcacggccgccatgatgatctccgccaccgtcatcatctacgtgcagagcaacgtgagctggcccatcgggctgggcatccccacggcactcatgttcctggcatgcgtgctcttcttcatgggcacgcgcctatacgtgcgggtgacgcccgaggggagccccttcaccagcgtcgtgcaggtgctatcagccgcgctcaagaagcggtcgctgaagcagcccaaggacccgaagcaggacctcttcgacccgccgcacaccagcgccatcgtcaccaagttggcgcacacggaccagttccgctgcctcgacaaggcggccatcgtggcatccccggacgaggtgcgttccggcggcggcgcgcccgcggacccctggaggctctgcagcgtgcagcaggtggaggaggtcgcgcacacgaaccacatcctgcccgtcgggtccacggggatcatctactacgtcgccgtggtgcagcagtccacgtacgtggtgctctcggcgctgcagtccgaccgccacctcggccgcgccggcttccagatccccgccgcgtccttcaccgtcttcgccatgctcgcgcagacgctgtggatccccttctacgaccgcctcctgctgcccaagctccggaagataaccggcaaggaggaggggttcacgctgctccagcgccagggcatcggcatcgcgctctccactgtcgccatggtcatctcggccatcgtcgaggaccggcgccgtgccatcgcgctcagccagccgacgctcgggcaccaccatcactggcggggcgatctcggccatgtccagcctgtggatggtgccacagctcatgatcctggggctgtcggaggccttcaacctcatcagccagatcgagttctactacaaggagatcccggagcacatgcgcagcgtggccggggcgctcgccttctgcaacctggcgctcggcaactacctcagcggcttcctggttaccatcgtgcaccggacgacggggtccgggcagaactggctggcgcaggacctcaacaagggccgcctcgacctattctactggaccatcgccggaatcggcgtctttaacttcatctacttcgtcatctgcgccaggtggtacaggttcaagggggccagcaactgatccgccgaggtaaccgtcgtctcacgatcacgacgagtgcgggcatgaatgggactcagctctatgcggtcctgatggcagtttgcttggtggcttgggtaattatgttatggccttggcagagcaacaggaaaaaaaaggggccttaaaataaggtcatgataattattttgtatctaccatagtagttgtttgatatcgacgcctctctctctctctctctctctctctctctctctctctctctctctctctctgttattactttatatttttgttactgtcctttcatttgaatctataggatggtcaaagtggctgatgaaagaggagaaagaaacaaaacagttggtttcttgttacttgtaagtggttaaactgaaatacaaatggatgtaagattgaatgaaagatttaaaaaaaataccagattatgattgcaagcatttactcct

SEQ ID NO: 130996 - DNA, 142 bp, Zea mays
  Clone ID: MRT4577_50954C.1
aagtcacagattcacagctaattctcacagatcagcagatatctgtgatgcttacaagaggtaaacttgtgctatcatcaattcatcaccgagcatggcctcatgcctcatataggcttctgtgttttatgaattactgcaa

SEQ ID NO: 130997 - DNA, 218 bp, Zea mays
  Clone ID: MRT4577_50955C.1
agataggacaacccatcactgagactataggatcacggcatagctacagacgtcgccttcctgtgctgcgtggcgtcgctgtacatgatgttgctgagcgcgacattctgatcctgaatgctcacatgctcctatagccgctcttctttgcgcacacgtaccagctaacgtagctgcagtctgtgaagacacgcgtcatcaactcatatgcgcgccaa

SEQ ID NO: 130998 - DNA, 144 bp, Zea mays
  unsure (1)..(144): unsure at all n locations
  Clone ID: MRT4577_50956C.1
accaaacggctgactcaggacaccgtccatacacaacaccgaactagacttgcccaacgacagttattcaaagggcggagtttcaaacttatanaccgatcgttgctgcngcttggggggggggaggagcttctaaagcgccct

SEQ ID NO: 130999 - DNA, 1622 bp, Zea mays
  Clone ID: MRT4577_50957C.1
ttttcaaccctaattcttcgtcagacccctggatggatgttgccccaagttccccaagcaaccggcaccagaggaagatgatattgagcatctcaacactcatcgcaattgtgggtggagcagttattgttatcggtgtggtcaccataacagtgctcaacctccgtgcccatgcaacagcttcccgctctgcacttcccactccattgtcagatgattatcatagccaatcagctgaatctccagaaaatgaggccaagtctgggaagctagtcatgtttggcagaggcagctcggattttagtgctgatgggcatgcgttgttgaataaggattgtgaacttgggcgtggaggctttggtactgtttacaaggcagtgctcagagatggccagccagtggccatcaagaagctgacagtttcaagtatggtcaagtcagagcatgacttcaagcagcacgtcaagcttctaggcaaggtgcggcaccataacattgtcaccctcaaaggcttctactggacttcctcactgcagctccttatatatgaattcattcctgctgggagtttgcatcagcacctccatgagtgctcatacgagagctcgctttcatgggtggagaggtttgacataatcgttggcgtggcccgcgcacttgtgcacttgcatcgctacggtataatccactacaatctgaagtccagcaatgtcttgctagacacgaatggtgagcccagggttggtgattatggtcttgtgaacctgctgccgatgctggatcgctatgtgctcagcagtaagatccagagcgtgctgggatacatggcacctgagttcacttgcacaacggtcaaggtcacggagaagtgcgacatatacagcttcggagtgctagtccttgagattttgtcaggcagaaggcccgtagaatatctggaagatagtgtggttgtgctttctgatcttgtcagtgatgcactcgatgatgacaggctggaggactgcatggatccacggctatcaggtgagttctcgatggtggaggccacactgatcatcaagctgggcctggtctgtgcatctcaggtgccttctcaacgaccggacatggctgaggtggtcagtatgcttgagatggtgaggagtcctcagggtaccccagaggatgatctggtttgagatccatttagggtgcgttcttttgttcaggattgatgccaggattggttccaggtgatcaaagcttatacaaattagataagcattcatggttagattggttctagatcatgattccggaacaaacaaacacacccttaccggagtttctcccttttctcattccttttttccattcgtctttgggtagatacatgttgaggagatggggaaagtgcggtccgaaagtatgttaggtctttgactagtgagtctagtttggttgcaatatttaggcacttctctatctcaggtgtctgaatttttagttgattttagggaacactcttgaataaccaactagtataagaaaattattgtttttaaaaaaaaaaaaaaaaaaaaaaaaaaaaaaggaacactcttgaataaccaactagtataagaaaatttattgtttta

SEQ ID NO: 131000 - DNA, 224 bp, Zea mays
  Clone ID: MRT4577_50958C.1
aagtgtcctgtagtctgagacaaggcatggcacaagataacagcttcgcctgcttcttctttagctacctcggattctcctcccgacatggcaaaaattgctcgcgaagttgaccctctaccggacgattctacccccgagttcaaaatgtatatggttggagctgagaatcggaacatgccaaaatgccacgctctgaacatgaccacacaccttgttcccat

SEQ ID NO: 131001 - DNA, 890 bp, Zea mays
  Clone ID: MRT4577_50959C.1
ggtccctcgaggcctcacggtggactcggactggctccgagcctccgcgttgtccgtggttgcgcttcgtccaggatcgcattcttcctgctgctcgcctgctccagaatgttcccctccagctccgccaccggcccccgcttccttcgccccttcaccgccaccgcaccccgccgtgccatggcggcatgcacgggcgccccaagcgacccgccgatgcagcagtcttctcccaccaaggcggtgcgcgtggtggtgaaggggcgcgtgcagggcgtcttcttccgggactggaccgtggagatggcgcgctccctggggctcgccgggtgggtccgcaaccgccgcgacggcaccgtggaggcgctactctccggggacccggacaaggtggacgagatggtgtcccggcggatccccgtcggcccgcccgccgccgtcgtcaccgctgttgtaccctcccccgctgaaccggtctcccccgacgagggcttccaccgcaagcccaccgcctgatttatggctggttcgtcggccatccgtggggcgtggtcattggccagcggcgccacgcgcctgtggtaatcaatctactgaagaacactgaagaacacgtacattcttttcctggagattgctagcgctaatttatggtgttgaatcaataatctcaatcttgacgatgagctgcttcgatgagtggacaaggattgtgactgctcgatacactcggttcttgtgatcatgtcttatgcagccctgtgaactgtggtgtttctgacaactatgccgtgcctgtaattattatctactatgttccgagagaaacggttatgtatggcttatttgcgactgctcaaaataaaaaaaaaaaaaaccctcgtgccgaa

SEQ ID NO: 131002 - DNA, 730 bp, Zea mays
  Clone ID: MRT4577_5095C.1
tttttttttttttttttgtaaatgtgaatgggaccatgtccgctaattgttcattactgaatctatttaatcattgatgtcgtgaatgtaatcgtaagctcccccgcaatggcgggtcgagttcatcaaatgttcatcttcctcagcgcctacacaagtgtcgaagtaaggacttacaacttggcctcgaccttcttcaagcactctgggaagtccttccaatcgtacatgatggcagcgcacttggtttcctcggtgagaagcttagccatctggtccatcttgtccttgccctcctcaatgccgtagatgccaacgtagccaatgcaggggataccggcgcgcatggcagcagtggcaccgctcttgctgtcctcgacggtgatggcctcggaaggcttgacgcctagttgctcggcagcgtataggtagatcttggggtcgggcttggaagagggagggttgagtgaggtggcagcagagtagacgtgctcaggagggaagaagtgggcgatgccggccttctcgatggaagcgacgacgcggctcttcgcggaagtggagacaacagacatagggtagccctcctccttgagcttggtgagctgctcagtcacgccagggcactcgacagccttctggctgagcttgagagtgacggcaccgagttcttgcgcgacatagtcctccatctcatcgtcgggcatcttgaacttgtgcttctcctgca

SEQ ID NO: 131003 - DNA, 306 bp, Zea mays
  Clone ID: MRT4577_50960C.1
gaggtgtaagcccaaaaaccccggctgcatcggcgtcgtaccctcggatctttacagcctgcactacctgaggaggaagccgggactgtgcttacggtactacgacggagacaggaacggatagatcctgtgggaggggaccagcggcccgattcacgccccatgttggacggtgcacggcctgatgcccgctaagtggcggatcacggtcttttgcaggctagacggagcgacagcatggattgagaaccctagtgacaacaccaaggctaacttcactgacgctcatgggacgtatgacagtac

SEQ ID NO: 131004 - DNA, 362 bp, Zea mays
  Clone ID: MRT4577_50961C.1
cttccttcaccaagacagtagcgaagattcaggacactgatgttagcaggtgtcgatcggagcatcttacaattcgatacggcagcacaattaattgctccagtaaaacatatgtgctttaccagaatcaatggctagtggctactgctctgctcagtttggtcgccgtcagtccttttttttggcgacgcacacggccacggtcacgctcacgcgtcgatcgctattggtacacattgatggaccatgaacgggaagtaaatggagatgtcctcgtaccacagtactgttcacccatcattagctgccccagaagagaatcctagctagcgtctggtttgcacacctgctatcctgttact

SEQ ID NO: 131005 - DNA, 297 bp, Zea mays
  Clone ID: MRT4577_50962C.1
attcggctcgagcgcgagtgagtgattaccagacgactggcgcccactgctgacccctaccgatcctcggctgctgcagcacatggcgacctccgtggcgctgtccaccgccgcctattggacacaggtttactggtcccgggctttggtgggcatgccacccaaggggcttggcctgagaatgggcagacagagctcctagggacccattgccgtgtcaggtgtcgagcataatttcagccgaccgcatctctgacatggaaaaacccaagctgatgaaccggctcgttcttggtg

SEQ ID NO: 131006 - DNA, 432 bp, Zea mays
  Clone ID: MRT4577_50963C.1
gtctcctactaaccatactcacggcgctggacagtacttcgacggtgggcatgacgacgcgctatgaagcagaaccaaacgaagcgcgcgcacgtgtacggcgggcacggccccatgggaacgcactcggaagcatagcggaggctcaggcaacgccggtgcacatgcgccagcaccgaatcctctccggatacgtaccatgcaccgtacttctgtgagggatgcatgctcctcttacacaagctacctaatagttctactgtcccgttgcaaacattgagcgcctatgaccgacggtactcgacgacagggctgcggatgccgtcctccaccagggcccggctatcggcggcccgcaaggcctatatttcaaggctcttggaaggggggtgcttctgcccaatccactcgaagcgcatgacaatctcatct

SEQ ID NO: 131007 - DNA, 776 bp, Zea mays
  Clone ID: MRT4577_50964C.1
ccggccggggggtctccggccttgcttgcccgtcgcacgcgaggctgactctctgcctcgctgtgctcgtcggggtcaccctccatgctggtgctcacccttatggcgtccctcgtctccctgggctccttttgtcgcgtccagttctagtcactgttatccgctgaaccaccgtcgcgccgggttgcccctgattcgtggaattcaccggctttcccgtgcgcagtcgcggatgccgtcgctcggcccttgtgtcttgctgagctcatcaccgtcgcttatccctaacgctcgtcatggacctcgtcgtcggcctacgttgtatccacgacatgcttgtcgactctgatgatctgttttccaattgcgtgctgcctacgtcgattttcggaactccttgccgtgctcgactctgcaagtctccaactcgttgttattcgtgcatccccaagagatcccaagaatcgggtgaagacgaagttaacagcgcgatattcccccaagcgctcgacaaattgcttggatcggaaaatcgctaccgatctcgtagattcatctcatctgtggaaacggtaagctgataaattatttagaatagttcgatcgttgaataaattaatgtgttagtgcgaggcttattaaggtgctcgataaattgcgtgagtcacgaaactctcgtccgacttcgcagttcttgtgattatcgagccagattcagctatagcggaattatttccggtattcccggtaaaaaaaaaaaaaaaaaaggggcggcc

SEQ ID NO: 131008 - DNA, 1697 bp, Zea mays
  unsure (1)..(1697): unsure at all n locations
  Clone ID: MRT4577_50965C.1
attgggtacctcgagtccgccgggcgtcccattccgcaaaaccacaaccgcgcggttttctccctcccccggctcccgcggcgcaagcgcagcccacccaagcgccatggcccccgccgcccccgacgccgacgcctatgatatcccgtgggtggagaagtaccgcccctcccgcgtcgctgacgtcgtcggaaactccgatgccgtcgcccgcctggaggtcattgcccgcgacggcaacatgcccaacctcatcctctccgggcctccggggaccgggaagacgacgagcatcctggcgctggcgcatgagctcctcgggcccagctatcgtgatgccgtgctggagctcaatgcctcagatgacaggggtttggatgttgtgcggaacaagatcaagatgtttgcacagaagaaggtcaccctacagccagggcggcacaaaatcgtgatcttggatgaggctgacagcatgacatcaggagcacagcaagctctgcgaagaacaatggagatctattcaaacaccactagatttgcacttgcatgcaacacatcatcaaagataattgaacccattcaaagccgatgtgctatcgtcaggttctcaaggctctctgatcaggagatcctcggtcgcctcatgattgttgtggcagctgagaaggtgccttatgcgccagaggggctggaagctatcatatttactgctgatggtgacatgagacaagctttgaacaacttgcaagctacatttagtgggttccgctttattaatcaagaaaacgtgttcaaggtgtgcgatcaaccacatcccttacatgtcaagaacatggtgaaaaacgtgctcgatggaaagtttgatgaggcatgctctgcactgaagcaactttatgatttgggatactctcctactgacattatcactactctcttccgtgttgtcaagaattatgacatggctgaatatctgaagctggaaatgctgaaggaaacaggatttgcacacatgagaatctgtgatggtgttggatcatttcttcagctttctggtctacttgccaagtttgcgcttgtgagggaaactgcaaaagcaccatgaactcgttgtattccagatgataatagcttgtgtcatgctgtgctatcatggtaacctagttcagttaatagcgctgtcatgcgtggcttaatgtctacagacgtgatgtatctctgtaagatagtgctttctgaagaaacaactatcatgtttacccagtgtggcagatctagctgttgtgcggcacccatccttactcttagggcttgtttgggagctgcttagcccctccaatcccctctgatatcctcttacttctaaacaagcccttagggctganttgatgaatagggatcangagggatctatgctacaagagaattcctctccatagacccctcttaatccctattcaccaaatcagtccttattgttttctgttgccccgaatgccacctacgttcaaaatgaattggcctatcttggtgtttcttgtactgagtatgtagaccatgaaagggagggtgatggagangggagtaacagaaacaacagtatctccaattataatatagttcctaagcatacttgacaaatgcagcattcggaatacggtgctngatcangtatcccattaaaaaaaaaaaaacaacat

SEQ ID NO: 131009 - DNA, 653 bp, Zea mays
  Clone ID: MRT4577_50966C.1
ccggccgggcttcgcttccgtcaggtcgggtccgcagcctccccctctacgaaatccccacctgctcctccgccggcctccgagaagatctgctctctaatcagacatgaccgaagaccatttgctgtctgcgcgtacaggctctttccagcagcaacattacttccagaacttgaccacagcacacctacctgaaaggtcgctacgacgagatactcgctgcgaagccatcccccttgcactcgctgcctccaacatgctgatgattgggcgagcagtttacagacactcgtgctcactcggtgttgggaaaaaacagagatcttccactggttaactatctgcttctgctaggcatggaacacactaccgtcgtagactgccaacccctcttcttttgcaaaaaaatacgagctgataacaattcaactacattgtcgcatgaattttctgcttgtatttgtggttgcgaagtggcactaacttgaaaatcagcactgtcactggtttgggtagttactccattcctttcatattttgagtcccctttcaatagaatatgtccttgtactaactccattctttttttagatgacacgggtcatctcaaaaatgaactagcggctcacgattattgagctcaaaaatgctct

SEQ ID NO: 131010 - DNA, 204 bp, Zea mays
  Clone ID: MRT4577_50967C.1
cgctcccccatggcacccccagcctcctgcccagttcaggctggtccaggaatggatgtgggggatggtcgctgtgtaacgtgctggtgatctttttcccctaccccttttatgacccttaaaactttgattttgtcctaaacatgccgggccaactaaagggtggggagaggagagacgagccccaccatgctcacaagaacc

SEQ ID NO: 131011 - DNA, 512 bp, Zea mays
  Clone ID: MRT4577_50968C.1
gtgggggtttttttttttttttttttttttttttttttttttttttttttttttttttttttttttttttttttttttttttttttttttttttttttttttttttttttttataatattttttaaacaattatcctttttttttgggggggggggggggcacttttaattttgtcaaatcaagttggttgttttgggtttattaatgggggggcaagaaaatgcccgtggtgggggcagaacccttgcaaaacgggaacagatggggctgtgtcaagaccaaacaaggttaaaaaccgccacccctaacccttggccgacccctaggcgggcccctgcgattaccccggaattcctggccgggccccgggggcccccctggtttccccctagaaagcccgaccaaaactctggaaaaacacccggcctacgtgaaagcggtgtgaaaaaacaattccctcacaattccaaaacccaaacgcttcggggaaaattctgtgccgccccttggg

SEQ ID NO: 131012 - DNA, 353 bp, Zea mays
  Clone ID: MRT4577_50969C.1
tttttattgttttggtccggaaggaatgcacgtatatgtgtgtgtgtgtagagcacagcacgcaaagcttacaaagttcatagggagataccacgtacatatatgtatccaaatgtactattgctcaacaggtcgacgagcaaatattcagcttgacgatgtcatacgaaattagtgatgaagggaccgtggccaaagaactccggccaaacaagtagcggactagatcccccactgcctaattcaacacaactccgtgtgcacactaagctgcacaaggtttgctgcgtcgtggaacaggccattctggagctgcagtgagctctcaccgacaagagggtagcaatcgaaca

SEQ ID NO: 131013 - DNA, 582 bp, Zea mays
  Clone ID: MRT4577_5096C.1
aacgaggaaaaagcatactttatgcaaaaaaaatgaggcacaaagggcccccccccccagttttttacatagcaaaactagagctgttagggaaggcatcccccccctttggggatgaagggaagggatccccttatttattgggagaacgggaaattcaaattgggggaaaaataaaagagaccaccacgagaactgtttgttcgatcgaacaaaaacaaaactagacggggggggcaacaacaacaaaaggaggagggccgcccccctccaaccggaagggggcgagcacccaaccgtccaatccgatgctgttgaacttggggaaaaaatccgggaacgggaccctcctgtacaggggaggcttggtggggtctggaattgggccaaacagcctttgggtttttttttcgccggggttgaaaaaggcaattaccgaaaccctcgccgggtcactgtttttgttagccggcacccggggatccacccttttgtaccggtcattcgtcacaagctggatgcatcatgccgggaacagggctttggatgtattaattaagaggggggttgaaatcatcaaaa

SEQ ID NO: 131014 - DNA, 325 bp, Zea mays
  Clone ID: MRT4577_50970C.1
gcatccaggaaatttttgtttatgccccataaaatgtttaatggatgaacaaataataatcccatggttttggggggaataaacgagggactgatccagagtcatccttgcttacagtacacacgcttttttaacccaaaaaacgatgcttgcccccttgcttaaaaaacaagccttcattaaaggggaccggtttggctcctcctggtggggcggccccgccgggcgcttaatggtctccttttttttctcctcctggggggggtcctggacctccggggggacgggttttttgtgggctatttctaacgcgggggaccccatg

SEQ ID NO: 131015 - DNA, 937 bp, Zea mays
  unsure (1)..(937): unsure at all n locations
  Clone ID: MRT4577_50971C.1
cctcgagccgccgnaccaagtgtaatgtatgagccagtccaaagtgtgaacctctcccgccgacgacgctcgcatacactccaattcccccccccccccccctttcctagtcagttcccccacctcatgactcctgaggtcttgctctagctcgagcgccatggccacgtctcgctgcggtaaacagcggcagccgctcctccactctcccacgcccgcagacgccaacggtggcggcgcagccaagaggcgcaggttcgtctcgttcctcgccgtcacggcagctcttgtcgcgtcctaccacctcctcgtgccaaccaattcgtcgcactaccacgcactattcctctccctcggttccaacgccaccgcggcggcccacctacgcgcgctcaccctccgcccccacgtcgctggcaccgaggccaacgcggccaccgcccgctacgtgctccacgccttctcctccctctccttcccagcacacatcaccccttactcggttctcctctcctaccccgtccaccgctccctctccctcgccgcggcgcccggcctagccgccaggccgttctccttggtgcaagagacctacaaaggcgacccgtacgctgaggccgccgcggaggtcctcccgacgtacttcgcctactcgggatccggctccgtcaccgccgaggtcgtctacgccaactacggccacaacgaggattatgcttacctcgcctcccgcggggtcgacgtcgtgggcaaggtcgcgctcgtgcggtacggtgacatccactgcgaggacatggtgcggaacgcgcgcgccgcgggcgccgccgccgctatcgtgtacaccgatgccaaggacttcggcgggagcgcggcgaagggggagaagcgcaagtggttccccgacgcgcggtggctgccggcgacaggcgttcaggtc

SEQ ID NO: 131016 - DNA, 243 bp, Zea mays
  Clone ID: MRT4577_50972C.1
cggacgcgtgtgctgacgccttggcggtacgcttggtgaagaaacagacactgcaactagggccaaataactaccacccggtttagccggctccgctgacaccgacgaaactgccctctgtctacaggatgcacaattacaaggccatgaaggcccacgagctggtctgccatgagtgctgaagtggaaggaagtggacgtcgttgaacaccgtgaaggcgagatacacattaggaccaccga

SEQ ID NO: 131017 - DNA, 681 bp, Zea mays
  Clone ID: MRT4577_50973C.1
ttgggtacctcgaggccggccgggataggactcaagccaccccaacatgagtgctctctcatacccccgcacacatgacaggaacaagaaaaacccaagcatatcctcagtcttcacggtgctcacaattctcgccgtccactctcaccacaagcaggctcttgccctccctgctccacatgcctgtccagacgaccacggcctttctcccctcggccctctacgcgcacaaggagaaggcgctgaacgactccatcttcttcttggtggaccggatcacgacgtagtgtgctcaggatgcacaccgtgcgactctgggcctacgcaccgtgagggcgaccacgtcccgggacatacgaaagcagatgaaaacggcgtccaccccgtcatcgacccccgcgtcgtcttctgcaaagaaaacactccgcgaaggcacggacgtcatcaacgtcccactcccagtgatcatcctctccacctggaatggcctccttgagacaaataattggaacgtaatcatgtgctgccgtcacttgctcaatgtatatatggcacacaaggcagccgagcatgaacaacgacagattactacgtcctgtcaccttggacctcatcctccctgtgacagtcgtgcgccagaacaatcacgaacgcgcagccagctggagaggcccatctgac

SEQ ID NO: 131018 - DNA, 154 bp, Zea mays
  Clone ID: MRT4577_50974C.1
tcgttgtcccggactactatccccgctaccggtagccgccccgctgctcatttgggggctgctcgccttccttcccccattcggcggcggcggcttcttctttagctccctccttaccccgagctttaagcttgggctaccttcctacctaacc

SEQ ID NO: 131019 - DNA, 660 bp, Zea mays
  Clone ID: MRT4577_50975C.1
cgggaaaaaaaaaaaaaaaactaatcagcccaactgcgaataggacgcctcgtttcatgataggtcgcgcgcacccagttatccggcggggcccagctcgacgccggcgcagccttgctgcggcgccgctcctcagtccgccgcctctgcgggagcggcgtcgctgcgaccctggtctaggggcgtgaattcgacacccatctgggcgtgtatagtattattcttccctcgaattttgtggtttatgtggagatctaggaggccaatccacccatccgtggttcgattagaggattgtgacactgaaacagcaccaaggtggcaagttgtggattttgaagaaggcatttttttttcaagagaataagagaagcaagcaagccccttgtaggttcagttgtgaagaagctcacagtcacagttgatataaaatacttgacagcgaatttatctgtaagcacagaagagtgtcgtcatgtcactaataaaactaatgctatgatattctgtagtcacacttgcttgtcatcatttagtaaatgtcaggttactaacattttaattaatcatgggattatgcatttgtgtatgtatgtaaaggctgctttcgcatgtggtatatatgctgtagttttggagtgctggggcagtgaagtattc

SEQ ID NO: 131020 - DNA, 380 bp, Zea mays
  Clone ID: MRT4577_50976C.1
gcccagtccgcggggctccgcaccgtcgtcttcctaccgtgcaagggcggcgtcctcgagctcggctccgccgtgcccgtccgcgagactcccgagaccctgcgcgcgctccagaccgcgctcgctgtcgcacggcccccggcacgcgaggaatgcatgaggatcttcggccaggacctctcccccggcgggagcgcccgagccccgcgcagcgtcgacaattgggctccacatccacacctcgccgcccaagccaccgccgcgtccgcactagccagcaaggaagccgccgcgggacacaaggctccggagccgcccaggagcatagacttcagcaagccagggaagcctgggcacgggcaggccggctgctaggagcg

SEQ ID NO: 131021 - DNA, 359 bp, Zea mays
  Clone ID: MRT4577_50977C.1
accagcatcctcgccatctagagctcgacgtgctggttgtcataatcagaatccttgctatcctcggcatcagagtcggccttgacctggaatgccttgtcatcgcctttctcatcctctaggtcatcatcctcattatccccacccttggcggcattctcttcgtccttacttttctgggccttatcaaaagcagacttttctgcctccgtgtgctagccccaagtctcctctgcaaaagactcggccaacgcaggggcatcagtgatgatgatgctgtcaaaacagagtgcccgattttaaccggacacagggcaatggccatgttctttaagctgtcgaaagcggaaatgtatgga

SEQ ID NO: 131022 - DNA, 718 bp, Zea mays
  Clone ID: MRT4577_50978C.1
gggcgcaagaatgcacttgaaggacgtactacgtggctgcagaaaagccgagggctggcgcataatatgcccacatgccatgtgggtagctgctgctactagtcgtctcgtctcttagtactactgccacagtacttgggcatccagttctccaatcacacggtgcggtgcgtcgcgtggtcatggcttctcaggatgattagaaagcagtaagcccaatcgccggagcgggtcgatcagtcgatggcaaagaaacgcaacggtatcgaatattcatacgagagatgcagttggactgtcactgaatgaaaaaaaaagacacagccacacgcactaggctgtaggctctggctcagacaactgtaaatctcgctcgccctggtagtctaccccttgcacggttcacgatctgttaatggaaaatatactgtgtaggaaaccccttacagtgatttacatcaaaaaagaaaaaagaaagaaagaaagtcgatggcacataaaggattaaagggtgagtcgtcgtgagtgggtgaatgaaggtgagggccgggcaccagctctgaagcagccaacgcaagcttaaactagctaggcgaagcgaaactagcctgtctggtggcggtgaccactctgacggtccacgcaacgcacggaatgtagccgaaaccaaaagtgcctctgccgctttgcgaacgctggcaaatcgctaggcatcaag

SEQ ID NO: 131023 - DNA, 258 bp, Zea mays
  Clone ID: MRT4577_50979C.1
gaacctttttcaagtattctaggtgcacactcagtatcgagtgttcctcctgcatactatgctgacctgacaaccttccgagctcggttctacatggagccagattcgagtgacagtggatctatggcaagccgcggccctccaccatgggggcgcaacatcaacgctggttgtgttggaaatgatgctgagagagcattaccatccactgagagacatcctaagcggtgaaacctgtgactttctacacatgctata

SEQ ID NO: 131024 - DNA, 555 bp, Zea mays
  unsure (1)..(555): unsure at all n locations
  Clone ID: MRT4577_5097C.1
tccaccgcggtggcggccgcccttttttttttttttttaactctcgtggcaacgcagttaactacaataaaagacatacaatatccaccttaattttactttattaactacattaaaaaggtatggtgcagtggtgagagttatctcgtcatgggttcgaacccatgaagcagcctctccgcatttacggaagaaggtttgattgggtttatcccttccacagaccccacttacgtgagagtctctagcactaggtctactctaactacatttaaaaggtcttatggcttacatatctttgagcattacatatctttttgaactgatttagttgcgcgttaccattttattcaatactagggtgagtgctcgngcgttgcaacagagatatataatacataagttaccgtgatattatatgtccccgttgcaacgcatgagcactcacctatatgtacataagttattatatggctccgtcgcaaggcacgggcgttcacctaattgatcattgaggtgacatcgtgacatctgaacttcaagttagggtgggct

SEQ ID NO: 131025 - DNA, 209 bp, Zea mays
  Clone ID: MRT4577_50980C.1
cagccgcgtgcgcccagaactctgcctctccacactgcgctacctacgagtctcatagcttgggaactcatcccaaatcccgccgtcaattcatcccatagctcgacaccatcaagaagcgcattgcgatccacatccgccaggccgatatccaagtcactaacgcatgctggtagctgtactgccttaagcatggcatgcaagctgac

SEQ ID NO: 131026 - DNA, 328 bp, Zea mays
  Clone ID: MRT4577_50981C.1
actcaattctgtttcccttttattatttattttttggtcccggagaaagaacccaggccagccatcaatctcctggcggggccaataatcaacccagaagcaagtaaaaggctaatccaaaaggcacaaggcttttccaagtaactgggagggaacggttcccccgccgaggaacaaggggctttcggggcccccgctggggggggccgggcgcaccccggccccggaacctggggcggccccccgcctcgggggaatgccgcccccgggggtgcccctgtggggggtgccggcgcctggccggggtgtggcttccctccgcgggggg

SEQ ID NO: 131027 - DNA, 192 bp, Zea mays
  Clone ID: MRT4577_50982C.1
ttttgtttgggaagctacggagccagagaggacccaaaccatacgatcagatgtatgctatcatggaacaccaccaaatacatggcggcggcattcaaacggtcacaaggcgtacaggcacataatgccatattaggagtacacaactaaacccaagagcaagcaccagaacagatgcactggcaaccaccg

SEQ ID NO: 131028 - DNA, 216 bp, Zea mays
  Clone ID: MRT4577_50983C.1
ctccgtctctcgtgggcgtggcactacttttatgccatcgctgccgccctactccaggttgccatatcatctgcggccccttcgcctgcgactatcaccatccatcataaatagcatcaagcactcgaacttacagcgagattgaaaatgatagaaggcaactacatcagatcgatccaagaagaccccattttccttgctgcatactatgtactc

SEQ ID NO: 131029 - DNA, 382 bp, Zea mays
  Clone ID: MRT4577_50984C.1
aggctccacatcgcgaaaagcaccatcttcgtcaccacagttaacaggccgaagcgtttttataatgtgtcagagaaatcgccagttggtaatgttgtcattgaccgggatcacaaagtttataagtgaatcatacacacataatgagtctggaattatatactgcttttcaaagaaggaatgtgtataggttgcacaagaactgcgctaaaggggtatttcagcacattaggagcatgcagacatggagatcctgaatcctgacaaaattcataggcggatcgacacacatcggatgtgattgggactggccgtctccgtaaatcttcgcctcacctctatatcatggacaccttgcgtcatcgttcacaccatatcacta

SEQ ID NO: 131030 - DNA, 313 bp, Zea mays
  Clone ID: MRT4577_50985C.1
gcgtaatttcggacaaacactgagtctaatgggggcgttaagacaaccggcggttctacaaccagacaagacactaggtgaacaacaagtgcggagcattggaaaaagtagcaaaggcactagagcctccgggaaaggccggcgctagaggaagcccagagaccttcccgcactacaacaagataaagcatgaagcacagtgcaccttgaggccatatgaccgacactatgctggatgagaaagcgctgaggccgatgatagcccatagcctggggcacacatgagggaggaacacaccgcgagctatagcac

SEQ ID NO: 131031 - DNA, 641 bp, Zea mays
  Clone ID: MRT4577_50986C.1
actactctctctctctctgcctgaaagctgcttgatccatcatcgatcacatcactccaccagccgcagcgcacgaacgtacgactcgtggcgacgctgttccctctgggcgggctgctcctggtgctgtcgggcctggcgctggcggcctccacggtggggctggccctggccacgcccgtgttcctgctcttcagccccgtgctcgtccccgccgcgctgctcatcggcacggccgtcgcggggttcctcacgtcgggcgcgctggggctcggcggcctgtcctcgctcacgtgcctcgccaacacggcgcggcaggcgttccagcgcaccccggactacgtcgaggaggcgcgccgcaggatggcggaggccgcggcgcacgcgggccacaagaccgcgcaggccgggcacggcatccagagcaaggcgcaggaggccggtgctggcactggcgccggcggcggcaggacttcctcgtaaatatgcaaatcatccatggatgcgtgcgtgtcaatgtcagcagggtcgtcgtggaatgctcttctctgtacgtgggtaaccgtcttttggtcgtcttccccgagtgcgtgataaatatcctggtgttcgtcgtgtgtggtgctgccctaggctggggc

SEQ ID NO: 131032 - DNA, 575 bp, Zea mays
  Clone ID: MRT4577_50987C.1
cccacgcgtccgcccacgcgtccgcggacgcgtggggccatctcgccctaggcttcggcacgaggcccagtcgccaccacgctttgatcttgagcgctgttgcgctgagcggctcaccggcgagtcgacgatcgccgcagccaaggcctaggggactggccgcacgccgcagcgcgccagcgttgctgcccctcggccttcgcagttcgctcgcctgcctccgctccgccgtggcgccgtccgccgatcgattgcagcaccgccgcgggccgtggcgtcgctgccctgagctgctgcgcatcggccatccccggatcgcccgcaccaccgcactccccacaggcggcaggcccttggtagctcacccagtcggcgtgggccactcggccggtcggcccccttctgaggactgcagtcataccttctggacttctgcttgtcagtaggcggaggccagagctgctgcttgcttgcttcaattaaccaatagactgagccagtgaattgcgaatctgatgctggaactgaggccgcggtcgaatctgccgctggttaatgtggcttgcccatgccac

SEQ ID NO: 131033 - DNA, 1040 bp, Zea mays
  Clone ID: MRT4577_50988C.1
acttactactctctctctctctctgcctgcaaagctgcttgatccatcatcgatcacatcactccaccagccgcagcgcgcgaacgtacgactcatggcagatcgcgaccgcagcggcatctacggcggcggcgcctacgggcagcagcaggggggcggccgcccgatgggtgagcaggtgaagggcatgatccacgacaaggggccgacggcgtcccaggcgctgacggtggcgacgctgttccctctgggcgggctgctcctggtgctgtcgggcctggcgctggcggcctccacggtggggctggccctggccacgcccgtgttcctgctcttcagccccgtgctcgtccccgccgcgctgctcatcggcacggccgtcgcggggttcctcacgtcgggcgcgctggggctcggcggcctgtcctcgctcacgtgcctcgccaacacggcgcggcaggcgttccagcgcaccccggactacgtcgaggaggcgcgccgcaggatggcggaggccgcggcgcacgcgggccacaagactgcgcaggccgggcacggcatccagagcaaggcgcaggaggccggtgctggcactggcactggcgccggcggcggcagggcttcctcgtaaataagcaagtcatccatgggatgcgtgcgtgtcaatgtcagcagggtcgtcgtggaatgctcttctctgtacgtgggtaaccgtcttttggtcgtcttccccgagtgcgtgataaatatcctggtgttcgtcgtgtgtggtgctgccctaggctggggcctggggtcggctgtgtaccggtatctgttcatcgccgctccgtcgcgttcggagatgtgaataagtgatgtgaaggttaagtttcagctttgctattgctattgtggcttgtgcatcagcggtttgctcgttgactgttatggaaataagcattggtgaaggtattgttttaaaaaaaaaaaaaaaaaaaaaaaaaaaaaaaaaaaaaaaaaaaaaaaaaaaaagggcggcgtgcgcgcccacgcggccg

SEQ ID NO: 131034 - DNA, 179 bp, Zea mays
  Clone ID: MRT4577_50989C.1
tcgggtcccacttggaacctaggaagggccattgtggacccaccattgccggccaaatattttggcctcctaagcttcttggtctttctgcaaggggttgttacgggagcctttttccgaaatggttggaaggttctataaccttccttatttccccgtaacttttaacaagggggttt

SEQ ID NO: 131035 - DNA, 187 bp, Zea mays
  unsure (1)..(187): unsure at all n locations
  Clone ID: MRT4577_5098C.1
acctacccgtccgcagtgcatcataacgaacgcctctagcataattctctcaacctcatcggcggcggcggggagcgtgcggatcggagagtggagacaagcggtggaggaggagagcgtccgcncnnttttcaaaaacactactccttgtcttccttctcagaattctccacggggtaatcgaaga

SEQ ID NO: 131036 - DNA, 258 bp, Zea mays
  Clone ID: MRT4577_50990C.1
ctcccacgaatggttaatatatatgtagatatatattttagcagtgacattcccagagagccccagagctctcaagctcctttctgtcagggtggggggttcagcctgtcctgtcacctctgaggtgcctgctggcatcctctcccccatgcttactaatacattcccttccccatagccatcaaaactggaccaactggcctcttcctttcccctgggaccaaaatttaggggcctcagtccctcaccgccatgccc

SEQ ID NO: 131037 - DNA, 418 bp, Zea mays
  Clone ID: MRT4577_50991C.1
cccacgcgtccgatacgctccccccgcccaccgttcatttgcttggtaggctgctggaacaaaacttggggggtaagatggcgggcagcccagtgccgaacaggatttatgcaggtaggtatcctagggcacgaggtgggattgaatctgtggcgcagtgattttttttgtgcggccccggaatacaacacagggcctggggcgccaaggcattcccttttgggtgtgagaaaggccttgctaaacttagcttaactctgaccttggtctggctctctctttctctttcttgaaagttttgagtgtactatctctctctctcgctggggtgtgggcatactacaactgtagctggcgaaatataaatgctttgttctgggggtaaaaaaaaaaaaaatgggcagccgttctagaggat

SEQ ID NO: 131038 - DNA, 540 bp, Zea mays
  unsure (1)..(540): unsure at all n locations
  Clone ID: MRT4577_50992C.1
tccgccttcccgntcgaccccgcgtccgttcatcctcctctcccccactcaatctactgtgcttctagcactggagcaatagctggaggtgttgctgctggtgcagcattggtgtttgctgttcctgcatttgcatttgcaatgcggcgccgcttcttacctctgggtactgttgttcgcgttctcgaaggcgcctcccgggggggtggcggcggtttctgtctgatttgctaggtttcaggcccttgcttctttttttttgtttgngggttggtgtctagtgttctacggcttttggcagctctttccggacctcggtatgtccggctgctcgtgttctctgcgtctgtgactgggagtggacgcgccgatgcgctggtggttccttgcggcgacgggagtgtgttctgctgtgcgggcgcgcccttcttgtggtgcctgngtgctcgctgccgggcggcggctgctttgggtttgctggtccgcggcggccgtggtcgcctcgtgcttcttgtgggatggggtcggggtgctctccgg

SEQ ID NO: 131039 - DNA, 1560 bp, Zea mays
  Clone ID: MRT4577_50993C.1
gaaaccttacgtccgcgattcttccgctgatgctgacgatgactacagtcaaaataaagcaaagagcatgcagcaaaacaggaagccccaaatgaacagtactatacagaagagcggggctatgatgagtgacaattgggcaacacctgccttggatgagttctgcgcggaatacttcaaatctccaaaagatgcaggattttctcagctgaaagaaggaaacactcattacaaggcttcacaacctaagaactctgggcacttccagcaacaagcgtcttcaagtggaggtgaagtggatgatggtcctcctgctatgcaatatctgtaccaccctgacccaagggtgggtgatttgttccggaacaggctgcaacatttcgttcctattggggcaggaagtaccagagcaaatgagcaaaacagagcaaaaagtctaagaagttgcaggaggcaatccagctcgagtgcagctgctaccgatgactgggtgactcctgggagggtctcagttccaactgatgctagcaagagaagggtgcatgccagtggaactcattctggctctggccattggtttactaatgacagtgggaggaaggtttacgtctcaaaaaatccgcacgagttgactgggcgtgatgcctatcgacaatatcaaaaggaaagtggcaggggattcaacaggtacaagaagaaaggttcatcaggaaccaaacgaggtgctgctcaagtgaaaactgagactgcagccaaacgaggtactgctcaagtgaaaactgagactgcagccaaacgaggtacgagtagagcaaaaaggaagcggtgactgcctacattggctaggattctgtagttaggttttcacctcgcgtgcttgagttcacagccgatttgttggtagaagtagaaccatatgaatgtataacaagcctcagctgctctcgggtcttcttttagggtgcgtttggttgcaatgacaggacgggataggacgagacgatccctcaaataagattgttttgttcagggtcaagggttgggacaggattatcccagtgttgtccccagttatccctcaaaattggagggacgagaggatgccagaggacgtccctatcctggttgtcccgcaaccaaacacacccttatatcaggaggctagcgtatacgtcagtacatggttctattgtgtgtttgtaaatatgattttgctcttcatgtattcttctttttttggatgccaatgaggcaatgatctgtatgcaaaaggctggattactccacaggatgaataaaccattatttcaaaaaaaaaaaaaaaaaaaaaaaaaaaaaaaaaaaaaaaaaaaaaaaaaaaaaaaaaaaaaaaaaaaaaaaaaaaaaaaaaaaaaaaaaaggaaaaaaaaaaaataaaaaataaaacaaaaaaaaaattatataaggggggcgaggtttattaaagtggccatttttttccaccgtgggggacgaggaaaactttttttttacggaccttaataatttttatggggggcccgctttaaaaaactggtgtat

SEQ ID NO: 131040 - DNA, 684 bp, Zea mays
  unsure (1)..(684): unsure at all n locations
  Clone ID: MRT4577_50994C.1
ccacgcgtccggcagaatatttggcctgaaaaaggcatcgtgctcaacagctaagtgctctggaaatgcatatgttgcgttggatttgtatggcaaggaaccaagtccaaaacaatgatacacatgataggctagtggtagcatcaattgaagaaaaacttgtacaacgccgattgagatggtttggacatgtccaacggagacctctagaggcaaccatgtgtagtgggattctaaggtgtgattgtaatgggaaaagagacagtggaaggctgaaattgacatgggaagaggcattaaaaggagttctgaaaggatgatacatacccaaagatttagccttgattagaagcgaatgaaaaataactgagagagagtgttctgccctgggaaaccctagctatagtacacatagagctacagtgcacacataaccctaatgggctaggcccatatacatatcactcgggccgggtgaagatgaggtactgaagtgccccgacaatgctccggtagccggtcggatcggcgaccaggggccggcggcggagaccttgccctgcgtgttcacctaggtcgcgcagggcttgcacttggccatgccaacgtgctcgaggaggttgacagtgtactgtcgctagtgaaggaacatgccctgnngacggtgcttgacggtgatcccca

SEQ ID NO: 131041 - DNA, 468 bp, Zea mays
  Clone ID: MRT4577_50995C.1
atggatccaatcacaaggccggcagctccatcgttccatcggccagcagtcgcgaccgcgaagcatctccatcaggccgccgccaccttggctcggaggaatggagtcagcaggaggtgccttctgacgctgctgatgtccactgcggccatacctggcggcagcgaatcgaggaaggctctactgcaagagtatctgaagaaatcgaaggagaacaaggaaaagaacgacaaggagaggctggatgactacaacaagaggaactacagggactacttcgggctcatcgagggccaggtcagagagaagacggaagaggagcgcacggagtcggagaaacggatcctcgagtggctcgacaagaacagacagaaaacaaaacacaacctgaagattcactacaagttaatctccgcacggagagtcaatgtgcaatgcatgtacggtgaattgcaaaatctgatgtag

SEQ ID NO: 131042 - DNA, 751 bp, Zea mays
  Clone ID: MRT4577_50996C.1
gccggccgggcagcagcaccatccaactcggccaactggctcatccgcaagcgaacccgatggatccaatcacaaggccggcagctccatcgttccatcggccagcagtcgcgaccgcgaagcatctccatcaggccgccgccaccttggctcggaggaatggagtcagcaggaggtgccttctgacgctgctgacgtccactgcggccatacctggcggcagcgaatcgaggaaggctctactgcaagagtatctgaagaaatcgaaggagaacaaggagaagaacgacaaggagaggctggatgactacaacaagaggaattacagggactacttcgggctcatcgagggccaggtcagagagaagacagaagaggagcgcacggagtcggagaaacggatcctcgagtggcttgacaagaacaggtagtctaatgagcaggatcgaatggtcgatcatggagggccggccgcacggggtgaaaattctcgcaggattcttcgtgttcccgctctagctatggcacgctttgtgtaaacaagtactccgtatatgattgactgagcgtactacgtcgtgtttgttttcctgttacagcgagagcgagcgaggaaacatgttatctcgttcgcaatataaacaaagattagaaaatttccattttatcttgatcgcactttctgctcacagacagaaaacaaaacacaacctgaagattcactacaagttaatctccacacggagaatcg

SEQ ID NO: 131043 - DNA, 821 bp, Zea mays
  Clone ID: MRT4577_50997C.1
tccctgtgtcccggacggcgagccggaggcggcggcggtcggcatgggtttcctcgacgcgctctaccggggggtgatggggcccaacggcggctacggtaccttcggcggcggcggcggtttcgcgggcgagcggccggtggactaccgcggtcacaagagccgggagatgaaccaccccgggaaaaggtaccgaagacatatccgccctcggcccacaccccacgcgcggagtgacacaccgccgcgccacccccgcacgcgccccccccgccgcccctccccccccccggcgcgcccccaaccgccccccgccctttccttccccccccccccccccgccccccccgcgcccgcccccgccccacccccccccccccccagcccccccaagcccccccacccgcccccccgcccccccccccccccccccggcccccccccaccccccgcgccccccgcgcacccccgccccgacccgcgcccccccgcccccccccccccccaccccctcccccccccccccccccccccccccccccgccccccaccccccacccccgcgcgcacgccccgcacccccccccccccccccccccccccccccccccccacccccccgcccgcccccgcgccccgcctcggcccccaccccccgcccccgccccccgccgccaccgcgacacccccccccgcccgccggcccccgccgcggcacgcaccccccgccccccaggcccccccaacccccccgtccgctgagtcaccccccccccccccccccgccgcccccccccccccgcccccccccccccaccccc

SEQ ID NO: 131044 - DNA, 852 bp, Zea mays
  Clone ID: MRT4577_50998C.1
cattgggtacctcgaggccggccgggctctgttggccgcacgtctccctgcccagctgcctctcgcgtctcccatggctgtggccgtggtgctccggctcgtccatggtgcctagctccagccctcaacgccggcgcgtggactgcgttgctccagctcgcgtcgagctcttttctctgcttccatgggcccgagcgctctgccctcagctgcctgctctcctcagctgcctgctctgctcgccgcgcgtgctcctccctgccgccgcatctctggtccagctcggacttcagctccaacgcgcgtcgccattcttccctgcgcttggccttcagctcgcccaaggcgatttccctttccccggattccgttgtctggccgcgccctcctccaccgtcgtgcgccaccggctctgcttaagcttcttcctcggtgtctctccttgtccctagcgccaccggctagcctcgctggccgagccactcccttgcgtccttggagccatctaaccccatggttgtcgctgctccctggtcctagctgctacgcgcgctcggtcttcaaccacagccacgcctatggccgagctcgcccctgctcgcgcgttctcctgcgtcctgctcgtggaatccacgacttgcgctctctgcttgacagctgcgccgctcgcccgctccttgcggctgagaagtcgagtgctcccagatttttcctttgtcgtgattatctcccagctctgtgccgcgctcgttccatggccaccgcgccgtggattttcctgcgcacgcgcgcagtggcggacccagaaattggtcaagacccgggccgaaacgaccataaactctaatagta

SEQ ID NO: 131045 - DNA, 280 bp, Zea mays
  unsure (1)..(280): unsure at all n locations
  Clone ID: MRT4577_50999C.1
accaccncaagggaaaccngcanncacggcggnangccgaggccaaggnnacgcngnnngggcccangccanggccgnnnaanganggngngcncnncnncaacaacccacgcgnagaagganccgggcgagggggacncaagcncacagagcaccagagagcnngcccnggnnccagagcccgaggnnncagggaangaaaccgaggngacancaaggcngagagaaggnncaacccccccnaanggngngaaaggggcacccnanggngcaaaaggcc

SEQ ID NO: 131046 - DNA, 158 bp, Zea mays
  unsure (1)..(158): unsure at all n locations
  Clone ID: MRT4577_5099C.1
cccccgcacgaacccggcacgagggcaaaaggcaaggggacggagngaggggcagatgcgactgcatgtctaacctaaaagcaactatagctaccgaccgcaagaacaaaacataacaacctgttgtgatgaaccgagaggcatcaggtagccttctt

SEQ ID NO: 131047 - DNA, 634 bp, Zea mays
  Clone ID: MRT4577_509C.1
agcagtggtaacaacgcagagtactttttttttttttttttttttttttttttttggggatagagaactattgatagtaatttttagaatcttgaataattcatcttatgttcatgttttaataatcttccccacctcttttgttgatccttctctcattttgatatttcaatgccatgccacatagactgaaacctacaagaaaaaggtaagaaaagctagcattatcggctatgtaatacaccacacatagatttttatcatacgtcaattcggcaagttttgggagatagttgcttgttcccccaatttatccaaaaattaatttacctacacctctatacctagatcctcattagtcctttaccttcacatctgatgagattattaatttgatatgggggtcatagaaatgtttccaaaacctgtaacaccccaggtctttatttcgtgtcatgccggaagatttgtcctaagctcagatccttagtgggaatttctatttctcgatcacgtctatctccttttatcaagccagtcatgaaagcctgtcccaatttggaattatttatctcaagcaccgccaaatttggaacccacccctgccgcgtcctttgcgctgttacctctgctt

SEQ ID NO: 131048 - DNA, 392 bp, Zea mays
  Clone ID: MRT4577_50C.1
attcggctcgagctcatgtggcaaagtatgaacgtgagctctgcgatagagggaggggccaaccaatagcaaagctagcgcatagaggtagctggtaacaggagggctacgaccaatatctgctccagtacctggttcttgttccctctggctcatcactggaggggccggtgtggtagctgcctggctgtggctggtgccagaaaaaaagtaaccagtatcacgcgcatgttgcgattatcgtcagttacggtgaggagacacatagaaagtttggtggtactggtgaggcaaacgtttccttacacggttcgctaggaactaagcgtgtggcaatctgaagcctctaaccggttgcgtgctgctgcccactactattcggtcatggagcg

SEQ ID NO: 131049 - DNA, 311 bp, Zea mays
  Clone ID: MRT4577_51000C.1
agagaatggtgattggatactggatgttaggttatatgtgcgccctacggtgaccgggcggtaaggcaaagaacttattggcaagtctgagcactattttggggggtggggtgggggggagcgaagaaatataactagctgtaagccacgaacagaagctggctaactaatcgaaagaacgagaggaacttagagatacaaccaaacgcggtgagaaaaaaaaagaaaaaaaagggggaacgggttataggatccaaacttacaacgcgagaatgcgaaggcatagattttcatatagtggcaactaaaat

SEQ ID NO: 131050 - DNA, 916 bp, Zea mays
  unsure (1)..(916): unsure at all n locations
  Clone ID: MRT4577_51001C.1
cattgggtacctcgaggccggccggaaacactataaaagatttttttactataataggttcttctggagccttcgccgccaagagcccgatacccccccgtcctccctgctcctgctgccgcgcgcccctctccggccacccgccgccggcgccagtgtccatgaactagcatcctctttctttgcccggtacccattcagttcgtccgcctccttctcttcgagtttgggtgcccatggagaccagcagtgcgcccgccgccgccaccgaggccggctggtacgtgcttggaccgaaccaggagggcgtcggaccctacgcgcttgctgagcttcgagaacatttcgcaaacggttatttcaatgagagcacaatgctctgggcagaagggtggaaggaatggatgccactctcgtccatctctgagctacactctgcagtcgcagcgaaggatcaatctgaacaagatgctccagatgttgatgatgattttgagaaatttcagaaggaggttatcgaagccgagacagaggtgaaggccttgaaaggcagtgatgtggaccggcaagatgatgagcggccagcaaccccccctgatggagaggaagaatttactgatgatgatggcacaatttacaaatgggaccgtactttgagggcatgggttcctcaaaatgatgcatctggtagcaaggaagattacgctgttgaagagatgacttttgcagttgaggaggaaatatttcaggcacccgatatcctgggtcctgcattagaagaaatcaacactctatctgaaagcaaaaacaaggatcagataaagcagaaatgagaggagacnaaaagcggaaatcttatgagaatccagctgagaaaaaggaagctacaaccctccgacagnntggttgatctcaa

SEQ ID NO: 131051 - DNA, 328 bp, Zea mays
  unsure (1)..(328): unsure at all n locations
  Clone ID: MRT4577_51002C.1
cagcctcggccagccacctcctcgtcgctctcacgctctggggggggggggcgtgccctcttcccctccacctcagtgctcccgtctgacgcacatggcctccatcgccggatcttccgctctctccttcgccatgcctgtcaaggcaatcaactcaaattctctagccttctccccggtgaggaagggtaacacaggggctgcnggggcaaccagtgcctatgagatctgtttactgcgctgccaagaaggatacggnggacaaggttggtgaaattgcgaagaagcgggtgggtgttgctgacgacgctggagggtggggggaatg

SEQ ID NO: 131052 - DNA, 348 bp, Zea mays
  Clone ID: MRT4577_51003C.1
atggaaggaggcaagaagaacgtcgagaaaccgagtgtatggaagaaggccaaggagactaaggcacctaaagccaggggtgaagaagatggcttgcaaagtcaagggtgttggagctcatggatagcaatcaagataaagttatgtaaacttgatgatttggagttcaacccaaacctcaaacatgccaaaaagggcaaaacgatgaagaaggttaagtatgcaagtcacaataatgttctccaaagagttgaagccaattggagaaagaatggaggaaaaaggacttatagggtgttttctaggcgcaccagaccttcaacaagaccggtctggtggtgcacatga

SEQ ID NO: 131053 - DNA, 671 bp, Zea mays
  Clone ID: MRT4577_51004C.1
gtacgccctgatcacgaatgcggtgtcggccgacctcggcacccacagctccttgaacggcaactcccgggcgctggccaccgtgacggccataatcgacgggacggggtctattggagctgccattggaccgctgctgacagggtacatctcgtccaagagctggagcgctgtgttcaccatgctgatggcggcggctctccttgccgggctcctcttgaccaagcttgtgtgcgccgagctgcaagggaaaacacctaccagtgcgagcaaggacgttgctgatgcgcaaggtacttattactcggatgaagtgtaaatccaaagctggttgcgctgaatgcctatctaagatagtggccggttgctgcttccactgtctttcatgatggctaccagtctgaagactcaggagggaaacagatttggctgctgagtgacttgctcaaatgccagttcagatgattttgcgtgtgtgtgttggtatagagacaatagaagatagaggtgtgtgcttggattagttttcagattttacttactagataggggtgaaaacacctcaaaagctctagagcccaaatacaggcacattttaggcaccttgtaaatatgtttgttgggcaataaactcgggcttgcactggctgcattgccagttacgttaaaaa

SEQ ID NO: 131054 - DNA, 659 bp, Zea mays
  Clone ID: MRT4577_51005C.1
ctcgagttttttttttttttttttttttttttttttttttttttttttttttttttttttttttttttttttttttttttttttttttttttttttctttttctggctaaattcccctatttcgttgcttgggaaaaaaaaatgggcgtttttcaaaaccctcccgggactaaacccccggcgggccctgattcccattcctactaaagcgggagctagctagacttgaaaacaaatccgaaagcctaaagcccgcccttgtcgaaagacgacgggtccggctccggctccttctccacctccgggtggtcctcggcctcgttctcctcctccacggtcgcggcggggctcagggccaggcccttttgcaccgacttgtagatgctggacccgaactccttgggggcggggagggtgaaccccctctccatcagggccggctggaacaccagcctcgccgggggcttcagctcctcgctctcgttgtcccgggcgaccttggggcggagctccttggtgatggggggcctgggggtgatctcgaccaccctcttgccgcgcatgtacccctgcttgctcgagtcccacaggggctgcgcccgcatgatcttctcctgggggggctccacccggacttgggggggaccaccacgcagggg

SEQ ID NO: 131055 - DNA, 2125 bp, Zea mays
  unsure (1)..(2125): unsure at all n locations
  Clone ID: MRT4577_51006C.1
ccggccgggaaaaaaaaaaaaaagcactcgcactcgcaccacccaaaccgagctcgaggacaggagacacaccaccacgaacaagaaagaaccgtatagatctaaggatctttctgacgatcggcatggtcgggactgccgtgttcacggctctcttcggcgctggatactggctgaacgtccacagcttctactatttcctggtcgttcagatggtttccggcctgtttcagtcggttgggtggccgtcggttgtcgcggttgtcggtaactggttcgggaagagcaagagggggctgatcatgggcgtatggaacgcgcacacttctatcgggaacatagctggctcgctgcttgccgccttcctcctcgagttcgggtggggctggtcgttcgccgtccctagccttgtcatggctcttgttgggttggtggtgtatgtttccttgccggttagccctgaggtgatggagatagacattgctggcagtggtgaattgaactgtgagaaggacactggcactgtgaaggagccccttttggaaccaggccaacaagttaagcataaggcagtggggttcttggaggcatggaggattcctggagttgcgccattcgctctttgcctcttcttctccaaattggttgcatataccttcctgtactggctacccttcggcaggggccatacacgcattggtggcgagtacctctccgacgccacggcaggaagcctatcgacgatcttcgacgtcggcggcgtgctgggaggggtcctggtgggccacatctccgaccgcctgaacgcgcgcgcgatcacggccgcgagcttcacttactgcgcgatccccgcgctcttcctgtaccgcacgtacgggagcatgtcgatggcgtggaacgtctcgctcatgttcgtcacggggatgttcgtgaacgggccctacgcgctgatcacgacggcggtgtcggccgacctcggcacgcacagctcgctcaacggcaactcccgggcgctggccaccgtgacggcgatcatcgacgggacggggtctgtcggagccgccatcgggccgctggtgacggggtacgtctcgtcgaggagctggagcgccgtgttcaccatgctgatggcggcggctctcctcgctgggctcctcttgagcaagctcgtgtgcgccgagctgcaagggaaaacgcattccagcgtgagcaaggacgcaggcggtgaacatggtgcctactcagatgaagtgtaagtctgaagccctggttagtaagcccacgttcccgacctgaagatgaaaaggcagagatttagctgctgagtgacttgctcaaatggcaattcagatgattttcttttgttttgtgtggtagaagatgtaagtgtgtgcttagattggtttttcaggtttactagactctagagcccaaatacaggcacattttaggcgcctttgtaaataaggtcgggctcatactagttaccattgctagttgctcaattgtatgtgatgtttagggtatatgtcaaatggagggcgaaccaccttttgtacactggaatggccaactctgcatttactttgaatgttggccttctttttgtacgtgtaaaccgtgtgaaggttcagagaattttgaattgaagcatctaggctgcgctagtgtgtgctgatgcgcaaggtacttattactcggatgaagtgtaaatccaaagctggttgcgctgaatgcctatctaagatagtggccggttgctgcttccactgtctttcatgatggctaccagtctgaagactcaggagggaaacagatttggctgctgagtgacttgctcaaatgccagttcagatgattttgcgtgtgtgtgttggtatagagacaatagaagatagaggtgtgtgcttggattagttttcagattttacttactagataggggtgaaaacacctcaaaagctctagagcccaaatacaggcacattttaggcaccttgtaaatatgtttgttgggcaataaactcgggcttgcactggctgcatttgccatttaaaaaaaaaaaaaaaaaaaaaaaaaaaaaaaaaaaaaaaaaatngagggcggccaggacgctgggtcgac

SEQ ID NO: 131056 - DNA, 240 bp, Zea mays
  Clone ID: MRT4577_51007C.1
tctttctatgcaatcgacgcagaggcgcgggtgctcgcaccaccacgaccacgacccgatggctttcatgcgctcccgctcaaatgcatctatctggcatgagtagctgctacctaacattaggagagacattcgcctgagcttaaaatgatacaaggcatgtccgatatgttagtctctcaaaatcggaagagcaagcaataagcaatgcggtatgcgcgagcaagacagggcgctact

SEQ ID NO: 131057 - DNA, 256 bp, Zea mays
  Clone ID: MRT4577_51008C.1
gcgtccgacactacaccacaccacacacacccgacgactatgacacacatgtagaagatctagttcgtccaatcgtgaccgtgacgcaggacgctatcaactatccatgacatgaataatattggcggcctctacggtggcaacgcgctctgtcacggtgacgacagctatcttcgctgcagctgtagccacagacggcaccgacgtgctgatcatcgtccccaagacggctggcgccgggcgcatcatctggttc

SEQ ID NO: 131058 - DNA, 291 bp, Zea mays
  Clone ID: MRT4577_51009C.1
acctcgaggccggccgggaaaccatttccatataattgtatagaccgctctccactatctgtctattcgacgtcgacaagtcgcgactacaatctaatttacatgctatgctacacgagccgtcgagatctgtgaaccttggcaacttgaactgcgtagtcatcaggtacacgaccagaagattgtactaatccttaatgaccgacctgttcacccttcatatgttcgatgctgcttaattaaacctccttatgactgactatctgagctccataggcgtctgcatgaaca

SEQ ID NO: 131059 - DNA, 359 bp, Zea mays
  Clone ID: MRT4577_5100C.1
cggacgcgtgggcgccgccagggactctctggtatctcgccagggccaggaacgcgcgcctcagggccgccgtctccgacaaggacggcgcgctgcagagcctccgacaggagtacaagtgcgtcagggtcagtgaggctgcagcacccccgcgtcgtccgccaccaccacgacggcgtgcagaacccccgcgtcgtccgccaagaccgcccccgcgccgggctacggcctcaatcagcgccttccgaatggcagcagcatgaagggaacgccgcggtcggcgtcacagcggtggacgccggacaagccacggacgccgagcaaccggcggacgtactctatccgcgagccgggcaaac

SEQ ID NO: 131060 - DNA, 223 bp, Zea mays
  Clone ID: MRT4577_51010C.1
ttcaaaattcactgtcagagatcttcaccgataacggtttgtgtgaagtttaaacgcagtggtaaatcaattagcacactgtatctggcctcagatgaagctctagaggctgaatacaggaaagaaatgctacacttagggcttgtttggttttaaaaaaaatacaaataaaaaaaaaaaaaaaaaaaaaaaaaaaaaggcccctaaagaacgaggacaatct

SEQ ID NO: 131061 - DNA, 356 bp, Zea mays
  Clone ID: MRT4577_51011C.1
aatagttgggttttcgtggttttttcttttttggggggggggcccccaaaattataaccccattggttatttttttaacaaagcccaaaagaactaaaactttgcgaattctttacaaaacgggggcagattattttaaacacaaaaaggcaaccgggtccaaaaccagcttggttccagggtccaggggccccgttcacatttttttttagcataaacaagccgcaaagttggtttgggaccaaaggccattgggaccacccttgatggggggggagaaatatttttttttactagcctactggggtttgaacatgggggggatcaggtcgaccacccggtttttgtagccccac

SEQ ID NO: 131062 - DNA, 191 bp, Zea mays
  Clone ID: MRT4577_51012C.1
ccggggcagggacatatccaggaggaacagcatttcaaccagttacatccaagcatacatgcagaggcacactacataggcacagtgacgtagcagctgccgatgaacagatcctctgttgaggggcgcgagatgttacccagatgcaccttgtgcactatgagcatgcagtggtggacatgtagctggaa

SEQ ID NO: 131063 - DNA, 1971 bp, Zea mays
  Clone ID: MRT4577_51013C.1
gccgggtagtttcttccgccaaagggtgtgccggtgtagtgtcggggaagctcttagagctccatttccttatagtgatagtacacggtagcataggtggagggggtgtgaggtgtgtgtggttggagtggggctaacaattgagcctgccgcgcacaatcaatggccgcgctcgagtccaacaagaagctgcgcctccttctcgtgcccttcttcgccaccagtcacataggcccgttcaccgacttcgccgtccgtctagccacagccaacccggacgccgtcgagctcactctcgccgtcaccccggcgaacgtccacgtggttcgctcggccctcgggcggtacggcgccgaggcgggcggcgtggtcaagattgccacctacccgttcccgcgcgtggacggcctcgctccgggcgtggagaacctctcggccgccggggacgacgggtggcgcattgatgccgtcgccgtcgacgaggcctcgacgcgaccggcgcaggaggcgctcatcagggaacagtcccctgacgccgtcatcaccgacgtccacttcatctggaacaacgccgtggccggcgagctcggcgtgccgtgcgttacgttcagcgtcgttggcatcttctcgacgctcgtcatgtaccacctcggccgtgacgtcgtcatcagagatggccaggaggtgaccgtccctgggttgccgcttgccggggccggagatacggatccccgtatccgagttgccggagttcctgagacgccggcaggagcacgacggggtcaggcggtgccatgtggagatgggcaggtgcttcggcgtcaccctcaactcgttcgtggatctggagcagccatactgcgacatgtgcgtgagcagcggatacctgaagcgcgcctacttcgtcgggcccctctcgctgccgttaccaccggccggagcaagcaccagagattcgccatgcctcgcgtggctcgacaccaagccgaggttttcagtggtgtacgtatgcttcggcaccttcgctgccatctcggaggaccagctccgggaactggcgcttgggctagaagcttcaaagaagccattcctgtgggtggtgagggcggacggatggacgccgccggaggggtgggaggagcgcgtcggagagagggggatgctagtgagagggtgggcgccgcagacggcgatactgtcccatccagcggttggcgcgttcctgacgcactgcgggtcgagctcgctgctggaggcggcggcggccggcgtgccgatgctgacgtggccgctggtgttcgaccagttcatcgaggagagactggtgacggaggtcctcaagatcggggagagggtgtggagcgggacacggagcacgagatacgaggagcaaaaggtcgtggcatggcagcagaggtagtggcgcgagcggtggcaaggttcttggagccgggtggcaccggcgaggcggcgaggagcaaggcgggggtgctcgctgcgaaggcgcgctcggctgtggcggagggtggctcgtcattctgtgatctgcgccgtctcgtcaatgacctgatcgaagcaagaacggctgccggaaccaacgcctgagttacaaaaatcacgacaaggctctccactcgctttcctgcagagcatcagggcgaaatgtcagtggcagagtcaatatgcagaggatccactccggttcaaatgggatttttttctcataaataaatgtaagtaaagttaatcgacaaaaatcgctggaattctaaagtgagacttcgacaaaaaccgctatgcactcaagattctcgatgtaatcgatgtacaataaaattattaatcgatgtaggactaaatattacccttgtgttgtaaccagagcaacaaaaaatatttgttatttttgtacccgagtttaaattaaggccaaaaatcccagaattattatatataaactaaaaaataaag

SEQ ID NO: 131064 - DNA, 303 bp, Zea mays
  Clone ID: MRT4577_51014C.1
atgtcctgaaagaaatgttggaagaggaggttggaaataatacacagaaaaataggtttacatatagtgatctttgtgttcaaattcctgaacccaaacttcgcctctgcttgttgagaaccctagagttcttattttcattgatgtgctcatactatactattatgagcttctcttcaggagataagaatattgactccaagggcccagatgaagcatataaggatggcacatctcagaatagcagcgaaactttagttaatttaggaagaggtcattcaagtgcagcagtcactcaggatg

SEQ ID NO: 131065 - DNA, 471 bp, Zea mays
  Clone ID: MRT4577_51015C.1
acaagctttttttttttttttttttttttttttttttttatgtttttttatttttttttttttttttctttttttttttttttttttttttttttttttttttttttttttttttttttttttttttttaaaaaaaaaaccccgggcgcgacccccccaaggggaaattccaaaacaccggggggcgttactaggggaacccagcccgggcccaaacttggggaaaacaagggaaaaactggttcccggggaaaaatgttatcccctcaaaaatccccacaaaaaacaaaccggaaacaaaaaaggaaaaacccggggggcccaaagagggggccaacccaaaataaatgggggggccccaccgccccctttccaagcgaaaaaaccgtggggcccacttgattaaaaaaaccgcccacccccgggaaaaagggggtttcggattgggagcctttcccctttcctgtaaaa

SEQ ID NO: 131066 - DNA, 854 bp, Zea mays
  Clone ID: MRT4577_51016C.1
gttctagatcgcgagcgccgccctttttttttttttttttttttttttttttttttttggcaaaacctttcgctgctcttgctcattaacaatgaacgaacaatgtgaaatgcacaaacagcagatcccaccatggaaaggttggctcactttattttgcctacaaaacttctcatgaactgcacaattaccatgttctcatctaccagaagtttatacaaactttgtaatacaagaagcagaaccagctagaaagagaaccaggggggaatggatacggcggcgaacgaccggtgtagctgcaaaacaaagagcatacacaaaccagctgctccgtggaaagttttaccagtcacaatcgatatctcaccactgaaaacagactgtaaaaatccagcaccgcttcttcaaccagctcctccattactcccccttcgagctcctcggtgatgacaaccacctgcgccatcatcagtttcacccaccctcttgcttcgacctcctgcttcacaattctgtccagtatgatcccagcattatctctcttgctcaccacaaacatccgtgccccgtgtatccagtccttgagaatactccagacctccacccccagatcaggagatgaggtgcccctccatgttctggagcttcttttactccatgggagggcgctcagtaaggcgttctcaccgatctcaattagagcaacattcacgcagtcaaaaagaagccttctgtatgagcttttctcctgcagctcagatccttagttgcgcagcaccgggtcaagagggtgatcaggtgaatgccagccggcgaaaaccatacgtgactgtgaagtgcctaatccagct

SEQ ID NO: 131067 - DNA, 394 bp, Zea mays
  Clone ID: MRT4577_51017C.1
aaaacatagctggatcctccttttagcagggaactgtcagccccaaataaatgatctctcatgctcattctttctttgtcatgcttttgtatgacctttggagcgagcatagaccactgaggggttgtcctaaatatgttaccctgcagccatagtcttttagtgacatgattttggatgagcaaaaccacaaaaaggagagcgagggggagggagggaaatgcaagctggtggacaatgtactgttgcaaagaggacgggtctacgttgtcaaatctgtgcttatattttttaccccgagctgtagaaagcaggaatgagcccttttcagaaaatagtgctggtccagacttgaagcttactgttgcatgaaagaggtcttgtataagcaata

SEQ ID NO: 131068 - DNA, 256 bp, Zea mays
  Clone ID: MRT4577_51018C.1
gtatctatattcgctcgacaaggacacgttcaagaagctccaccatctagatgttaactccttaaggggggatactgactcctatactgccctagccttctacaatgacgcctgtaacctagttaccggatgagctgaagaagccatcaaggtattagggatcgatgatacctatagcaagagcttcaagatacttaaaataaactggccagctggagttcactctacggctgttacttctcagaggggttatcat

SEQ ID NO: 131069 - DNA, 422 bp, Zea mays
  Clone ID: MRT4577_51019C.1
cccgccccaaaagcagaaaaaatctttgggttaaagggtccacatcttctccaaaaaaattaatttagcctcccccattcccaaccaagaaaaaagccccccccccccccaaaaccccaaatcctttcctacccggggggccccagggggcttcagggggacaaaacggcttggggggctgggcccttttcaaccccccggctgttttcacgacgggacataaaccctggccctgggaaaatcggcccgagctttttcaacccttgggctcccagcttcaggacctttttggaaaccctgctttttttaaaaactggtggggaaacccgggaaagcggggactcgatttccaccccattggttttccaaagggagctgggccggggattttttttttccccaaaacccttaaaaaggggccc

SEQ ID NO: 131070 - DNA, 229 bp, Zea mays
  Clone ID: MRT4577_5101C.1
cccacgcgtccgcccacgcgtccgccctcgtcgtcgtctcactcaccccgccttcacgcctgcctcaccaaataaggtcccgcccttttccgacattcacaggggggacaggaaatcagcggccatggcctcgattccggcgacgaccttcggcggcatcttattcggcctcttctgtgccgcgggtggtgccgccgttgacaacgaactttccgagtacgttattcaa

SEQ ID NO: 131071 - DNA, 267 bp, Zea mays
  unsure (1)..(267): unsure at all n locations
  Clone ID: MRT4577_51020C.1
ctttataaatttctttgccgnaaacaacattttggggggtttttttgagggttttcccgtttttttccccagaacagcaagtacattccctcaatttgccgcttgcgttccaggcaccccgccaaaaacgaacggagaaggtttccaacgggatcaagccgagcaccatagcggctgctggctgtctatgctccgtactaactatatcacatgaaagaaatgggggtcagatccgtttcacagagcggggcccattcaccaattata

SEQ ID NO: 131072 - DNA, 685 bp, Zea mays
  Clone ID: MRT4577_51021C.1
atacctcctttctttattcgccgccacccgccatccaggctcctcccatggccacgacgcacctgagtttcgccctcgcggcgcaccccgcacgtcctcctcctcatcttcggacccggcagcatgcgctcctccagtcgcgctgccataggtacgcggcggcgtggaaacgctatgctggaccgcgcgccatgcgctcgcgctcctacttcgactagggcgggcgcatggaaaaggatgtggccacagtcgaggccacggtcgtggtaccagggcggcaactggatacgcgggtggccacgctcgtcaggatgctcatctccaagggcagggcctgcatccacctgctggcactgcatgccccctcatatcaatttgtgcttgctacaattagttcccaagtcttgttcgtgtattctctcctgcgaatcatgctgactacagctatagaaagtcacttttcccagtccagagtttcaattttgactatcttctgaaagcaattttcccatttcgcctgatgtagactaattgctgatatgttaccatcatatctagaaaaaaatgaatcttctccacaaaggaacatatctgaaaaatgaactaataaattaagttgtcatgtgatctgatattatatctttatttatcttatactactaaatctttgtgcaggaagatactc

SEQ ID NO: 131073 - DNA, 708 bp, Zea mays
  Clone ID: MRT4577_51022C.1
gatccccccggctgcaggaattcggcacgaggcaagggcagggcctgcatccacctgctggcactgcatgccccctcatatcaatttgtgtttgctacaattagttcccaagtcttgttcgtgtattctctcctgcgaatcatgctgactacagctatagaaagtcacttttcccagtccagagtttcaattttgactatcttctgaaagcaattttcccatttcgcctgatgtagactaattgctgatatgttaccgacgatcattaggcttaataatattgattaattaattctaagcttttccgcaaaacatcatatctagaaaaaaaatgaatcttctccacaaaggaacatatctgaaaaatgaactaataaattaagttgtcatgtgatctgatattatatctttatttatcttatactactaaatctttgtgcaggaagatactcggagcggtgccaaattctgcacatcacacatcaatgagatggactcagactgattctctcctcttgctcttctatctcagatgagagctcccacccctttgtgtaatgagtgtctgtttttttttgtctctgtatgctcctacaagcaaagggtcaaatttccagcaatatttggcattacaataggtgggtcattgtgacaattacgcatgaagggaatttatttattctacttatagcagattgaattgagagc

SEQ ID NO: 131074 - DNA, 487 bp, Zea mays
  unsure (1)..(487): unsure at all n locations
  Clone ID: MRT4577_51023C.1
gtattgcacaaagcgacggacgatgggggatagttaaagctgcatctcttgtcttgtgaaacgataaaaaaattccctttttttactctttttttaagacaaccatgtcatataatcgtgggggggggggctgcaactgcaactgaagctggttgctttggcatgttgcttgttctggtaccacccgccgacgcggtctcctcctcctcctcctctgtcgccacggtggacgtgggcgacgaccccgccgagggcggccagcgccgcctcctcatcgtggtcaccaccacgcggtcggcgcccggggcccggcgcctttttcttttttagctgctgcccctggcccacacactgagcctcgngggcccgcccgtcgtttggaccgtcgtttagcccgccgccgacgcgcccgccaccgctgaggtgctccgcggcaccggcgtcatgtacaggcacctctccttcaggcccgtaggcaaccttaccg

SEQ ID NO: 131075 - DNA, 752 bp, Zea mays
  Clone ID: MRT4577_51024C.1
cccacgcgtccgcccacgctttcgcccacgcgtccgcccacactccgacgggcgattgggtccctcgaggccggccggggtccagtcccttttgctcgcgcacgcgctcgtctctccaagcctcgaaccgcatctccggcggcctagtggaacgcgaagatggcgacggcgctcggcctcggtgcgcgctccggcctccgactcctgtccgcaggcgccgaggccgcctcagcaacgtcttctcgtgcattccattctactggcacaaggaggatgggggcgcacgctcatgatgagccatactacgtccacgccaagcacatgtacaacctgcacaggatgaagcaccagcagcttaaggtgtgcctcgctgtgctggctgcggtgggcactggcattggagtccctgtgtatgctgttgttttccagcagaagaagactgcatctgcataatctgaaacgccgaggcggcacgacatgaaaacatgcctgcccgtgaaatttcttttcccatttcccacatagcattttgagaggttcaggctggagcttcagttttgcttggccatttctctctctatatatttttttctctcttgctgcaggtttactctgctcattggattttgacataggaataccgatgtctgttaataatacgatgtcttgaactgacagaaagcatatgctgttatcctttctaaaaaaaaaaaaaaaaaatttgcggccggcttgcgcccgcacgttacacc

SEQ ID NO: 131076 - DNA, 440 bp, Zea mays
  Clone ID: MRT4577_51025C.1
gtcgacctacgcgttcggttgcgagggcagaggcgccgctggcctgtgcatgggctggtgcggtagctggggcgctggtgctgctagacacatgcgcgacgatggcatgaaacgcaaaacgaaccaagctcttctactaaaccaaacaacagcagttgcagacaaaagacagaaagctggtggctggatgttttgtggcaatccaggtgagtgcgattgaacattactccgccagatcatacatgaaggcgatctacgagaatgtacaatacaccgggcgtgttcaggatgagggaggctaatgcaccgcgcactgtgatccgaactggtcacgggatgtacctactatttgagaccacgcagcaatttggtgcattcttgagacccctctttatcacaaggtgcgccgctaacacggataagttgaaacggcgttgctt

SEQ ID NO: 131077 - DNA, 332 bp, Zea mays
  unsure (1)..(332): unsure at all n locations
  Clone ID: MRT4577_51026C.1
ccggaccggaaaaccctggttcacccacgcgcccgataataacccccccacgccacaccccacncggccgtgcacataaaaaaacaccgggggtaaaaaacacaaaccaacgcaccgacaccacccggagaccggagcgaccacccaccggcgcgaaaacagagggcggacgcccgaaggcggatgagaaacaagcacaaaagaaagaagacgaggaatcaaacacaggccctaaagccagaccaaaccaggacgggaaaaaacaacacccaggcacccatcaaaacgccgaaacaacaacaaacgacaaggccgagcccgaccaaaagaac

SEQ ID NO: 131078 - DNA, 174 bp, Zea mays
  Clone ID: MRT4577_51027C.1
ccggccgggaagagtccccactagatgtgaaggacgcagctgcctgcacagggcggcgacgaatgtatctgctgtacgtaacggtaactatggttccggtgattcacgatgctggacctgttctccctggtcttcgacgtggacgctcctgactggcactcgcacctccaaggc

SEQ ID NO: 131079 - DNA, 342 bp, Zea mays
  Clone ID: MRT4577_51029C.1
ggggcgaccccagtcagtcgggactacccgctgagtttaagcatataaataagcggaggagaagaaacttacgaggattcccctagtaacggcgaccgcaagactgacaaccaggcctagcgagtgtgacgacggatctgaccgcccgattggtcggttctgaaccctgcctagtgtactccaaatgtgtgatccgtgcaacccgtacaagttcgatgcaacatttgttcattccttgtgtcgaacatgtgggaaaaaagggaaatatatgagcattttttgtattttttggccagttgtagctgttactaccacataaacagtaagcaaaatcgttcgcag

SEQ ID NO: 131080 - DNA, 374 bp, Zea mays
  unsure (1)..(374): unsure at all n locations
  Clone ID: MRT4577_5102C.1
tcgtcaccgggggcatcacacaacacctccggacctcccctcccggtcgacgcctcgacggtccgctcccttccaaaaacccacagcccgcttcgacgcttccttccaaaacccacaggccgcttcggcgcttcctcacaaaaacctaccacctggcacttttacttcaccacacacccacacccccgngccatgggctnttcttccccgaccttccttttcttcccccaccttattcattttcggcttcaacccctacccagcgtnccgccggttcaccttactacccttccctttctgcgcttccttccggttcaccttcactcggttcggcttaaccgaccccaccttccttccctaccggttggcttttt

SEQ ID NO: 131081 - DNA, 1290 bp, Zea mays
  Clone ID: MRT4577_51030C.1
atgtcgagaggatccgccaagagggagatggaaaccggtgagaaggccacaaggcacgagaaggctccattaagggagtctggcaccaaggtgaaggagggatcctctcctcgcatcatgttgcatcggagtggcgacaagaagaaaaagatgaagaaagtggtctactatgagaccgactcttcgtcgccctccacatctggctccgatgcggcctgcgtcacttctaagtgccatgagcgcaagaagtatagtaagatgccacttcgttatccccgtatttctaagcgcgctcctttacttttcattccattaggcaaaccaccatattttgatggtgaggattattgtatgtggagtgataaaatgaggtatcacctaacctcactccacacaagcatatgggacattgttgaatttggagcgcaggaggtaattggaaagtttgtgagatttgaactaatgatcaaagactccaaacacatcgtcaacttggagcaaggcgccacctcaacacccgaggtgcaacccgtcgcattcaaagcgacggaggaaaagaaagaagagtctacatcaagtaggctccccatcgacgcctccaagctcgacaatgaggagatgacgctcatcatcaagagcttccatcaaatcctcaagcaaaggagggggaaggactataaaccccgctccaaaagggtgtgctacaaatgtggtaagcacaatcattttattgctaaatgtccaatgtccagtgatagtgacagcggcgacgacaagagggggaagaaggaggagaagaagtactacaagaggaagggcaatgatgcccacgatgccgccaatatcgccgtcaacaagggactcctcttccccaacgtcagccacaagtgcttcatggcaaaggacgacaaaaagaagaacgtacaaactagaaccacccccaagtatactacatctagtcatgagggtagttctagtgaagatgaagatgacttacttacactttttgccaaccttaacatgcaacaaaaggaaaaattaaatgaattgataggagccattcatgaaaaggatgaactcttggatagccaagaggaattccttgttaaagaaaacaaaaagcatgttaaagtaaaaaatgcttatgctcaagaagtagagaaaaatgaaaatttgactaaggacattagcatgtgccatgattcaattaccaatcttagaaatgaaaatgctagtttaaatgctaagattgacaaattgaatgaatcaatttctagccttagaacttaa

SEQ ID NO: 131082 - DNA, 147 bp, Zea mays
  Clone ID: MRT4577_51031C.1
gatgttaagcctgctgttttatttcatcggtgggggagacaaattgaattagccctcatccatgaacacacaagttcgggccataatgccccggacgctaccaactattaaaaacacacatgatggctgctacaggcacacaataac

SEQ ID NO: 131083 - DNA, 515 bp, Zea mays
  unsure (1)..(515): unsure at all n locations
  Clone ID: MRT4577_51032C.1
tcggcctacccgaatcaaagctcgagntcatgcccgatagcaaagggggggaaaatggctccgcttctcgctgatgccatgaaccacgttgcagcccatcctgtccttatgagccacctattatgaaccaactacgagagtgttctcacggtcacgacctgccggcttcttctccagagagcagcaagcgaaagttgtatcttagctttactagacaatctgccatactatgcagccaaaatggagtcctgatgttgagcccctcggaaatcccacaaagggactggttcccctctgagttcatcttcggtgtccgcacttcagtgtaccaaattgtaggtgtttgtcatgaagatggcaagggggaaagccactgggatcacgtctggcacaatcatccggtaaggatactggacgggagacattctcacattggagcgaattcggaacatatgtacaatacggacgtcaaattgcttaccgaaatgcgtatgggacccatatagggcccccta

SEQ ID NO: 131084 - DNA, 299 bp, Zea mays
  Clone ID: MRT4577_51033C.1
aagaaaccggaaaaattttttgggaaccacggtttttttcgggtttttgacccgtacttgttgaaaacaacaagggggtgcttagaagataaaagatgccgtaacaaaagggtccaggggtttgaccgttcgggagaaactattttatccacattttggggggaactgggtcagcatttacaatgggtaataataaaacccccctttttacaaggttgggccaaaaattatgcggctcccttgggtattttttaagggttaggtgaagcttttgtatattggacaaccaattttttttt

SEQ ID NO: 131085 - DNA, 839 bp, Zea mays
  Clone ID: MRT4577_51034C.1
gggtacctcgaggccggccgggagcgcacacgcagatcagcgtcgaaatccgtcgcatcgtgcccgcctcgctgtctccgctgggcgctggtggtcatggcccgcagggcgctggagctcgcggcggttctgctcgcgctggcggcgctggcggccgtggcggccggaggggacatcgtgcaccaggacgacgaggcgcccaagatccccggctgctccaacgacttcgtgctggtaaaagtgcagacctggatcaacaaaaaagataaagatgagtttgttggtgttggtgctcgatttggccccaagatagagtcaaaggaaaagcatgccaactggacaaacttgctgttagcagacccttctgattgctgcacccctccaagagagaaggttgctggagatattttgttagtggagaggggaaactgtaagttcactacaaaagctaaggtggctgaatctgctggtgcttctgcgattataattatcaatgataagcacgagttatacaagatggtatgtgagaccaatgaaacaaatttagatattggcatacatgctgttcttctgccaaaagatgcaggctcttctttacaaaggtctctctctagtggtgaagttggtaccattctttgtgcatcatactggtcagcatggagtgcccgagaagcagatattgaacaagagaagcttctgaaggatggtcgtgaagtagcaccaaactttgagcctggaggttctagtggtatggtagatatcaacatggtatcggcaatactggttttgtggtgattgcatcatgcttcttgatacactctacagctgatgtcccattg

SEQ ID NO: 131086 - DNA, 2726 bp, Zea mays
  Clone ID: MRT4577_51035C.1
gggggcacgtggtctgtgcttgcacagcatacgctcccgccgataagaccattgcttggttccgccccgagaaaacggacgcccacaacgaaagcggagggaaaagcgagggaggcagccttctattttctgtcaaaacaagggcgatactcctcctactccagcgcacacgcagatcagcgtcgaaatccgtcgcatcgtgcccgcctcgctgtctccgctgggcgctggtggtcatggcccgcagggcgctggagctcgcggcggttctgctcgcgctggcggcgctggcggccgtggcggccggaggggacatcgtgcaccaggacgacgaggcgcccaagatccccggctgctccaacgacttcgtgctggtaaaagtgcagacctggatcaacaaaaaagataaagatgagtttgttggtgttggtgctcgatttggccccaagatagagtcaaaggaaaagcatgccaactggacaaacttgctgttagcagacccttctgattgctgcacccctccaagagagaaggttgctggagatattttgttagtggagaggggaaactgtaagttcactacaaaagctaaggtggctgaatctgctggtgcttctgcgattataattatcaatgataagcacgagttatacaagatggtatgtgagaccaatgaaacaaatttagatattggcatacatgctgttcttctgccaaaagatgcaggctcttctttacaaaggtctctctctagtggtgaagtcttagtggagctgtactctccagatcgtcctctggttgatactgcagaggtgtttctgtggcttatggcagttggtaccattctttgtgcatcatactggtcagcatggagtgcccgagaagcagatattgaacaagagaagcttctgaaggatggtcgtgaagtagtaccgaactttgaggccggaggttctagtggcatggtagatatcaatgtggcatcagcgataatgtttgtggtggttgcgtcatgcttcttaataatgctctacaagctgatgtcttattggtttgtggagctactggtggttatcttttgcataggcggtgtggagggtctacaaacatgcttggtggccttactgttaatgtcaagacggtttaaacctgctgcagaatcgtatgtgaaagtgccgtttcttggagccgtttcgtatcttactctggcagtttgcccattttgcgttgcatttgctgttgtgtggggtgtttttcgccagctcccctttgcttggattgggcaagatattcttggtattgccttgatagttacagtcatccaaattgtgagaatacctaacctcaaggtgggttcggctcttctcggctgtgccttcctgtatgatatcttctgggtgtttatctccaagagatggtttcatgagagcgtgatgattgtggttgcacgtggcgacaagactgatgaggatggtgtgcccatgctgctaaaaatcccgcggatgtttgatccatggggtggatacagcatcattggctttggtgatatccttcttcctggtcttttggttgctttctcattaaggtatgattgggctgcaaagaagaccttgcaatctggctactttttgtggtcaatggtggcatatggctctggacttctaattacatacgttgcgttgaaccttatggatgggcatggccagccggctctcctttacatcgtgcctttcacaatcggcaccttcttagcactgggcatgaagagaggcgagctcagaaacctgtggacaaaaggacagcccgagagagtgtgcacgcacatgcacccatcccccaaggattcgcctgttgcggtcagctcgctgtcgtagacaaggctaacgaccttacctgatgttgcctggccccggagaatgttgctgatgaccaaaaaaagtttccagggttaatgaaggagtctactgatttgtaatgaaccttacatagggataagccaagatcccctgatcgtgatcctcgttgtacagtaggtggtgtatttgtatagtgagtgatgactattgagatgtgcggctgacactggataaaaaaggcgcaggagcttgatgtgggagcagcactgcatctgcatcatgtggctggtgtatggttttgaatgatctctgccgcctcattcttgttcttgcctgctggtcttatgcacaccaaacgctgctggttttgtcgctgctgccgacgaccccaaactaaccccagggtcagtagaaaatcagcaagggttcctagcttttgcaaaatattgtatttgcctgctggtaatatgcaaaccaaatcatgccagtttaaaaggaggcactgcttcttggagacagcaaagtctgattgtgagctaactgctgcccaatgtgcagccatgcatgtatgtaacagcccaacaataaattgagcctgtcgaacagaaatgtatgagccgtgcatagcagcagcataaaaatactctccattcttttttaatttttttatttgtcgttttttgaaacaataggcgacaaatattcaagaacggaggtagtattgtatcaatatgcaaaccaaatcatgccagtttaaaaggaggcactgcttcttggagacagcaaagtctgattttgagctaactgctgcccaatgtgcagccatgcatgtatgtaacagcacaacaataaattgagcctgtcgaacag

SEQ ID NO: 131087 - DNA, 571 bp, Zea mays
  unsure (1)..(571): unsure at all n locations
  Clone ID: MRT4577_51036C.1
cggccgctcaggcggcgggcgggatanactcactagtagtcgcattggctcatactcgcagacacagtcctggtccccgttgagccaccgcgagcgccaatggcggcggccgtgctgctggccgccatcctggcgctgtccccgctccccctctccctcgcgtccccctctgcggcggcggcggccgaccgcatcacgcgcctgccgggccagccgccggtcaacttctccatgtactcgggctacgtcaccgacgacgccgccgcgggccgcgccctcttctactggctcatcgaggccgccgtcgagaagcccgagaccgccccgctcgtgctctggctcaacggcgggcccggctgctcctccgtcggctacggagcctccgaggagctcggcgccttccggatcaacgccgacggcaggacgctctccatcaacccctactcctggaacaaaatgtcgaacgtgttgttcctggacgcccccgccggcgacggagactccctactccaactccagctccgatctgctcgcccctggagacaacaagacatctcatgattcgtacact

SEQ ID NO: 131088 - DNA, 2148 bp, Zea mays
  Clone ID: MRT4577_51037C.1
tcgtgacaaacagttaatttttcgagtgaacaaagagacgggggcacagtagtagaccgcggaatccggtctgacgcaaaagaaaggaagcaagtcaacacaacgccccaccaccccgaatcccaaacggaggagggcactcggcgaggcaggtggcgattctgcgattctcctgtcaccttccgtcgtctccatccccttccatttccggcgagggtcaaagcaggcctcttgctcttgggggtggtttgagagagggagagaacatggccgcggcggcggtgttggtggtgctcacggtgtcagcgctggcgggggcagcggccggcggtgatatcgtccaccacgatgacgaggcacccaagatccctggatgctccaacgattttatcctggtaaaagtgcaaagctgggtcaatggcaaagagggtggcgagtttgttggcgtcggtgctcggtttggtccaaaaatcgtctccaaggagaagcacgcaaaccgaactaaactcacgctggcagaccctatggactgctgctctcctccgaaacataaggttcctggagatgttcttttagttcaaaggggaaagtgcaaattcacaaagaaagcaaagtttgctgaagctgctggtgcttctgctatagtaatcataaaccatgtccacgaattgtacaagatggtctgcgaaaagaatgaaaccgaccttgacataaatatacctgcagttctcctaccaaaagatgcaggttctgctttacatacacttcttacaaatggtaacacagtttctgtgcagctttactctccagatcgacctgtagttgacactgcagaggtgtttctatggcttatggctgttggcacagtacttggtgcttcctactggtcagcatggagtgctagagaagcagttattgaacaagagaagctcctcaaggatggccatgaagacctactgaatgttgaggccagaggttctagtggcatggtagatatcaatgtggcatcagcgataatgtttgtggtggttgcgtcatgcttcttaataatgctttacaaactgatgtcttactggtttgtggagctactggtggtaatcttctgcattggcggtgtagagggtctacaaacatgcttggtggctctgttatcaagatggtttaaacctgctgcagaatcttttgtgaaagtaccgttccttggagccgtttcgcatcttactctggcagtttgcccattttgcgttgcatttgctgttgtgtgggctgtttttcgccagctcccctttgcttggattgggcaagacattctgggtattgcattgatagttacagtcatccaaattgtgagagtacctaacctcaaggtgggttcggttcttctcggctgtgccttcctgtatgatatcttctgggtgtttatctccaagagatggtttcatgagagcgtgatgattgtggttgcgcgtggcgacaagaccgacgaggatggtgtgcccatgctgctaaaaatcccgcgaatgtttgatccatggggtggatacagcatcattggctttggtgatatccttcttcctggtcttttagttgctttctcgctaagatacgatttttctgcaaagaagggcttacggtctggttactttttgtgggcaatggtggcctatggctctggacttctaatcacatatgttgcgctgaacctgatggatgggcatggacaacctgcccttttgtacatcgtgcccttcactcttggcaccttgatcgcgcttggatggaagagaggggagctgcagaacctgtgggcgaggggagagccagagagagtgtgcacgcatatgcatatgccgctgctgccgacgaccccaaactaaccacagggtcagtagaaaatcagcaagggttcctagcttctgcaaaatattgtatttgcctgctggtaatatgcaaaccaaatcatgccagtttaaaaggaggcactgcttcttggagacagcaaagtctgattgtgagctaactgctgcccaatgtgcagccatgcatgtatgtaacagcacaacaataaattgagcctgtcgaacagaaatgtatgagccgtgcatagcagcagcataaaaataatctccattcttttttaattttttt

SEQ ID NO: 131089 - DNA, 429 bp, Zea mays
  Clone ID: MRT4577_51038C.1
ctgcgtgtgttcttttgtccatggtcaaaggaaaaataccattcgaaaaaaattcctcgacctcaaagagggagaacaaacagccttgcgccaaagaaatcatcaggaattggtattgaacttgctctgaaggactaacacctgcaaacctgttttattacggggacaagatccagaccatttgctctcacctaatacgcaccctacctgtgctgcattggacgtggggaccgactgcttgatatttatctccttccccggggagcatacatcttcctggacttatggcacagtgacggtgagacattacaaaaggtcataacaacgtggacatgataatattgcgcatcctgaaacgcaaataccacgagtgctatgtcacataaaattgcgcctaaggatcggtacccagattgaacttcaccccaa

SEQ ID NO: 131090 - DNA, 619 bp, Zea mays
  unsure (1)..(619): unsure at all n locations
  Clone ID: MRT4577_51039C.1
gggccaaaaaaaatctgaatttgtatttgcctttttttctcatctgtacactggtcagtgctataaaacctctcatccgaaatgatttacaaatgtgcaaatgaatgaagaaattagatatgaactaaacggtacacctaaactactacattcatctcttcttgagtaaaatcattgcagcaaatgccaccatcctgaagaagagaccatacatgaacaaaatcagaatgcagagcttgtagttgtggatatcaaactgattctggaacagcaggccgcagcgagttataagccagactccaggatacttcttggcatttacaattatgaagacaaaaaaaaagaacccccccccccccccccttttttgtttgaacaaacaccttttttttattagtaaagggggggcgtttttttttttttatggtgggggggggaaaaaaacaaccaccccccgcgggaaaaaaaaaaaaaaattttaatttttcttcttaaagagaaaaaaaaaaaaaaaaaaaaaaaaaaaaatatcttttttcccccccaccacacaccacagaaaaagaagggggggggggggggggggggggggggnnnnnggnttttttttttttttttt

SEQ ID NO: 131091 - DNA, 501 bp, Zea mays
  Clone ID: MRT4577_5103C.1
gacgcaataacaataaatgtccatataaaataaaacaaggtttacactgtatttatagataatgtttacacacacaatgcacttatatataaataggatctaagactgaaaagctacaatattaatttagaaatgaagttggtacgacatagagggtgaaattcgaaattatacatggcgcgcacctcctgcagtcgggaagaaggccagtcatcgatctcaggtggtcaccgaggatgcaatggcaagtgcaggtacgtagctctgtcaaaatcacgagcacgcaatgcacacggtgcattttctcatgttttatcagtaggcgaaattttggttggtggcgaaggtcatgccgaactgccaccacccgggcacgacgtagaggaactgaaggtactggccgccggtggtggtgacggcgaagctgaggccctggccgacgaggccagacagcgcctgccagttggcgccccatttcctggacatctggacccaccccgc

SEQ ID NO: 131092 - DNA, 263 bp, Zea mays
  Clone ID: MRT4577_51040C.1
ctaccgcctccgttctatatgccgtctgcgttgtatctgccgtcgcagcagtagtcgcatccatggctataccccactcaaccaccgtagctaagcccgtgccagcagttcggatcctgcggcttcagcagggtgggcagcccgttactgggccagtgcgtagagttcttgaggcaccattgcagcccggcagcgacgccctacagctcgccacattgccaggtgctgcagcagcagtgctgccaccagatcaggcaggtgga

SEQ ID NO: 131093 - DNA, 291 bp, Zea mays
  Clone ID: MRT4577_51041C.1
aatcaaaagcacactttacgcaaccttaaatcttatgactaccattcgctttaggtacttagatctatccctaaatatatgtagggatttttccctgttacagcggcattcatgtatgtatggagttttctatatatgattgttgggcctaataagtgaatttactgaagcaatattttcttttgttttttttcaatttaaggttttgattatctgcatagctgtattatacatttcactcctacatgcaagaactaatagcagacactactattaaaactgaacatgtag

SEQ ID NO: 131094 - DNA, 439 bp, Zea mays
  unsure (1)..(439): unsure at all n locations
  Clone ID: MRT4577_51042C.1
cagnnccaggcnaggcctgagccgcggaannccganccccccaccaagggcncgccccgancccaaggacgcgggccncncgnccnccgagggggcaacncancccanccggctncnaaagccgcggccaaggggggcaannccgggggcaggcggcagggannccggcgccaacagcgncggcgagncggggggcgagncgccggggcccgcgccggcgccncagacacggccagccgaaccggncacaaagggccgcgggctccgtcggcgccgccgcaccccgcgcgagcagcaccacgaggggnccccggcgagccccgggcccggcaacagggccggggctagcgcgggcgaggactcggcagcgcagctccacaagcgccgacacgggcctgccgacgacaagcccaagggaaagcaggacccgcccgcagag

SEQ ID NO: 131095 - DNA, 308 bp, Zea mays
  Clone ID: MRT4577_51043C.1
aatagcgcccactcaaaccctaccctgcccgcccgttccctctcgtccctcgcggcccccgcccccgcccccgcccttccgcagccggactaataaaccctagccccaccgccgccgccatggcgggcccgtccggcgcttcttcctcctcgcgcggagccggcgtcgtcgtcgaccgcttctacagcccgccccacgtgcgccgccagcattaggaggagcagctgcaggggctccagggcctggtcctagggtagtgtccgtcgtccccagcgggggggacgctcaggccccggggttgccccccc

SEQ ID NO: 131096 - DNA, 347 bp, Zea mays
  Clone ID: MRT4577_51044C.1
acggtcgcttccagccgccggcgagttcgtctcgacaagcgcagaagacgccggagcacatctgtcttttgatctagggcatggtgaggtggggccaaaacaggacacacggacactgtttaaccggtggaccttcaatgatttccaagggaaccacatctggatgaacgactacctggatgtgaacgcgacgaaacacgcaatgtagctgtcgcacaccgacgcgcgcttcttcaaaaaggggatacgcaaggctcaatgccccgatcgtgagggtggtacaaactgaggtacgaggcgggggcgcatcaacgatcgcactagtatagatgtccggctcatgtatc

SEQ ID NO: 131097 - DNA, 402 bp, Zea mays
  unsure (1)..(402): unsure at all n locations
  Clone ID: MRT4577_51045C.1
ttccccctgcacccacgcatccttccataattctttacctttaaccaacctcttgcctcccttctctttggtacnacgatatcttgcacacagcgggaaggtgttcctnttcccccnctcttatcaactccaccacntaaccgtaccttatcccacaccatctcaggctttctcattctttttttttcangcgataccaaaacaaatatcagcttcaccataatgaaaaaattttaattctcctggatttcatataatactaacctttcatctacagcaattctcaccattcttcatcacatcaagccattgacttccacctatactttttcctttaccccattgtacattgacaatacccgtactcgattcaatatatttccaaaaacaggctaccttttt

SEQ ID NO: 131098 - DNA, 178 bp, Zea mays
  Clone ID: MRT4577_51046C.1
cttggtttctgatctgaagactttgcctaactcggaatgatcttgtgtttaggaatatatatgaatatctccgtcggggttggaagtttaatgaataattgaagtcatgtattgcatatggtgctgattgaagtcaaggctaatcatacccttgtgcaggctaggagttggtctgatg

SEQ ID NO: 131099 - DNA, 655 bp, Zea mays
  Clone ID: MRT4577_51047C.1
gtcacctcccttcagacgacggaaccctagcctgctccccactcccccaccagaccaccacctcgccggaaccccggcgcctcgcccggagcacgtggttatcgccccccgtcggccgcggctgcggtgtagcggagaaagatgatgaacggcggcggcggccagaagaggcggaactcgaaaatcattccctacgagtaccgcgttgagtccgaccccaagttcttcgacaagtcgtggcggaagctccatgatgccatccgtgagatctacaaccacaactccatgagcctctccttcgaggagctctacaggttaacattgcgcgcccgcctccggttccccgacttttcggttgccgccctgttccatgcgcttaggtcgcgctgtatgatcgcggatgattcggatagatagcggccatgaatggactgattgctgtgctgattgctgatatgtaattttccattttttaatttatagtcgatcctcctgtgggcttgtatgcatcttagatgatgacatgcgaatgtttgtgaatagattgatcttgattcatatgtcttattattagtgtagtagggcttatcctgtaaccataatttgtcaacatgatattatgatcttttatgttggtgcaaaaaaaaaaaaaaaa

SEQ ID NO: 131100 - DNA, 284 bp, Zea mays
  unsure (1)..(284): unsure at all n locations
  Clone ID: MRT4577_51048C.1
accgggnccgagcccacgccgtcccgcgagacgagttctctttgataaccttagnccaattatagtatccatcccactcctngnngccagccggtntaaccggcnncctatcngttcatacgctgtgtgcgtcgttggaccttcgttgacctctttactggaaaagatanntgcccctcactttcccgtttacacgtganntggaacgtctccaaaccacgtctcttactgnnatggccagcccacgtcttcaactactcgtnngcttcacgtttaaaaaagaa

SEQ ID NO: 131101 - DNA, 411 bp, Zea mays
  Clone ID: MRT4577_51049C.1
ttattttttttttttttttttaccgagcccgacctttacacgggggtgggttttttttttttaaaaagaacccgccctgttttttaaaaaaagcaacggtggggtaaacattttcccatatccacaacccctccaccgccggcgggaagaagaaacccccgaaggaacctctcggtttccgccgataaatttttgtaaaacccgaattttttttatagcttggggaggtttttatcccccccaaaacggggaaaacgcaggattaaaaagggtccgaaagggttttttcgttaaagggaaaccttcttggcccaaggggcgggccccctggttttttaaagacaacagggaaccttttttttcgggggaagaccacctttgggccgggcccctccttccattcttaccccc

SEQ ID NO: 131102 - DNA, 222 bp, Zea mays
  Clone ID: MRT4577_5104C.1
gcacttgcaagaaaggtacgggctgcacgaaatgggaacgatactgagactagtccacagccttgcgcgtgccccatgggctgacgcatcatttctccccctctgaattaccatgcatattctatgccacggaggatgagggacacttggcatagaggtataactgacctagatgggccatcgaacgactacaaggtgaccgggccacttgcgacttattga

SEQ ID NO: 131103 - DNA, 213 bp, Zea mays
  Clone ID: MRT4577_51050C.1
atcctctgagcggcgcctttttattttttttttttttaacccctaaattggtggttttggagaaaaattttataccctcaaattagggtgttcaccgcgaacatatatagctgggggatgttgtcgtttactgggggcgtaccaatggatagcattaatgggcatcaaggaccagagaaaatttttactgagagatgggttagtcatggaggg

SEQ ID NO: 131104 - DNA, 448 bp, Zea mays
  Clone ID: MRT4577_51051C.1
tcctacgcgtccgagatcgcgagcggccagcggtttttttatatttttgggggtgttacacccctctccgcgctattgaagatcaacatagggggctccttttggcgggagacaaaaaggaagggcccgggccctgaacaaagggattcatccactgatgaccatccatgcctgtgggcttaattcccactcgccgcttacaataggctgcccttgacatttattggaaggcccccatgggccatgaacatccgccggcgggggaaactactacacccctactatctgaacaagttaaggacctggaagaccaccctgtgtacttgacgaacgggccaacaaatgggtggtcctggtgggagcacccatgtacggggttgccaaccaagttaattaccggagacaaagttcacggcgtatgcccactcttttttggcgacggtgcccg

SEQ ID NO: 131105 - DNA, 307 bp, Zea mays
  Clone ID: MRT4577_51052C.1
ttttgcctttgccgcccaagtcctgggggaaccaggcggtgaccgcgggcgaggggcacgcggggcccctgactaccaccttcctctcgccgcgccgcatcgtcgccaccggccacgcgccgaacgcgctgattcccctgagctcgtcgaagaagcggagatcgaacacgtcgccgaggcccgcgaagaggacgacgccggcgaggcggtggtgctcgatgtgttctagcgccacgttgcgctggtggtgccggtccctgcccgctgctgtttcagcgtatgtgaagttgttcttgtaggttaggtg

SEQ ID NO: 131106 - DNA, 330 bp, Zea mays
  Clone ID: MRT4577_51053C.1
acacccttccgcgacacccttgggggccggttcgcggcgaaaatccggaacccgccaaaccccccccgcgttgggttcgtaaccttgaattcgggggaggccgagaaccccccttacaactgggccgcccggcccttgaacggcccgttggcaagaacaaatttcccggggttggcaacaacttccggccgtccggggccaacatgcaattccggttcaaccgtcaagtcttcaagggaccccggacccggggacccaaaggcaagggcgggccattgtggccgtcataattcaaaaccctatattccccaacggaaggggcggcaaaca

SEQ ID NO: 131107 - DNA, 270 bp, Zea mays
  Clone ID: MRT4577_51054C.1
gtggagcgcggcggcgacgtggcgctcatcgacgacctgttcgacgaggtggtggagggcaggaagaagctgctggacctctgcagcggcggcaaatgatcgaaggagagactgactaacgcgcacgcgatgagctgcttcgccgttcgcgatgtgcaatggcgatagatagggccagccatgtgtggctctttacgtactgcttgtgttcttccttcctcctcgaatgtgtggctctcgatcgatatttgccgtggcaggcagtgctcg

SEQ ID NO: 131108 - DNA, 902 bp, Zea mays
  Clone ID: MRT4577_51055C.1
agcgaataactattcgtttgcttttcgtcttcgtcctctctttgcccagttgtcggtcgcccgcgccgtcgtctccgctccgccggccttcctgcgaaaccctagcgaggcgagcgagagagaaactagcggccatgttcggctacaggaaggctgacccggacctcgaggccggcgggtcctcgctgctgtacccgggaatgacggagagccccgtctccaacttcttcgtctcctccaacgccggggtcgcactctacatcttcctcatcatcctgcctttcctcgtgctgtgccctctgcgctactaccaccagaagcatccggtcaatctgctgctgctcggcctcttcaccgtcgccatcagctttgccgtcggcatgacatgcgctttcactagcggaaaaatcattttggaggctgccattcttacagcagtggtggtgatcagcttaactgcgtacactttctgggctgcaaagaggggtcatgatttcaacttcctcggtcccttcctatttgctgctatcatggtgctcatggtgttttcactaatccagatctttttcccgctgggtaagatatctgtgatgatatacggtgggttggcatcgcttatcttctgtggatacatcatctatgacacggacaatgtcatcaagcgctacacctacgatgaatacatatgggctgctgtttcactctacctcgacgtcatcaacctgttcctgtctctgctgcagctgctgagggcagccgatagctgagctcgtcaagctttcacttggatcttgttctcacatacatttgtgtatatcacaaactctgtaatggtcatggatactccaatttataactatactctgtcggtgttaaaaaaaaaaaaaaaaggcggccgccct

SEQ ID NO: 131109 - DNA, 262 bp, Zea mays
  Clone ID: MRT4577_51056C.1
tcgattttcttggtttcacgatcaagaatgtctgaggtcacagatccgtgcctacttcaaggactaacagaggcaggccacacaggatgctgctacgatggctggccttaatgtgctgcgaatcatcaacgagccaacagcttgtgatatgggctatgaactcagacaggaaggctaccactggcggtgagaagaacgttctgatttgcgaaccagggggtggtaccatcgatggctgcctcctaaccactgaggaaggaat

SEQ ID NO: 131110 - DNA, 1159 bp, Zea mays
  Clone ID: MRT4577_51057C.1
ctcgaggccggccgggccggggagggtggccccggcgcggccggggagtccgagccagcgaaccaactattcgtttgcttttcgtcttcgtcctctctttgcccagttgtcggtcgcccgcgccgtcgtctccgctccgccggcctgcctgcgaaaccctagcgaggcgagcgagagagaaactagcggccatgttcggctacaggaaggctgacccggacctcgaggccggcgggtcctcgctgctgtacccggggatgacggagagccccgagctgcggtgggcgttcgtccgcaagatctacgtcatcctagccgtccagctcgccatgacggccgcggtctccgccttcgtcgtcaaggtgcccgccgtctccaacttcttcgtctcctccaacgccggggtcgcactctacatcttcctcatcatcctgcctttcctcgtgctgtgccctctgcgctactaccaccagaagcatccggtcaatctgctgctgctcggcctcttcaccgtcgccatcagctttgccgtcggcatgacatgcgctttcactagcggaaaaatcattttggaggctgccattcttacagcagtggtggtgatcagcttaactgcgtacactttctgggctgcaaagaggggccatgacttcaacttcctcggtcccttcctatttgctgctatcatggtgctcatggtgttttcactaatccagatctttttcccgctgggtaagatatctgtgatgatatacggtggattggcatcgcttatcttctgtggatacatcatctatgacacagacaatgtcatcaagcgctacacatacgatcaatacatatgggcagctgtttcactctacctcgacgtcatcaacttgttcctgtctctgctgcagctgctgagggcagccgatagctgagctcattaatggagtgtttggtttgaggaatgatatagtccatcatcttctcactcacttttttgtttggtttgtggaatgaagtgagttaatccatcaccacctcattctcatagttagttgtttagtattaatatgtggaatagagtcatcccactaaatttgatgaatggacccatgatgcaccccttcattttggctaaaaaaaaaaaaaaaaaaaggcccctagggccctc

SEQ ID NO: 131111 - DNA, 2504 bp, Zea mays
  Clone ID: MRT4577_51058C.1
ccgggcgctgcggagtccgagccagcgcagcgaaccaactattcgtttgcttttcgtcttcgtcctctcttttgcgcccagttgtcggtcgcccgcgccgtcgtctccgccggccggtcgtcctgcgaaaccctagcgagccgagcgagagagaaactagcggccatgttcggctacaggaaggctgacccggacctcgaggccggcgggtcctcgctgctgtacccgggaatgacggagagccccgagctgcggtgggcgttcgtccgcaagatctacgtcatcctagccgtccagctcgccatgacggccgcggtctccgccttcgtcgtcaaggtgcccgccgtctccaacttcttcgtctcctccaacgccgggctcgcactctacatcttcctcatcatcctgcctttcctcgtgctgtgccctctgcgctactaccaccagaagcatccggtcaatctgctgctgctcggcctcttcaccgtcgctatcagctttgccgtcggcatgacatgcgctttcactagcggaaaaatcattttggaggctgccattcttacagcagtggtggtgatcagcttaactgcgtacactttctgggctgcaaagaggggccatgacttcaacttcctcggtcccttcctatttgctgctatcatggtgctcatggtgttttcactaatccagatctttttcccgctgggtaagatatctgtgatgatatacggtgggttggcatcgcttatcttctgtggatacatcatctatgacacggacaatgtcatcaagcgctacacctacgatgaatacatatgggctgctgtttcactctacctcgacgtcatcaacctgttcctgtctctgctgcagctgctgagggcagccgatagctgagctcgtcaagctttcacttggatcttgttctcacatacatttgtgtatatcacaaactctgtaatggtcatggatactccaatttataactatactctgtcggtgttaccttggttcaaatggtatgtctggctttaacggatacccaagagagttttaagagcgcggacgcgcggtcaatagctcagctgcttaacaaccgagcttggataaaaatcataagcggtgcagtaacagtacatctgtacatgtcttggtcaattatttgcaataagtctttatgatgttatgaaaaaaaaaaaaaaaaaacggcccctagggcctgttcgaacaatggtcatcaaagctttgatatggatgcaaaatccacatgaatcttttgaagagctaaaatctatcattgcatgcgagttgtctgacccagcctggccttcctcgctcctgaatgatgtcctactaaccttacatgctaggatcaaggcaacccctgatatggctgcgactctgcttgagattgcacgaatttttgacactaaagttcctggaaagattgatgctgctgatctacagttgttatggaagacatgccttgtacgagcaggaccagatgggaaacatacagccttggaagctgtaactatagttcttgatctgccaccacctcagcctggttcaatgtctggactcacttctgttgatatggtatctgcctctgatccaaaatctgcaatggcactccaaagattagttcaagctgctgtttggtttctaggagaaaatgctaattatgctgcatctgagtatgcctgggagtctgcaacaccacccggtactgcattaatgatgctagatgctgataaaatggttgctgctgcaagttcccgtaatcctacacttgctagcgctctgacaaggcttcaaaggtgtgcatttagtggaagctgggagatccgcattgctgctgtacaagccctaactaccattgcaataaggtctggtgaaccttatagactgcagatatatgaatttcttcatgcttgggctcttggaggtgtgcagtcaaacttttcagaattgcagctaagtaatggggaaaatcaaggtgccagtggtactggtcttggatctttaataagcccaatgcttaaggtcctagatgaaatgtatagaggccaagatgatcttgccagagatattcgccagcatgataacagcaaacaggaatggagtgatgaggaactcaagaaactttatgaaacccatgagaggcttcttgattttgtttccttattctgttttgttccaagggctaaatacttgccccttggtcctaccagtgccaagctaattgagatctaccgcaaccgtcataacataagtgcttctggtggtctaagtgatcctgctgttgccactggaatatctgatctcatgtatgagtccaaagaagtacataaagagaccaatactgtccagtctggtattgatcccgatctggcaatggcctgggcagcaggtttggaagacgatgtttgggcaaacaacgctccagctgtggataaagtaaaggacttccttgccggtgctggaactgatgctcctgatgt

SEQ ID NO: 131112 - DNA, 502 bp, Zea mays
  Clone ID: MRT4577_51059C.1
ggccgcttttttttttttttttttcacataaacttacatttatttagaaagtaagatcaagttacttattacagaccagagctataaacgagtgttgagtagtacacatttcaagggaggcaaaaactcctcccgatagctttaaacaaaagtcctatatggaggaccacgtcctcccgcatcttcactcttgtttttcttcatttgataccaccttggagcaaaagcaacaaaaatttgtcgcttcctcacctgagatgattatggaacaagcttcatataggccagcaactccctagaatgttctggctatggtgggtaaagaattgtgagcatggtcaccactggcacttgattctctggacagagcagacttggtggctgcgggagagggtcatcactagcagggatacaagaaccccaacacccatgcagtggtatgcgagtagagctcgaggtagagagtttttattctctctactatctgtcccggccgagcctc

SEQ ID NO: 131113 - DNA, 279 bp, Zea mays
  Clone ID: MRT4577_5105C.1
acctcgaggccggccgggccgcccccagctcgcttacgatattgcacgttcgtggcgcggagcaccgtggtgttggcctagtacgtcgatttcacggtgacttcaccaccattgccgcccagtggctgcagaagctccccgccagcaacaagttcacctacaactgcgacggccacaccttcagttacctcatagagaaaggatttagtgtgggattaatctggacttggataaatgaagtataatgcaagaaatgtggggcaaataatacccttggct

SEQ ID NO: 131114 - DNA, 1490 bp, Zea mays
  Clone ID: MRT4577_51060C.1
attgggtacctcgaggccggccgagtttcgtcttcgtcctctctttgcccagctgtcggtcgcccgcgccgtcgtctccgctccgccggccggcctgcgaaaccctagcgaggcgagcgagagagaaactagcggccatgttcggctacaggaaggctggcccggacctcgaggccggcgggtcctcgctgctgtacccggggatgacggagagccccgagctgcggtgggcgttcgtccgcaagatctacgtcatcctagccgtccagctcgccatgacggccgcggtctccgccttcgtcgtcaaggtgcccgccgtctccaacttcttcgtctcctccaacgccggggtcgcactctacatcttcctcatcatcctgcctttcctcggtaagcccggctctcccgtcttttgggggattttttccccgtgagctgaaattggttgcaaccttttgcgcgcagtgctgtgccctctgcgctactaccaccagaagcatccggtcaatctgctgctgctcggcctcttcaccgtcgccatcagctttgccgtcggcatgacatgcgctttcactagcggaaaaatcattttggaggctgccattcttacagcagtggtggtgatcagcttaactgcgtacactttctgggctgcaaagaggggccatgacttcaacttcctcggtcccttcctatttgctgctatcatggtgctcatggtgttttcactaatccagatctttttcccgctgggtaagatatctgtgatgatatacggtgggttggcatcgcttatcttctgtggatacatcatctatgacacggacaatgtcatcaagcgctacacctacgatgaatacatatgggctgctgtttcactctacctcgacgtcatcaacctgttcctgtctctgctgcagctgctgagggcagccgatagctgagctcgtcaagctttcacttggatcttgttctcacatacatttgtgtatatcacaaactctgtaatggtcatggatactccaatttataactatactctgttcggtgttaccttggttcaaatggtatgtctggctttaacggataaaaaaaaaaaaaaaaaagggcggccgccaccgcttaaggcaagacacaccagatgtcagcaaccttcagaaatgtgctgactttgtcgcaattccgtatgctcgtccaactaggggctttgtactctacttattatttgcaacaacaacaactaccattcagccagctacctgctgcctacccccagcaatttcttccattcaaccaactagcagcattgaactctcctgcttatttacagcagcaacaactactaccattcagccagctagctggtgtgagccctgctaccttcttgacacaaccacagttgttgccgttctaccagcacgttgcgcctaacgctggcaccctcttacaactgcaactattgctgccattcaaccaacttgctttgacaa

SEQ ID NO: 131115 - DNA, 622 bp, Zea mays
  Clone ID: MRT4577_51061C.1
gggataaagaaatgcggaagcttttacataaacttacatttatatagaatgtaagatcaagttacttattacagaccagaactaaaagcgagtgcagagtagtaatattttacaaaccaagggaggcacaaactcctcccgataagctataaacaaaagatcctatgtggaggaccgagtcctcccgcacttcagtcttgtttttccttatttggtaccaccttggagcaaaaacaacaaaaatttgtcgcttcctcacctttgttagtaggtgagtcaggctcggactcgcagatgtcgaagtagagacgagaccctgcctgagattccaaaggtggtgatgtcttttcttcagtcacttcaccctcttctccgttttctttgttagtaggtgagtcaggctcggactcgcagatgtcgaagtagagacaagtctctgcctgagattccaaaggtggtgatgtcttttcttcagtcacttcaccctcttctccgttttctgctggagttactctgctacagcaaggtgaagttccactgacccaaaccgaagggcactgatcaagggcaggtttcactgaatatatataggcaaaagggtccctattcttcggacgcgggg

SEQ ID NO: 131116 - DNA, 1366 bp, Zea mays
  Clone ID: MRT4577_51062C.1
tttctgcccacgcgcgcttgtgaaccgcaggcctcgggcgccgctccgtccagacaccagtccactcccacggacgggcccgtggcgtgaaagcgctggcgcctgccagtcgggcaagccaaggccgccactcgtagggccctcttctctgcgcttgctctgctggagcgcgccgccgaatagcacaatgccagcggcagcctctcatccgagccccacagggccacttgtcgctcgcccgcccgcgtcgtcgtctccgccggccggccggccggcctcccaaaccctagcgaggcgagcgagagagaaactagacgccatgttcgggtacaggaaggcggacccggacctcgaggccggcgggtcctcgctgctgtacccggggatgacggagagccccgaactgcggtgggcgttcgtccgcaagatctacgtcatcctcacggtccagctcgccatgacggcagccgtctcggccttcgtcgtcaaggtgcccgccgtctccaactttttcgtctcctccaacgccgggatcgcgctctacatcttcctcatcgtcctgcccttcatcgtgctgtgccctctgcactactaccaccagaagcatccggtcaatctgctgctgctcggcctcttcaccgtcgccatcagcttcgccgtcggcatgacatgcgctttcactagcggaaaaatcattttggaggctgccattcttacagcggtggtggtgaacagcttaactgcttacactttctgggctgcgaagaggggccatgacttcaacttcctcggccccttcctaattgctgctatcatggtgctcatggtgttttcactaatccagatctttttcccactgggcaagatctctgtgatgatatatggtggattggcatctcttatcttctgtggctatatcatctatgacacagacaatatcatcaagcgccacacatacgatcaatacatatgggcagctgtttcactctacctcgacgtcatcaacttgttcctgtctctgctgcagctgctgagggcagccgatagctgagctcattaatggagtgtttggtttgagaaatgatatagtccatcatcttctcactcctcacttttttgtttggtttgtggaatggagtgagttaatccaccaccacctcattctttataattagttgtttagtactaatatgtggaataaagtcatcccactaaatttaaggaatggacccatgatgcacaacttcattttggataaagtgattcattaaacaaaaaaaaaaaaaaaaaaaggcccctaacatcccactaaatggggtgaatgtacccatgatgcaccccttcattttggataaagtgattcatt

SEQ ID NO: 131117 - DNA, 594 bp, Zea mays
  Clone ID: MRT4577_51063C.1
tttttagagatgcggaagcgattgcataaacttacatttatttagaaagtaggatcaagttacttattacagaccagagctataacgagtgctgagtagtacacatatcaagggaggcaaaaactcctcccgataactttaaacaaaaagtcctatatggaggaccacgtcctccccacatcttcactcttgtttttcttcatttgataccaccttggagccaaagcaacaaaaatttgtcgctacctcacctttgttagtaggtgagtcaggctcggactcgcagatgtcgaagtagagccaagtctctgcctgagattccaaaggtggtgatgtcttttcttcagtcacttcaccctcttctccgttttctgagatgattatggaacaagcttcatataggccagcaactccctagaatgttctggctatggtggggtaaagaattgtgagcatggtcaccactggcacttgattctctggacagagcagacttggtggctgtgggagagggtcatcactagcagggatacaagaaccccaacacccatgcagtggtatgcgagtagagctcgaggtagagagcccggccgg

SEQ ID NO: 131118 - DNA, 240 bp, Zea mays
  Clone ID: MRT4577_51064C.1
ttccacgcgtacgtttttggaaaggtcaagaaaaatgtggaatataaggggaagaacactaaatcctgcttaatttttgccgctttcttccgtttaaatattcttgcttggaaaattgaaaagggcgctttaaattcactgaatgtccaactaatgtacttgtaaaataatcctacctttgtgaagatcacttgtaaaagattggttattatagaagtcatctttgaaatatatgtaaaa

SEQ ID NO: 131119 - DNA, 144 bp, Zea mays
  Clone ID: MRT4577_51065C.1
atgcccctcttggtgtcaaagagggcgcatgcagaggccaggatgctggccccaagacttacatgtacagcgcactcgatacaaccacgtactcttgtcctagcctggagcaccaatgatcatgtgaaaagaatccgaatctga

SEQ ID NO: 131120 - DNA, 298 bp, Zea mays
  Clone ID: MRT4577_51066C.1
aggtgcattgcccaccgcgagcggtctatatgaaagtagttgtaagtagacggcagggctcaccatggctagttgactgacacactggcataaactgttgcacttgctgttgttgctggtatgcatgctacgttacgccagatcaagagggttggatgcaagcagctgctgttgcaagtaggtgacagggctcaccacggctaggtggctcactgatggcagaaactgctgttgttggtgttgcgactgactggtttgaagggctagatgtgcctaggattgatgatgcaatcgggca

SEQ ID NO: 131121 - DNA, 275 bp, Zea mays
  Clone ID: MRT4577_51067C.1
taaatctatacgtgagtcgtattatgtcagtcgcacactccagagtcggcgacggaacgctcatcatgatctcacctcgtcacgcttaactcgcacgacatctgtcgctgatgcgccgtggaaggtcattcgagggcttatggcgtgagctctggtaggtcttccagagctttcccttccgctcttgaagcagcagtatcagcatgctgttccccgcgttcggacgcacgagttgttctgagacagcggcattagatggcgcttctctctactgg

SEQ ID NO: 131122 - DNA, 669 bp, Zea mays
  Clone ID: MRT4577_51068C.1
gctctagccacgcccacgctcccgcctccccggcaaacacactcacgcccgccgaggccacatcctagcacgttgtagacgccgccaccgccaccgcctgacgccatgcaggagttccagtccatccctggcctggccgggcggctgttcggcggggccgcggcacccggcgacctccggcgcgcgcaggcggcgcagcatggccccggcggggcgcgatgcggcggtgcctcgcccgcggcgcccgaggcggtgaagtgcccgcggtgcgagtctaccaacaccaagttctgctactacaacaactacaacctgtcgcagccgcgccacttctgcaagagctgccgccggtactggaccaagggcggcgtcctgcgcaacgtccccgtgggcggcggctgccgcaaggcgaagcgcgcctcgccgtcggcgtcggcgtcggcgtcctcgcccgcctcgtcgtcggcgccgtccacgcccgcgtcggccgacgcggccaagaacccgcgccgcgcctcggcctcgccccgctccaacagcggcagcgcgagccccacggccgccgccgcgacgaccccgaccccgaccgatccgagcacctccgccacgccgtcgtcgaacggcgtcgccttcacgggcagccaccactcgtcgaaccccttctccacg

SEQ ID NO: 131123 - DNA, 585 bp, Zea mays
  Clone ID: MRT4577_51069C.1
cgccaactaagctcaggtatagtgaacagccatagagccttgagccgtggcccaccgtgattgcttgctcatgactggtcggaagtgcgtgcgcgatccgccctcggcaggggagaggtgagctatgtctagctactggagtacctggaccggactgctgggaagctcgcgacgttgctccgcaagtttgctgggctgtcctccaacaagcatactcctaaaggcgcaaagcaccgtgttggatcactttaataactcgctcatgatgcacgggctcaataacctcctgaagggcatgggcgttccaatcataaagcacaccctacaaaataatgcagatgcgtgactgacacccataccattcattgggatggacgacgccattattaacagagctacacagcggaggatgccatcctaattagctcaaatagccttttcagaaggcaggctgtgaatatcttacccctgacaaaggtgaaccaggccatatacctcatcaccactggtgccagcgacgagcgctttacacgaacatcaaaatcattcgctgagtgccttgcaggatgaattagatcaacgctg

SEQ ID NO: 131124 - DNA, 531 bp, Zea mays
  Clone ID: MRT4577_5106C.1
ccgggagcacgacacccgagtacccgacctgcctgcctgcctgcctgtggtcgcctgtatcacaagctcccaaaaccgccgcgcacgctgccaccaccggtacccaacgaacatggcggcggcgccgtcctccctcgcctcctcgtcgcatatcccccgccgcgccacagctacggccccagcacagtcgcactcgcctccgttgccgcagcagctccggccggccaggtccttcaaacgcggggcgctcgcgcagcacgtccggtacagctttgctggcagggaggcatcgaggcggcgcacaccaggccttgctgccatcgatgtgccggcagcgactattcctgatgccacgacgacaagcgtcactgagcggacttcggtttcatctcttttagaggttgtatcggaggacttgctcagccttaacaacaatctgaaatcgcttgttggtgcagaaaatccagttttggtttctgcagctgaacaaatttttgggtgctggggggaaaagattaagggcagaattgg

SEQ ID NO: 131125 - DNA, 117 bp, Zea mays
  Clone ID: MRT4577_51070C.1
ctgttatcacgcgtacgaactcggaatctgtcgatgagccgatagcttaaaggctccacgctgctcaccaacgtagtgctaacagatgggtcagacgaatgtgccatctacggtggc

SEQ ID NO: 131126 - DNA, 155 bp, Zea mays
  Clone ID: MRT4577_51071C.1
catgaatggtgacattcgtcacctcagggacactggcatgtcaaccttcattctcactacgtaacttgatgctgctcctgcagcagttagacgatgagggcacgtacacaagtgtcacatgcgttctcagagtgcattcggaaagccacggtggt

SEQ ID NO: 131127 - DNA, 1040 bp, Zea mays
  unsure (1)..(1040): unsure at all n locations
  Clone ID: MRT4577_51072C.1
agatgcacgcagcaggcttccccacagctgcttccttgcaggccggaaggagggatcgaatcgaatagagccgcgctcagcctgccggtcgttttcccttcaaccaccgcgcgatctgctgcaaatcctccatgctttccccagcggaaaaaggagagatacagatactagctagatatattatcctcctgctgctgctgctgcacaccacaacaacccacccggccgccggtgcaagttcgtagtgattccatttcttttgtgaccagtgcaattgataatgccggcgtcggcgtcgtcgccgtcgccgtcgccgctcgagatcgtgagctgctccgctctggaggatccgtggtcaccaacgatggccatcgccggcgacaagttcacggtggtgcagcgggtgccgagggacgtctcggacggcctcctcggcaagttcgcggacaccagcgcgttcggcttcgactacgaccgcagcgcgctctggtcgccgctggtgctgcgccccgaggccatgctgcttgcgcagtgcccggccgggcggccgcggccgacggcggctacgatggcggcagcgtcgccggaagcggaggaaggtgctctgcggctgctggcaatggtggtgacgtcgcatgcaatgttgtctacggacgtcgaagcatctggtctgaatcattctgcaaacgttctgccgctgattcttggatttcttcattcttctgcagtattatgcattcaaagagtcaatactgttaccatatcgtctctctatgatcaacgacgatgggaagctgaggacactatgtaatgtatatgtatgtatacatatgcagcgacgtaaggtccagatgtaagatgaaatgattgtgtaatgtatagtcacagatacatactacattgtttttttgatgtgcacattggacacgtatcattgtgtcgtgattgttggaggcatcttcaacaggaatgaatacagcaattacacttgctaaaaanaaaaanaaaaaaagtaaaaaattaaatattaaaatataata

SEQ ID NO: 131128 - DNA, 687 bp, Zea mays
  Clone ID: MRT4577_51073C.1
tgggaccctcgaggccggccgggggtacattccatacattcgtgctaataagtagaatttcacttgagcatatatctcgatatccatgagaatccctcatattatactgctacatgatcgccatctgaaggcacgcagagtcgaaatcatgatggacgtgtacaccaacgtggtgaccaagaccgcgctcaacttcccggcgctgttcaccgtcgacaagggcgtgggctagtgcgcgaagccggtccactacaagggctccaccttcgaccgcgtcatccccgagttcatgtggcagggcgaggacttcacccgcggcaacggaaccggtggagatttcatctacggcgagaagttccccgacgagaatttcgtgcgcaagcacaccgtccccggtgtgctctccatgggcaacgccggtgccaacaccaaagtctcgcagttcttcatctggaccgtcgtgaccccttgagtcgacggcaagcacgtcgtcttcggtcaggtcgacgagggtatggacgtcgtcaaggccatcgagaaggtgggtacccggaatggctccacctccaaggtggtcaaggtcgctgactgcggacagctctcctatatctctctgatctgatctgttcgagcgacctcgctccgtcatcgtcgactccccctgcgatcgtatgctttggatctgaa

SEQ ID NO: 131129 - DNA, 726 bp, Zea mays
  Clone ID: MRT4577_51074C.1
tcatgtgaccctgataggtcacggctgatggaaaaccaattgttccgtgtggtctgattgcttggagtttgtttaatgacacctatagcttcactcgtggtaaagaaaacttgacagtaaacaagaaggacatctcctggaaaagtgatagggagcacaaatttgccaaaaatgtctacccaagcaacttccagaatggtgcgctcataggtggaaagaagcttaactcgagtatcccgctgagcgaacaggaggatcttattgtttggatgcggactgcagcgcttcctacattcagaaagttatatgggaggatatacgttgatctcaaggcgaatgataccataacagtgaggctgagtaacaactacaatacatatagcttcggtggcaagaagaagttggtcctttccactgcaacctggcttggaggaaagaatgattttcttggatttgcatacctcatagttggtggactctgtattttcttggcatttgcattcaccttgctatacttgataaagccaaggaaactgggagatcacaactacctgtcctggaacaggcaccccgcaggccgctaagggtgtttccgaactcgatatggcgtacaattgatgcccgcctcgactacgtgaaatgtatcatcatgccctacatgatacctgagattgccagtagctctagaccacttgtgtgtgtacattttaacaaacggatctatct

SEQ ID NO: 131130 - DNA, 230 bp, Zea mays
  Clone ID: MRT4577_51075C.1
tcgtcctttgtcttcactggtttgcttcttctggggccgtcgcaaggacgtaatggcttccgccccggtgcttccgaacgcccgcttccggggcctttttttctaccctacttttcgcgccggttcgatatatgtaccttcttcgcttcccgatgcgcccgcggcggcggtagcgcccgtccaaccgccaccgattggccggaccctcttggcgaggttcattggcaact

SEQ ID NO: 131131 - DNA, 447 bp, Zea mays
  Clone ID: MRT4577_51076C.1
gtgtactcagatccaagcatacatactaattattaacatggatagtggaccggcagggagtcaccagcatggactatatgaacatgaacccaagggacaactagtggctgggttctactgtcggcaaactgaacgataacactaatgacgcgaggtataccttcatcctttgccacattctgttatgcgagactgatgcgaaaacctgagcaggggcaagcccaaacaagaggaactttagaacagggcaccctgatacaggtccttttcattcaagtggtccaagccatatctgaacggaggcgtggtccttggaacggaggaatctgtttgaggccgggcacttgctgggggcatataggtccaaagactaaccctatttgctttacatagtgacagttgcaggaactaccgtcagagcaaatgagcgcatcctgccgcacgctt

SEQ ID NO: 131132 - DNA, 552 bp, Zea mays
  Clone ID: MRT4577_51077C.1
cacttagagaacacaagactgggacccgctagaactgccgcgttactccgaggacaggataacccgatcacttcggctcgtaccgaaacaccacggacttaacacacgtcacacgatcgcgggggaccgactcctggtcggtagtggttggaccggacgggtaagaggcggcacggcacccgttccacgctctggacctacgggatcggccttcccatctccctcttttgagcccgggggacggacccctacgccactccagttagttaacccacgtatgggagaaggacaagttggatgactgtaggaggaggtgtggaagttcatccaggttctggaggtcttgaagaagattgtcctggttcatgacgaggatgtcgtcgtccgaattgtcgttatcccaaatgtcttcctttaactggtataggaacagaaattattccccctcaattaacatttgatccatgaggacgagcagaataagaattaggtagatctcgagaagcaagaatagaagaataagaatagatgtaatccggatcgagagggggg

SEQ ID NO: 131133 - DNA, 383 bp, Zea mays
  Clone ID: MRT4577_51078C.1
acattgctgtcaccgcctctccaacctgctttcactagtgagctgcaactgcaatgtcttggacgagaaccaatattgattgataaaaggagagcagaccaagcaccttacgctttgctgtcctacacacagtggtatactgggtactcaacgagttcaaaaatgatcttacggagttcaagtaagccatgcgttttaagagcatgtttgttttagtttatagattatataacctagattatatatgagattaaataatctgaattatataataagattaataatttggacgtagctatttggcaacccggaactttgattattgattttagtcacatgttgcgtggcaggagcaagaaaaaaatagataaaacatttttttt

SEQ ID NO: 131134 - DNA, 284 bp, Zea mays
  Clone ID: MRT4577_51079C.1
attcgatttcgcagcccaccagctccggtttgttccgactgcgagcttccaagtggcgactgcccgagtgcgagaagagggagagaagcggttgtcggaatccactccggccaggggtgcggaggtcggaatggggggaggattggatgaggcggtgaaggtggtggatttctaggaccgcgattgttacgtggcatcatcatcccccaggccggtttgttcgtctttaccgactggcttgctgtcctctgcaccgactccggatcctctcactcgagccgatt

SEQ ID NO: 131135 - DNA, 1125 bp, Zea mays
  Clone ID: MRT4577_5107C.1
cgtcggaggaaacgtgggaggaagtggcaaggcatataccggagctgatgcaggtacaagtgtttcaagcggaggatctgctggcgccgatgcgggtaccggtgctaccgtgggtgctggtgtctccaaagacgccaaagttggtggtggcgtcggaggaagtgtgggagggagtggcaatgcctataccggaaccggtgccggcgtttctagtggaggatcctccggtggcgccgatgctggcgctggcgctaccgtaggtgctggtgtctcgggaggcgctaaagttggtggtggcgttggaggaaacgcgggaggaagtggcaaggcgtatacaggaaccggtgccgatgcgggtgtttccggtggaggatccggtggcgtcgatgctggtgtctccggaggcgccaaagttgacggcaacattggaggaaaagcgggagggagtggaaatgcatatactggagctgatgcaggtacaagtgtttcaggtggaggatccggtggcgccagtgcaggtaccagtgctaccgtgggtgctggtgtctccggaggtgccaaagttggtggtggcgtaggaggaaatgcaggaggaagtggcaacgtctatactggaaccggtgccgatgcaggcgtttctggtggaggatccggtggcgccgacggtggtattggagctaacataggtgctggtgtcttcggaggcgtcaaatttggtggcggcgccggaggaagtgtaggaggaagtggcagtgctgctgcaggtgcttctggagggagtaaatcatcggggggtggctcagattttggatatggttcagcgagcaaggagttatagaggatgatgaccactcaccaccgtaagatcgatatgatccgtcccaaggaatttattcctgccctttttgttatcgcgtgttgttttattaccacgcaccagtcaatagtgtggaggcaatatacattgattccccttgactggacaatacaaagataaccttatgtatttcatttttgcttacttaacattgccatgtaaaccagaatagctgaggcttattctcatgataaacatgacatttattttacggcttcatcttgaaaaaaaaaaaaaaaaaagcggcc

SEQ ID NO: 131136 - DNA, 709 bp, Zea mays
  unsure (1)..(709): unsure at all n locations
  Clone ID: MRT4577_51080C.1
gacccccgaggctggccgggcgtgaccgcgatttgctctgcgtgacctcgtcctcttcctccactctcttcctccctcctccgcccgtccccggctgttttatgccagcactacgctcgctatgttctgcatctacccgacagccccatgtcacacacgcatacatcgctaacggcctgtatcatcaggctgcgcccngtattacacggcgcctgcgccttctgctacatacgaacctctctgcctgatccgccctcaactcgtatcttgactgaccactcttgagagccaaaactagagggcctcatggcctaccttctacgcaaggacagaagatgcagctactacagaagagtacccttgctcgccacaccagctcaagcgttcttctataccaagaacctgaaagtggacccaaataacttcgagccttaaagggagctcaggacaaggcggatcggcctcgtggttcaaggggggacctgtgcctacacactgccagcgctttgaagaagctaactaatggctgctaccatgcacactaggatccactagtcatgcgacgcccgctgaccacaagcacccaccgcgatcgagccaccttcctggccgattaccacagcctggaatcatacagaaccattcttcgtactagctcggtcacaagcacaccaacatgcttgccattgtgcaacacaaggggctacac

SEQ ID NO: 131137 - DNA, 316 bp, Zea mays
  Clone ID: MRT4577_51081C.1
aggaaacccagccgacggcgcatcggtcttccaggtaagcagtagcgttcacgtcaggggccgtcatgaagcgcaacccccgcgtcacgagctttcgccggaagtgccggaaggcgcacttcacggcccagtactctgtccggcgcgtgctcatgtccatggcgctatcgacggagctatgacacatgtacaaatgtgcgttccatcccgatcctgcatagacgacaaggtgcaagtcgtgcgcggtacctacaagggacttgaggtcaaattggtgcacgtgtaacgacgttgctatgttatacacgtatagcgg

SEQ ID NO: 131138 - DNA, 377 bp, Zea mays
  Clone ID: MRT4577_51082C.1
aaacggggacaggcctttttttttttcataaccaaataaaaaccccctaacacaaacaaaaaaaggcccgggtttagcaaggggcacaaaaagatataaaatttgggggggaaggcacacccccacaaaaaaagaccaaacttttaattaaatttcctagccccttaaataaaaagggtccaaccaaatggaggaaacaggggggggggtcaccccaaaacaggaaactttggaaaaagggggggttcaaaacttggcttttaagaaaaattcaaggttacccgagccgaaaaaataacttttaaaccctacccaaccgggtaagggtaaacaagggggcaccaacataaccacctttggctgaaggaataaaatgg

SEQ ID NO: 131139 - DNA, 280 bp, Zea mays
  Clone ID: MRT4577_51083C.1
cccactcattcgcccggcacctggggtgcgcggcggacctcaacgccggatgcccgccctcgcagcgcgtgccgggggccggaggcggcgaggcattttcaatgattattaagcttaataaaaaaaaaaacgcggaaataaacgttaaaaacataattaaacttaaagagaatcgtttgattatcataatcattatacaaacaaaataatactgggaaccaaaacgttataaaaaaaatgtaactaaactaaggcaaggaatggatttaaaatttttaaa

SEQ ID NO: 131140 - DNA, 302 bp, Zea mays
  Clone ID: MRT4577_51084C.1
gcgcccacgcgtccgaaaaaaaaaaaaaaaaaaaaaaaaaaaaaaaaaaaaaaaagggaggaaaaaaaaaaaaaaaagaaaaaaaaaaaaaaaaaaaaaaaaaaaaaaaaaaaaaaaacatgtcaagcagaagcatgggacactggatggaatatcaggaacaccaaacaaacaaccgctataggctatactggacacaaatttacagggctgcacataagacggtgaaagttggaaaaaccccagggtacaatgtataagattgtatggcgagcattatggtactcatgtgatgacataaa

SEQ ID NO: 131141 - DNA, 158 bp, Zea mays
  Clone ID: MRT4577_51085C.1
tcggcccggcccctgtgcttcccttgccggcggacgagagccaaaagcctttcgccccacgactcgcctcgccctgctgcgacgcccttgaggacgtttgccgcaccgaccggcgaccaagccttgattgccttcgccccatggctactcgggcgcgg

SEQ ID NO: 131142 - DNA, 481 bp, Zea mays
  Clone ID: MRT4577_51086C.1
aaccttgctcattcttttctcaacaaggtgcatagcgggggcaaacaaaggggaaaacaggggggccaacacctaacccaaaggtagaacggacactaacacggggacagaaacccaacgggtacacgaggctataaatcgataaaataactgggcccaagccaggatgggcccacacatctagtccgtgcaggcggcgcctgcgtcgacgtaggcgtcaccaccacccttgcgccgaccgccggcaccgccaccgccacggggactgggcctggctaacggagatgggaccgccgtcaagctccttgccggtgatgttctaagatagcgggaatcatggagttctcggaggagaaggaaaccaagccgaagccgtgaaacctccccatctcccggtcggcgaccaccttgggatcgaggatcccgccgaaggaggggaacgccttctccagccactagttggtggtggcccaggcaagcc

SEQ ID NO: 131143 - DNA, 586 bp, Zea mays
  Clone ID: MRT4577_51087C.1
ccccctcgagttttttttttttttttttttttttttttttttttttttttttttttttttttttttttttttttttttttggaaacacccataaaaaaggacttttatgggaaaggaaaaaaacccagaacccaggggcaaaaaacccgggtaaagttttttaacagggggcagggcggcgggaaaaaagggggggagccccaaaaaatccgggcccccaggacccacgggaatcccataggtccccaaaaaataacagaacccggggggggacctcttggggaaaggaaccccgggcccccaggacccgataaatcaccagagaaaaaaccaggcccgtcccgggctggggtccaaaaagcggctcccaagaataaaatggcctaggccaaaaaggggcaagaaaccaaactttgtccaaaacaaaatttagggggaaggaaacgaaggggggcccctgggtttcccccccaaaaccaaaaacgccaaaatggttttgggattcccaaaacaggctaggggcatccccaaaaagcccgtaaaaaaggccccttacttttttcccgctctttgaaaagggggcaaa

SEQ ID NO: 131144 - DNA, 109 bp, Zea mays
  Clone ID: MRT4577_51088C.1
cacccgttgagcgcgcgagagaggcatgacggaggaacgtattggagatctaacatgtcacacagacccaccgtgacaataacacaagggtatgggccaaacagaccgt

SEQ ID NO: 131145 - DNA, 655 bp, Zea mays
  unsure (1)..(655): unsure at all n locations
  Clone ID: MRT4577_51089C.1
ctccctcttctctctcttctctcctccccttgctgcttgtctggtcgccgcacccgtgcaaaaggatcttgagaaattctcctcctcctcctgacctcctcccactccctctgcaatctgcaccacaccaccgttccagcgagcggagtcctggtcgacttctccgggcagcaggcggcgcgaggcgccctcgccgcttcactcgacccccaccgcttctgctatgccgtcggcgccagccgccgtcgcgctagagccacagaagctttcgctgacaccgacgccgacgcagtagtgccaccggccgcgctcgccgctcgccaacggcttgagccgagcgcccctgcagctccctgcaggagaggaatgctgggaaagtttcctcctgaaaatatgagactgaaggtccctataaaatggcctaaaagtcgtgatgtagtatggaaagcaaatattccacacactcaccttgcaaaagagaagtcagaccanaactggatggttgaagctggtgaaaaaatcaatttccaggtggtgggaaccattttcaccatggagctgacanatacatatcaaatattgcaaatataacaatataaacaatgaggggatgcttcgtacagttcttgatgttgggttgtggagttgctagttt

SEQ ID NO: 131146 - DNA, 871 bp, Zea mays
  unsure (1)..(871): unsure at all n locations
  Clone ID: MRT4577_5108C.1
ccggccgggagccagccaggcacggctccagcaacgacacccgagtacggagtacccgacccgcctgcctgcctcctgcctgcctgtggtcgcctgtatcacaagctcccaaaaccgccgcgcacgctgccaccaccggtacccaacgaacatggcggcggcgccgtcctccctcgcctcctcgtcgcatatcccccgccgcgccacagccacggccccagcacagtcgcactcgcctccgttgccgcagcagctccgccccgccaggtccttcaaacgcggggcgctcgcgcagcacgtccggtacagctttgccggcagggaggcatcgaggcggcgcacaccaggtgcttgcttcgtggtctcatccagccagccaggccttgctgccatcgatgtgccggcagcgactattcctgatgccacgacgacaagcgtcactgagcggacttcggtttcatctcttttagaggttgtatcggaggacttgctcagccttaacaacaatctgaaatcgcttgttggtgcagaaaatccagttttggtttctgcagctgaacaaatttttggtgctggtggaaaaagattaaggccagcattggttttcctggtgtctagagcaactgctgaattagctggtttgtcggagttaactgcagaaaatcgacgcttggcagagataatcgagatgattcacactgtcgagtttaatacatgatgatgtcatagatgatagtgggatgaagaagagggnaaggaaacttatttcaccaactgatatgggttacacgtgtggactgtnacttgactggtgnattttnaagtttggncacaantctttcttggtttgcttggcaaacctaggaaaaat

SEQ ID NO: 131147 - DNA, 293 bp, Zea mays
  Clone ID: MRT4577_51090C.1
ccggccgggccgggacattatactcttcgtcaaccccaaccgtattaggtgctcaaggtgagacggaggaggaggagggggaagcggtataaagccgcggagtcgttctgacgtgagtcgcgacctgaggtcgctcgcagccttgcgcgacaccttttcctcctccttgtcttcttcctcgcttgacatctcaccgccgaggttgtatacagccgctgacagatcacctccctcccccttctctctcttatctcagacctaaccagccgtgcgacacacctaggactgtcact

SEQ ID NO: 131148 - DNA, 542 bp, Zea mays
  Clone ID: MRT4577_51091C.1
aaaaaaaaaaaaaaaaaaaaaaaaaaaaaaaaaaaaaaaaaaaaaaaaaaaaaaaaaaaaaaaaaaaaaaaaaaaaaaaaaaaaaaaaaaaaaaaaaaaaaaaaaaaaaggggagggccgattttaaagaacccaagttggcggccccgtcttggggaccccattttttttttttggggccccctaatttaacttcttgggcgggggttttaaaacgtgggcatgggaaaacccttggcgttccccacttttgtggcctgggggcccttcccctttttgccccctggggaaatacccccctgtccccccccgtgcccctttccaaaagggcccgcacccttgagggttacgggaaccccccctgttggggggctttagccccgcgggctgtggggtttcctcacagcgggaccgttacattttccagccccctagcccccgttcctttccctttctgcctttcctttttggccaggttttttggttttccccgcaaggctttaacccgggggttccctttggggctccgatttggggttttc

SEQ ID NO: 131149 - DNA, 833 bp, Zea mays
  Clone ID: MRT4577_51092C.1
ccgctgctcgcgttcgccgggccatcggcaccatcccagtcccaatctggcaatcccatcctccctaccccgtcccccctcctccccgcgcgaccagcgccctcgcacccgcggacgcatgcgaggccacaccgcgcgtagcccccagtagcaaccccgcccggcaatgtcggcgccccactcggcgccccaccacccatccctcgccgccggggacgccaagaagcagccacacctcggggccgaccccagcaagaaggcctcctgcttcggcggcgggggcgaccaccaccccaagaagcccggcccctccgcagcgaagctcgcgctcgcgtccttcctcggcgtcatcatcctcctcgccgccgacgcctcccttaccggcgccggcgcgcaccgccgcctgcggcagcagtacctgcattacgtcggcgttggcgtcggcgtcggcgttggaggcggaggaatcaccgactcgctctcgtggctctccgtgccggaccgccccaacttcaccgacgacctactcgcgcggtggctcgcgcccgggggttccccgtgccgggacgcgcgcacggcgaacatctccgtggaggttcttgacgacgccgcggcgaggggggaggcgaccactctcggcgcgggcgagatccacgaggtcacgttctgggcgctggacgaggctgggcagcgccgctgcctcggcggggactacttcgaggtcgacctctccggggacgcctggaagtcgcggccccccatcgtggaccacggcgacggctcctactccttccgtctccaggtcgcaccgcgcttaacctcgggggagttcc

SEQ ID NO: 131150 - DNA, 658 bp, Zea mays
  Clone ID: MRT4577_51093C.1
tcacacatgtatgtttttattgtctgaatcctgtggtgctaaagttgcgtgtgggcgtaggtgctatagaagagcatggtatgggtgaagaatatattctagatatttgtctcgtgtacgtgcttatccacgcgctgaattcagagacagggtacaattgcagtggtcgaactcatttcagagagctagaaaatcgaaaagttgcatatataaggttatttaattatacaacaagaaacgaaaacggctttactatatgacagacagacaggagcggtggtgaactggtgatcacttattaattaattaggtatgcgcagcaataggcaccgagacaaagctgctgtggctgtcgtcgggcatttcgtccacgtccccgacccggacaacgctgacggtcaggctcctggtcaccttggtctgcgacggcttgggcttgctgaccaggttgttcgcctcgatcctctccaccttcttcaccctcaccacgctctccactggcagctcgtaattgctactagggttgttgttgccgcggaacattttcgacatcgatcccggccggccggccggcccctttctaagttctttcttcgctaatcgatgctgatgattttctagctatagattaattgctcgatctgtccggacgcgtggg

SEQ ID NO: 131151 - DNA, 504 bp, Zea mays
  Clone ID: MRT4577_51094C.1
ccggccgggacttctccacccagatttccaggctcccatcctcacctctgacactacgccccgtacctcgtgcccactgccaccaactttgttctcggtgctccgtggcttcgccttggcacgcgccggtcgtgcccgcggcctcgctcctccactagcataggcacaggtgaacccgcacagcgacataggcggcgcttcgcgcctggctttgcctcggcacacgccgagtcgtgccttagcccccaacccccctcttgcacaggtgcacgagatatctccaacctcgcctccctgctgattagtcgtcttgtgtcttcaacattacgaagtgatgatggccttctttttcctgaaaggatgatgactatcttgctcctatccaagctgatcgagaaaaagagttgaagtttgtgcagtaggttgaactccacagggtagaggaagctgcagcaagagaggctgctcttgaaaagcaaaaaaaaaaaaaaaaaatttgcggcc

SEQ ID NO: 131152 - DNA, 519 bp, Zea mays
  Clone ID: MRT4577_51095C.1
tgagctagaaaatcgaaaagttgcatatataaggttatttaattatacaacaagaaacgaaaacggctttactatatgactgactgactgacagacagacagacagagacaggagcggtggtggtcactgattaattagttaggtatgcgcagcaataggcaccgagacaaagctgctgtggctgtcgtcgggcatttcgtccacgtccccgaaccggacaacgctgacggtcaggctcctggtcaccttggtctgccacggcttgggcttgctggccaggttgttcgcctcgatcctctccaccttcttcaccctcaccacgctctcgactggcagctcgtaactgctcgtggttgctgacccagccctgctactagggtggttgttgttgccgccgcggaacattttcgacatcaatcccggccggccggccggccccttctaagttctttcttcgctaatcgatgctgatgattttctagctatagattaattgctcgatctgtccggacgcgggg

SEQ ID NO: 131153 - DNA, 1177 bp, Zea mays
  Clone ID: MRT4577_51096C.1
ccggccgggagaaggtcgtgggttcggctcccactgtggtcgccaccgtattgggtacctcgaggccggccgggtgcagctgcaggttctcgccgactccccttctccttcgacctccgccgctcgccgccgtttcccgtccgcggcggcgcctcctcccctcccactcttcctcgttgtcgatctcgtctcgggtaccatggcaagatcactctccaccgccctcgtgaggggacttatgagatcgtcccgtgcatcgacatcagctgctgtgtcacgaccagctatccagcagtttatgaactattcatcaggtcttagtggcactcctaatgcaaatggggactcagtgacaacacgagtagctgctgatcacgacacccatcaagattttcagccaacaagtaaaagttcagatatgtctttcagtgacattgttgctcaggatgtgaaggagcaccctgttgtcatctatatgaaaggttatcctgatgctcctaggtgtggtttcagtgcattagcagtgaaggtcctccagcaatatggtgtccccatcagtgctagagatattctttcagatctaaagctcaaagagagtgttaaagcatacagtaactggcctacgtttccacaaatatttatcaaaggagagttcgttgggggatctgatatcatactcaccatgcaccagaagggtgaactgaaggaactgcttggcgatattgcacaaaaagccgaacaaagtggttcttcatgaaacaagcatcagtatttgtgatgcaaacttcccggactggatgttccttctcagaagattttaggtgatcttgcattgttgccctgtggcttcggatttgaatacgttctctgttttgttctgttctgttcttgccagttgtgatggaagatccactcaaggccgaattgcaggagtaaccaaagttatagttctcgataaataaatgccaatgctcgacactattcttttatgcatctagctgcctgccttagcttaagcttgggtgctttaagttgcttttaaactgaacggtgctgttgaaacatgtaattagtatgtgacatgcttatacgctctatgttttgttcttttttgacatcaactctgtttgcagttctactcaaatagatgtactgctttgttccaccaaaaaaaaaa

SEQ ID NO: 131154 - DNA, 1201 bp, Zea mays
  Clone ID: MRT4577_51097C.1
atacaccccgagcccgggccttggtgggcgtcaacttattctccctcgcgtcaccgtgacatctttctgtatgggcgaaaggccttcacaggatctatcgtcgagcacgacgatgacgatctttcaacccttcaaccttctgcgggcaattcgctggcaaaacctggtacttctgcgtcttcaaggcccatgtcataattcaagatgcagaaaggagggcggtaagtctcgataccacggggcgatgtatcttcggcgggtgattagatgcatctggaacaatcatgttaagtggtagatctgtgcgagctgagcacccagaacttctttgttcattcctttgcctgcattagactctcagcaagggttgcacgatggacttgagcactgacattattgtacatgaaaaacaagagtaccgggtctcatgaaagaatttaagtacatactttagagttaagatagaaatatttgatgctgcaataatgttcatttgtcatttggctgtaaacggctctaatgtctgaacacgccctgtccccgctaacatatgtactatgccataatttactgttgcccccgttgcttgaatcatggctatttatacttacatttgcagagttcttcagaccccactccatcatgtgaccgaaagataatatcgagtgggcgaaaggccttcacaggatctatcgtcgagcacgacgatgacgatctttcaaccattcaaccttctgcgggcaattcgttggcaaaacctggtacttctgcgtcttcaaggcccatgtcaagattcaagatgcagaaaggagggcggtgagtctcgataccacggggctatgtatcatcggtggttgattagatgcatctggaacaatcatgttgagtggtagttttgtgcgagctgagcacctggaaactagacattttgttgtggagcggcgattgccctcttggggcctgttgttgtggagtgcaccttcaccagtgagactgtttggagaggatacatgggatgttcagttagattcagtttaattagtggctggtggtgcagtatctctttcagaaacctatatatatatgccgccatgccgtttgtaaatctttcagcaacaaaaaaaagtgtcgaaagattaattctcggatttatggaaaaccatgctgcttaagactgaaaaaaaaaaaaaaaaaagcggcc

SEQ ID NO: 131155 - DNA, 268 bp, Zea mays
  Clone ID: MRT4577_51098C.1
gaaagatcagcacattgctttaattcaatcacacgcaaatcataataagccatcgctagcagtcatcacataaactgagccacgcgtaccggcgacgcccatcatgaccattacaaggatcctaggacgaggtgaactaccaaacgggcttagtgccctaggagaccgtgtgcttggggaggtccccggagaggaccaggcgcaccgaggtctggaactaccgggaggtgaaggagggcttcttgttgtagctcgccaccgaccccta

SEQ ID NO: 131156 - DNA, 374 bp, Zea mays
  Clone ID: MRT4577_51099C.1
ctctggtggtttttttttttggttccccgcccgggcccgcgctcggagggggcaaggcccccgccctggccggggggaattgggggtccccgcccggtccccccctcgggggaaaccgggaccaaaaggggtaccgggggggaagcctatgcgggcccaaacccccaaaaattgcgccccgctcactgaccggttacccccggggggccctgtggggccccctccccccattaatgggcctgcccccccggcccggtttccagcggggagacccgccgtccccttcctattaaacaaaccccccccccccggggagagggctttggcgaattgggccctcttcccctaacgcggtaatacgcttcttcacccaa

SEQ ID NO: 131157 - DNA, 399 bp, Zea mays
  unsure (1)..(399): unsure at all n locations
  Clone ID: MRT4577_5109C.1
caacgcgacacaaaaacattaaaaacaatagaaananaagcaanggtgaaacttttttaagttttgaaaaaccccacncccanaaaccaaaagaataatcaccacacaaaaaatcccgccaaccgccaccaaaaaagcagaccgcccccacaataaaaaaacgacccgacccataaaggcgcccaaatgcccccaaagctagacaatacccatccagagcatacaaatgcaaaaaccggctcccaagctacatcaaatcacatgccaaaacgccacacaaaaaacccccacaaacataaaattgataacccgggggcccaaatacagcgccaaaacccaaactataaaccttcccctcacagaccaatttaaaatgataaaaactatgacaccaactat

SEQ ID NO: 131158 - DNA, 2635 bp, Zea mays
  Clone ID: MRT4577_510C.1
gggtacacctcgaggttctgccgggacccagcagcagcggaaggggaatcatcgtggactcgcaactccttcctggcccttccgctcaccgctggacacttccatcaatctctttcccccttcccttggattcgtttcagctactgaaactgaacgcgggcagtggcaggcaggatcagccgagccgagttccatttccgccaccgtcccttccccctctgcccctcgttcctcgtcttctctatttgcttggctttgcttgcttttggttcaacttccacaccattcattcatttcttggatttctttggtggcgtccgcaagtcaagtcccttcccccttccgcccctcgtcaaagcaagcaagcaaaagtggtgcggtgccatcagagtaagcaagctccccattttccctattcctatactactactagtagctgcagcagcatccaccggatggccatgtccagcgacaccgccgccacgacggggacatgcaccaagcccaaccccaaccaccgcctcccactctcaatagcctgattgattcatggcctccgcccccaccaccgcctcttctccgctaccggcgtcctcgcggcccactgccacaccgcccgacaccgctgccacgcccccgcccctcacctctcccgcacccgccgctcctccaccctcctcccactcccactcccactcccagccgtcgcctgggcctcctcaacacacagcctcgccgccgccgcgggcggctgctgctcctccaaggccgccgctgctctcgccccctccaacgtccccgacgccgtctgccgctccgacgccctcgccatctccgccagcgtccccggcccctgcaccacctccttttagcgctcctccgccgtcagcacgaccactgcctacgcctgccatcgcagtcgacccggccaggggcaagaacccaagttggaacaagtcgtccagcccgggtgcgccgtccaggagcccatccgccccctttggcggccttggtaatggtgttgtagccatcgccgctgcggtggtcgccctgctccttcttagcctcctagtcacagcagtttggttcaaccgcaagcgcaagaggaagcagatgagtggttacagagctggtctcatgtcgcctttttcttcgcagcaaccttcgggtgaatctgcaaatgtaggatggtcagctgatccttctgtccacaccaactatagcgccgggagccccaggctgaaacaatgcttgtctgatatcagcatgggcaactccaggttcttctcatatgatgagctgtatcagatcactgatggtttctcagctcagaggctgctaggggaaggaggctttgggtcggtgtacaagggccgcctgccagattataaagatgtcgccgttaaacgactaaaggatggcggcggacaaggggagcgcgagttccaggccgaagtggagataattagtcgcgtgcaccaccgccatttggtttctcttgtgggatactgcatttccaatgaccaaaggttacttgtatacgactttgtttctaataacacgctgcattatcatcttcacggacacggaatgcctgtgttagaatggtccgcacgggttaaaattgctgcaggtgctgctcgtggaattgcttacctacacgaagattgccatccgaggataattcatcgagacatcaagtcctcaaacattttgttggataacaatttcgaagcaaaggttgctgactttggtcttgcgaggctggctttggatgctgtaacccatgtgacaacccgtgttatgggaacatttgggtacatggctccagagtatgcatcgagtggcaaactgactgagagatcagatgtgttctcttttggtgtagttttgttagagcttattactggccggaaacctgttgatgcatcaagaccaatgggtgacgagagcctcgtcgagtgggctcggccattgctctctcgagccctggacacaggcgatttggaagggttggttgaccccaggctcgagatgaagttggacgaggtggagatgttccgcatggtcgaggccgctgcagcctgcatccggcactcggcgtcaaggaggcccaggatgagccaggttgtgcgggttctcgagagctcagcggacatcgacctgaccaatggtgttcagcctgggcaaagccagctcttcaacgtggccaacgcggcggagatacggatgttccgccggatggtagccggcgcgcaagacgacgacagctctgacttgacacagtacgattggagcaggggtagcgacgctgccccgggctccaggatcttgtaacgatgaccacattgtggtttctgaattctgactctgcctgcagtacttgttctgtagggagagggatggaattcagttcaaagtttgttccctgaccggccgggtcttattctttaggaaaaaacaaagtgatgtgttgtgttgtgtgtagagaagattgcactcctaggtttggtgtgaaggaagaggtttgcagttcattcagatttttaggcagtcaaggacaaggacgtggaaattgaagcaattgttgtatacttgaatgaaacacgtgacatgcaaggttcaccaagcggcc

SEQ ID NO: 131159 - DNA, 411 bp, Zea mays
  Clone ID: MRT4577_51100C.1
gggaccttaaccggcttaaaggtaaactggccccatgtatatatttgaaaccgggatgacaattcatgattaatacaagttcacaataccctcaggcaaagtaaataataatccataaatcccctttgacatttttgaaatgaaacatatcgttttttggggggggggggcaaacaaacaaaaatcagctggtgggaccaattcccactacccgacaggggtttggatccacaaggatccaaaaaaaacgattaaaaggggaaccctgaggaaaaaaaaaaaaggggggttcccagagcccaagtttaaatccagatccagaaggatggaccccctccccagataaactccatttctcaggcccacaattcgtggggtgcccttagcagggctgcaggaggcaattcttga

SEQ ID NO: 131160 - DNA, 477 bp, Zea mays
  Clone ID: MRT4577_51101C.1
cccacgcgtccgcgcggtgtctccagctccttcccatggccggcgctcgccccaacgtcgagctcggccttgccatctcccagcgcgccgccacccggagtcctgccccgacgcgcgtgctcctctgctcaccgcgcccctgcgagcttcctccgtcggccattgacgccggtgagcttatcccctggtgccgcgacctcgctgtggagtttcaagcgcgtttcttccctgctgcgcagctccctcggcgtccctcccgtgctcgatcgtagcccggtttccagagccctccctgccgcagctcgcgcccatcgtcctgcttgctcgagctcgccccggcctcctgctccttcacgaggtccttggctgcgttgtagcgagatttcagaggagaaatccatgtggactagcgaaaagaagcagccccagtacagcgtccgctagatgttcgatgaaatgccgaaaccaataattatc

SEQ ID NO: 131161 - DNA, 600 bp, Zea mays
  unsure (1)..(600): unsure at all n locations
  Clone ID: MRT4577_51102C.1
aactaattcaaacattaatcagaatcatagaaattctagaagtgggttcgattttgtccggtttagtttgatccgaccaatcattggttatttatgtgtgtttctgtaggtgacaagttaccaatgggtgcacccgaactaatgatgtcacctcagggtttgtggcaaggggtactaaggccagagttggtgaagagaagagatgagaagtacaacatttcgacagatgatttgaaacacacgagagcggagattgctgaaccggagtggatcaatccgatggctgactactggaagcaacatggtaagtgttttgtactcgatattgcgactgtcgaaatgaaccgtcacgcgcaattcccgtgaacaatgtcctctcatggctcacttgtatgagtgatgaagttgatatagaaatcgaatgtatatagaataatgttttactcgatttcaattacgtcaagaaaatcttaaatagcggtacggtacacaacaaagatcacacacttggttttgtggaaccttctttagnttcttattttactatgttttcttcaaagctgtgccagcctttgaaatatccatagggtaaggcgtctg

SEQ ID NO: 131162 - DNA, 690 bp, Zea mays
  Clone ID: MRT4577_51103C.1
tctcagcctcggctccatccgcgactcgactcgaagctccagctccgccgccgccccccgcctccgatggatccgaagctggtggaggtgacgcagctgttcgaccgcttcaaggccagcaatttcgacgtctgcgcgaccctcctctcgcagctcaaggtcctcctcaccaagttccccagcctacccccgctcttccagcagacgcccaacgccgtggaggagctcaagcttgcgagggaaatttatgagcaggcagttattttgagtgtgaaaatggaagaccaagatgcatttgaaagggacttctgccagctcaagccgtattacatggacacatgtggcataattcctccatcatcggtggagtacccaatcatgggggctaaccttctgaggctgttagtccagaatagaattgcggagttccacactgagctggagcttcttcccaccaaagcgctggataatgcttacatcaagcacggggttgagctcgagcagtcctttatggagggcgcatacaaccgcgtgctgagcgctcgacaaaccgcgccgcatgaaacctacatatacttcatggaccttctcgtcaaaacggttagagacgagatagctgggtgcagcgagaagggatatgattacctgtcaataaacgacgcgaagcagatgtttaagttcagctccgac

SEQ ID NO: 131163 - DNA, 264 bp, Zea mays
  Clone ID: MRT4577_51104C.1
cgaaaatgttttttttttacatcaaacacaaaataggtattgggttgcgtgcaacaaacatggtccggggagcagacatttatacggaacctttaacataaccaaacagatcagtgggggcacacagctcaccataattctaaaatggacctagtttaaatcgagggaggaaatggatataaaggccttggaccagttggtataattgaagaataaactgtttcattcttccatggggggcgtccaaaaaaatgtccatataaa

SEQ ID NO: 131164 - DNA, 292 bp, Zea mays
  Clone ID: MRT4577_51105C.1
ctcatacctagtttccggggcgcgggagacggagtaccgacgcctgctgacaaagcagagcgacacgaccgctctagtatgtactatgtcggcactaccggggcaggcaagggttaaattcttacacatgaaagtttgatcttatcagctgctattatgacagccgatcaagacgcgctcggagaggtacgaatccttttactctgatatctgcacaaagactagattgttggtttagttgacatcactttagagcagggactccattctaatactcaacgtttgaaatgtt

SEQ ID NO: 131165 - DNA, 1109 bp, Zea mays
  Clone ID: MRT4577_51106C.1
ggccagttgctcctggtccggggatgggataggtaagagcaatggtggtgggaagagggatgatagacacaggatgcagcagtacaggtcgcagctcgaacaggaggtcaagaaattgcagaggcagcttgaagaagaggttgatctgcacatggcgttggcggatgctgttacgcaaaatgttgcgcctatactgaagtcttctatgaagcttccacacaaggcacaggagctactgattaacatcgcctccttggagattaccgtttcaaaccttgaaaagaagctaaatgatctgtactaccagctttgtcacgaaaggaacgaaaggttacttgctgaaaataatcagggatgcttgccatctacatcctccgatgagcaccagtcattgtcaacttgcacgtgtacgtgggaagagcacatatcatcgttgagagatttgaagtttgggggatctgaatcaatgagatcaatgagacaggacttattccccgagcttgaagatggccaggatatgggagaagatcctgagggtcaacagatagtttctttaaacaggctgctagaaaagcaccgagattcttctttgaatagacttcttgaaaagcatcgagatgaagagatgcaagaatctggctccatggaaaatgaaggcaatgaaaatgagcagcctgacacgttatcctttgaacagtctattctaaagataactagcataaaaggagggaatctttggagcacccaaatgagctctctgaggagatggttcgctgcatgagaaacattttcctacgcttgtctgaatccttgaagatatcgccgaagacatcttctgattgttcatcttcctccgtggagcgtctatcaggctccacgttagcatctttctcagattcatccataatgccctcaatgctacggagtccttcagttgattctaatcacaatgacgagacgatgaaggaagtcaggaactttgatccgtataaaggtaatggaaaggaaacccgagagatttcggaaactatcggtcagcagctggagatcttgggatgcctgttggaagggatcaactagaatatggcttcggaggctttaaagaagtt

SEQ ID NO: 131166 - DNA, 1892 bp, Zea mays
  Clone ID: MRT4577_51107C.1
aggccggccgggccggggttccccactactcttcctcctccaggctccaacctcccctcctgtctctccctccctccctggcagcgactactccccaacccgcacgcacgccgtgagcataaagccgtcgcgcgcccacacgcccgttttcatttccatcggttccctttccaaactcaacggccgcggcagggagcaggcacggtcacctccctgacccgttgagccgtcaattttatcccgccccgcgatttcctacagctgccgatcgaggaggaggcgcattgcccgcattcttctccgcttccaccgagagggcctcgcctgatcggcgccgccttggcccccatgacgtgtgtgcgcgccgaggacgccgtctcgcccgccgccgccgacgacgtggcggctgccctggtttccaggagcggcttgatccagaaggtggctgccggcggcgggcggagatcggccggctcggcgcgctcgctgcagcgctcagcacatctggccaccggggacggcaacgctccggcgccggcggtggaggccagttgctcctggtccggggatgggataggtaagagcaacggtggtgggaagagagatgatagacacaggatgcggcagtacaggtcgcagctcgaacaggaggtcaagaaattgcagaggcagcttgaagaagaggttgatctgcacgtggcgttggcggatgctgttacacaaaatgttgcgcctatactgaagtcttctatgaagcttccacacaaggcacaggagctactgattaacatcgcctccttggagattaccgtttcaaaccttgaaaagaagctaaatgatctgtactaccagctttgtcacgaaaggaacgaaaggttacttgctgaaaataatcagggatgcttgccatctacatcctccgatgagcaccagtcattgtcaacttgcacgtgtacgtgggaagagcacatatcatcgttgagagatttgaagtttgggggatctgaatcaatgagatcaatgagacaggacttattccccgagcttgaagatgaccaggatatgggagaagatcctgagggtcaacagatagtttctttaaacaggctgctagaaaagcaccgagattcttctttgaatagacttcttgaaaagcaccgagatgaagaggtccctttcatgcttaccttacctctatagttttaagaaccaactttggaacatattagagtatcaagaatttatttatctttcagcagatgcaagaatctggctccatggaaaatgaaggcaatgaaaatgagcagcctgacacgttatcctttgaacagtctattctaaagataactagcataaaaggagggaatctttggagcaacccaaatgagctctctgaggagatggttcgctgcatgagaaacattttcctacgcttgtctgaatccttgaagatatcgccgaagacatcttctgattgttcatcttcctccgtggagcgtctatcaggctccacattagcatctttctcagattcatccataatgccctcaatgctacggagtccttcagttgattctaatcacaatgacgagacgatgaaggaagtcaggaactttgatccgtataaagttaatggaaaggaaacccgaagagatatcggaaactatcgttcagcagctgaagtatcttggatgtctgttggaaaggatcaactagaatatgcatctgaagctttaaagaagttcaggtttgctgctgcagccttggctaaacctatgagtcctcatagatatatcacatgtctacaaactgtacaaaccttagtgcatatatacaaaaattttagcatatgatgtatacttttaaattttgttcagccttgttaatgttct

SEQ ID NO: 131167 - DNA, 357 bp, Zea mays
  Clone ID: MRT4577_51108C.1
aaaaaaacgggaaaaggaacttcttattttgggggggccccatacattatccaaaaaacttttttattgaattaccaccaataagccatctaaaaaagggcccccccaatgatttttttttggtaagaggcccctgggtctttcaaaacaaggtggacaaagggcaacaattgttgtaattgtaaaaagggtgcggggttaaccccaaactggtgggaaaaaggccacaactgttgctttggcaaaaaagaaaccccggttgcttcaactaactgggtaaaagggaggagtttttgctggtggaaaaaaacagggggggttaatgggggcaaatggaccccgggggccaccccggaa

SEQ ID NO: 131168 - DNA, 674 bp, Zea mays
  Clone ID: MRT4577_51109C.1
gtacgcctcgcggtatcggtccggaattcccgggtcgaccacgcgtccgcaaaggggcttgatttctcagatcgcattggaaagaccaagaggacaggatatgagtctggagactatgaaatgcttggagagggtctgggagtgaaggagacaccgcagcagaagtaccaacgactactgcatgaagtccaagagctgacaactgaggtggagaagatcaagacgacagtgaaggagtcagccaccgaggagaagctcacccctgtggtgctggctaagcagctggctgccctgaagcagcagctggtggcttcccacctggagaagcttctgggaccagatgctgcaatcaaccttgccgacccagacggagccctagctaagcgcttactgctgcagctggaagcaactaagagcagcaaaggcagttcagggggtaaggctacagctggggcccccccagacagcagcctggtcacctatgaactccactcacggcctgagcaggacaagttctctcaagctgccaaagttgcagaactcgagaagcgtctgacagagctggaggccactgtccgatgtgaccaggatgctcagaatccgctttctgcaggtctacagggagcctgccttatggaaacggtagaactgttgcaagccaaagtgagtgccct

SEQ ID NO: 131169 - DNA, 575 bp, Zea mays
  Clone ID: MRT4577_5110C.1
cctcgaggccggccgggcccgaaaccctagctcacttaacgccgccgcggagctgctccgcgcccccgacgccggtgattaggagcaggagcaagaggggttcggaatggccaagtctaagaaccacacggcgcataaccagtcgttcaaggcgcacaagaacggcatcaagaagcccaagcgccaccgccagacctccaccaaggggatggaccccaagtttctgaggaacttgaggtactcaaggaagggcaataagaagagttgtgaggctgagtcagaggagtgagatgatgcctgagtttgtggcgacaaatgcatctcttgtatcgttagggtcttagttgtgaacttaattttcacatctgtatgattaaaagagattcatcaattggtactgaagtgttgtttttttgtcttgttgcctatctggagtttatttaactaaaatcatcagttgtgtccttgagaatcgggcacttaatgtatcattttcggttctctgtgacctgtgctgttatctccaatttacctgttgatttcttgccttaaaaaaaaaaaaaaaacccgcggcc

SEQ ID NO: 131170 - DNA, 376 bp, Zea mays
  Clone ID: MRT4577_51110C.1
ggaaagggtaaaagtctggaatttgtttccattgtacaaaaaaagcagaactctacggttttctttcacagtaatgtgaaaatggaaggtaaaaaaaacaattctacctgatcaccaggtagtcctgatccgtgacggataaagggtatgtaaaggtctagaatccagagctcaaaaaatgtagggctttcagctaatctttgaccacatgtgacgaacattatttgactcgtagtttcagactgaagaaacagcggccatcttttgaaagtcaaaagacataagaatttcgatgaagattcttcacctcttttgaggaaaataggggagtacttgctgccggtctgccaggtttgaacgaggatagataagatct

SEQ ID NO: 131171 - DNA, 508 bp, Zea mays
  Clone ID: MRT4577_51111C.1
gcctttctttccctagcgccgcgccggcgccgccattctatatgccgattcggcggcgaccgcatattccatggcggttggttttggcacttgggaccggcggacatggcttacgacgggatcggccacagcacatgtatgactcctacgggcgttgcacgcaccccaatgggccgcgtttcttggtgccttggcttccttgcctgctacgataacttcgcctctatagcaattcaacctgctctggaaagagcaaacgtggatcctgccctcgagcacgaggactacttaggaaacgtctttagtgctaatttgaggcatgctcctgcaaggcaagctgctctcggtgccgggactccaaactctgatgttcgcaccactgttaacaaagtggtggcgtctaggcatgaaatctactatgttttcacggcaggcaattcaattcggtatcacagatactgccttgaatagttgtatggaaagcatgtgcaatgccccaaagttcatt

SEQ ID NO: 131172 - DNA, 512 bp, Zea mays
  Clone ID: MRT4577_51112C.1
gaggaggagaccagtctcggcggacaaggggaagacctccgctccctcggcgatcgcgagaccaccctccacaagatggtgctgatgcaggcagatccgttcctgagcgagctgaccaacatgtacgagcggagcacggagaagggctccgtgtgggtcaccatgaagcgatcgtcgatgaagtgtcaggctaggttgaagaagatggcgagtaagggggagcctgttgagtaccggtgcctggtccgcgccaccgatggcaagaggaacatctccacctcgctgtctgcaaaggagtatctgaaattccaagcttcgtatgccctggttcttaaagcccatatgcatgccttgaagaagagggagaggaaggacaggaagaagacggtcgaggcagagaagatacccgagaaggaaccgaagaagcagaagaaatcatcttcgaagaagtccgcagggtctaagtagtgaggtacttacagaattcaccgagtcctttttcgcccacatgt

SEQ ID NO: 131173 - DNA, 428 bp, Zea mays
  Clone ID: MRT4577_51113C.1
ttttgtattttttgttacaacgggcctatcaaacccgagcattactctaaaacaagcactaagtgcctaacaaggaaacatgggcccccccttttaagacagaccgtatgacaataattattacaccctccttacacatgaaacaggattatatactgcacagcgcgtccaatctaaccctgaccagggggtcccaatttttgtgaccaggatgagattgctagggcgccgtaacactgcacggtttcctagcaacagaagtgaaaaacgtttattcggacgtaacattggaccatccataagcacaaacactttctgacttagcacaccaatgtttcaggattgacagatgacgaacgcggaacatgggggtggctacccgagagtctggaattgcgagatatgcttgtgccggactcttggatcta

SEQ ID NO: 131174 - DNA, 330 bp, Zea mays
  Clone ID: MRT4577_51114C.1
cccgaaatgggctgacccatcaaggattcaaaggtctactcaaaatccggtttccaaaaggtttcctcagtccaacgtttccatcaaaaacacaaccgaacaaaaaatttcattaacaatacttttcgaaagaccaagatcctctttttttattgctcccaaaaattttgcactacccccattcttatccccctgttcttctttaaacctatccggaacccacaaatatttttttgatggggataaaaaaaaacttaaaaaaaaaacccacaaaacccattaaaacaaacccgtttgccgttcgggccccccccttgggaaacccctttg

SEQ ID NO: 131175 - DNA, 553 bp, Zea mays
  Clone ID: MRT4577_51115C.1
cgggggccgttttctatgcgcctgacgatgccattgattacaccatgcacgcaacacgcatctgggagaaaaagacatactgggctacacataccacctagtcactgactactatgtactaagagtgccggggcaatatatcactaagtgcatgcggtaactcaaactaaaacccggatacaccatccgaccaataacaacactacacaaacacagccctatatataggtgatgactagcgtatattaacaccatgtcgtgcgtggggagataaccacaacgaccagagtgacatggggcgtcttgactgtgccatccatctcggcccgacctaaccggggctgctcctggaattgggagtggagcaccaatcgtagacggagcaggagatacgctcccggcgaacgaaaaagatggctcccatggccttcacgggcactttgcttcccggcaggaagacgctgtctcacaccttgccagtgccgagcggtgcctgcaaccacaacaactaccactgtattaacggcgattacagcgtggactgaatatgact

SEQ ID NO: 131176 - DNA, 3411 bp, Zea mays
  Clone ID: MRT4577_51116C.1
ctcgaggccggccgggatcttgtcttgatcctctggtccgtggccatggcgtcgtccatgctctccgccaccaccgtgccactccagcaggtgggcggtctgtccgagttctccgggctaaggagctccgcgtcgctgcccatgcgccggaatgccacctccgacgacttcatgtccgccgtctccttcaggacccacgcggtcggcacgagcggcgggtcgcggcgggcgccgacggaggcaaagctgaaggtggccatcaacgggttcggccgcatcggagcgcaacttcctgcggtgctggcacgggcgcggtgacgcctcgcccctcgacgtcatcgccatcaacgacaccggatgtgtcaagcaggcgtcccacctgctcaagtacgactccacgctcggcatcttcgacgccgacgtcaagtccgtcggcgacaacgccatctccgtcgacggcaaggtcatcaaggtgcgtgtccgaccgaaaacgcagcaacctgtcgagtagcgagctcagcagagaccatctgatctaggttaccggcagttgacttgacacgagaggttacgcttgcgactcattgagcttctcgaggccggccgggagcagttgactttacttcgtaagctcagcttactcacgaaaaccttcctctaaaaaactcgctacggccaacctatactcactctctctctactctcttcgtctgcgcccccacaaaaccctagacgccaccctcccccgccgcgcgccgccgcccgcggacatggatctccttcgctctcatctccacaaggtccggatccccgagccaaccaaccgcatccacaaggacgagtgctgcgtctccttcgacactccgaggtcagagggaggcctgtacgtggacatggtctcgttcctggggttcgggagggagtacgtggagtggaacttcgagaagacggggaaccccgtgtacctccacatcgttcagcgccggaagccggagcccgacgaggcggatcgcccgcttaagaagcccaccctcctcgctataggtgtggaaggaggttttggtgatcaagaaccagaatatgatgaaacttttgaaatagtcatcttacctgattttatctgtcttccatttccgtcagttgatttgccagagaaggttaggcttgcggttgataaagttttacttgctgaaagtgctgatagaaaagaacaactggctgcttgggttgctgacaaaaagaacattagtgcatatgctatggacctgcagcagctagacaatggtgttattgtgcctcctactggatggaagtgtagcaaatgcgataaaactgagaacctctggctgaatttaactgatggtatgatcctttgtgggaggaagctctgggatggaagtggtgggaataatcatgccattgaacattatgaacagactaaataccctcttgcggtgaagcttggaacaattactgctgatttggaagcggcagatgttttctcgtaccctgaagatgatagtgttgaagatccgctattagctcagcacttatcacattttggtatcgatttttcttcactccaaaagactgagatgactactgctgagagggaacttgatgctaacacaaattatgactggaatagaatacaagaaagtggaaaagacgctgagcttctgtttggacccggctatactggtcttgcgaatcttgggaatagttgctatatggcttcaataatgcaagtcatgttttcaatccatcctttcatatcaaggtacttcgagaaacagagtttgaaagctgcatttgcaactgcacccgctgatccaacagtagacctaaacatgcaactgacaaaactagcgcatggtttgctctctggtaaatattctgctccagcaaaggaggggcaagaagggatacgttctcgcatgtttaagtcagttatcactgcgaaccatcctgaattttcaagcatgagacaacaggatgtccttgaattcttccttcaccttattgacagagttgagaaggcaaaccctggagaccgtgagctaaatcctttttccggtttcaagtttgttgttgaagagagggttcagtgcccttctgggaaggtttcttacaacaaacgatctgacaacgttctttctttgagcataccactgcatgaggcaactaataaagagcagctagaagcttttaatgagaagaaagctgcaatgaacttggatggaaaagaagtgtctaatgaggatattgtcaggcctagagtcccattggaggcatgcttggcaagtttttcagggccagaggagattccagatttttatagcactgcattaaattcaaagactaccgtcactaagacagctggtttcactacctttcctgattaccttgtgctgcacatgcgtaagtttgtaatggaaacaggatgggtgccaaagaaactcgatgtttatatagatgtgccagatacaattgatatcacacatatgcgcagcaaaggattacagcctggggaagagctgctacctgaaggaggttctggtgacgacagtgccgagcctgctaatcctgttgccagtgaagatattgtaacccagcttgcaagcatgggcttcaactaccttcattgtcagaaagctgctattaacacatcaaacacaggagttgaggaagcgatgaattggctcctctcgcacatggatgatccagatataaacgacccaatatcaaaagattcacgtgcttatgagccatctgttgacgaagcaagtgttcaaactctcatctcctttggattccaggaagacattgccataaaggccctgaaagcttctggtggtaatatcgagaaagctacagactggattttcagccaccccgaagcatctacctcagcatctgctgattcttccactagcaatgtaaatgctgatgacacatatattccagatggaagtggcagatacaagctgatggcgttcgtgagccatatgggcacctctacccactgcgggcactacgtagctcatgtcctcaaagacgggaggtggacaatctttaacgacagcaaggtcgcagtatctgttgacctgcccaaggaaatgggctacctctatttctttcagaggattagcaactaggcacgtcacacacaacggaaagaatggtgggctgttaggatactgtcttgctgattttaaagcgaacgtttgctcacatcctgccatgctggttactgaatggtcaaccgggatatttgcttttttgttccttgagacctcgattggcatcttccggttaaaaaaaaaaaaaaaaaaaaaaaaaaaaaaaaaaaaaaaaaaaaaaaatctgtgcttttttattaatgatttgcattggtggtttcttgtgttc

SEQ ID NO: 131177 - DNA, 806 bp, Zea mays
  unsure (1)..(806): unsure at all n locations
  Clone ID: MRT4577_51117C.1
ccggccgggaattcatatccatactttcaagtcacactacaaacaattagtctcctcacaaatctaccatgcgttttgactctcttttctgcgccaccatggctacactgtcctcagctctttgcacacgaccaaaagccgttgtatatcgtggtccggcgtcatcgccaggctgtcccgaagccattggcaatcttctagagtcttcatcataccatttcaaagttatctacgctggtccaaacgagtcagtcgacgttaccgatgaaacactgcagggcgccgccatttacgcccacggtggtggaccaaactgggacaaggcgtatcggcagacgaagaagtaccaaaggacaattcagaagtttgtcggtaacgggggccattacatgggcttttgtcttggcgcttatcttgctggacctaacgacggatatgatctactacccagaggtgttgaaaccgaccaagagattgaaagacgaggagcacaggtcaaagatgaggatgatacggtcatccaagtcgattggacctttgaatctgggaaaactgataagaaacgctggatgtacttccaagacggtgttgtcatcaaaggtctgagcgcaaagactcctggtcatgttatagggaggtactcttacaacggcgatgtggcgtcttcggtcacccgtatggtaaaggttgngttggacttgttgggcctcatcctgaagctgacaagacgtggtacgaagacgctgaaattgagaaatcggaaggtgtcagacgtgatatcggacatgatttcatccaagcaacta

SEQ ID NO: 131178 - DNA, 890 bp, Zea mays
  Clone ID: MRT4577_51118C.1
cattgggtacctcgaggccggccggggatcttgtcttgatcctctggtccgtggccatggcgtcgtccatgctctccgctaccaccgtgccactccagcaggggggcggcctgtccgagttctccgggctcaggagctccgcgtcgctgcccatgcgccggaatgccacctccgacgacttcatgtccgccgtctccttcaggacccacgcggtacgtgcctgccccggccgatctttcgaccctcatgcagccgcgtaggaaagtagctttgtatcgtattgcacgtacggccggctttggggattcacatgtgtgtgtaactgcgtatgcgctgctgctgcctggcttgctcgctcgctcgctcgctcgtgcatcacatcaacaacaaccaggtcggcacgagcggcgggccgcggcgggcgccgacggaggcgaagctgaaggtggccatcaatgggttcggccgcatcgggcgcaacttcctgcggtgctggcacgggcgcggcgacgcctcgcccctcgacgtcatcgccatcaacgacaccggaggcgtcaagcaggcgtcccacctgctcaagtacgactccacgctcggcatcttcgatgccgacgtcaagcccgtcggcgacaacgccatctccgtcgacggcaaggtcatcaaggtcgtgtccgaccgcaaccccagcaacctgccgtggggcgagctcggcatcgacctcgtcatcgagggcaccggcgtcttcgtcgaccgcgagggcgcggggaagcacatccaggcgggggccaagaaggtgctcatcacggcgcccggcaagggcgacatccccacctacgtcgtcggcgttaatgccgaccagtacaaccccgacgagcccatcatcagcaacg

SEQ ID NO: 131179 - DNA, 649 bp, Zea mays
  unsure (1)..(649): unsure at all n locations
  Clone ID: MRT4577_51119C.1
gccccggacctggtggctccttgaacttttccgtgctgttgcgacctagcatataacctgcgctgatgactaggggatgtgacgttttatcagttcgaatgagctgtggatttgatcggtaacctcaagcagtgtcaagccatcaactctgaatgtggataatgcttggatttgtgccttgtttcttgggcttgtgtgtggttaccacccaagaaactagaaaatttggtggggggcaccttgatatgataacgattcttcgtttctactgctacagtcttgtcaaatctatcaagtcttgtggatatctatagacttctgtggtgctgctagtgtcagcttttaagaactattgtcctctcgtggcaatatattagacgtcagatatgaggaggtttgatgctaacgacgggataggactataggaggtctgaatgaccgatgatgtctggtgccgctccatttggggtagtattagagactttgtgttgcgacttagaggagtaaatgggcaatgcaatgagatgttgaagcaccccgccccttttttcaaaaaaatggaggtttgcttggtaaatggcttattctgcaaatcggnggtgaatgtttctgtccagtgtncatgtatattgtcgaccttttgcttgct

SEQ ID NO: 131180 - DNA, 162 bp, Zea mays
  unsure (1)..(162): unsure at all n locations
  Clone ID: MRT4577_5111C.1
actcgttcgggcttcttcttccccaccggttcgttttctttttctggttcgtggcccaaaaggaaggaggtgtcttctttctgacgttgagtaccnctgcttcnttttcggcctctcctgtgccaccgactaccactccctttacaactccttcagcaccta

SEQ ID NO: 131181 - DNA, 595 bp, Zea mays
  Clone ID: MRT4577_51120C.1
aacaatgccaaaaggttaacatatagcttttacagcattcttggattgcagaaggggaaatagcaaggaagggtccaaataaattgattaaagggcccaggcttacaaagcttaacaggtcacacaattaccggaacgaccacaaacaaaacttggaatggtgaaaacaagggattggttaagcaggcgccggatcgcattatttttttttgggagcagccttgggcaccttggcgcccggtggggccttctttttcacactcttgataactccaacaacaaccgtctggctcatgtgtcgggcaggaaacctaccacagggaggatacgctgagaatgtctccaccaccatgggcttggtgggtgtcatcttctccataccagcatcaccgttcttcaggaactttggctccttctcaagctccttgccagagcgcctgtcgatcttggtaatgagctcagcaaacttgacagcgatgtgggaggtgtggggagtccagcacaggagcatgagccgttgccaatctgcccagcgtgggttcatgatggatgacctggggaggtggaagctggcagcctccttggcagggtcata

SEQ ID NO: 131182 - DNA, 212 bp, Zea mays
  Clone ID: MRT4577_51121C.1
agtcgcatggtcgcgtcggaatgctgctcgagctgccgaggctacacgaggatgatctataatcggcagcttgcggtagtagcgcagatgttggcctgatgctgcagagcctagggcatgcggctattcctagtaatttcggtcccgcgctactcgcctgacttcgatgccgcgtcgtaatatctatgtccatttcagggtgaatggctgtc

SEQ ID NO: 131183 - DNA, 239 bp, Zea mays
  Clone ID: MRT4577_51122C.1
ggattccgggtggagacacgcgtgcgcagactagcgacttgcatggctctacacgtgtcagcagcgctttagaagcatgactgtgaccgtcctgaccgttggtcctgctgcaaccaggcagcactattactagaccgtacctggaaggccatttcgagcagctgagcatgagagaccaacctgctagacaactattgcatagacgaggtgctgactactgctcaggagcatcgcgtaca

SEQ ID NO: 131184 - DNA, 1283 bp, Zea mays
  Clone ID: MRT4577_51123C.1
gccggccgcaacaggcaatccgaacggcctagcccaccccgccggcgcagtcttcaccccacacttcaatggcccagtcgcggtcccagccaatcgcccacaagcgctcgcaggagaggtcgaaaccctagcagtcttcagcacgcacaccaatcgcccacaagcgctcgcaggagaggtcgaaaccctagcttttgcggcggcggcgagagaagatgatctacgacgtgaactcccccctcttccgttccttcctcagccagaagggcggcgccgacaagaggaaaatggaggagcataaaccaaaggagcagaggcccaaggctaacgagaacaagcctgtgatgaacgaatgaatatctccagaagctttgttcaatgtgcaaccaagtccgatgtccgtttgctctggtcagcttaaaaccaacgcttccaataatcctatattggtgtcttagtttccccttatagtgttatttgctcggcttgaacatggcaacggaaatgaaacttgaactacctatggtactgtcatcaatttgagactcccatggttgacaaaaaaaaaaaaaaaaaaaaaaaaaaaaaagtcttgatcctctggtccgtggccatggcgtcgtccatgctctccgctaccaccgtgccactccagcaggggggcggcctgtccgagttctccgggctcaggagctccgcgtcgctgcccatgcgccggaatgccacctccgacgacttcatgtccgccgtctccttcaggacccacgcggtcggcacgagcggcgggtcgcggcgggcgccgacggaggcgaagctgaaggtggccatcaacgggtcggccgcatcgggcgcaacttcctgcggtgctggcacgggcgcggcgacgcctcgcccctcgacgtcatcgccatcaacgacaccggcggtgtcaagcaggcgttccacctgctcaagtacgactccacgctcggcatcttcgacgccgacgtcaagcccgtcggcgacaacgccatctccgtcgacggcaaggtcatcaaggtcgtgtccgaccgcaaccccagcaacctgccgtggggcgagctcggcatcgacctcgccatccgagggcacaggagtcttcgtcgaccgcgagggcggggagaaacacatccaggcgggggccaagaaggtgctcatcacggcgcccggcaagggcgacatccccacctaccgcgtcggcgtcaatgccgaaccagtacaaccccgacgagcccatcatcaggaacgccttcctgcaccaccaa

SEQ ID NO: 131185 - DNA, 1439 bp, Zea mays
  unsure (1)..(1439): unsure at all n locations
  Clone ID: MRT4577_51124C.1
attcggctcgagagcaaataggtcagatgaaattaatcacagtctcgatgattttaaccaaagtaatcccaagccagtgctgaagggaagagtctccaaaatgatgtgcccaagacttgcgtttcaactgccaaaagtgttgcctgtatgcgaacatcacaaaagggagatgtcattgccttccaagcatgttagtccacggaaagcaacaaaaagtagctttagaaagcaatatgaaggaccaaacagacatgtttcacgtcatactgaacatcagaaaaccaaactcgttatgaaggacagaaatacaggtcctgctcatatgagaagttgtaggccaacaaagcaaattgattgtacttgctcaagtgcttccttggattcatctccaaagactaaggaagtaaatgatgcagaaccaagatgttctaaatctgtaaaaacttttgagaatgtcatggccaagaaaagaaaacgacctattctatcatatgatgaagatgccaaggccatgcagatggaagtgaggatgcgcaggagacacagggaaagtggtgtgatgaagctgcgaagatccacagaaaattctgatgaagcgatgtgtccaggaaattcaaataatcaacttaccaatgatcatacgaaggcaaggaagcagagaagggccaacaaagacaataaaacaccaccagtgaacgctagtgttccatgcacacagattgatgctgcacgattagcatcagatcagcaaagctttatttgcacgcgacccattgatagaccttactggactggaatcatgaagattggccaggaatatatttcattggttgcacacctgtcaaatcaagcatgcaagaaggtgcaggaattatcgatgtcattaccaccactaatgaaagtaacaaagcattcaaagttgaaagcctggccagggaggtggaaggcatcggaacctactgctgaatgcgttggcttgtatttcttctcagataatatgagggaactggatcaacttgtgcattatctcaatgatcatagcttagtcctaaaatatgtcgttggctttgccaagctgctgatctccccgtctgttttcctaccagagcaatgccaaacgttccaagggaaacgctatctgtggnggagtgttcaagcgcaggatgaatacggggagaatacatcatgtgaatgcaaagtgacaccctagtccaataaatccatgttgtgaagaactctcccctacccaggctatcgggccttgtcattgtgcggacgtctgaggtcggagcacttcatttgtttgggagctggaaaatgaaggtgcctgggttggtttctctgaacttgtgaaagggttagcgaaggaccgtactggaatgttcatggcctgnaggaatgatgtnagcagtaggatcagaaatcagaactagccagcg

SEQ ID NO: 131186 - DNA, 999 bp, Zea mays
  unsure (1)..(999): unsure at all n locations
  Clone ID: MRT4577_51125C.1
cactcctatgggcgattgggatcctccgaggccggccgggatcgtcatcttgtcttgatcctctggtccgtggccatggcgtcgtccatgctctccgctaccaccgtgccactccagcaggggggcggcctgtccgagttctccgggctcaggagctccgcgtcgctgcccatgcgccggaatgccacctccgacgacttcatgtccgccgtctccttcaggacccacgcggtcggcacgagcggcgggccgcggcgggcgccgacggaggcgaagctgaaggtggccatcaatgggttcggccgcatcgggcgcaacttcctgcggtgctggcacgggcgcggcgacgcctcgcccctcgacgtcatcgccatcaacgacaccggaggcgtcaagcaggcgtcccacctgctcaagtacgactccacgctcggcatcttcgatgccgacgtcaagcccgtcggcgacaacgccatctccgtcgacggcaaggtcatcaaggtcgtgtccgaccgcaaccccagcaacctgccgtggggcgagctcggcatcgacctcgtcatcgagggcaccggcgtcttcgtcgaccgcgagggcgcggggaagcacatccaggcgggggccaagaaggtgctcatcacggcgcccggcaagggcgacatccccacctacgtcgtcggcgttaatgccgaccagtacaaccccgacgagcccatcatcagcaacgcctcctggcacaccaactgcctcgcgccattcgtcaaggtcctcgaccaaaagttcggcatcatcaagggcaccatgaccaccacccactcctacaccggcgaccagaggctgctggacgcgagccaccgcgacctgcgccgcgcccgcgccgccgcgctcaacatcgtgcccacgtccaccggtgccgccaaggccgtctcgctggtgctccccaaccttaagggcaagctcaacgaggtcgacgacggagacgttncgggtgcccacccc

SEQ ID NO: 131187 - DNA, 244 bp, Zea mays
  Clone ID: MRT4577_51126C.1
attcagttggaaatacatggcttctgttctgtctgcaatgggaacagctctctgcaacacacctcgatcatgtcacgaggctaacctactaacccccacggttaagtacacctcatgccacttgtgttctgtaaacgagctgaacgtcaccaaactcaactgcaacaccaagtgccatgccatgccaccacaaaatgcagacacctccaaaaacttgtcactacaggtgagcaattttaaccag

SEQ ID NO: 131188 - DNA, 530 bp, Zea mays
  Clone ID: MRT4577_51127C.1
gggtcgtacccacgccgtccgttaaaaaaaaaaaaaaaaaaaaaaaaaaaaaaaaaaaaaaagggaagaaaaaaaaaaaaaaaaaccaaaaaaaaaaaaagcttgcttgcggggtgcatgcttttttatttggccgttccttagttccaattcatgggccttctttgcccatcgttgtacttggaaaaacctgggaaaaccccagctttggggaggggggggacctcccctttcccccgcttttcccaatttgaaggagtcccgccccttccccctttcccaaaattgcgaaaccctgaaggggcctgggccgcccccctttcccgccctttaaaggcccttgatggggggggttccccccggtttcccgcttcgtttggcctgcgctttaccgccccttccttccggttacttcctttattttccagccctttacggcccttttccctggctgtcttctaatgggtgtttccctggggggccccttttgcttgctaatcggtactttgccccaaaaaatttttttaagg

SEQ ID NO: 131189 - DNA, 369 bp, Zea mays
  Clone ID: MRT4577_51128C.1
ggaccttgctggttctgagagggtgaaaaaaatctggttcagcaggaaagcaattgaaagaagcgcaaagtataaataaatctctttttgctttggctgatgttattggtgctttatcttctgatggacaacatataccttaccggaaccataatgcttatgagtgattatctaatgtggattgtctgcaaaaaagctaagttttgtggaccttgctggttctgagagggtgaaaaaatctggttccgcaggaaagcaattgaaagaagcgcaaaaaccataagttaacaatgcttatgagtgattatctaatgtggattgtctacaaaaaaaggttgcatttccggtttttattcagtaccaacaaaa

SEQ ID NO: 131190 - DNA, 432 bp, Zea mays
  Clone ID: MRT4577_51129C.1
agaatgaaagtaaggttatgttaattttattgatcgttgaaacacgaacattttaagtattagacaatcaattgaaagttgcatttcaattggaatctgaacaaagtagaagccatattgcagattgattgatttattgactgttatcaatcaactatttaaccgttaaaactaaactaaaacaaaataaacaggatattggtagttaataaactaattggtttaaatttagtttagctgccacaaacagcaaatactgaaacaagcacataattataatatgctttaaaacaaagcatcattttactctttgttgcgacgagattcaataaattgagccaatgctttagagtttgcaaccacaatggtatcccaatcatcgacctgtggccgcaaacgttccacccatttgtggatgttggaatatttgtc

SEQ ID NO: 131191 - DNA, 196 bp, Zea mays
  Clone ID: MRT4577_5112C.1
aacacacattacggtatagcgtatatattatttctaaagaatcaacatagaattacaggaacatataatatcatgggaatttatgtatacggagtacaattccgactttctaaagcttgtgtggggctttagggtgtcggtcgaaaggggggggggggtcttcttgagggtaacattaagtcgttcaggcaaacca

SEQ ID NO: 131192 - DNA, 301 bp, Zea mays
  unsure (1)..(301): unsure at all n locations
  Clone ID: MRT4577_51130C.1
cggacgctnggccgngcgcatacacacatggngtcgcagnagnggnaanagcatgctggagcngcggctgcgnccgncctccgncgtgngcttcgaggactacctgccggtgntggntgatcggcngggcgatgacgggctgatgcnggagctggcgancgggttccngctgctgatggacccggcgcgcggnntcatcaccgtcgacagcctccgncgcaacgcnccgctgctggncctntgcggcatgtcngangccgacctccgcnggatgctcgncgatggngacttcgactgcgac

SEQ ID NO: 131193 - DNA, 662 bp, Zea mays
  Clone ID: MRT4577_51131C.1
attgggacctcgagccggcgggagctcaccccatccggctcctgccataacccgtacatatgcgcctccgcaggcgttccccctgcatcgccgccaaagatgcagatctttgtgaagactctgacggctaagaccatcacttattgaggtggagacctcgaacaccatcgacaatgtgaaggccaacatcaggataaggaggtcatccccccggaccatgagcggctcatcttcgccggcaagcagctcgaagacggtcgcaccctccccgactactgcatccagaaggagtccacactccacctgtgtgctccgcctccgcggcgacgccaagaagcgtaaaaataagacgtactgcaagcccaagaagatcaaacacaagcacaagaaggttaagctctccgagctgcagtgctataacgtggacgacaccactagcaacgcgacccgactccgcaaggagtgccccaacacagaatgcggtgcgggcgtcttcatggacaaccacttcgaccgccactactgctgcaagtgcggactcacctatgtctacaaccagaaggagcagttgcttgacccgatttgctttatccgactagcctatcgaacatccagctactcggtgactcgaattgaatctcatgaacacctgattgacggtg

SEQ ID NO: 131194 - DNA, 321 bp, Zea mays
  Clone ID: MRT4577_51132C.1
caccgacggacaacaggagggtttgaatacaccgtacgatgagtaccttaagggcgcgactggacgcaacgacatcgaccatgacaaggggacgccgaggatcgagcctgaggaagagggccgggcccactatctcaaggccgccacatctcgaagccagggccggtggcagcatggctgaggacttggatgcaagggaagagcacagctgaaatctaacagcactggaggaagacgtgaagaggccaaagactgttagctctaaagagggactagggcaaaaattcaggcaaccttcaggaacaggaacgaccaccacga

SEQ ID NO: 131195 - DNA, 602 bp, Zea mays
  Clone ID: MRT4577_51133C.1
ccctctgcgctgtgtcaggactctggcacactacctccccccgtctccacctcggcggcgggggaagaagacagggctggagcaaggcgatgtcctgtgctaccgcactaaccctctataaagaaaacgaataagaaacagagagagagcgagcgaccgggggctgagcaatgtcatggggcacggggacaggtgcgaccgcactcggagacgagcacgactacttccgcgcggcgcatggcggagacctccaggacctggacgcgcatgtagacgacgacccctgtctctgccgccgagccacgctttacgaccgggtttccgggctccacatcgccgacggatatggacgtctggaggtgctaggaaaggtctgggatcacggagagccgacggacggggggaatcgcacaagcagacaccgctgatgctcgcggagatagacggcatgaccgactgtatgctgaagctccttcaggccgaagccaatattgttatgatcgactaccaggactggcggacctgcctggaccacgcgtactacttagaccgcgtgggctgactgcatgccatcctgacggcggcgcggaccacgccggggg

SEQ ID NO: 131196 - DNA, 738 bp, Zea mays
  Clone ID: MRT4577_51134C.1
aattcggcacgaggctcctctgcttctctgccgcccagcccagcttgccttctcgaacagcgcgagcgcgcaggcgaggagcagcgtgtccgtccgtccttgcactctctgcagcctccctctctctctaccccgcccatctccctccccaggccttcaaatccgcggccgcgccacccgctgcgctgctgccccggtccttgcattgctcgactcgaggcgccccagcgctggtcgcctccgtgccttccgcggtgttcctgggcgcggctcctaggctcgctcattttacttctgctgctcctgtgctgcctcttggggggcgttcctttacggcccggagcagcgcctagctgcttccgccattgatccggcaaccccagctctaggtttgctttgctctcgtgtgtggtagcgattctggtgttgggggggtgccaccaacagttacaggttgtcgccacgccgagggtgtcgtcctgcgttccttttttttatcttctctccgtgatctctctagctgcatccttgcccccccttcgctccttgctttcttctctgcgctgcctttggtgtgttgccagatagctcccgggacttcaccggttcgctaaccggcaccggcccatagtctgcggacaaacaggggccagttcggcctatttcatttcacaaaaggggggcaagattaggcggcggaatcctgttctttcccgattccttttggacatactgctc

SEQ ID NO: 131197 - DNA, 180 bp, Zea mays
  Clone ID: MRT4577_51135C.1
tgtcgcactcacacgtccgctcgctcggttgcctgctctattagctgagagcttagcaatggtgccacaatttgttgagaattccaaaaatcatggcacaaattttattggatgtataaaatcaaagctctctagtaaagttggttttcggatttttaggacagttagaaattattaagt

SEQ ID NO: 131198 - DNA, 3850 bp, Zea mays
  Clone ID: MRT4577_51136C.1
ctcctggccatacgccataggaagaacaggacacggacggaggtgagggcaccactcggaaatcctgccatcctgctagctggaggggctgtagctggacagtgactgagagtgagaggcagcagcggtccggtggctggcctccttgctggatgctcgtcggcacgagggtacgacgagcacgaccgcctctccctcccgggagcgttccctctccggcgaggtccctcctccgggaaatgcggcggggcagttacaaatgacatcttcttcttcttctccttcgtaacctgctgcaaaggagggcaacctcctgcatttccgggttctctttccacgagaagggaagggggaaccggaggatgccggccaagtacctgggggcgttggcggaggacaggcgcccggatctctatcgccaggtgggctgcgtcaccgggatcttgcaggccttcgaccgccgccaccatctcgcctcctcccacaagaggctcctccccccaacaggccatgcacccagcaatccaagcaaagggggagaatgcacgagatattcaccccaggttgttctggagaagaactcgagtaaaacttgggctgatagccaaagagcaccagcaacagaactatctcaaacctcatattcatcatcaccctcttcgtcattctcatcccttgatggcaacaggtcaacacaacaagacctatcatccactgaccgaatgctatttccagagaggccgtttaagagctcgccgaagctcaagagttcttttgacagtgacaatggactcgactaccctgatgacgcgcttaccaagtccaagaacatgcccatagttcaatccagcctgccaactcttggtataagaaatcttgtgaaggattcaatctacaaggatagccatgaattgtcagtcagaattagcactgaagaagaagtaaaagatcacccatccaactgtggagatcaacctatgcaattgaatgggcctcaccatgacagtacacaaggaaaaagcaagggtctcatggacatcaacgaatcgcttcgagtgctagccaagctcagggaagcctcgtggactcctcctgaatctgttcatcatgcaagactctcatatgatgctcctcggttctcacgcgagggaaaggaagcaacatcaaaattgagggaggtaccgaggttgtcattggacatcaaggaaggtcacctttggaatcgtgaaattgactctaggttggacccaagcttgagttctgcagacagaaacagcaacactgttactgggtccaatgcagctttcgagacccagcaggaacagcctgcctgcaagcggcttcctagcgttgttgcaaagctcatgggtttggaagagttgccagagcataatcaaagtacagcatcatcacatgcatgcaataccgttcaagagaacaagcaagatgccatgttgaactccttgagcatctcctaccagtacgagcatgctcctcaacaagaaaggaatcctgattcaactgtaagaaatttacccaactctaagttccctgtccaaactgcaccatggaagcaacaagaaaggattgtccttccacgaaaactgccaaagggatcaaaaggagcccacggaagagaacctgctgcaccatggaaccagctgaaggatcttgattttcagcaaccaaacaaagaccttagagcacttaaacagattttggattctgcaaaaggactattagaaaataagaaacgggaggaagcatttatgccaaagctatataatggaaaccatgatgaccaagagatggccagtgcgaacatgagactgaaccgtaacaccaacaacatgtggatgcctgaagagagcaacgctgaaagctctttcaaatcgcctattgtgataatgaaaccttcaaaatctgcaaacctttacagcaaagtggattcttctgtcttcccattaggaggttcatctgatctcccacagccacaaacaagcaatagcactgatagaaggaaagcttcaacgattaatagaaccgccaaagggcaatatgcgaaattgagtccaagggtgcctacttctcaaccccttgtttcttgtgacaggagatcatatggaaggaatgatgatagcagcaacaaccaaaaatctagttcactgctggtcactgagagctcaaccagaagacagcagctgccaaggaatagtagcgtaagtatgcaaaagaacaaaaattccactagcccaaaattactacagagaaaacttgatccagagcggagggctagaccacctattccttctgctgagtctaacaaaagcgaaaggcaatctggagataggaacaattcagaaacagtgtcaccccgaagcaaattcagaaggaaacttgtgcgcccacaaggtgatgatggcatgcccattggattgaacaacaggacaaggagcctgtatcagcatgacaatgatatgtccataaggtcagatggcagtataagtgttgcttcagagctggatattataagcaatgacagatctacaggagttaatatttctaactttgagcaaggcattggaactccatctggaaggaacccacagaaagtgaaaacctcatatgatgcaagtatggacgtgccatctgtagacccttcagctgctatttcggaacggcccagtccagtttctgtgttggactcttcatttgatcaggaggatttgttccctaccagcaggactccaaattcacttgctgttgatgatgagcgcgaaacattagaggaaccctggaaaccatctgtcgctatacagtccaagaacaataaactcgcaaatgttgcgagcttgcttgagaagctccagcagcttagcgtgaacaaggatgaggatgcacctccggttgaccatattgctttcttgtgtgagacagagagcccagaccaccgctacgtgtctgagatactgctggcctccggtcttctgatgaaagacctaggttcaggacagacaggtctccagctccactcctctggctacccgatcaaccctgacttgttccacgtgttggagcaaaggaaggctggatgggtcagtacacctgatggcatccatcagagcagaagcggcacaaaatctgatcccaggagagcgcaccggaagctgatgtttgacactgtgaatgagcttctccttcagaagtttgagaaggaaaccgccgtttatgcgctcagttccttcaccagagcgaaggatccacctgcaaagacttttagcgggcaacagctgccgaagttcatatcttcgggaattgaagaactggatatggagcgatcgtccatcagccagaaggacagcagcgtgatacctgatgcagagatcctgcggaggctgcagggatggacgagcttcagcaaggagctcccggggatggtgctggagatcgaaaggtcgatattcaaggagctggtggacgaggtggtgcatggggagtctgctgacggcccggagatgaaggcggctggcagacggagaaggcggctctttgcttgatacggtttgtttgaccatcgccatccaccatttggatgggcctgatttgtgaagctgtaactttgtttgtcttgccatgagagtgagaccctattttctcaagagaagagggagagagaggggatagcgcagatttggtgagagacccgaaaatgggcattcgttcgtgctatatatagatactatgtataccattgtttcttgactccttgtgatttactgtggatgatgctatttcagtaaaaaaaatggtcgaatgacagctgttttttgccatggaaaaggcaaattat

SEQ ID NO: 131199 - DNA, 375 bp, Zea mays
  Clone ID: MRT4577_51137C.1
gggctccgctgctcatcccgtttcccttactctcctctcttggctgccgcgcttgcctgctccggatctccgttagaaggcgggcggggtcccgttgcccgcccgcgagatgccctgcgcgcgctgccccaggcgctggcggagctcctgcccgacttgttgcagcccccccggcctggatcactggcctcgcgttgcacgtgaaaagatggctggctcagtggtggcctcgaccaggtgctggccctggttgtcccgttctttgatgcccgtgtttctcatcttcgtgttcttgctgaggtctgtgagcctccaccctttgtgaggctggggctggcgctctgcgctgaacgcttggttcaccctttgactgtt

SEQ ID NO: 131200 - DNA, 860 bp, Zea mays
  Clone ID: MRT4577_51138C.1
ggcccgctcgaaaggccggcccgttccgaagatcagagaaagagccgccttctctgtctgccagcagccttcatctccgggccgtcagcagactccccatgcaccacctcgtccaccagctccttgaatatcgacctttcgatctccagcaccatccccgggagctccttgctgaagctcgtccatccctgcagcctccgcaggatctctgcatcaggtggatccttcgctctggtgaaggaactgagcgcataaacggcggtttccttctcaaacttctgaaggagaagctcattcacagtgtcaaacatcagcttccggtgcgctctcctgggatcagattttgtgccgcttctgctctgatggatgccatcaggtgtactgacccatccagccttcctttgctccaacacgtggaacaagtcagggttgatcgggtagccagaggagtggagctggagacctgtctgtcctgaacctaggtctttcatcagaagaccggaggccagcagtatctcagacacgtagcggtggtctgggctctctgtctcacacaagaaagcaatatggtcaaccggaggtgcatcctcatccttgttcacgctaagctgctggagcttctcaagcaagctcgcaacatttgcgagtttattgttcttggactgtatagcgacagatggtttccagggttcctctaatgtttcgcgctcatcatctgcaggtttcagggaacaatgcttaagtcaatgtctggctgacaaaaaaattagtaaacaatcatgcacagtagttaatcattctagtacatctcagttttacaatagcgagtgaactttagcaaaagagctcaacattctcct

SEQ ID NO: 131201 - DNA, 3252 bp, Zea mays
  Clone ID: MRT4577_51139C.1
ggcagcagataccctagcctgggaagctgggcgggggtcccattctcctccgttcgagagggaagggtaggttagtggtgcgccatcgactatgggctgcgtcttcggccgggcggctgcgtcttcctctgcatcgccgaaaaagaagtggggcaaggggaggtccaaaaagcaagggtctcatggacatcaacgaatcgcttcgagtgctagccaagctcagggaagcctcgtggactcctcctgaatctgttcatcatgcaagactctcatatgatgctcctcggttctcatacgatggaaaggaagcaacatcaaaattgagggaggtaccgaggttgtcattggacatcaaggaaggtcacctttggaatcgtgaaattgactctaggttggacccaagcttgagttctgcagacagaaacagcaacactgttactgggtccaatgcagctttcgagacccagcaggaacagcctgcctgcaagcggcttcctagcgttgttgcaaagctcatgggtttggaagagttgccagagcataatcaaagtacagcatcatcacatgcatgcaataccgttcaagagaacaagcaagatgccatgttgaactccttgagcatctcctaccagtacgagcatgctcctcaacaagaaaggaatcctgattcaactgtaagaaatttacccaactctaagttccctgtccaaactgcaccatggaagcaacaagaaaggattgtccttccacgaaaactgccaaagggatcaaaaggagcccacggaagagaacctgctgcaccatggaaccagctgaaggatcttgattttcagcaaccaaacaaagaccttagagcacttaaacagattttggattctgcaaaaggactattagaaaataagaaacgggaggaagcatttatgccaaagctatataatggaaaccatgatgaccaagagatggccagtgcgaacatgagactgaaccgtaacaccaacaacatgtggatgcctgaagagagcaacgctgaaagctctttcaaatcgcctattgtgataatgaaaccttcaaaatctgcaaacctttacagcaaagtggattcttctgtcttcccattaggaggttcatctgatctcccacagccacaaacaagcaatagcactgatagaaggaaagcttcaacgattaatagaaccgccaaagggcaatatgcgaaattgagtccaagggtgcctacttctcaaccccttgtttcttgtgacaggagatcatatggaaggaatgatgatagcagcaacaaccaaaaatctagttcactgctggtcactgagagctcaaccagaagacagcagctgccaaggaatagtagcgtaagtatgcaaaagaacaaaaattccactagcccaaaattactacagagaaaacttgatccagagcggagggctagaccacctattccttctgctgagtctaacaaaagcgaaaggcaatctggagataggaacaattcagaaacagtgtcaccccgaagcaaattcagaaggaaacttgtgcgcccacaaggtgatgatggcatgcccattggattgaacaacaggacaaggagcctgtatcagcatgacaatgatatgtccataaggtcagatggcagtataagtgttgcttcagagctggatattataagcaatgacagatctacaggagttaatatttctaactttgagcaaggcattggaactccatctggaaggaacccacagaaagtggtaaagaatttccttgcaattatgccttctttctaaagcttcactaatttaagatgataatgtatatttccaatacttaactactatggagaaaataataatatgtaatggaaatagtatctgtttttggtcttgtattaatctctctccaaatgctagttgttgttgggccaggaaacgagaatggaaaattaaatcgcatgacatacgatgctgcatgtctcatttttatggtttgtgtcttcagaaaacctcatacgatgcaaatatggacgtgccatctgtagacccttcagctgctatttcggaacggcccagtccagtttctgtgttggactcttcatttgatcaggaggatttgttccctaccagcaggactccaaattcacttgctgttgatgatgagcgcgaaacattagaggaaccctggaaaccatctgtcgctatacagtccaagaacaataaactcgcaaatgttgcgagcttgcttgagaagctccagcagcttagcgtgaacaaggatgaggatgcacctccggttgaccatattgctttcttgtgtgagacagagagcccagaccaccgctacgtgtctgagatactgctggcctccggtcttctgatgaaagacctaggttcaggacagacaggtctccagctccactcctctggctacccgatcaaccctgacttgttccacgtgttggagcaaaggaaggctggatgggtcagtacacctgatggcatccatcagagcagaagcggcacaaaatctgatcccaggagagcgcaccggaagctgatgtttgacactgtgaatgagcttctccttcagaagtttgagaaggaaaccgccgtttatgcgctcagttccttcaccagagcgaaggatccacctgcaaagacttttagcgggcaacagctgccgaagttcatatcttcgggaattgaagaactggatatggagcgatcgtccatcagccagaaggacagcagcgtgatacctgatgcagagatcctgcggaggctgcagggatggacgagcttcagcaaggagctcccggggatggtgctggagatcgaaaggtcgatattcaaggagctggtggacgaggtggtgcatggggagtctgctgacggcccggagatgaaggctgctggcagacggagaaggcggctctttgcttgatacggtttgtttgaccatcgccatccaccatttggatgggcctgatttgtgaagctgtaactttgtttgtcttgccatgagagtgagaccctatttcatctcaagagaagagggagagagagggggtagcgcagatttggtgagagacccgaaaatgggcattcgttcgtgctatatatagatactatgtataccattgtttcttgactccttgtgatttactgtggatgatgctatttcagtaaaaaaaatggacgaatgacagttgttttttgccatgtaaaaggcaaattatat

SEQ ID NO: 131202 - DNA, 436 bp, Zea mays
  Clone ID: MRT4577_5113C.1
actcctatgggcgattgggttctaaagggcggcgggtacaacattttccacgaacgctgccttgtgacgttgattgtgcacttctgtaatgtcatgtctgcgccggcaataaaatgtggacttccactgcaaatttctgttgatttctcgctaacgcatcgatttcctgaataagcaatcggcaaagaggctaaacatctttcgcgtctcaatgctcctccaaggatatcgtgcacaatatagagaaggcatttgtcccacctgatttcaacgggcgtgaacagaattgcaagatgaaattgagagatgacatatccgtaacaaaagaccacttatctgtagccactgacatttttgaggatgatccttcacttcacatgatcgagattcccaaaaccacaatataaccttgaaattccacaacttctactagaat

SEQ ID NO: 131203 - DNA, 730 bp, Zea mays
  Clone ID: MRT4577_51140C.1
gggagttatgtgctaagactctaaagttagatgttttgcaacaatgaaagctaaaatcccagtcattttgtgcaaacttgagaaaaatttcctcatgctttctttgatgtaatgctacacctagctgttcatttgcctgatgaggcagtccttagaggcccagtacaatatggatggatgtacccagtataaagacgattgttgacattgaaacgggttgtgaggaacatggcaagacctgaaggatccattgcagaagcatatgtcgctaatgagtgtttgacagcatgctcaaggtactttgatgatattgacacacgacacaatcgtgaaggaaggaacaaagagcgtgttgatttgagaaaaggtgatttttctgtgttccagcatggagttgatctacttggagcaccaaggcttacatatcttgaagataattatgacagaatggtttggtttgtgctaaacaattgtccggaggtcgagcaatatttgaagatatacaaggaagagttagcggatcaaggaactccttatgttcaaaaaacccatgataagcaattttctttctggtttaagaagcatattgcaaaactacgttacgtggatggagaagacattagtgatgacctatttgcattgtcatgtgaaccggaccttcgggttcgaatattttcagcatgtcttgtcgatggggttcgatatcacactattgaccgtgaaagaaata

SEQ ID NO: 131204 - DNA, 197 bp, Zea mays
  unsure (1)..(197): unsure at all n locations
  Clone ID: MRT4577_51141C.1
tccgnaaatgggcgcagcttgttggatggnnagttagaaaanaaccactggttacatgggtacataagaattttcagggtattttgaccaatgaaaccagatgcctaatgtgtgagacaatcaccgcaaagaatgagacattttttgacttgagcgttgacattgaacagaatagttcactcacaagctgtctgaag

SEQ ID NO: 131205 - DNA, 489 bp, Zea mays
  Clone ID: MRT4577_51142C.1
gacacacgacacaatcgtgaaggaaggaacaaagagcgtgttgatttgagaaaaggtgatttttctgtgttccagcatggagttgatctacttggagcaccaaggcttacatatcttgaagataattatgacagaatggtttggtttgtgctaaacaattgtccggaggttgagcaatatttgaagtataacaccctgatataattctaatttatgtgtgtgacttgctaattattagattcgatgttcgaattaactatgtttcataattgcaggatatacaaggaagagttagcggatcaaggaactccttatgttcaaaaaacccatgataagcaattttctttctgggttaagaagcatattgcaaaactaacgtacgtgtatggagaagacattagtgatgacctatttgcattgtcatgtgaaccggaccttctggtttgaatattttcagcatgtcttgtcgatggggttcgatattcacac

SEQ ID NO: 131206 - DNA, 406 bp, Zea mays
  Clone ID: MRT4577_51143C.1
caggtcgactctagaggatctttatagatatttaaaagaagtttcttcgttatttttttgtaattttttcgatgacttctgacaaagaatttgataactatcccaatcagaaatagataccaaaggaaaaccaatttcataactatttttatcttctagtggaattaaaaaacctggcgtttgactcaattcttcatcgttatctaaaactaaaattggccgatcagcactatcaagaacagcgtcaagcagttgtaatggctcattttgtaaataggttccgaggttagcgtaaattttcataattagctgtacaacatccccttccattggaattgtccgtatcgcccttgcttagctcgatcaaaagcttctgtgagtgccggatccccgggtaccgagctcg

SEQ ID NO: 131207 - DNA, 967 bp, Zea mays
  Clone ID: MRT4577_51144C.1
agcgtggtcgcggccgaggtacgcgggggcaacagatacacacacactcgggtaaagctatctcgagctagctagctgctgtaagccgttgccatggccaaaatggtgttgctctgcgtgctcgtctccttcctcctgatgcccttggcctccctagccctgacgcaggacttctgcgtcgccgacctgacctgcagcgacacgccggcggggtacccgcccgggcggccgctcgagcgtcaccgccaacgacttctacttccacggcctggccggccagggcaaaataaacccacccggcgggctcagagctcctcttcgtgacccagggcaccgtcgccgccggcttcatcagctccggctccaacaccgtctacaccaagacactgtacgccggcgacatcatggtgttcccccagggcctgctccactaccagtacaacgccggcaccggcgctgccgtgggcctcgtcgccttcagcagccccaaccccggcctgcagatcaccgactttgcgctctttgccaacaacctcccgtccgccgtcgtggagaaggtcaccttcttggacgacgcgcaggtgaagaagctcaagagtgtgctcggcggcagcggttaacctgtttttcgagacaatacagtgcaggctgggtatgcatcgtcgccgtcgtcgtcttggtccgtcgtcatcgaatggaacgcgtgtgcttgctgctgcatgcgtgcgtgcacctgtcgtcgcgtgtcaaagtactcgtggtctatttcatcttacccttatttattcatctacttttcattcagggatgtattcagtttcccatattgcattttgttgcaatgaaagagtaacatgtgcatctgattggttcaaaatagctttgtggtcgatgtcgtttgtaaagctatatatgatcgcttaaggttaaaaaaaaaaaaaaaaagggcggccgccaccgcggtgga

SEQ ID NO: 131208 - DNA, 1174 bp, Zea mays
  Clone ID: MRT4577_51145C.1
agcgtggtcgcggccgaggtacgcgggggcaacagatacgcacacactcgggtaaagctatctcgagctagctagctgctgtaagccgttgccatggccaaaatggtgttgctctgcgtgctcgtctccttcctcctgatgcccttggcctccctagccctgacgcaggacttctgcgtcgccgacctgacctgcagcgacacgccggcggggtacccgtgcaagtccagcgtcaccgccaacgacttctacttccacggcctggccggccagggcaaaataaacccactcatcaaggccgccgtgaccccggccttcgtgggccagttcccgggcgtcaacgggcttggcatctctgcggccaggctcgacatcgaggtgggcggcgtcgtgccgctgcacacccacccggcgggctcagagctcctcttcgtgacccagggcaccgtcgccgccggcttcatcagctccggctccaacaccgtctacaccaagacgctgtacgccggcgacatcatggtgttcccccagggcctgctccactaccagtacaacgccggcaccggcgctgccgtgggcctcgtcgccttcagcagccccaaccccggcctgcagatcaccgactttgcgctctttgccaacaacctcccgtccgccgtcgtggagaaggtcaccttcttggacgacgcgcaggtgaagaagctcaagagtgtgctcggcggcagcggttaacttgtttttcgagacaatacagtgcaggctgggtatgcatcgtcgccgtcgtcgtcttggtccgtcgtcatcgaatggaacgcgtgtgcttgctgctgcatgcgtgcgtgcacctgtcgtcgcgtgtcaaagtactcgtggtctatttcatcttacccttatttattcatctacttttcattcagggatgtattcagtttccatattgcattttgttgcaatgaaagagtaacatgtgcatctgattggttcaaaatagctttgtggtcgatgtcgtttgtaaagctatatatgatcgcttaaggttacgtttcgctgttttttcagtgttttatatatacaccactttgtagtgccgcatgctgttaatctgttcaattacatataagtcctactattgaaatacttatcccaaaaaaaaacgcacataaaaaaaaaaaaa

SEQ ID NO: 131209 - DNA, 685 bp, Zea mays
  Clone ID: MRT4577_51146C.1
tttcgcggaacagatacacacacactcgggtaaagctatctcgagctagctagctgctgtaagccgctgccatggccaaaatggtgttgctctgcgtgctcgtctccttcctcctgatgcccttggcctccctagccctgacgcaggacttctgcgtcgccgacctgacctgcagatcaccgactttgcgctctttgccaacaacctcccgtccgccgtcgtggagaaggtcaccttcttggacgacgcgcaggtgaagaagctcaagagtgtgctcggcggcagcggttaacttgtttttcgagacaatacagtgcaggctgggtatgcatcgtcgtcgtcgtcgtcttggtccgtcgtcatcgaatggaacgcgtgtgcttgctgttgctgctgcatgcgtgcgtgcacctgtcgtcgcgtgtcaaagtactcgtggtctatttcatcttacccttatttattcatctacttttcatatattcagggatgaattcagtttccatattgcattttgttgcaatgaaagagtaacatgtgcatctgattggttcaaattagctttgtggtcgatgtcgtttgtaaagctatatgatcgcttaaggttacatttcgctgtttgttcagtgttttatatatacaccactttgtagtgccgcaaaaaaaaaaaaaaaaaaggccccta

SEQ ID NO: 131210 - DNA, 697 bp, Zea mays
  Clone ID: MRT4577_51147C.1
aacactccgtcgcctcgccgccaccgcccgcagcctccgatcgatttcggttcgattgcggtttcgtccccccgcccgccgacgaggtagcagcatctgttttgctgcaatctgacaaagtggagggctacgctgaaccttcttttatgtctgaacaagcatcggtctatttgggatcagttggattgctgggagagtactctcgtgcaacgagaaaaaggcataagtttgtgctcccctgcatgcatcaagagcccattaggttctctggttctgagagttcacttgccactgcctgtgctcagagtcctgcagctactatttcttctgaattttgccacatctgatagcatctgctgcaggaagattttctcaagatggcgttgcaaaacattggtgcttcaaacaaggatgatgccttctacaggtacaagatgcccagaatgttgaccaaaattgaaggccgtggtaatggcatcaagaccaatattgtgaacatggttgatatagcaaaagcacttgccaggcctgcttcctacacaccagtactttggatgtgagcttggggcacaatcaaagtttgatgagaagacgggaatctccttggtcaatggagcccatgacacttcgaagctggctggtctgcttgagaacttcatcaagaagtatgttcagcgttatggatggtggaaatcca

SEQ ID NO: 131211 - DNA, 340 bp, Zea mays
  Clone ID: MRT4577_51148C.1
gcgggtgcaagtcatgaacctctctctctcatctcggcatttgaaatcagtgtgtttaattgcgtacttggtctctctctctctggctaccgtggtttttggaagaactctctagatgtacaagttaatactactagtactttccacacctattgcagctgaattagagaactgtttttgagttctcatgcattattagagttgtcaagggttcatgaatcaagttatccagctagctactttctttctccctgcttctacttctatagtggaattaatttctccttctttctcgggggttttttttgttcaaacttggcttgtaccaattatgattgct

SEQ ID NO: 131212 - DNA, 527 bp, Zea mays
  Clone ID: MRT4577_51149C.1
gggggggttttttttttttttttttttttttgttttttttttttttttttttttttttttttttttttttttttttttttttaaaaaaaaacccactgggggggaaaagggaagggccccgggccaggacaaagttttacaccccggggggggaaggggggggcatgacaaggccagagttaaccgaaaagggaaggacccccttaactcaaaaaaaacggacttccccaaaaacgagggggactaaacacaaacccccgggggggggcccccctcaccaaaaaacggtcgaacgggcccccccaacttttttttagcaacccgggagcgggtggtggccaaaggggggtttgccttaaaaggccccagtcgggggggggaccaggggagcccccgaacaggccatttaccagggggggatcttccagggggggggggggcccccgccccccttccaaaacaaaaaggtggggcccccccgcacccccccgggggccttgtagccgggcgggcccggggggccccca

SEQ ID NO: 131213 - DNA, 635 bp, Zea mays
  Clone ID: MRT4577_5114C.1
agatttccttcacctccatgcttcctattcctgcccctggcacccgcgcttccaaacaatcattctccactcccgtctccagagattgctgctagcgccgctccaaatgggattcatactgcgggtgcgggtcgcctccctcttcatcctcgcgtctggcgccgcctcccacaaactttactttgtcaacaaagctaacacgcgcggcgaaggttctatgggcacgcaacgtggaatgtatgcaatgacatcgatcggtagacgcccttatctatgccctccatgagcagactcctatgcttgggcacgccaatactgcactgaaggtgcaccgcaagcggatacagctgcatagtaatctggtcgatacaaaactttcaccgacggctggattccataatcccagctgtatgctccgttggaagcaagaacctgaactgcaacttgtgatctattgtgcttcatttgtgctgcctgccgcggatgtccgacgaatgatattctcccctacagctcatgtcgcactagttcttggacgtcccaactctgattgctctggttgactggtgatgaacgaatgatactgagcccgacatcctgattgagacaataatgttgctgtggattttgccgag

SEQ ID NO: 131214 - DNA, 1534 bp, Zea mays
  Clone ID: MRT4577_51150C.1
tttggtatcatcatgtctgactaacccttttttactttcattgaatgaagttcgtacatgtatttgaggtattttttattttcttcctactataagccttgcttagatactgatctaagatcatctccaagggacagacaaaaaatcctagaggttctcacataagtacggtttagagaagggataaaccgaggaaagcctcccccacaaatacagaaaggctgcctcgaacctatgatttggtgactcagtgaaacaaacaactctcactactgcactaggcctgccattgtttacgagcatccccaagggccttacttaaattcactctctaaattttaatttggtgagccattttaataaaaatatgtttgataggttttttatcttctaacaatttttatgtatcttgtacgcactctagagaaccaacccactcactgctctttatttactgcatgctatttaggtctgctaagcaaaaaatgatattctttctcaatcttttgtcatgtttagataaatttggtggttttaggataaagtttgtgaagggcttcactttttttttctataattagaatttaactcaaaagttttcccttgaaattcaagttgattttgagaagtatgaagggatgattaaggtcatggagaaggtggtaatacagttaattctatggagctcactggaggagcactaccttttgccagttgcttgcaagaatgtaattggaatccgatgtgcttcatggcgcatcgtatcctccattgagtatagggaataaggttgtgtcaacatggaccgtgccactctcatcgagggctaccataacaagattgaagttgaactcaacaagatctgcgttggaatcctcaagctctttgcttcccaccttcccccctcattaatagttccaaagtccaaggtcttctacctcaagatgaagggtgattactacaggatattgctttggaggagttggcccccttatcctattaggctttggctgatgcttaacctctcaactctcctgatcttgctcgtggtctccccaaacaggtttggtttctagatccattacatggagtgtgtagtgtttttcctcttttttgcaatcctcatgatgtgccaccaggtctggtctaatcgttcccctaaaattgtggcctataatcagcttcttggcctatgatccttttgtatgtaggcaaagccaacgaatgaaagggactcactcgcagcaacaaccaaaaagctgatcacgcattctccttttcacatttgttgcatttaattaattcatccaatagcataaattggcactccttttgtgttattgctctttggttggtcttattgttgttgttgtactgcttgccatgtgtattttatcataagtgttgttttggctaatccctaacgatgcaatacatttgagcaacaattcaattgttttgttttttgaactagttattctaaatacccaatgttcacagcatatttcacttccaaaaaaaaaaaaaaaaaaaa

SEQ ID NO: 131215 - DNA, 738 bp, Zea mays
  Clone ID: MRT4577_51151C.1
cgaagaaaacttctcgggagaccatccgaaacggtctgcccttccattggccttccactagtaacaagaatactctgtaacttcactccggacgagttctgccctgatcctgttcctggcatggttctagaggagctgaattctgagagcttgctggatcgatccacagacatagacatggtgagcacgttcccagtgaccgctgctccagtggtgtactgggcccctacgctggaggacgttagggagaaagtggctgacacggcatgtggcaacccagagctggaccggaggggttcaatggtgcagaggaggggctacaccagcgatgacgatctggatgccctggagttcccgctggcgtccctgtacgacaagagcaaccccccgtccccgtgcaacaatggcgtcgcccatttcagcactcggcaggtagcctccatggagaacgtgaggcacgagctcctgcgagaagtatggtgcgagcggctatgatctcgataaatacggcctgtggagcctttttgatctatgtgaacagtggaaatggtgggaaagacgtgaagaaactgcaatcgaaaagcgatgacaaaaatgctattcaattcttcgtgtatatccatccgttccttgtcagcccgtgcattggttgtttcccctttttttatatgatatagtagaactgtattgtacagtggctatgaatgaatgtgatgtgatcaataaacattgggagac

SEQ ID NO: 131216 - DNA, 317 bp, Zea mays
  Clone ID: MRT4577_51152C.1
tctcgtctgtcggtatgtatgtcgtctggaggaaaggaaatttaagttatatgaaatgaatatgctgttgatgtgtcaaattcaaaaaaaaaaaaaaaaaaaaaataaaaaaaaaaaaaaaaaaaaaaagaaaaaaaataaaaaaaaaaaaaaaaaaaaaaaaaaataaaaaaaaaaaaaaaaaaggggtttcccttttaaagaaccaatttcacaaaatccttcatttaaaggtattaactcttttaaagttcacctataattgaattaactgcctggcttttaaaaatctactctaccaaaaaaacatgtttttt

SEQ ID NO: 131217 - DNA, 633 bp, Zea mays
  Clone ID: MRT4577_51153C.1
gaacggacttgactactatatgattctctagaaaagaacgaacttatgtagcaccacaggtcacacggatagtgtcgcacctgcggactccaaactgctgctggcgctcaagctgcaagtgcccgaaggaagtaccctggacctgcgctgagagagcaccgccagacaggccaccgcagttccccgaaggaccccggcacaataaggcaccaaccgccacttcgctcgaggcctgctgcggcagtccggccagcgccgaccacgcctgcgggtgccgtagcaggtgctagtgcaacccctgcaactgctgatcacatccatccacaaccatggatataattactatctatttagctggatgcggctgttgaacaataatcagatatgccgaccttactgccatacatacttatagcttgacgagacaaagagagagagaaacatatttctttagatccatctctttttctgtgcatgatcggaatgagaacatgggctcatgtacgtgtgtctacatacatgtgggtagatccaattgagattcctgtaaccatatattaattggtccacgatgatatgatttgatactatatatatatatatatactaaaaaaaaaaaaaaaaggcggccgc

SEQ ID NO: 131218 - DNA, 244 bp, Zea mays
  Clone ID: MRT4577_51154C.1
ttcccatctcagggcacgtgtatttcattccattcaaacaaactaagttgataggaaggcattttgcttttttgacccatttaaacatattaagatggtgccccacgaacggacttaggtaggtgcaaatgactgcagggcgtttgttttacaaactgggaacaaaactgtgtgatttataatacactcctttacttcttaaaagaaaactttcccttattcctagctttttttttggcttttt

SEQ ID NO: 131219 - DNA, 276 bp, Zea mays
  Clone ID: MRT4577_51155C.1
ccgactatctgaagttacagtgctttggtctccaagctagggacaagagaggggggggaaagacacttttcagagccataaagctttcctgagtgcaggttttatatattggtatgccattaggtctgtgtccttgatatcaaaaaaaggattttactgtctgcctggtttgtttttgtcaaatatatatactagacaaggagtatttatttcctttatggtactggattagctttcaaccatcatgtttaatttctctttcttcttatgaataac

SEQ ID NO: 131220 - DNA, 324 bp, Zea mays
  Clone ID: MRT4577_51156C.1
gcctatcccacatccctaataaatctggctgcggatgtgcgatatctaaatccgagatctacctcttgcattatcagacacttctctgaatccaaatgaaaagagaacgggattcctcagggaattccaaagccacattctccaaaaactacgacgctaaagctgtccatatatgaatcacaatcctgtgctgtgttatcacaccaatcctcaatccaaaatgaatgagatcggaattgttagcgtaatttcaatttcacattgtcaataacgattggtgcaaaaatgttaatatattatttagaagtctttgtttcattatta

SEQ ID NO: 131221 - DNA, 236 bp, Zea mays
  Clone ID: MRT4577_51157C.1
cgtcctttttttttttttttttttaaaataagtttttagggggcaacaaaaaactgtaattcatttatgtaccagatgctcccgcaagattagtttcacaacggacgccaaaaaaggctgcccaagttaactgaaatctcaaatgcggtaccaaaaaatcgtttcattctgcaatcactgggacaaaaaacactgtgagccatacgcaacatttctgcacgattaaccaaaattaa

SEQ ID NO: 131222 - DNA, 707 bp, Zea mays
  Clone ID: MRT4577_51158C.1
ccggccgggcggcccgccattccggccgggctcgccatttcccacacagtgtggcgagagccggccgcgtggcggatcatcgtcgccgcccctcgcatcctcgtcgtgccgccgcaccgcaagggttgctcgtgttcgacgggatgccaccgctgggacccgggagaggtactagccattcccctccccacgcgcgctagatttcaggtgccgtccagtgtgctctcgcgtcctgtttgtgcagcctcggtttctgcatcccctgagcggctgagccccggtgatttcgaggaaacatgatcgttttcgaatttcgacggagggttcttcatgggggactcatgagctcgcgtcatcgttgtctgtgtgggcctatgtcgcgctggtcccatgcgcgccacgggaacgccttgctatgagctcctcctgctgcctgcgccacgggaatgccttgctatgagctcctcctgctgcctgcgctgtatggctgtattggctctcgtgcagcaggtgggttgggtgtgagatgaatgtgctgaggcctgtggctgttcgcctgtttcagttattggtgcacaggtgtttcgcaagttgtcacctgtcaagtagatgtttctagtatgggcccgactccattgatggatgattaataacaaagctgaggaaaattcattctgaagcaaaaaaaaaaaaaaaaatttgcggcc

SEQ ID NO: 131223 - DNA, 399 bp, Zea mays
  unsure (1)..(399): unsure at all n locations
  Clone ID: MRT4577_51159C.1
cttggacctttgggctgatttatgtgcttgtttatgtgcttgtggatgtgngggtgggcctatgcgacactggattcgacttcattagtcacggtaagaagcgacccgaactccttacgataccctggagctttaccctatctgatcttatcgtcgcgaaaccgcctgccccggggttactccatcgcgtatgcgttccgacaccgtaaaaaaacaaaacaaacaataacattcaaacaaagggcggccaccgaagtcttcttacctcttccgtctttaaataaaccttttccgtccntaaacaaacttcaacgcaaagccccttaacaccgcacgggaacactcaccccccatagacttacacacggacagccgaaccgcaaaaaaaagaaaaagggt

SEQ ID NO: 131224 - DNA, 847 bp, Zea mays
  Clone ID: MRT4577_5115C.1
gtcattttgttccaagatatgcttgacgtggtcacaagggatataatggaggaacaggaccagctcggcacactgttggaatctgcacatggtgcaaatagtagaaaacatgaaggaattccggccggggatcagcaagaccagttgtttgctaaagctattaagtttcctgtggtggaatcaaatgcatggactgaaaagataaagaggcttcatcttctgttaactgtgaaagagtctgctatggatgttcctattaatcttgatgctaggcggcggatatcgttcttcgcaaattctctatttatggatatgcccaatgctccaaaagttcggaacatgttgcccttctctatcttgactccttattacaaggaagatgttctgttttcattacaaaatctggaagagcgaaatgaggatggagtttccattcttttctacttgcaaaaaatttacccagatgaatggaaaaatttcctcgaaagggtgggctgcaagaatgaagaggtactccgtgaagatgaacagctggaagagaagctttgtctttgggtgtcatatagggggcagacattaacaagaactgtaagagggatgatgtactatcgaaaagctttggagcttcaggcttttcttgatatggccaacaatgatgatcttatgaaaggctacagagcaatggaagtaatgtctgaggactcaccattaaagactcaatgcaaggctatagccgacatgaagtttacatatgttgtctcatgccaactatatggaattcagaagcgttcctaatgagccttgcgcacatgaattttttgagactaatgccagagtatccatcact

SEQ ID NO: 131225 - DNA, 291 bp, Zea mays
  Clone ID: MRT4577_51160C.1
tccaatcctgccttctcttctacctttctcactcagcaacccttcactccttctgcctgtatattgaaatcatcttcactcccctttctgccatctcacaactgaaccccatctagtaacatccattttgctcgtcaataattttttggacgaataacatggattattttaaggtgcatgtggtagaatcatcatttgtactgcctatctatcctactccaactaacgcgctctggctctctttctttgacatgtttcatttcaacaaatcccacacctcaacaatccact

SEQ ID NO: 131226 - DNA, 343 bp, Zea mays
  Clone ID: MRT4577_51161C.1
aatgtttttaccctccagtaccagggtattttaaagttttttggacttgaaagaaaaacccctcattaacagctgggtgaaaaaaattctcttggggggaactgcggcacgaaaaaccgcccttaacaataaaagattgggttgaaacacacaatacggtttgatatacaatacttgcattaaggagcatttcatccaatcttttgagcggacaaaaaatgctccaagagacaaccccttgtatgtcatttgtgaccttgttcataatgaaggccaaatggaaagggaaaatgattaccctggccgataggctcccctaattgtttagggatacatttctaca

SEQ ID NO: 131227 - DNA, 292 bp, Zea mays
  Clone ID: MRT4577_51162C.1
gcatggcctgtcacacacaagctaggatgttccctccgccactgttgcagagtcccatgagcaatgtgaaaatgtggcaggcccaaggttttcttctctggtccagagagggcgaggcaagagcaggaagcaggttctacagctctgagaatgctgagctagagcagcagcctaccaggcaaatgggttaccaaagcaattgccttactgccagactgggtgctggggcctcagagagactccagtattcttgccttcctgaaaccagggtctagcaggacaaaactattcc

SEQ ID NO: 131228 - DNA, 286 bp, Zea mays
  Clone ID: MRT4577_51163C.1
gttgtcggaaccaccaacattaaccaaattaattcactcactgtgggtcacaagaacgaacatgagtgctccggctttagggtgcataactttaagccagaacaaaaacaggcctggttgcccacgaggggcagggcaacaaaatgaacaatgctttgggtacaggtgtggaatgccccttttagggacgtgagggtagccctgcctgttggatttactacgagggggcattcttggcgggggcctgctgcgagggccgtttttagagcacctgcgggggtacctt

SEQ ID NO: 131229 - DNA, 344 bp, Zea mays
  Clone ID: MRT4577_51164C.1
tttaattgttgaatttcaggtatgggaaccgtcgtattttagttggcgtaaccagagcatgcgtccttgggaatggggtatgactaatgccaatgcgtagaaaatattgcatcaactgggattaaaagcactgtgggcacacactaagtgagttgagatagattgtagacgtttgaaccacaaaggattgtacgtcaaacatgatataggtatgctatgatgtagccaaagcctcaaacttgttttgggggaacttaatgtgggtatcgcaaaaggttaacctcagatggagagagatacattactggatgaggatgacgcaacctagcgcataagattgaacg

SEQ ID NO: 131230 - DNA, 648 bp, Zea mays
  unsure (1)..(648): unsure at all n locations
  Clone ID: MRT4577_51165C.1
agcaaccactgatccctcgctttctctctctctcgctcacctgctccacttttcgtctccgatccctcgcgatccacacataactagctagtttgactatctagcttgtaggtgcagtgtaggtcaggcatgtcgagcccgacgacgacggagcagcagcgtgtcagcttcatcgtcgacggagaggagcatgagcagcagcagaagcatgacgaccttgttagccgcgccgccgtggtggcgagggaggtgagcaagcgggtgtctcgcctggccgtcgagggaggagaaggcgacgccgaccgcaaggccaacttcgacgccggggtggcggcagcgcggcgctcgttcggtggcacgcggacgctgccgccgccgcacgcgtggctggcgatcgaggacacgaggaggaggcagaagcaacagcagcagccggaggagcacggcgacagcgacgacccggaggcggagcagtgggcgcgtctcttccggggcggcgggatgcagcagcagcagcagcaaaggcggagcagcttcancgtggtgcggcgcgagcgcgcggcgcgggaggcgtggctggaccacgcgtgggaggcgaagcggagctggcaccagcgcaacggcggcgcccccgacgcggacaccccc

SEQ ID NO: 131231 - DNA, 624 bp, Zea mays
  unsure (1)..(624): unsure at all n locations
  Clone ID: MRT4577_51166C.1
aaaaagtcattgttacaaaaattaactaaaacttcccaccaaacaaaatacatcaaaaaacgaatatattatatagcagaaattaatctaaacttaaatcttcttcttccttaatatcctgtcggaaactcgcatcttccatacttcggtggttggctattgttttaagcggcgccgccgaagtaacaactcccaccggcacgacccttcttctggtaataactattgaaagcaaacgaagcgtgagcctcaagtgtatcaggactataacagttagcaccaggttgaataggacgacaatcagcaccaccttcaccacaagcataatctaaaccaccttgtaacctttcttcaccagcatcaccattagctacacaccaagtataaccattcaaactcttcgacacgcctccactcatcggaggctttgtaacctgatctcctccagtgaccggagtatgaccaccgtcacggtaatgtttcaacccctctgttgtgaaaggaatgtcgtagactttcttctcatcagggaagaagagaccatagtttctcttcgacgttggacctaacttcttgttcttgntgaacagagcgaaaagatagaccgttagatctgctttagga

SEQ ID NO: 131232 - DNA, 468 bp, Zea mays
  Clone ID: MRT4577_51167C.1
cgcccgcctgcacgagccgggactgaagttatactgtgctgggccggcgcgctatttagtcggcggccggattgaactcctgggatggggcaccagagtaggccttgaccttacgacgggactttttgggccggagggtgtggtgaatggtcgacggcacacatgggtgggcgatggtgacagatgggcgcagtttgcttagttcctagtcgtttcgcacggtgagttaaaggtgacacgtacccatagcgctcttcttgttgtgcgcccccgtgcctctcggcagttctaacatatctggcgggagatgactcgggactggcgggaggcagacagcgcgaccacacgacgacacgcttggtgtacttgcccatctagatgtagcgcgcgcatcgaccggcactgaactggctgctggcctttgtcaacatcgacacaggctgtgacctgtcgaacatgcatctgacg

SEQ ID NO: 131233 - DNA, 582 bp, Zea mays
  Clone ID: MRT4577_51168C.1
ttccgactcacaccttcatctcacaatgatcaacgcctactttgatatcatcatcggcgacaagcccgcggcgcgcatcgtcttcaaactgtacgacgatgttcgtgcctaagaccgcgagaaacttccgtgaacttgccacgggccagaatggtttcggctacgccggctctagcttccaccgtgtcatccctcaggtcatgcttcaggggcgggacttcacggcccacaacgggactgggggcaagtcgatctatgtgtgagaagtttgcagatgagaatttccagcttaagcacaccaagcccggtctcctctccatggccaacgctggaaagaacacgaatggctcgcagttcttcattaccactgtcgctacttcctggctcgatggcgcccatgtcgtttttggtgaggatgttgagggtatggatgctgagcaggaggtcgagaagcagggcagaccctccggcaaacccaaaagcaaggtcctcatcactgcttccggtaccgtttaaggcggatgtaaatatgatcgaagacatcaattggactattcctgttagacaagctacctttgcccc

SEQ ID NO: 131234 - DNA, 258 bp, Zea mays
  unsure (1)..(258): unsure at all n locations
  Clone ID: MRT4577_51169C.1
ctaagtcttacgaactgaaaggaaactacgagaaggcattcgagctatttggagaagctgctgaagctggaagtgaggcagccgaagttgtcgttggaagatactactccacaggactgggtgttaagaaaagcaaaacgaaagccgcagagttcttcaaatcagcagctgataccggaanagcagccggattttacttctacggagaagcctaattgaaaggaagcggagtttccaaggacaaacacgtcggaggtg

SEQ ID NO: 131235 - DNA, 241 bp, Zea mays
  Clone ID: MRT4577_5116C.1
ggcttttctcattatcagtatctccacggtcttggcgatgcaccacccggtgttttcacgctcttcaccgtcttatcggacctgtaaccagctcgttgtgctcctgactcgaacaataaagtattcattgatgaaccaaaaggagaaggcgcctgccacgggcacgctgcccttgggcttgttgagccatcaattcaccccctgaacaaactcctcctgctcaacgacatcttttgcggga

SEQ ID NO: 131236 - DNA, 326 bp, Zea mays
  Clone ID: MRT4577_51170C.1
cctcgagccggccgggagctcctccaacatccacgctcgaagctcctcacgttcccgacgtatcgtcaccatgtaaggcggcgctcctgctcgctccgggctacgatgtactgccgagaaaaccttaacctgggcgaggaacttaagaatcaagtaggggggggtggggccctgatctccggcgccctcctgcacaacaggatccacaagatctccgccatgtgaccgggacacacctggagagatgcgcctcgctgtggcctccatgagcacctccttctccaccgtcaccggcctcaccctgctgctatagatgtgaagagctc

SEQ ID NO: 131237 - DNA, 506 bp, Zea mays
  Clone ID: MRT4577_51171C.1
aggtgttctactgttctcttgaatacgcgtagactactgtagctctagaaggcagatcagatcggttcatctgttcagcttcagcacaagtcgttgttgcatccaccttgattgagatcaccttcttcttcttcttatttttgagatggaatgtgtgacatggcggaaacaaattgcgaggggcttggttgttgcagggcgtgttgtgggatgcgaggactggctccggatcaccttcgccatcgatccgtcctctctcgaagacggcctggacaggctcaggtccttctgctcgcgacatagcaagccggcagcacagggttctgctgcctctgtagtctagtagtgtctgttagaggatctgaagcgtgtccaggactccacgtcttggaaacaatgaagtttgggtcaatatgagaacgtaataataaagttgattcagacaaatgtaagggccctttttttcgtgcagatcgcgttcaaacatagaattggatcttgattca

SEQ ID NO: 131238 - DNA, 357 bp, Zea mays
  unsure (1)..(357): unsure at all n locations
  Clone ID: MRT4577_51172C.1
gcggggagcaagcaaagaaaggcgcacagcnacaanncnaccaaagaaaaacacnagcggcacagcaaacaaggggagaaaaacacagangcagaggccgggaggggaaccatttgtgttttgcacccagggagaacaagncgcaacccagggcagcttttaaggaagcaccctccttctccactttgaaaatggagnngaggaggccgacaaagctgcagctgctaaagataaactcgctgtggaccttagggaagctgaaatccgacgcgctcttagaagtgtcttcggagataaacatgagaatccttgagtgaggggcaaatagcaaaacacttactgaagagtgactgacca

SEQ ID NO: 131239 - DNA, 227 bp, Zea mays
  Clone ID: MRT4577_51173C.1
ggaacaaattgtaaattgtttacattaattaacatgttcaagtgaagaattgcaaattataaaattaagtttctacaaccaaacaaccagcaaactttctttccacaacattacaacaatatgtttattttttccctcatccaagggaacttaaaattatgcttaacaatgttatcttgggccgtgtttttaaaaaataaaggaataataggttcttttttttcccc

SEQ ID NO: 131240 - DNA, 411 bp, Zea mays
  Clone ID: MRT4577_51174C.1
gccccctagtccccaacccccccaggtgcgccccggcggccatgtcgtcctcgcagtcgccggagccatgcacgccggggacaccctccccggttctcagcgtccgcatcgtctcgctcgactactacatggctccgcccctcccgggcttcggcttctcccgcagccctttccacggagaggaggtggaggaagtgccggtggtaaggatctacggctccacccccgcggggcagaagacttgcctccacatccaccgggtgctgccatatttttatataccttgttcggaggagctggtttgtaatctagaaaaaggtgattcatatataactggtctcttgagtgaccttgagaaagctttgcaggctcgcggtccatcaaaaaggaagcatgtgcatggatgggacc

SEQ ID NO: 131241 - DNA, 325 bp, Zea mays
  Clone ID: MRT4577_51175C.1
gagattttattatcggatttgggagatcttcgactttttttgtggatgtaatgtcacggacggcctagcctgtaactgatatgaaccagaaaacaacgcccgaacatttgacactgtggcgcggggaaaagaacaaaaccttggttgatgcaagcctaacccaccttcggtttactctgtgacgaaaagaaacggaaagagttaacattggttcccaaaaccttgtggtctctaaaagaaaggattgaaacggcactgccgtttatttccacaggaactgcaatgacgtgcatactggtcagtacttttagcataaagttatacc

SEQ ID NO: 131242 - DNA, 927 bp, Zea mays
  Clone ID: MRT4577_51176C.1
tatactgtcatcactgatggactaccttctaggaaggattgttgacaccgtggatggcggcaaccttaattgatttctacataaatgtctttgcgatatcggtctgggttgctcacaaggaatcatcatggatatcaactaccatttggattgtcttgctgatatgctttggaagcatcacaacatgcggctacattgtcatccaacttttcaaagtatcatatcaagatccaatctaccacgtgctattgaactcccacagcaagtatggaattccaacttcactgtgataattcatcttctatgatcctggaagatttgaaaatttattgaagttttatgtgcagcttggctggtaatattaaaatgttccttctatctatatgtaaggtaccacaattaaggggacaggaggatagcaattagacaagttgttttactttgaataaaataactcatgtgctgagttctctgctaaatgaactgtaacgtgaaatcctttattgtaaaaaaaaaaaaaaaaaagcggccaattatcaaagtatctattcaagatccgatctaccacgtgctattgaactcccacagcaagtatggaattccaacttcactgtgataattcatcttctatgatcctgatttgaaaatttattgaagttttatgtgcagcttggctggtaatattaaaatgttccttctatctatatgtaaggtaccacaattaaggggacaggaggatagcaattagacaagttgttttactttgaataaaataactcatgtgctgagttctctgctaaatgaactgtaacgtgaaatcctttattgtatttctgattgaaattgcttgaacaataatctcctttgttatggtttccttgccaaaaaaaaaaaaaaaaaaaaaaaaaaaaaaaaaaaaagaagggg

SEQ ID NO: 131243 - DNA, 1337 bp, Zea mays
  Clone ID: MRT4577_51177C.1
aattcggcacgaggcagcgatcgaacacccgacgatttttacctgccacaccgctcatcctctcccgcgcgcttggccctttccgcttggccttccgcccctcctcttctccgcacggagcgccgccacaggtgattgctagggtttcggggccgccgcctgcagcagccctaccgccagcgctcctacgcctgtgtccctgttcctctccgtcccgttctgccggcgtaccacggctgacggccgacgccctgcagatccagcaaaggcaacgctgagatccctacgacttcgaacggcctgtgacctgtggatctgtgccagcctgttggtcgagctacctgctccagcccgagcagcccgtgttaaagctagctaaggaaacagggcctaagtgagctccagaaaaaaaaaaggaacggaatggaggagggggacgtgcgggtggacctcgacaagctccccatcaagcgccttgaggccattgaggagactggcaacgagcactacccacctgacactagcaacgaggagcagcgactcgcggccatccgccggattgacttctcctgggtcatagagaaggatgcaaagaaggccaagaaggcggctgaggctgacactgcccagcaggcatggccctggcagggccttatggagagcctgcagcaggcacatcaggagctctctgtcgtcatagacctcatcggcacggttgaggctaatgacgctgtggcagtcgcctcgacacgaagcccaagtcgcagccaaatgaaatactggttgacatggcagtctctgctgccaccaagctccagcgccttaggcatttgtcatggtacttcaaacaatctgctaagactatggagcaacaattccaaaaggagactaggttctacggctccttaataaggtagttacttggggggagagttttgaatgtaaaagctgttaaaaagttgaagctgttgtcacaaagtgctcagattgcagcagaactggaaagtgaagcggcagcgggctgttgggagtccaggaagtgaaggcttcatgtttgatctagttgatagttctcagctagacacaacaacagtgcttcgattatcaccattatctttaattccgattgatcaagactcttcaggcactttgtctgtacaaattccacagaagtctttgcgttccttgagccttaaatttcatggagacatagtcaataatgcagaaagcagtgctatcgaaaagaaagaaggcacattaaccaacactactgctgaagccgaaaaggatgttttggcagataatgatgtcaataagtctattagacatgcacattc

SEQ ID NO: 131244 - DNA, 271 bp, Zea mays
  unsure (1)..(271): unsure at all n locations
  Clone ID: MRT4577_51178C.1
caggaatttggtcttgcgcggttcaaaagcaatgtgaccaagacaatgaacgngtttgaatacatcctggccaagctacaaggtgaggccccttcaaaaacacttgttgagacagccaaggaggccaaagagaaagcaaaggagaccgcactggcagctacagagaaggccaaggacctggccaccaaggccgccaccaagcagcagcagcagcagctcgtatagccctcttcctctccctcctcccccgtgtacttgattattaaagatg

SEQ ID NO: 131245 - DNA, 350 bp, Zea mays
  Clone ID: MRT4577_51179C.1
cgtacgcgtgggccggctcttgctctgctcggttcctcctggcagcaaccgaatgtctcccgacgccgacgccgccgccgggggaggaggaggtggagaggcgagcgctcggcgccggtgccggcgcgtagtcgcctcccgcgtccgcttccgcggcggcgaacggccgggcgctggtgcggtgggaccagatcctgccgcgccgcttcctgcgggtgcttctcgtcgagcacgacgactctacgcgccatatcgtcactgctctcctccgcaagtgcggctaccgcgtggacgacgtcgcggacaggatgaaagcgtgtgacgttatgctggagcgtgcctacgacttc

SEQ ID NO: 131246 - DNA, 352 bp, Zea mays
  Clone ID: MRT4577_5117C.1
gcgtacgaaaaagacacgtattctgatgtggatccgttagctgaggaatttattgagctgactcacactggtcggtctctccaacaggagtaggaccttggcccatccttctacctaaaggtgtaaatagtttaactagatgatactgtctacttatggaggttatctgtatacaagtatccttacctatttgaaataagaagtgctgtttgcagcgctctgatatttacggacgcgtgagtgaacctaccatgatatgacttgctatgcattaatagctaatgagattatctcgagatgtgtaattgatatactgatattatttgcaccattgatgtatttatggtcatgg

SEQ ID NO: 131247 - DNA, 367 bp, Zea mays
  Clone ID: MRT4577_51180C.1
caccagaggctcttaggggactgcctcttgcgcctcctatggttggcccacctgcttatccatactttcaagcccagcctgaacctgaacctcagcctgatcctgagcctgatgcggaagaggaacgtgtcaagctgctcaagcagatagagttctacttcagcaaggagaacctatgctcagatgtgtacctgaggcagcagatggatggtcagggctgggttgatttatctcttatagctggcttcaaaaaggtccaagggctgaagaaggacctacaatatataaaagagacggtgcagtcctcatctgtactggaaatgaaggataataaaatcaggaagcacggagactgggagaaatgggt

SEQ ID NO: 131248 - DNA, 302 bp, Zea mays
  unsure (1)..(302): unsure at all n locations
  Clone ID: MRT4577_51181C.1
ccgtccgtggcaaaaccgtngccggtggtgtccggtatcatacctgtttggtcgttgtgcaaagggcgnngcgtgggccggtgggcggtnctaatcccgggcaccggcaagggccgggtcgtgcatccacggnntcgtgcgttggcatagtntngcggcggttggctgttccactngtttatacccgggataagaaaagacccgtcccacngnttcaacgtctttccccttttcatttctacacgtnnacgccgcngtnncggagaatcgcagctttgcacgacngnaaccccanngcgtgg

SEQ ID NO: 131249 - DNA, 683 bp, Zea mays
  unsure (1)..(683): unsure at all n locations
  Clone ID: MRT4577_51182C.1
gccttccgggaaaaaaaaaaaaaaaaaaaaactcttctgcaccttacctcacacttcnnctctccatcgattaagtgctcctccccccntcaacaaccgcgaggatcttcagctacccgctcttctccggntcgcgtttgctnatccgcattcctcaagatccaagattcangagccccagccccgctttcgaagaatgccagctagctcttcttatcaagcattccgnngcggagcgnnggcagcggggggcttcgggcgagagganngaagatgaagnncggaagacggccggaacccaagatcatcgtatgggacacctggggccctggcttgcagtggcagattctgggtgggggcggcacgattgggcgctggtgctcanncggcggggacccgtggaaggccatagatannaagaagtcgcagggagaaagaatctgtaaccaagggggtggggatgtgggctcggggagcaaggtacttgcnntgcaacgacacccccatcaccgacnnttcttcaagggtgtaccccagttcgagaaccctcttnnngccaagcgcaacaccccccgtcggcgcacgcccgtcggggttctggggactaccagggcctttcatcaccgcccgcggcccctctttcgagcccccaggggtttttggaccacctggcgggaaagcag

SEQ ID NO: 131250 - DNA, 536 bp, Zea mays
  Clone ID: MRT4577_51183C.1
ccggccgggccgccctctttttttttctttttctttcttcgatcgatcacccaccatgcagccatgcacgatcataatcaccgacggggaggagcccaccggccggcgaggcggcgacggccgtacgtccagtccgttggctcattcatcaaccggatcatgccgccgcggcgtcgctcccttttcaagatttggtcctagttttccggccagaacgctacagaactagcgatccgccgcggggagctgttttggcctattgaacggccggttcctcttccttgtttgtttgagaccctgttgtgctcacaatccatcatgcatgcatcagtggttgcgcgctaagaaacgcgtgctctttttttccccattgtttcttatttgttgaggagacgactgaatattttgtgcaccacacgcatttttttagtacgcctgttataggtacccactccatgcaagtctctggatgtctagttcagtcgtttcaaatttaagataataactacccgaaaaaaaaaaaaaaaaaagcggcc

SEQ ID NO: 131251 - DNA, 526 bp, Zea mays
  Clone ID: MRT4577_51184C.1
ccggccgggaaaaaaaaaaaaaaaaaaaaaaaaaaaaaaaaaaaaaaaaaaaaaaaaaaaaaaaaaaaaaaaaaaaaaaaaaaaaaaaaaaaaaaaaaaaaaaaaaaaaaggcccggcccagccggggagccagggaggggtttgggggggggggaggggagagacacaaccaacgggtggtcgttggaaaaaggaaaaaaaggcccgggggaaaccggggggatccaaaaaaagatgaggcagggggtcttggccgtcccctttttcgccgttgtttgggggggggcgttcttcttgggggccgaggcccagcagcggggccaccaaacagagaggatttaaggaagcgccggcaacgtgctgaaaaacaaccccgtcggagggttaaaggtgtacgtgtccgacctccccagcaagtccaacaagaagttgttgaaaaaggaccccaggtgcctgagccacatgttcgccggggaaattttattgcaccgtttcttgttgtcgagcgccgtccgacctttaaac

SEQ ID NO: 131252 - DNA, 179 bp, Zea mays
  Clone ID: MRT4577_51185C.1
atggtaagggtatatgtgtattaaattacgccaattcgatggaagaagaaataaaacctaaaattaataaatctaaacccttatgttgtatgtcgtgctaaaaaattcttattattttaagcagggacctttattttgcgggaaaaaatacaagtgttggaaagatttgaaactcgttt

SEQ ID NO: 131253 - DNA, 564 bp, Zea mays
  Clone ID: MRT4577_51186C.1
ggtagattccagcgctggcgtatctagcgtctctctctctcacaagcgagatcggctcctgccacccgtggaaccaccccaccactgatgagcaccaacaacacttgactccaacgacgacaactctatccttggacccactgtcctcgacataaaggttgacatatatcgccgctctcatctatgcatccttcattgacaccttcatctccagtgactgattctctctcgccaagctactgtagaatcgcatcgctgatgacctcatcctctccgttgaatctgatgacgcatctcctcatgctgctatggtcgctgctcctgatgttgcatagggctgctagtggctcggcttcaccgcgctgcacattaaacttcatgcaactgtaggaaacaagaccaagacccctgcagctggagttcagactgctctcacccatcttgctcgatctgttactgagaattggacgcattgatcatgtcacaccggatgccactaacatcactctaagaatacccaggatgagagtatatgagatgtagctatggcatgcaactcatacc

SEQ ID NO: 131254 - DNA, 402 bp, Zea mays
  Clone ID: MRT4577_51187C.1
ggcaagataattattcattttttatcattaactatcatatgaaaacatacgtgcatgtatgtaaaacgggtccccgcggggaacggggatgggcaatagctacattaaggtgaccatacacggaatgcaccatatttccctttactattatgctcaaatagccacaaggggcttgaatcatccaatgatggtttagcatattcaagaagggaggctgcaggacaagaacatatgccgagacgtcttaaaggcaaaccctgaaagcacaactaaggcttcatgactaaaaaccacaggctattccggtatattcattggagcgcccaggttctccacaaaaatcccaaggtttaagttcttatcctccaacttcttgaaaaaaagccgattcaagaattccaa

SEQ ID NO: 131255 - DNA, 611 bp, Zea mays
  Clone ID: MRT4577_51188C.1
gggcaaaactgccaaaacggcagacgagaagcttggaattccatggttagaatggaaacggcagtatgatggtaagcaccctagcagacctgagttgacaaagatctgactctcagtagccacagtacaagttgcaaaaatattctgattcatgcatttaagggttcagtatcatggtgccttcctggatacttctggtactctgtctaaatgaagagttcaacatcctcgattctactcagcattttccgtgatggcaacttcacctataaaacagatcataattcaacactaaaagatagacatatcaggtggtggtccataaactgatttccatgacaagggaacgatccacccatttgacccatttccatggaatttctcagggccatgacctagaagtttgcatattgcttcagctaactggaaagattctggcatgttgtcgccttccgagcagtagcacaggacacaagaaactttcaagcctttagccttgcaggcagaaaatagtgctgcaaatggcaagcttgcatagtaatcatttattgtcatctcatcagtatcatcatccatatcttctgaaagacaccacccttaaccaggctagc

SEQ ID NO: 131256 - DNA, 463 bp, Zea mays
  unsure (1)..(463): unsure at all n locations
  Clone ID: MRT4577_51189C.1
aatatttttctgggcatgttgtttcatcaaatggggcgtgttaactacgaacaggtttattctaattccaaggctccaagtttagtgaacagaagagcttcttaagccacactaaacgaaccctttgaaagacacacaccccccttcagggnctgccgccattaagaataaggggctacaggatgatggggccgtcagccgctgatcccgaattataagcttcactagggggactgtctgcccaacttatggtgggactatgacgaaccggccccaataccagtggcgcacgaagacctgagccatggacttaagcggcacgcccttggtatccggcacgaactccacggttaaggcagttattacaaccagtcacgactcgtccaaaaggaaggggcctatcttgaagcaaaccagtatggccagggagaacagctcctgcagaagttgatgcccaggttga

SEQ ID NO: 131257 - DNA, 430 bp, Zea mays
  Clone ID: MRT4577_5118C.1
aatctaaaggtttaaaacaatataacaaggaccaatacctatacatccaacagcagctgacggaaattagtagctttcataggtcaataaaagaaaatttcacagccttttgaggccaaagtaaagaatgattagcgctcaagggcggcactaagtagattttcccttgtatcagggcggcgcggggaaaaaatttatgtaataatgaactgaaattttatcatataattgttcaggccctttgggttatggagtaaaatgtaaatgcgtcaggtaattttggggtgaactctgcccctgttagcccaaatgggcaaggaacaccacacttgtattcttttacattcaaaatgacttaccttttaagtaacttgcattgccatgcccgcatatatgaaagggggggggaaagcttttcttttttaaggaa

SEQ ID NO: 131258 - DNA, 463 bp, Zea mays
  Clone ID: MRT4577_51190C.1
gggtacctcgaggccggccggggactcaccatctgacctacccgtattgcaaacagccaaactgtgaaaaaaagattctccagtccacgactcgtcccaaccctagccccgagcgatctcgcatggacaccggaccgcgatatctccacgacctcctcgggggagacagcagtcgccgacttgctgctgagcaggcggaagaacgcctctgcggcggacgaggatggcacgacaccgcgaactggctcgacaacgagcgtgcgacctacagcttcgcctccgctgtggccaacgacctgctcctccgcgacgccatcctcttgttctgatccaagaccgcttagctggttaacaggcctctaccaactcttcctaatcctgatgattaacatgcagaagcagcaaaggctgcatatcatgctcttgtatggatcaataagctgctggctgccggacatgacat

SEQ ID NO: 131259 - DNA, 1039 bp, Zea mays
  Clone ID: MRT4577_51191C.1
cccgggctctctctctctctctctctctctctctctatatctctcttctctcccagaccttccctccggccagcctcaatctcccgcgtgagctcctcgaacgcacacctctctcgatccgactgacatggccggcgcccagtcctggaggacctacctgtgctgcgtgggcggcagcgcggcggtcgaggacgacggctcgacgctgcggcggcggcggaggcgcggcggcagcggcagcagcagcagcaaggacagcccgaggtcgtcgtcgtcgcggatgtcgctcacgagcctcggctcgtcgtcggagacgctctcccccgaggacctgtcgctcacgctgtccgggtccaacctgcacgccttcacgtacgccgagctgcgctccgccacggccagcttctcccgcgccaacttcctcggctgcggcgggttcggccccgtgtacaggggcgccgtcggcgaggccctccgcccgggcctgcgcgcgcaggacgtcgccgtcaagtacctcgacctggagggcggcgcgcaggggcacaaggagtggctggctgaggtgttcttcctcgggcaactgaggcacaagaacctggtgaagctcatcggctactgctacgaggccgagcaccggatgctggtgtacgagttcatgagcttcgggagcctggagaaccacctgttcaaaagtaccaacggcgccctcccatggatgacgaggatgaagatcgccgtcggcgcggccaagggcctcgccttcctccacgacgccgacccgccggtgatctaccgcgacttcaaggcttccaacatcctgctcgactcggactacaacaccaagctgtccgacttcggtctggccaaggacgggccatagggcgacgagacgcacgtgacgacacgtgtcatggggacgcacgggtacgcggcgcccgagtacatcctgacgggccacctaaccgccaagagcgacgtgtacagcttcggcgtggtgcttctagagctgctctcgggccggcagtcggtggaccggtcg

SEQ ID NO: 131260 - DNA, 1931 bp, Zea mays
  Clone ID: MRT4577_51192C.1
cattgggtacctcgaggccggccgggccgggttgcttgagggtcgccttgttcaacttctcgaccaaggcagagagagctttcatccggcagccgctgagcctgagatccctgcaccgcctcccgcccgcccgccggaatggagttcgccttagtcgagagtgaatcgttctctccttcctgccccacgcttatcatgccagcgctgtcgattggcaacgtggggcagctcgccgtcgaccttctcatatcctcgtcgagggcgaggcgggtggcctacctcgacgagccctccgtgctgccctgcgccggtaacgacgccttcggccctgacgccgtcggcgacctcgcactcgctctcgaagcttatgaatctacatctcataagctgggtttcattcagcaaaggtctccagttactacaggaatgatggtttcatttgcaaaaaatgttgctgatttcataagcagcatcgggaagaaccatattgtcattatatcaagtttagattctggaaagaggagagtgattgatgcatccagtgacatgcaggtgtattacctttcaagttgcaatgaagatggttctgatccagaatatgagaaattggggtggaaaaagcttgaggattatgatccatctcagaaacggtggaattgtcttgctagcctagttgagggtggtggtctttcagaagatctggatgatgatactgatgagatgacaataaatgattactatgcaagcttgccatttgcagcactattctctgcctgcaaggctaaaggcttgaaagtttcttgtgtactgtgctactgctcggaaggcgacaacatgccagaatctttccagttagctgaagcaatatgcaaacttctaggtcatggccctgagaaattccatggaaatgggtcaaatggatggatcgttcccttgtcatggaaatcagtatatggaccaccacctgatatgtctatcttttagtgttgaattatgatcaggtgaagttgccatcacggaaaatgctgagtagaatcgaggatgttgaactcttaatttagacagtgtaccagaagtatccaggagggtgagttgcagacgtttgtagtcagttggtaaaggattactaaacactcaaggatggaacttctgcaggcaccatgatacttaacccttaaatgcatgaatcagaatatttttgtaactggtactgtggctactaagagtcagatctttgtcaactcaggtctgctaggtgcttacgcatgttgcttaccatcataccatgtgccgtttccattctaaccatggaattccaagcttctcgtctgccgttttggcagttttgcccatttggtttggttgattttgatgtggtggaagaatctttgctagtgcgtacccctttatgaaaagttgctactgaatggtggaactgttcggtgaggcaattccgtcggcgatgcctggttgtctgttcattttagttgcctacccgaaggtacggtatggaatcgttacgcttttaagcccagtacgtatgacatgtgactagaaggggagttctcgccttctcggtgccctgttacatggctcatggctggttgctactatttcaagaggtggccattcggcctctgtcggcagctgggcaaagctgtctagcgcatcaacgccctaaaggatatatgccttattttaagcgcaggaaccttttcccaatcacaagcggaaatcgtatgttttctgatgcttaatccatgcactccatttgaaattatgggaacttttttttagattcattgttttattatgtacttgcatagatacataatatattctagatataaaataaaaatattgtatctagaaaaatcaaaacgtgtcttatgaaaaaaaaaaaaaaaaagggcggccgccaccgcggtgga

SEQ ID NO: 131261 - DNA, 199 bp, Zea mays
  Clone ID: MRT4577_51193C.1
gctaaattcggttagtttgaacccatctagggacaaatttgtttgggacgggcataagaatggaattttctcagtccaatctatgtaccatttattgatgtacaatcctaacaacaatcggaataagatgatttggagacttaagatccccttgaaaataaaggtctttttgtggtatttaggtcgaggagcgatcctc

SEQ ID NO: 131262 - DNA, 713 bp, Zea mays
  unsure (1)..(713): unsure at all n locations
  Clone ID: MRT4577_51194C.1
ggccgcttttttttttttttttttggtagaaagtctgttcatattcataatctccatgatacatgatgaagaacccaaccagagccccagtccaatccagtccattggggtataagaaaggcaccaatccaacatccccgaaggcgggtaaatgttcaaagaaacccagaattgacgccactgtccccgttgccgtgatagacccaatctaaacgaattgaagagcaagaatccaaatggttaacgcgcccattaaactttcataaacacatgcgaaacatgacatgggccaaactagcacttgccgtcaagaacctcaaagatgccgacgacgtggacttcgcttgtgccgcggcccatgctaggtcgtggctcgaggacgtcgagttcttgctcaaacaagtgcttctcctcttccatctcgaactcgtacatgctaggcttgcgacggacggcgagcagttgcctgatggatgagcctgaggagcggtggctgtgtggcgaagagttgcgggtcagaggcgtagtgcttgaggaaataatggatgatggcgaggcagagcgcattgagttgcggtttgggctaaaggcagtcttaagacgacggagggatcccggatgtgcttcggaggggagtgaaggattgnaagcggttggtgcggcttggggaaggcattttgactgttgggttggtccttcggagtggtagcgat

SEQ ID NO: 131263 - DNA, 546 bp, Zea mays
  Clone ID: MRT4577_51195C.1
gggtttggggtttttttttttttttttttttttttttttttttttttttttttttttttttttttttttttttttttttttttttttttttttttttttggggccgaacgaaaaatttggggcaccccttctaaccaggggctaaaaaggggggggggggagaaaaaaaagggaatcgggggcccaaaaaggggttccttaaaaaaaaaagataggggaaaggaaaaagggggaaaatcgaaaaaaaaaaacccctgacataaaaatgggaatcctggtggaggggtaatttaaaaaaaaggggtttaaaaaaaaccaaagggggggctcgcactgggggacacctttcaaaagggggctttgagcagtttaactaatttttcctgaaccattggccagggaaggggacccccagagaagggtctaagaaaagggaccggggaaactcccaggaagggttctttgaaaaatgcccggcacaaaaaaaatgggggggcccttttataaaaaaaaggaattttaatggggggaagccccctggctggg

SEQ ID NO: 131264 - DNA, 645 bp, Zea mays
  Clone ID: MRT4577_51196C.1
ttttttttttttttccctgaacaggaagccttccatcttacgttctccctcatggggcaacaatgttcacagtgctactagaaaaacattctacagcgctccaactgcctgatcttgtagggcattcgaagaaaaacactcttccgtcagcatgaaggaagaaaaaccctagttccgttgctgcagcttcccaaccgagtgcaggtacacagacacagaaacgaccgtggatccaagcaagaatgcaagagacaggtggaagccaaataagaagacggatactattgccgtcagaagcattgcaactgatgttgagtaaaccttaataatattgttagcatatttcatcaccattgatacagcaattccactcaaagcatgattaagaatcatcaaaactgtaataaacgagtagccatggaaaaagcctttgttcatgacagcatcgaagtcctggacacaaattgcaaccaaattgaagagcatcccaaatatgtacagccaaaaattctgtgcattgatatttcttgaaggatttttcttgatgataacttcagtatatactcctgcaaaaccacttaaggccatgttcgtttaatcccaaaaccatagggattgagggggattggaagggattggagagga

SEQ ID NO: 131265 - DNA, 420 bp, Zea mays
  unsure (1)..(420): unsure at all n locations
  Clone ID: MRT4577_51198C.1
acacaccaggncacgccagccncaggcacnccccagtttaccncacacgcacgaagcaggagagcaggggacnggacaagcaaggngggcaacaggaagccngcggccaccgccagagnngcnggccnccncnncnnccncgncccccnccgggcgcngccnncccnccgcgncnccanggcnggancagggnncngcgacggcaagngcgcgggggggggcgccaaggcttttttttttcgacgacggccncaagnacngcgggancngcngcgccaccngcaacngcgcgccgcccgggaccgcgggcaacaaggacgagngcccangcnaccgcgacangaccaccggacacggcaaccgcaccaggcccaagngccccnngagananncannccnncgcacccaccggggagccag

SEQ ID NO: 131266 - DNA, 387 bp, Zea mays
  Clone ID: MRT4577_51199C.1
ataaatgaatcaacagggccggggacactatattacattgggcatggtacggctccaaagatgcaatatacattgggattagagattagataacagcaggatctagtgaacaagaattttcaaggtgattgtgacagccacattgacaaaaggacgggagttatgtggatctaaatacaaaaaaaggcttagcgggaatcaagcgaacttgaaacgtggaatactgtgtgacaaggaagagcctctgtatacagagaagtgcaattatctgcacttcaatggatttatgattcatgagctgaatgactcgacggtagatctggaggataaacaacactactcggtcagatggatggtactggaagaactgaccgaggctgataaacg

SEQ ID NO: 131267 - DNA, 852 bp, Zea mays
  Clone ID: MRT4577_5119C.1
tagccaccgcatcgtcgccctcaaattcgttccgtccaggcaaggaagaaatcgagcagccaaggagaggagaagatggctcgtacgaagcagaccgcccgcaagtccaccggaggcaaggccccgcgcaagcagctcgccaccaaggttcgtctctacctacccgtaccgatctgctgttccgatcccctcgatggttcccgttgtaagacggcgctgacgcggcggcggttgttgtttcgttgcaggcggcgaggaagtcggcgccgacgaccggcggcgtgaagaagccccacaggtacaggcccggcaccgtggcgctgcgcgagatccgcaagtaccagaagagcacggagctgctcatccggaagttgcccttccagcgcctggtccgtgagatcgctcaggacttcaagacggatctgcggttccagagccacgccgtcctggccctccaggaagccgccgaggcctacctcgtcggtctgttcgaggacaccaacctctgcgccatccacgccaagcgcgtcaccatcatgcccaaagacatccagctcgcccgccgcatccgcggcgagcgcgcgtaggcgtatctcgcgcccggccccagtggcggcggagggatggaggagtgcaatttgtaactttatgctgtttgttcgcttttagacggcgtggcgaagtagtgtaaaaacggctttacaagtctattttgtgtggtagttcgtgtaccgcttcgtcccgaagcgatcttggtaaaagactgatgattcgtgttgccaaacgacacaattcgtattttttttgtgtgccgtgtagaacacggtttgttgttattggaatggttccccg

SEQ ID NO: 131268 - DNA, 349 bp, Zea mays
  unsure (1)..(349): unsure at all n locations
  Clone ID: MRT4577_511C.1
tttttctttttttttttttttttttttttttttttggggtttttttttttttttttttttttttttttttttttttttttttttttttggggggccaatcgggagacatacccggggccaaggnttattttttcatggatttgccccccccttttttcctcctccggccttgcgcgggcgggaacttggatgggggggcccggggggncttaatagaaggtgaggggcaagggtttgcccccccactccttggggcccccaaacatgggggnaaaaagtttgccctggccgaacccggggggcaccccgggaattcgggcccggaccctgaaggggacccaactttccc

SEQ ID NO: 131269 - DNA, 329 bp, Zea mays
  Clone ID: MRT4577_51200C.1
acatcggaggtccatatttacactgctcacagcacaacacaaagaatgttcagcaacagccaacgaatagcactcttggtgtgtagcatctaacacaatatacacaagctggcaagcatttattatgcaaaactcggttttaattaacataactagtaaacgtgcgtaagctgttctccacacccatcaccagcctttggtctcatctacctgatgaacataacttgaggtagtagatatgatctttgctgcactagctccaaaagaaacacaggcaacagtatcagtatttcttctctgctgctctatggacctagtcaaaatttgca

SEQ ID NO: 131270 - DNA, 334 bp, Zea mays
  Clone ID: MRT4577_51201C.1
ccctgcgtccgtgatcagtgtctaaaggacggggtcaacttctgaacagactcgtgcggtggcactccggagaaccgctgccggttcgactggtagcactcatgccgagggcgacaaaagtggagctgacatggtcaggatatggctgtgaccattcgctaggtactccgaggccccggactcacaccctgaagctctgggaccggacatggagcacgcgctcaacgagtccgagatcgtgtactggcacatggagcagccgcggctgggggaactcggtgaaacgctggcaacccggtacagacttgggcggatcaggtacgctctgatggga

SEQ ID NO: 131271 - DNA, 303 bp, Zea mays
  Clone ID: MRT4577_51202C.1
cgaataacacaggtcagcgcgacgatggcatccctcgctaataacatcatggtcgggggcgccatccttgctgcgctcggctgcggcgattcgtgcgggccccctaatgtgccacccggccccaacatcatcaccaactacaacggccagtggctcatcgttagggccacctggtactgtcagtccaaccgtgcctgaactcctgacaaccgcttttctatgctggatcaagaacgtgaatctgccaccctacatctttatgactgcatgcggtaacgtgcccatcttcaatgactgctaggg

SEQ ID NO: 131272 - DNA, 477 bp, Zea mays
  Clone ID: MRT4577_51203C.1
ctaccaccaatcacttctgatcagccgccttcattaacagggcacggggtacttcaaacatgagactacgatccctcatgactccttcttttgctctgcaaagcccaatatatctaatccacggcacctacgacgcgccgaacatgctattgatcccgagcgccgctatacgacaccgaacaccacattcacatgatattcccagcttatatagacctgacaatccaagaacttcgtatttgacacgatcgagcccacctgtgttttaaagcctagactgactacttcaacagcctcttcgcggactaccacatcgatcacctcgaccacatgcacatattgactgttgacacctacaaactcacgagaaataacccgtacttcctccggcggtacgcccagcgccctttcctcaacctcctgcagcacattatcactaatgccatgcctggcatgaccaccattattacctacatc

SEQ ID NO: 131273 - DNA, 233 bp, Zea mays
  unsure (1)..(233): unsure at all n locations
  Clone ID: MRT4577_51204C.1
ggagagtcgatcgtcgtgtctcatacacttatacacatcgtatgacttagatacgacatagattcgatgcaacgtataagctacagattggatacagcggctagacgctccgactactacacgcgtactacgagagtatggcactgctgttatatgtacgtgatctctntacactcgaactgatcgacatgacagacgctctgatacgtacagattggttgcacagcgtatga

SEQ ID NO: 131274 - DNA, 752 bp, Zea mays
  Clone ID: MRT4577_51205C.1
aggtcgtttcaggtaaaggaaaggaaaacagggggaaagacatcgtgagaaactcatacaaaacagaacttgcaaggcaaattttactcagtttcattgtgaagtcggtgcacgacagtttaggtccctcccgggctgaaccagagaggaagccaagtggatcagatgaagctagtaatgaacagaccagcgtcttaggcaagaacgcttctggttctggtcgcaaagatccagataaacaagagaaagcgacggaggttactaagggcctgaaggatacagagggattcactgtcgtttcaaaacgccgaaggcgtccccagccgttcatgaaccccataaatggcctatattctcagccgtctatttgcacctctgtcagttaaggtcattgcgttatcgaagacctgcaatattttgggagatggacctttgcctttgcctttgcttagaggattggtatttggtagcagagattttctctatccaagtgagttgtgagcagcgagcatttagtcaaactgtacaaaagttttccgggataccctttttgtaataaaagaaactgatgtattccgcagtagctgtagcgctggatataatgttcctttgtatgttatatatgacagaatcataggaaatagcagatgttaagttaatcctgaaaaaaaaaaaaaaaaaagcggcctgggcgggccgaaaggatccaagtttatttccccgtgcttgcaagggcatatcctttttttagg

SEQ ID NO: 131275 - DNA, 216 bp, Zea mays
  Clone ID: MRT4577_51206C.1
tacagtccaaaccacacaaactaagtcctccaaccaacaggccgcagcacgcacccagcgcacagcgatggcctcgctcacgatgatggcatcggtggccggccgtggcggtggccgcgccttcgcgcggcggcagcttcgccgtggtcaggtcccccaaggtcgatcgcggccagcacccggccacgctagcagcaaccgatgccaggcccgccg

SEQ ID NO: 131276 - DNA, 154 bp, Zea mays
  Clone ID: MRT4577_51207C.1
cctttgaaaatatttgggcgccatgtttgcatacaggtcttttcattggcagtcacaaagggcaaacgtgtgctccaattgttgatgactggcgaacaggtttctacccgaaaaaggcggatgggaagtactcttctcttacctaagctttcgc

SEQ ID NO: 131277 - DNA, 607 bp, Zea mays
  unsure (1)..(607): unsure at all n locations
  Clone ID: MRT4577_51208C.1
ccggngtcgacccacgcccgtccggctggnaaactttgnaatctacaggatacacatttctctggtgtcactctgagctacttgggcaatctcacatctttgacagacctgggaatagatggaagatcaatttctatggaacctccctattttttcgtaaacaagctggaacatgttagtaccttgcgactctcttcggtaaattgttcatttgaggctaggtcaaatttctcatggattggtgatctccagagcttgaaaacattgaaaatttctgattgctactctactaagaccatgccctcctggattggaaacctaaccagtttgagaagcttggatatcaggtattgtggttccatagggccaattccacagttaattgacaaccttacgacattggaatatttgacaatctctgattgtgcttttactggtcaattaccctcttcagttggcaatctagaaaacttaagattcctgcaaatatcctataactatcaaggtttatctggccctataacaccaacaattggacatctcaacaagttgacagtattaatacttcgagattgcagcttctctgggagaataccaaatacaatcg

SEQ ID NO: 131278 - DNA, 489 bp, Zea mays
  Clone ID: MRT4577_51209C.1
accggcccgggccgccccccggaaggggggaagcccaacacacgggcggccggcccaagggggcccgagcccgggcccaacccgggccaaaccaagggcaaagccggcccccgggggaaagggaaatccggtcacaatcccaaacaaaaaaaaacccggaagcaaaaagaaaaaagccaggggcgccaaaggagggagccaacccaaacaaattggggggggcaaaccgcccccgccccaggcggaaaaccaaacccccccgccccagaaaaaaaaaggccaacccccggggagaggggggggggggaaggggcgccctcccccttccccgcccacggacaccgggcgccggggccggcggctgcgggggggggggtccgctcacccaaaggcgggggggcgggtccccacaaaaccaggggacaacgcaggaaaaaacatgggaacaaaaggccagggaaaggcccggaaccctaaaaaggccggggg

SEQ ID NO: 131279 - DNA, 831 bp, Zea mays
  Clone ID: MRT4577_5120C.1
ctagccaccgcatcgtcgccctcaaattcgttccgtccaggcaaggaagaaatcgagcagccaaggagaggagaagatggctcgtacgaagcagaccgcccgcaagtccaccggaggcaaggccccgcgcaagcagctcgccaccaaggttcgtctctacctacccgtaccgatctgctgttccgatcccctcgatggttcccgttgtaagacggcgctgacgcggcggcggttgttgttttgttgcaggcggcgaggaagtcggcgccgacgaccggcggcgtgaagaagccccacaggtacaggcccgggacggtggcgctgcgcgagatccgcaagtaccagaagagcacggagctgctgatccggaagttgcccttccagcgcctggtccgtgagatcgctcaggacttcaagacggatctgcggttccagagccacgccgtcctggccctccaggaagccgccgaggcctacctcgtcggcctgttcgaggacaccaacctctgcgccatccacgcaaagcgcgtcaccatcatgcccaaagacatccagctcgcccgccgcatccgcggcgagcgcgcgtaggcgtatctcgcgcccggccccagtggcggcggagggatggaggagtgcaatttgtaactttatgctgtttgttcgcttttagacggcgcggcgaagaagtagtgtaaaaacggctttacaagtctattttgtgcggtagttcgtgtaggccgcttcgtcccgaagcgatcttggtaaaagactgatcattcgtgttgccaaacgacacaattcgtattcaaaaaaaaaaaaaaaaaagcggcc

SEQ ID NO: 131280 - DNA, 140 bp, Zea mays
  Clone ID: MRT4577_51210C.1
gaacttgtgcttacaggagccacacaaatccccagcaccagatgacaacaaggactgtgctaaatacacagcagatggaactgatgagggcaccataccacatggcactgacatgagccatgagcctcaggatggccagc

SEQ ID NO: 131281 - DNA, 448 bp, Zea mays
  Clone ID: MRT4577_51211C.1
aacacagaataattgtttctcttccccaaatgatttagttattgagacaaacttccaaaaagaaaagaaaatcgtactatgtttcttcatagttcatgtccacgagttaaggagtgggcatgaagagatagagaagattgatatttcatctttgttatgttaccactttcgttcgatatgtggcttacttaaaagtccaagcaacttctatgacccaattcaactattttacctttcaaataaagttgaattgaccaggaggaacattggtgcttccgaactggaaaccagattgtggagcatgattctcgtcgttgccttctttttcattgtcttcagtccaaaatgtttcgaggatcttcacggctttgtcgtagatatcattgttgtcgtgactctgaagaatctcaatcttttctaacccttctgcttcgtcaatcatttgagc

SEQ ID NO: 131282 - DNA, 252 bp, Zea mays
  Clone ID: MRT4577_51212C.1
ttttctttcttttttttttggggtttttttaattttttttggggttcccaggaaaaaaaacacctaaggccagctgggaccatacagtcctcctagttcaaaaacattcgtttctaaaaaaccctgggaaaaacccccccagaacatttttaaaacctcaacaggggggcgggtgtgcccatcccacccccgaataaaatttccccctgctgaaaaagcaacctcttgtacttctccaatcgctatcgctaa

SEQ ID NO: 131283 - DNA, 173 bp, Zea mays
  Clone ID: MRT4577_51213C.1
aaacgccaggtgtgatatttaccaagcaggggctccaacacccgacattgcctacctatcgcccgtgcaaagtaccaagcagacactatacgagtaactacacatgctgtacatagaccaacaattatacgccgtatgacttgggtcgacccccatgcgaacatcactacagg

SEQ ID NO: 131284 - DNA, 405 bp, Zea mays
  Clone ID: MRT4577_51214C.1
aaaaaaaaacccggcagggcacaacgggggggaagtttcgggaaccgcccccgggggaaagcaaaaaatttatccccccggcccccaagaaaaggaaaatggcccccgagacctgaacaaaattaaaagacccccgttaacgggggccggcccccccaaaaaggaaattgggggaccccccaacaaaccggagggggcaggacagggggggcccttgttggggcaaaaacccaccccccgacgctgaatccggggggcggggcaaacttgggcgaccccccggggttgttgaccccggggaacccccgggaaagcacgggggggcaactgacaaaaagggggtagctgccggaaacccaggggccgaccttccactggaggggggcggccaccttgacctggagg

SEQ ID NO: 131285 - DNA, 392 bp, Zea mays
  Clone ID: MRT4577_51215C.1
gcgtaactgtttttttttattgtaacattatttttgaagaaccaaccatctttttttgggttcagggttcttccgttcaacaaaacaacctaaagtctttctcatgcgccttgaatttttttttacatcacagacttttgacattttgggaacattaaacacgtaatactgataaaccggccaacgtttaaaaaccctcagaaaaatcatttttctggggttttgcgctatcaccaggcttccaaaattttgctaattgattagtctggggagcaacccttattgaaagaaaggggggctttttccgggcgtaggggatatctaaccgccaaaaccggtttgttgagcaaatatttgttttatgaaaagagatttgattaataaaattgggg

SEQ ID NO: 131286 - DNA, 366 bp, Zea mays
  Clone ID: MRT4577_51216C.1
gtattattacttttttttttttttttaattttttattgttgataaaaagcaagacaaagaaagctaagctggaacgttgggcaaccataaaggaccggggaaacaaaggaactgagatagaaaaaatatggaccgcagtgaatagttatggcagaaacaaggacctcctatgaccctaatactggatgatcaacatatagcctgggtggccatattcagagagcttacaaagcctgatagcacccataggcgcatgcagtgtagagggtgtatcaatcggaactccaaatgaagcttgtgaaacacaggatatggtacttggagatatgaatgtcaagcttaaggttctgcaccacgtgcttcaaa

SEQ ID NO: 131287 - DNA, 844 bp, Zea mays
  Clone ID: MRT4577_51217C.1
cctcgaggccggccggggttgaaaaccaccgcaccctttcatcagcctgcctgtccactgttggcttggtgacttcctccgctccgctccgctcccctccgctcccgaacggtcgatctttgcatggcagcagcagctggctccaaggggcgggcgatcgctggaagcttcgtcagccgcgtcctcgccggcaaggccgcctcgccgaggtactcagacgggccacactcacccacacgcgcgggtttcggtttgccctgtgattctgtttttttactatttttgagcgtgcttgttctcgatcagttcgtccaagatctcgccgtagttttaggcttgtagcagagcgatctgtctgttctatttacggccgttcttagctttgcgctgggagtctgggttcggtgattcggtccctcggatcgatagtgcttgctggctgctgcagtttatttccccccctccgacttgggacttgggaggatcttagcttcgtggataactataactctagttctgcagagagccttgttttgtgttggttcagtgtgctgctggtgccaagattttggtcagcagaaatatctagaagttggcgacagcagatgagcagaatgattatcttctcacacgagtacgtagatatggcaaccctgaacatctcccagcttgtttaaccctctggccgtcagtccgagaacgatagagcacatactggcagcctaggactaggagggagagtatgtatcttccacttgaatgcgctgttcggcctggcggcggtggacagaagaacccaaccatctccgtagaagtgatagaagaaccccaaccaaagccagat

SEQ ID NO: 131288 - DNA, 677 bp, Zea mays
  Clone ID: MRT4577_51218C.1
ccggccgggcagacccctggaggatatagtggagcctctgcaggataatagagtggagctctgcaggataatagagtggcaatgcccactcaggtgacctaaaaagaagctggttaacccagttggtatttaaaaaaaaaaaaaaaaaaaaaaaaaaaaaaaaaaaaaaaaaaaaaaaaaaaaaaaaaaaaaaaaaaaaaaaaaaaaaaaaaaaaaaaaaaaaaaaaaaaaaaaaaaaaaaaaaaaaaaaaaaaaaaaaaaaaaaaaaattttctggccccccccccccttttttttttcgggggaaaaaaaaaaaaaaacctttttccccccaaaaaaaaaaaagggggagattttttttttccccctcaaaacccgggagaaaagcaaaaaccccggggggccccccacaaaaaagagcgctttaaaccccccccaaaaaaaaaatccccgcgggggaaaaaattttaaaaaaaaacaattttttgggggccccgcaaaaaaaaaaaaaagggggccaaaaaaatttttttgtgggggaaaaaagccccccccccccccccgcgcttttattaaaaaggggcccaaaaacccgggggccccccccctctggagaagaattttggggccccccaaaaaaacaccacccccgccgcccccccttttttccccccccc

SEQ ID NO: 131289 - DNA, 655 bp, Zea mays
  unsure (1)..(655): unsure at all n locations
  Clone ID: MRT4577_51219C.1
cgaccacctcaacccgcgcgtgcagggggagcgctccgcctggctgaactggctcaggtccgacgccgtggggttcgacggctggcgcctcgacttcgccaagggctactcgccggccgtcgccagaatgtacgtggagagcacggggccgccgagcttcgtcgtcgcggagatatggaactcgctgagctacagcggggacggcaagccggcgcccaaccaggaccagtgccggcaggagctggtggactgggcgcgggccgtcggcgggccggccatggcgttcgacttccccaccaagggcctgctgcaggcgggcgtgcagggggagctgtggcggctgcgcgacagctccggcaacgcggccggcctgatcgggtgggcgcccgagaaggccgtcaccttcgtcgacaaccatgacaccgggtcgacgcagaagctctggccgttcccatccgacaaggtcatgcagggctacgcctacatcctcacccatccaggagtcccctgcattttctacgaccacatgttcgactggaacctgaagcaggagatatccacgctgtctgccatcanggcgcggaacggcatccgcgccgggagcaagctgcggatcctcntggcggacgcggacgcgtacgtggcccgtcgtcga

SEQ ID NO: 131290 - DNA, 299 bp, Zea mays
  unsure (1)..(299): unsure at all n locations
  Clone ID: MRT4577_5121C.1
ttcacaaaacgaggaacacgctttttttttttttggttcattttttggttctttccctccctctgccctctttgtcttgtggcgcttgtgcttctctcgcggcccctcttcgggggggttctgtcgctttctgcctggggtggggggggggttgntgcttctctctggtgggcgcccggtttggcctgtggccgggtgtctcccttctcgctgcccttgggtgtggagcttgtcccctgtgtcctatccttgttcgcgcttgttgccttgctgctcatgccctgtcttgcggggggggg

SEQ ID NO: 131291 - DNA, 138 bp, Zea mays
  Clone ID: MRT4577_51220C.1
ttttgtgttttatgaaaacggcccgtcgaaaaaggccccaatggcagccggacaagggaaacacaacagtaggggacctcaatctcggtaaaaatcataccacccatacattaataacaacactcaatgcatactaga

SEQ ID NO: 131292 - DNA, 361 bp, Zea mays
  Clone ID: MRT4577_51221C.1
acgcgcgagaacggcgagaaggccatggccaaacccatcattttagcattccttggagagcatccacctgctggggtgacgcggattctatccaggtgggtcgccactccattatcaacaggggaccacgtgaggatgccacccgaattggttcaactggtgttgtgagaaggcaggctgtggatatctcacccctgagaagggagaaccagaccatctaccttctcaccactccatgccagggagagcgctatcaagaacatcaaaaccattgctgagtgccttgcagatgagtcgatcaacactgccaatggctctttcaacagctacgccttctaggaaaaggaacaagattgagcgt

SEQ ID NO: 131293 - DNA, 685 bp, Zea mays
  Clone ID: MRT4577_51222C.1
ttgggtacctcgaggccggccgggccaggagttactattgtatcttaattagttttgcgcaaaataaagaatacaccaaatttcgggtcgagtgtgggttacccgtgggttgaaatagaaagtcgcacccacactcacaaaaaaaaaaaaaaaaaaaaaaaaaaaaaaaaaaaaaaaaaaaaaaaaaaaaaaaaaaaaaaaaaaaaaaaaaaaaaaaaaaaaaaaaaaaaaaaaaaaaaaaaaaaaaaaaaaaaaaaaaaaaaaaaaaaaatttttccccggcccccagccctttggggggggccaaaaaagggggggcccccccgggggggggggggggggttttcccccccccccccggggccggtggggcgggaaaattgaaaaaaaaaaacctttttttccccttaccaaaaaattgggttttggggaaaaagggggggggggcaaaacaaagaaattttgcacaaatgggtaaaagggccacccccaaaacgggggggggggggaccctgggggcccctttcaaaaaaataaacctttgggggacaaaaccaagccaaaaaaatccccccccaagggggttgggaaaatcccccttaaaatgggcgcccggaaaataccctcctccaaaacaaaagggggggggtttttggagggtttttagggggaaattttgtccccc

SEQ ID NO: 131294 - DNA, 540 bp, Zea mays
  unsure (1)..(540): unsure at all n locations
  Clone ID: MRT4577_51223C.1
cccccacccccaccgaaccaccgcctccaccaaccgagtccgttccatcccccctncgccctcgctggagcgcgaggcttctctcccctccgctaccttctcctgcccccccgtcgcggagaccaacaaggagaactacaccctaatcaggagagaagccacgacagacagagcctcangaagaaaacaactgcgggcacctggccacatgtatgtgcagaaccatgaccaatcaacatgcaccagacctaacctgtataacaaggtacaacaccgcaccagcccgccccctatggcaatcacacgctattccaaaaaaaaccctgancacatcataacacacacgggtcatggcaacgaagcaacacgagagcgccttgtacaaaacagaacacaaccaaacacctgccccnataaganggcatccaacacaagaaacgacccanangggaacaaaagctactgatagcccaaaatccnnnaagnacagacataacccaccgngggcccaaaacaaggacccccccgcaccaaaggaca

SEQ ID NO: 131295 - DNA, 230 bp, Zea mays
  Clone ID: MRT4577_51224C.1
tacacgcgtcggttgtaagactgatgtattgttcatacagagagggatgttgcaaattgcgtggcagcgtaagcatactggcatcgtgaggacttggacaggatcaagaagcgagcattgggcaatggagcgtctgatagcactttcgatgatcacgaatggttggtgataccattcgagcgctctgggaagcagacaattcttatacataagggtgacttgcttgtagg

SEQ ID NO: 131296 - DNA, 352 bp, Zea mays
  Clone ID: MRT4577_51225C.1
cccacgcgtccgcccacgcgtccgcccacgcgtccggacgagctcgggctgcagctggagggggaagtggaggacggcgagggtgagggtgaggagactccgcagggcgcgctggggtgctccgatctggtgaagatgttcggcgaggtggccgacgtgaagccgctgctgagcgggagctgggactagaacgactgatccgcgcaccagatgccattgtacagcgttcgcaggtcgtagttgggtgtttcagatcgctgctaggaggcttgtgaaacgtccggtaccctgtatatagactttttcatcgtccgcaagttgcgttccagtgacgaactgtatgacatccggt

SEQ ID NO: 131297 - DNA, 647 bp, Zea mays
  Clone ID: MRT4577_51226C.1
gctctagctgctgttttaatttcatcagctgttaggtgtcgcctctcctcacgccttagttgcttaagcgtaaggcggtagtcagtcgccatgccctcaccttactatgcgtcacgacattatatttctgcatcattataatttgcagcaatgaagttatcaacttttgaaagctaaccttactctgccatgaggctaaatagcagaaatttattactttctgagataagcccacacactgaatcatttttgcttgatatattctgtttgtgtattgtggcctcttactgagttactaaaataagtttggttcactaccacatttttccagaacaaagttaagcatgtcggaccaagtgctagcatttggttcatgactgctgctgtggcttgctagctccggtccaagttgtgagattcatgttctattttggaacacttttgttgcaaggagggaaagtggtcttcatttcacatgataaaatattaaatctgtcatagtctattttagtgacatttgctctcaatagaaacagtaatatgatctttggagatttttttgcttccatatttctatacctcattttataattgtttcccttctgtaattctttaataaattgatgatttttgagaattgcttcttt

SEQ ID NO: 131298 - DNA, 573 bp, Zea mays
  Clone ID: MRT4577_51227C.1
acaagctttttttttttttttttttttttttgcttttttttttttttttttttttttttttttttttttttttttttttttttattttttttttttttttttttttttttttttttttttttttttttttttttttttttttttaccccggccccaacccccctaaggggaaattccaaaaaactggggggcgttaataagggaacccaactcggaaccaaacttggggaaaaaaagggaaaaactttttcccggggaaaaattttatcccctcaaaattccaaaaaaaaaaaaaaccggaaacaaaaaaggtaaaacccggggggcccaaagagggaaccaacccaaattaattgggggggccccactgccccctttccaaaagaaaaaacctttggccccattttattaaaaaaacccccaaccccccgggaaaaggggtttgggtaatgggcccctttcccctttcccgctaaaaaaatcggtgggcccgggcgttcgggtggggggaagggtttaaaccaactcaaaggggggaaaaccgttttccccaaaataaggggataacccaag

SEQ ID NO: 131299 - DNA, 596 bp, Zea mays
  Clone ID: MRT4577_51228C.1
aattacaataaatttaacatcgaataattcacagggctggcaacaaccgggattggcaagcggccatacaatggctaaatatgttcgcactgatcctgaacatgacaatccgtagtaactgcccaacacactattttttagggtacataagaaccatccatccatgaaaagcaaggggaaaaaaccagtatactgggtgtagaacatgtggcagatcatgtatacaacacggatggtgaaacctcactctttgtacagccaacagaccaggtagacgaaatgggctcacagagccacccctgccttggcctcgaaaagactcgacctgctgtcaccaaggaagtctgtttaaaccaaatcctactacacataacccatgatacccttgagtggacccttgggagcagtcttaatagctctctagatatcctaataggaggccccgtagtcgattatgaaagctaggtcaacaaccgagacatacacagtaagaacacggtaggacataccagtgagcttgccattcaaatcaggaaaaactttaccaacagtcttggcagcaccggagcttgtaagaatgagttaaagctggcagc

SEQ ID NO: 131300 - DNA, 318 bp, Zea mays
  unsure (1)..(318): unsure at all n locations
  Clone ID: MRT4577_51229C.1
acccttggctgnatgcctagggnaggatgggggatttttggnagccctctaagnnacaaatagnnttctgcnntccttgnncgcttcagnacgcccaccttngnncgcccnntgcgtgtntnncgtgnatttggggccctctnaagtnnnttgttgtgtnctgttntnntctcgtngnntttgagggtgggggggggtggggggggtgnannaaggctaccagnatnnttcttcnntcccttgtttgtngttggacagagagtttgggaatgaaaaccctagtnnctgtgtgcannagcagcccaaattgggggttct

SEQ ID NO: 131301 - DNA, 282 bp, Zea mays
  Clone ID: MRT4577_5122C.1
tagaagcgctggtaggccttggagatgcgggttaggaagagtggagactgctgcacggactcttgaaccatgaacatatttgatcgaaagatcaattttgatgcgcttgtaatattttctcatataaccccgtcaacgcagcagcacctgaagaaggtctatgcaagttttgccctgtgtatgtttgtggcggctgcaggggcctatggtcctatggtcactcatttcattcaggctggccttatgtctgccttgagctccctgatagtgatgatgtggctg

SEQ ID NO: 131302 - DNA, 417 bp, Zea mays
  unsure (1)..(417): unsure at all n locations
  Clone ID: MRT4577_51230C.1
cgcggcgcgggtgttccagctgacccgcgagctcggccacaagtccgacggcgagaccatcgagtggctgctgcagcaggcggagccggccatcctggcggctaccggcaccggcaccatcccggccaactactcctcgcttaacatctccatccgctccggcgccgccgcccccgccgcccgcgccgcgccgttcccggcgctcgcgctccacccgcaccaccaccaccaggcggcccccgcgcacgacatgtccgncatgatggctgggtaccatcaccaccttctcccgccgcagccggagccgcaggaggaccccagcgccggcgacgcctacatgcggaagcgctaccgggaggacctgttcaaggaggacgacgagcgccaggatccgagcgcgcccaaagcgcgcgagca

SEQ ID NO: 131303 - DNA, 473 bp, Zea mays
  Clone ID: MRT4577_51231C.1
ggcgccctttttttttttttttttttttttttcccgggcaaaaagggttcttataacaattatccaaccaccaacagccggggggggaaaacaaaggcacccccccaccaaattgcgcccgcgccaccagggcctcttttttttttccccccccgcatctgtaaaccacccgcagagaaaaaaaaacaacataaaagtgaaagctgggatttcttgtttttggcggggagcggggaaaagtgtttgtggaaattaacaaaatgcctctccccccaacaccttgggcgcccgcgcgtctatccagaggcgggggggtttcctttctcgaactccgggcatgggaaaaagaagcaccgaaagaaatggcttgggctaaggacaccacacatcccaatgctccctaatcggtgatcgatctatcaggtctggggccaccgaaacgaataacttgctggagggctctccctcccgga

SEQ ID NO: 131304 - DNA, 303 bp, Zea mays
  Clone ID: MRT4577_51232C.1
gtgtattaacttttatgaattcaatttaagaattaatggttttttttatgtttagggtacaacgtaaactttcttaagctgaacacattgggcctgaggaattgtacatctacagacgtcttttgatgcgaaaaaaaaaaacaactgggaatactagcagaccgttcaattttttaaatgcctgacacaataaaaaattgggggggaacctttgaaaaccccctgttttaaagaacggacaaacaaattttttcctttgtctaaaaaaatgcaaatgaaaggtccccttttttggaataaaaa

SEQ ID NO: 131305 - DNA, 522 bp, Zea mays
  Clone ID: MRT4577_51233C.1
ggccgcttttttttttttttttttcgaggggtcaagactcccacatgaagaccgcatgatgataaacacgcaaacagagaccaacaagaacaggcactttcccagcggcgaaggatatttgccaaccgatagagacatcctctgttacggaaccactgagggcctataccaggacaccactggggggggggggcgaccacaccctgccagtagagcgaatcagactcgtgacccatcgcgccgtcctcaccctcgtcatactcagcaccatcctaccaggactccttatcaggcgccgacagatgcccccgagccgcggagaactcgccctgccccataccctaaccgactcaccgctgaacgaatgcgcgctctggcgcccatgaggcctgagacttggggtcaatgcgcttagaagaccttgacaacactgtgtggtcttggtgatggtacaccccgttcgctgcacctaggccagatcaccccctgtggcgactctgagaggatggtgagtgatgcgcc

SEQ ID NO: 131306 - DNA, 168 bp, Zea mays
  Clone ID: MRT4577_51234C.1
cgaaatcctaacgccgccgcttcacaggtaagccgccgccatggtctccggttccggcgtatgcgcgaagcatcggtgtgtggacgcgctgcagcacatgctgggccgcctgtcgtacattattgccaaggaactgctcaatgggcacaaagtggtcgtcgtccgctg

SEQ ID NO: 131307 - DNA, 346 bp, Zea mays
  unsure (1)..(346): unsure at all n locations
  Clone ID: MRT4577_51235C.1
gagaggtggaggagtggcctggcttatggggggggggggggggcacaactaagccccgcctggcgacccggcgccacaaaacgggcgcatgtggcccgggtcgggttccggttgggcgggagggggaaccctgctccgaagaagggggcgaanacatccacctcctctgaccccccgggggggggggcctacnccctttctccccactacctggaccgctccctagtccaggactaccggttccaccccgtcggtctccggaagcccggggagtacctgcatttccaggggggctccctggaccacaacctggccaataatgaggccccgggggggggtccccacc

SEQ ID NO: 131308 - DNA, 613 bp, Zea mays
  Clone ID: MRT4577_51236C.1
caattgtggagtttgagaattgtaaggttcttattactgatcagaagatcacaagcataaaggaaatccttccgattttggagaagaccacacagctgagagcccctctgttcattattgctgaggacattactggtgaagctttggcaactcttgttgttaacaagcttcgaggaattctcaatgttgcagcgattaaggctccaagttttggtgagcggcggaaggctgtacttcaggacattgccatcgtcacaggtgtgcgctccagaatgcggcctcggtagctggaatggtcctaaccacacaggcaattgttgttgagaagccaaagccgaagcctcaagtggcagagccaccagagggagcccttaccgtttaaaacttaacgttcttgaggctgctgtccagacggttcagatcagttgagagggtagaactttggtttgagaattttggttcagatccactgggagttgtagagtaggatttttattttgcagatgaagagtaattttactctggtctgaacttatccaaatcaaagacatttgcatctccattttttaaaaataagctcatggcgatgctggattgtacgagcaagtacagt

SEQ ID NO: 131309 - DNA, 307 bp, Zea mays
  Clone ID: MRT4577_51237C.1
ctaggtatcatatatttaggtccttgtcagttgtattgggatgtatattaggggtatgtaaatgcacagcggccgagccaatgcatgtgatggtagatactaaccacttgaggttgcaggtgtgaattgatctgttcagaagaaaaaccttctcttgattttcctgtttcttgatgtggtaatttgcgcaaaaaaaaaaataaaaaaaaaaacataagaaaaaaactaactgaaagaaaacaaaaactaaaaaaaataactgtacgaaatcttataaaaacaatcagacatgagatctagaagttca

SEQ ID NO: 131310 - DNA, 763 bp, Zea mays
  Clone ID: MRT4577_51238C.1
cttccttcctacccactcaccgccccctcggctctccgtcgatggaagggcgccattgacgccccgcgatcctcgctaccacccccacgaggccataccctccccccacacagatcttggaagaggctgccaccccgcccccgttcttggccccatcaccctccccatgcgatgctcgcctaccccacacgatgcaccccttccttgccttggtggcgagcttgtcgacgtcgaggcagatgcgggagatggacttggcggcctgctccgccttgtcggcgcgccgctgctcgaggaggcgcttggagcgatcctccccctccgccccgctctcgctcgcgctttcgtcgccgccgtggtccactgggagcggtcctccccctccgccccgctctcgctcgcgctttcgtcgccgccgtggtcggctgtcgcacacgccctcctgcccctccgctcccctcccagatcccgtgatccgctgccgtgatccgatgccgcacccgccatcaacgccctcctccccctctgctcccctcccagatctcgtgatccgctgcgaggccgccatcaacgccctcctccccctccgctcagctcccctcccaggatctcggcgcgctttcatcgccgccttgatggtccacggccgcacccacatacgacatcgcctgcccgcacgcaagcttctgcctgtgcccacctgtgtgcatagacgtgtgcccccgcccacctcctctgcgccaatcttttaccgtcgtccgcg

SEQ ID NO: 131311 - DNA, 2193 bp, Zea mays
  Clone ID: MRT4577_51239C.1
ctctctcggggcccggccggggctcttgtcttcggaagtttcagatcctcgcatcgtccgcaccttatcctctcgactttacagtacctgctctcagctcctccctatctcaatggcatccgcgaatgccatctccaccgcctccctcctccggcccctctctcagggcagggcgacgaggtcacagcggttcgtggtgcgtgcgaacgccaaagacattgcctttgaccagaaatccagggcagcgctgcaggccggcgtcgagaagctggcaaacgccgtcggtgtcaccctcgggccacgagggaggaatgtggtgctcgatgagtacggcaaccccaaagttgtgaatgatggagtcactattgcccgtgctattgagctgtatgatccaatggaaaatgctggtgcagcattgattcgtgaggttgctagcaagaccaatgattcagctggtgatgggactacaactgcatccgtccttgctcgtgaaatcatcaagctaggccttctgagtgtaacatctggtgcaaatcctgtatcactaaagaaaggaatagacaaaactgtgcagggcctaattcaggagcttgagaataagtctagaccagtcaagggtggtggtgatatcaaagctgttgcatctatctctgctggcaatgatgaatttatcggatccatgattgctgaagcaattgacaaagtggggcctgatggtgttctatcaattgaatcctcctcgtcttttgagaccactgttgaagttgaagaaggaatggagattgaccgcggttatatttccccacaatttgtgacaaaccttgagaaatcaattgtggagtttgagaattgtaaggttcttattactgatcagaagatcacaagcataaaggaaatccttccgattttggagaagaccacacagctgagagcccctctgttcattattgctgaggacattactggtgaagctttggcaactcttgttgttaacaagcttcgaggaattctcaatgttgcagcgattaaggctccaagttttggtgagcggcggaaggctgtacttcaggacattgccatcgtcacaggtgctgagttcctagcaaaagatcttggtttgttggttgaaaatgctacagaggaacaacttggcacagcaaggaaagtcacgatacatcagactacaacaaccctcatagcagatgcagccagtaaagatgagatccaggcgaggattgcacaactgaagaaggagcttgctgagactgattcagtttatgatactgagaaattggctgagagaattgctaagcttgccggtggtgttgctgttatcaaggttggagctgcaactgagactgagcttgaggaccgccagctaagaattgaggatgcaaaaaatgccacttttgcagctatagaggagggcattgttccaggaggtggtgcggcatatgtgcacctatctacggttgtccctaagatcaaagaagcaattgaggaccctgatgagcgtcttggcgctgatattattcaaaaggcattggtagcacctgcttcattgattgcacacaatgctggagtagagggtgaagtggttgtcgagaagatcaaggagagcgattgggaggtgggctacaatgcaatgactgacaagtacgagaacctgatggaggctggtgtgatcgaccctgccaaggtgaccaggtgtgcgctccagaatgcggcctcagtagctggaatggtcctaaccacacaggccattgttgttgagaagccaaagccgaagcctcaagtggcagagccaccggagggagcccttaccgtttaaaacttaacgttcttgaggctgctgtccagacggttcagatcagttgagagggtagaactttggtttgagaattttggttcagatccactgggagttgtagagtaggattgctattttgcagacgaagagtaattttactctggtctgaacttatccgaatcgaagacatttgcatcaccattttttaaaaataagctcatggcgatgctggattgtacgagcaagtacagtatgtttttagcctctcaatttttgggtctgtctcagcttggtttttagtgttgccccccgtaatctcctttgactgcatataggatcgttttacgtaagattgtgtcaattgaatgattagtgccttcgct

SEQ ID NO: 131312 - DNA, 1784 bp, Zea mays
  Clone ID: MRT4577_5123C.1
cctcgaggctcggccgggaaaaaaaaaaaaaaaaaaaaaactaaatgatgtgaaactttgaaagggaaagcgtccaatctgttcgattgtgatgtaccatgacagttctttcatattgaataggaagatctgatagaaacagaacgatctcaatctccctagcaatctctagcagcagatcctcgtgcgaagcaaagcgctagcccccttcgtactgtcccgatggcccgcacgaagcagacggcgaggaagtccactggcggcaaggcgccaaggaagcagctggccaccaaggcggcgcgcaagtctgccccggcgaccggcggagtgaagaagccccaccgtttccgccccggcaccgtcgcgctccgggagatccgcaagtaccagaagagcacggagctgctgatccgcaagctgccgttccagcgcctggtgcgtgagatcgcccaggacttcaagaccgacctccgcttccagagctccgccgtcgccgcgctgcaggaggcgtccgaggcctacctcgtcgggctcttcgaggacaccaacctctgcgccattcacgccaagcgcgtcaccatcatgcccaaggacatccagctcgcccgccgtatccgtggggagagggcctaggcgtcgtcccggtggaggtggaagtagtagtggccgtttctgtcatcactgtctggctagaaggtgtagagatgtgccgggttctgtagtttgggttatcggtcaaatcatgatgtagttgggtctaccctgctgtaatttaactatgactatgcaatggcaatgaagttctcggttatcaaaaaaaaaaaaaaaacgacacgactctcggcaacggatatctcggctctcgcatcgatgaagaacgtagcaaaatgcgatacctggtgtgaattgcagaatcccgcgaaccatcgagtttttgaacgcaagttgcgcccgaagccttctggcggagggcacgtctgcctgggcgtcacgccaaaaaaaagaaaaaaaaaaaaaataaaaaaaaaaaacctagccaccgcatcgtcgccctcaaattcgttccgtccaggcaaggaagaaatcgagcagccaaggagaggagaagatggctcgtacgaagcagaccgcccgcaagtccacgggaggcaaggcccccgcgcaagcagctcgccaccaaggcggcgaggaagtcggcgccgacgaccggcggcgtgaagaagccccacaggtacaggcccggcaccgtggcgctgcgcgagatccgcaagtaccagaagagcacggagctgctgatccggaagttgcccttccagcgcctggtccgtgagatcgctcaggacttcaagacggatctgcggttccagagccacgccgtcctggccctccaggaggccgccgaggcctacctcgtcggtctgttcgaggacaccaacctctgcgccatccacgccaagcgcgtcaccatcatgcccaaagacatccagctcgcccgccgcatccgcggcgagcgcgcgtaggcgtatctcgcgcccggccccagtggcggcggagggatggaggagtgcaatttgtaactttatgctgtttgttcgcttttagacggcgtggcgaagtagtgtaaaaacggctttacaagtctattttgtgtggtagttcgtgtaccgcttcgtcccgaagcgatcttggtaaaagactgatgattcgtgttgccaaacgacacaattcgtattttttttgtgtgccgtgtagaacacggtttgttgttattggaaatgttcacc

SEQ ID NO: 131313 - DNA, 492 bp, Zea mays
  Clone ID: MRT4577_51240C.1
ggacacccccatacacaattggatttttattctggaggctgcagccattcttacttggtatatggtaacgacaacctatatacgcaggatataacctgagctaaccggacctgccaatcctgactaatgcatgaccagaacttacctatatccagaatgcaatagcacgggacgcaatgtgcaaaacgggtaccaacatcagaatatactacgaatgggccttgaactggacttaaatctagaaaacattctttgttcttataaagcccggtccacactgaatttgggcttgacgtgggaccactaggttgacgtagcagaggcttctgtcacgctacagaccataatttgaccagagagtgtatgcaacgagtccatgctccgtacagattctcaacgtcgtaaagcgttcgaatgggactcggtatacgacaggcgtggtctgtcacataaccatgcgcgaaaccattccgacctatgctaacaatacgg

SEQ ID NO: 131314 - DNA, 2834 bp, Zea mays
  Clone ID: MRT4577_51241C.1
aaaaacagtcagattttaaagcaagggcgaagccacgttggcctccctcgtgcacatgcactaggggtgattacaagtactactacttgagaataatgtgcaggcgcatgtaaagtcaacggtgacaaacctaatccctactttgcagatactcgatcagacagtgacggagccagtgcgacaacctgggcatctgcaacgacacgttttctccgttcgtcttttattatttggtcccagtttgttcttacgcgtggtcctatcgtgtcatccaggcggccgattacagtttatctccactagatatgcattcctctgctggcatgcagttctgctgtgttttttgtcaatccgatgggagtgaagagccactctcttctcataatatacagaaatgcactatgtagcagctagctggcattagagtgaaatttgagttcacgtgctctgcaaggacgttatccacaccacatgatgtctcgcttccaacagcgaagccagcaaaaggagaggagcctttgtgacaatgaggataactgagctggacccacataacgcaccctatcaccttctctgaaagtatagctcttggatgtagctgttgaggattcttgtttcggtagagatgcagactgcagagtggatgttcccacaatatcagcattcacactggaagttggagcagctggcctcctgaattgaacagtgtctgccaacgaagaacgatgcttctgatatattgcaaacttctcagcagttcccttatcccctgatttatcacccttcccaacatctttctggactctgcatcctgcaaaggtgcgagaagctcgagttgtagtcggtctcagcagtctcggccatgacaacaacagggacactgaccaccaccgtgctcttctccatggtcagcccttgacgggaaccatccgagaacctgacgggagtagcgacagcctgcattttctgatctgaacttcttgtgtgtgatcaattgttctactgaagtgtagtagcagatatgttttagacaatttgttctcaagtaggtacataatcatcatacgagcttcattagttttactgaaacaatttggcatccctgaccattaacccgagtcgttcttggtctaggaatattaggtgaattaggaatcaagacagtatcgtttcagcccttaattaaagatggatagaaatagaacctgaaaccttacttttagtctcttttaatccctgtgattgacaatttataaactaaaatagaaagactaaaaatcagtcatattaagttgcatgcaccaaacagtagtcgaacaaaaaatgctttaactcaattcacttatagtatagtagagcagtgcaaccatcaatgaagctgaaggagggatggacagagcactgggggatagtccagcacttggcgtagcaggttcgcctccatcagctcggtaaatgccattggggttggggtaacctgatccaagttttattcagcaacagagtaccgcacaagtttttggtattcgatcgcaagatcggccaaccgaacctcaaagtatacactgcacaacagatcagtactgcacaaaacaaattgaacttgaacagtgaaaagttgaacaagtttttggtaaatgtaaatggttaattaagaaaagttgaacagtgaaagacgggcaatgtaatgttctcaaaaaacgagaaaaaatcaacagtgctccaaacaaaaaataaattggaagtccgcatggtgctggtttggaagcgggggcttgcagctccgtggtagcgaggtttcagggcggcggccaacatggtgctgcatgcggaggatggaagggcggtgcagcatccggagcacggctggggtgcggcacatgtggatctcgggcgtgggtgcgaggatggaacagcggcgcggacaacgggtaaagattgggcacagaagaggtgggcgggggcacacgtctatgcacacaggtgggcgcaggcagaagcttgcgtgcgggcaggcgatgtcgtatgtgggtgcggccgtggaccatcaaggcggcgatgaaagcgcgccgagatcctgggaggggagctgagcggagggggaggagggcgttgatggcggcctcgcagcggatcacgagatctgggaggggagcagagggggaggagggcgttgatggcgggtgcggcatcggatcacggcagcgaatcacgggatctgggaggggagcggaggggcaggagggcgtgtgcgacagcggaccacggcggcgacgaaagcgtgagcgagagcggggcggagggggaggaccgctccagcggaccacgacggcgacgaaagcgcgagcgagagcggggcggagggggaggaccgctccaagatggtgctactcaaggagcccgccgcacaggccaagcgcctcctcgagcagcggcgcgccgacaaggcagagcgggccgccaagtccatctcccgcatctgcctcgacgtcgacaagctcgccaccaaggcaaggaaggggtgcatcgtgtggggtaggcgagcatcgcgtggggagggtgatggggccaagaacgggggcggggtggcggcctcttccaagatctgtgtgtggggggagggtatggcctcgtggggatggtagcgaggatcgcggggcgtcaatggcgcccttccatcgacggagagccgagggggcggtgagtgggtacggaaggaagaggatggaaagaagcgcggcgggcgggcgggatgcgtggagcgtgcgcggtcgcggcggcggtggggaggagagcgggggatccacgaccgagacgggagcggcagaacggtg

SEQ ID NO: 131315 - DNA, 2424 bp, Zea mays
  Clone ID: MRT4577_51242C.1
cattgggaccctcgaggccggccgggtccttccatacccactcaccgcccctcggctctccgtcgatggaagggcgccattgacgccccgcgatcctcgctaccatccccacgaggccataccctccccgcacacacagatcttggaagaggccgccaccccgcccccgttcttggccccatcaccctccccacgcgatgctcgcctaccccacacgatgcaccccttccttgccttggtggcaagcttgtcgacgtcgaggcagatgcgggagatggacttggcggcccgctccaccttgtcggcgcgccgctgctcgaggaggcgcttggcctgcgcggcgggctcctcgagcagcaccatcttggagcggtcctccccctccgccccgctctcgctcgcgctttcgtcgccgccgtggtccgctgtcgcacacgccctcctgcccctccgctcccctcccagatcccgtgatccgctgccgtgatccgatgccgcacccgccatcaacgccctcctccccctctgctcccctcccagatctcgtgatccgctgcgaggccgccatcaacgccctcctccccctccgctcagctcccctcccaggatctcggcgcgctttcatcgccgccttgatggtccacggctgcacccacatacgacatcgcctgtccgcacgcaagcttctgcctgcgcccacctgtgtgcatagatgtgtgcccccgcccacctcttctgcgcccaatctttacccgtcgtccgcgccgctgttccatcctcgcacccacgcccgagatccacatgtgccgcaccccagccgtgctccggatgctgcaccgcccttccatcctccgcatgcagcaccatgttggccgccgccctgaaacctcgctaccacggagctgcaagcccccgcttccaaaccagcaccatgcagacttccaatttgttttttgtttggagcactgttgattttttctcgtttttttgagaacattacattgcccgtctttcactgttcaacttttcttaattaaccatttacatttaccaaaaacttattcaacttttcactgttcaagttcaatttgttttgtgcagtattgatctgttgtgcagtgtatactttgaggttcggttggccgatcttgcgatcgaataccaaaaacttgtgtggtactctgttgctgaataaaacttggatcaggttaccccaaccccaatggcatttaccgagccgatggaggcgaacctgctacgccaagtgctggactatccccccagtgctctgtccatccctccttcagcttcattgatggttgcactgctctactatactataagtgaattgagttaaagcattttttgttcgactactgtttggtgcatgcaacttaatatggctgatttttagtctttctattttagtttataaattgtcaatcacagggattaaaagagactaaaagtaaggtttcaggttctatttctatccatctttaattaagggctgaaacgatactgtcttgattcctaattcacctaatattcctagaccaagaacgactcgggttaatggtcagggatgccaaattgtttcagtaaaactaagcaagctcgtatgatgattatgtacctacttgagaacaaattgtctaaaacatatctgctactacacttcagtaaaacaattgatcacacacaagaagttcagatcagaaaatgcaggctgtcgctactcccgtcaggttctcggatggttcccgtcaagggctgaccatggagaagagcacagtggtggtcagtgtccctgttgttgtcatggccgagactgctgagaccgactacagctcgagcttctcgcacctttgcaggatgcagagtcccagaaagatgttgggaagggtgataaatcaagggataagggaactgctgagaagtttgcaatatatcagaagcatcgttcttcgttggcagacactgttcaattcaggaggccagctgctccaacttccagtgtgaatgctgatattgtgggaacatccactctgcagtctgcatctctaccgaaacaagaaccctcaacagctacatccaagagctatactttcagagaaggtgatagggtgcgttatgtgggtccagctcagttatcctcattgtcacaaaggctcctctccttttgctggcttcgctgttggaagcgagacatcatgtggtgtggataacgtccttgcagagcacgtgaactcaaatttcactctaatgtcagctagctgctacatagtgcacttctgtatattatgagtatgtatacagaattttaaagtatgaatacatgtgttttaaagcttggacaaccaatcatttattatccgagaatttaatttgggtttattaaaaaatttaaacccttttttaggg

SEQ ID NO: 131316 - DNA, 292 bp, Zea mays
  Clone ID: MRT4577_51243C.1
ggtcttgattgctagcggtcatgttttattatcctaggttaagtacgcttaagggcccactttcattgtccctgccacacaaaatgtgtggatggacgtatatagccttcctgtacctggatcacgggggaaaaacctgcgcccagactattttatgaggctggttgtaatacaccatcttgtccttattgcagtacttgttagggcggccccggatatacctttgcacagttgaacgaacctaatggctaatggttcaccacctactggaactctccaagcacgacggggc

SEQ ID NO: 131317 - DNA, 556 bp, Zea mays
  Clone ID: MRT4577_51244C.1
cggtccggattcccgggtcgacccacgcgtccggctctctaggcttcaagtccccaaaccaggcagcaaacctcgcgagaaagtaacgaagaactcgagaggcggagttggaggcggcgagggagatggagaacggcggcggcggcggcggcgatggcggcaagagcgacgtcccggcggacgccaacgagcattgccctgggacgcagtcggaggaggcggggaaggcggatgcctgcgccggatgccccaaccagcagatttgcgccaccgcccccaagggccctgatcctgacttggttggtattgttgaacggatggctacagtaaaacacaagatactggttctgtctgggaaaggaggtgagggaagagtacattttcagcccagctctcatttgcccttgctgaaatggactgccaggttggccttcttgatatagatatatgtggccctagcatcccaaaaatgttaggccttgaaggtcaggatattcatcaaagcaaccttggttggtcaccagtctatgtggagtccaaccttggtgtcatgtca

SEQ ID NO: 131318 - DNA, 542 bp, Zea mays
  unsure (1)..(542): unsure at all n locations
  Clone ID: MRT4577_51245C.1
gggatcacccccatctacctcgtcgccaaacccacgcccgggctagctagctacccttaattctccccttcccgacagaaacagcgccaatcgtcaacacaaccacacgtagcggggcatcactgccatcctctctcagccatggcgaagaacgcccctctggccatcgccgccttgatcctcattgctggctccctcgtcctcctcttcttcaccattcttgccggcgtgaccgacaccacccctctcaacaagacttacttcctccgcgcggacacatccggcattaccggcgcccgctcagtcacccaatggacctacttctacttttgcggtgaaggcaacaatgactgcagcagcgctcgtcctgcgcctgccttcggcaggcctgggctggcggtgcgagcaacgcgcncgaggatatcattggtagccatggcggaggcaccacgagcacacactacttctacatgtggcgctntggctgggttttcttcctgattgcgctgttcttcgagacctttgccttctttggagcgttt

SEQ ID NO: 131319 - DNA, 1374 bp, Zea mays
  Clone ID: MRT4577_51246C.1
gggataaccagtgggatataaaatgtaaccctttttatcctgagccatggagccttacccttaacaaaattagacaatcttttaggggttttaagcttgacattgtctccctgttgaaagccaatgccatccttaatcccagggcgtctcccattatagagcatgcttctagcaaatttaaacttttcattttctaagtcatgctcattaatcttagcactaagttgagctatgtgatcattttgttgtttaattaaagctaagtgatcatgaatagcatcaacattaatgtctctacatctagtacaaatagtaacatgatcaacactagatgtagagggtttgcatgcatttaattcatcaatcttagcatgtaaaatagcattctcattcttaagattggaaatagaaacattgcaaacatttaaatctttagccttagcaattaatttttcattctcaattttaaggctagagagtgatgcattcaacttgtcaatcttagtaatcaaactagcattatcatttctaagactaacaattgaatcatcacaaacatctaacttctcaaccttagcaattaatttagcattttcatttctaaggtttgagataatatcatggcaagtgcttagctcactagttaatttttcacatttttctacttcctgagcataagcatttttaaccttaacatgcttcttgttttctttaataaggaagtcctcttggctatccaagagttcatccttctcatgaatagcacctatcaattcatttaatttttctttttgttgcatgtttaggttggcaaaaagggcaagtaaattatcctcatcatcactagagttctcctcatcactagatgttgcatatttagtggaggctctagagtcgacctgcaggcaggaaattttgaaaataccttataatctgctgaaaaactatggaattcacatctttgacttcaatgacttgtatactttgacattgattttggatttctatggcaaaatactttatgatcagctggcaagctaaggaattcacatccctgatttgtatacttgacattgattttggatttacatggcaacataatttctccatctcttatgtcataaatgactgactaatgttgcaaagaatggattttaattgttaccgttttcacataaaaattccctgttgcattgtgggtacttttgaagaagcctcacacattgaagaatcctttgttccacacagttatatagaaaaaattggtacgccatataggaaaggcacatggcagaattttcaccttagtcatatcttgtatctttgatctgctcttcatatttacatttatatccatggttgaagttcatttat

SEQ ID NO: 131320 - DNA, 1503 bp, Zea mays
  Clone ID: MRT4577_51247C.1
ttaggccttgttcttaggtacccaaacagtcttgggtctgttgacgttagaaacaagcaccttgggcacccaaacgcaagtctttgagcctttgtgtttggccccaacatatttggcaactactttgcctgatttgttagtcagcacataagaagcatcaaaagtcttaaatgaaataataggctcatttgatgcagtaggatatttctttttaggcaatttaacatgggttgattgcctagaactagatgcctcattcttatacatcaaagcatgatgagaaacattataaggtttcctagcatgaattctcctaatcttgtgttcgggataaccagcaggatataaaatgtagccctcattatcctgaaccatgggtgccttgcccttaacaaaattagacaatttcttaggggcattaagcttaacattgcctccctgttggaagccaatgccatccttaatgccagggcgtcttccactatagagcatgcttctagcaaatttaaaattttcattttcaatttcatgctcattgattttagtagttagttgagctatgtgatcattttgttgtttaattaaagcaaggtgatcatgggtagcatcaacatcaatatctctacatctagtgcaaatagaaacatgatcaacagtagatgtagattgtttgcaaacatttaattcatcaatcttagcatgtaatatggcattctcatttctaagattggaaatagaatcattgcaaacatttaaataagcatttaacttctcaaccttagcaataaaactagcattctcagttctaaggttggaaatggtgtcatggcaaatgctaagctcattagtcaaattttcacacttttctatttcctgagcataagcattttttactttaacatgctttttgttttccttaataaggaatttctcttggctgtccaagagttcatccttctcatgaatagcacctatcaattcattcaatttttctttttgttgcatgttaagattggcaaaaaaggtaagcaaatcatcctcatctttactagagctaccctcatcactagatgttgtatatttagtggaggctctagattttagcttcttatttttgccgtcctttgccataagattaacaattgaatcatcacaaatatctaacatctcaaccttagcaattaattttgcattttcatttctaaggtttgagataatatcatggcaagtacttaactcactagttaatttttcacatttttcaacttcctgagcataagcatttttgaccttaacatgcttcttgttttctttaataaggaagttctcttggctatccaagagttcatccttctcacgaatagctcctattaattcatttaatttttctttttgttgcatgttgaggttggcaaaaagggcaaacaagttatcctcatcatcactagagttatccacaacactagatgttgcaaatttaatggaggctctagagtcgacctg

SEQ ID NO: 131321 - DNA, 368 bp, Zea mays
  Clone ID: MRT4577_51248C.1
aatcatgaagctgatgcctaacatggcaaggttaaattgtcttggcatattttgaaaagatacagctacaatggtatttgccgtgaaaacagtaacccattgtaatgacccctgcctggacgctagcaggagaaatactggtgcatgttcaacaaatcggaaggaggtgacagctaaaatgaacattcacagttgcctctattcactagccttccaaaagaaacgtagagtgaagtgaacaagacgagaactctgttgaagacagccttacaagttacaaccagtagaagcattactcacggacaaaggttgaagcatcctgacccaccgaggttggtggacaccagaaccatcacactagttatggc

SEQ ID NO: 131322 - DNA, 921 bp, Zea mays
  Clone ID: MRT4577_51249C.1
aattatgtgctcgggataaccagcaggatataaaatgtaaccctcgttatcctgagccatgttagccttgcccttaacaaagttagacaatttcttaggggcactaagcttgacattgtctccctgttggaagccaatgccatccttaatgcctgggcgtctcccactatagagcatacttctagcaaatttaaatttttcattttctaagtcatgctcattgattttagcactaagttgagctatgtgatcattttgttgtttaattaaggctagatgatcatgaatagtatcaacattaacatttctacatctagtacaaatagtaacatgctcattggtggatgtagagggtttgcaaacatttaattcatcaatcttagcatgtaacatgacattttcatttctaagattggaaacaatatcattgcaaacatttaaatttttagccttagtaatcaatttatcattttctatattaaggctagcaattgattcattcaacttgtcaatcttagcaatcaaattagcattattatttttaagtttgacaagagaatcatcacaatcatttaaatcctcaaccttagcaattaatttaacattctcatttctaaggttggaaatagtatcatggcaagtgcttagctcactagttaatttttcacatttttctacttcctgagcataagcatttttgaccttaacatgcttcttatcttctttaattagaaagtcctcttggctatccaagagttcatccttctcatgaatagctcctattaattcatttaatttttccttttgttacatgttgaggttggcaaaaagagcaagcaaattatcctcatcatcactagagttatcctcatcactagatgttacatatttagtggaggctctagagtcgacctgcaggca

SEQ ID NO: 131323 - DNA, 299 bp, Zea mays
  Clone ID: MRT4577_5124C.1
tctcgaccagaggaagactgtagccatgatattgatataacttcagacgaacctggtcgcagccctggtcaattccatcaccactctcatcaaatgtatggtacatattatagcagacactcactccacagggatcatcgcaagcgcatactaatccaagatccaggcttatctccactagatgaagactgtatctattaaaggtaaagaacttcatactaactttttctcatcccttattgtttccattattattttctttacaatttatgatactttttttatcatacatttttatt

SEQ ID NO: 131324 - DNA, 276 bp, Zea mays
  Clone ID: MRT4577_51250C.1
cctgatgaaagattctgggaagaaagttccagacagaggaaatagtatgtacaaatatcttgagtcaagagaggatagtatgaatgaagaatgaaggaagaacagtcagactagaggacaagggcaagagtggctgttgacacagttgaaaattcagaccaggataggttgaagcagaggggtgacaggatgagttttaatcacactggaggaagatgataatggctgtaggggatctgttaggaagctattgcaagaatccaggtgagaggtgat

SEQ ID NO: 131325 - DNA, 1455 bp, Zea mays
  Clone ID: MRT4577_51251C.1
atggcgttcatcatcaaaagtttccaccaaatccttaagcaaaggagggggaaggagtacaagccccgctccaagaaagtttgctacaagtgtggtaagctcgatcagtttattgctaaatgtccattatctagtgataatgacagggccgacgacaagaagggaaagaggagagaaaagatgagatactacaagaagaagggcgacgatgcccatatttgccgggagtgggactccgatgagagctccaccgactcctcctccgacgaggacgccgcaaacatcgccgtcaacatgggtctcctcttccccaacgtcggccacaagtgcctcatggcaaaggacagcaaaaagaaggtaaaatctagagcctccactaaatatgcaacatctagtgatgaggaaaactctagtgatgatgaagataatttgcttgccctttttgccaacctaaacatgcaacaaaaagaaaaattaaatgaattgataggtgctattcatgagaaggatgaactcttggatagccaagaggacttccttattaaggaaaataataagcatgttaaggttaaaaatgcttatgctcaagaagtagaaaaatgtgaaaaattatctagtgagtttagcatttgtcatgacactatttccaaccttaaaaatgagaatgctaaattaattgctaaggttgagaagttaaatgtttgtgataattctcttgtcaacctcaaaaatgataatgctagtttgatttctaaaattgacaagttgaatgaatcactttctagccttaagattgaaaataataatttaattgctaaggctaaagatttaaatgtttgcaatgtctctatttccaatcttagaaatgagaatgccattttacatgctaagattgatgaattaaatgcttgcaaaccctctacatctattgttgatcatgtttccatttgtactagatgtagagacattaatgttgatgctattcatgatcacctagctttaattaaacaacaaaatgatcacatagctcaacttagtaccaaaattaatgagcatgacttagaaaatgaaaaatttaaatttgctagaagcatgctctataatgggagacgccctgagattaaggatgacattggcttccaacagggagacaatgtcaagcttaatgcccctaaaagattgtataattttgttaagggtaaggctctcatggctcaggataacgagggttacattttatattctcctggttatctcgagcacaagattaggagaattcattctaggaagtctcactctggttctcatcatgtttttatgtataagtgtgaggcatctagttctaggaaatccactcatgtcaaattgcctaaaaagaaatctcctattgcatcaaatgaacccaatgtttcatttaagacttttgatgcatcatatgttttaactaacaaatga

SEQ ID NO: 131326 - DNA, 474 bp, Zea mays
  Clone ID: MRT4577_51252C.1
tgcagcaggtcgactctagagcctccactaaatatgcaacatctagtgatgaggaaaactctagtgatgatgaagataatttgcttgccctttttgccaacctaaacatgcaacaaaaggaaaagttaaatgaattgataggagctattcatgagaaggatgaactcttgatagccaagaggacttccttattcaagagaacaagaagcatgttaaggttaaaaatgcttatgctcaggaagtagaaaactgtgaaaaattgactagtgagctaagcacttgccatgatattatctcaaaccttagaaatgaaaatgaaaaattaattgctaaggctaaagacctaaatgtttgcaatatttctatttccaatcttagagatgagaatgctattttacatgctaagattgatgatttaaatagctgcaaaccctctacatctatcgttagtcatgtctctatttgcactaaatg

SEQ ID NO: 131327 - DNA, 435 bp, Zea mays
  unsure (1)..(435): unsure at all n locations
  Clone ID: MRT4577_51253C.1
ggggggggggggtttttttttaaaattttttgggggggggttttttttttttttttttttgctttttcccaccgctgaaaaaataatggggtaatatacaaatccctgagtaaaggacataggcggcgggtaaaacccaatnccaattcacccggggaacgaatggggggaaccaaatcaacaacacacctccctaanntttttttacataaaacaacatcaaccatcttatttttaccccccaaaaaacaattcccttacaaaaaactacaacccaacacaaaacaacactccccctcccnatccaaatttttaccccccanaaattacccccacccccccnaatttacccantttccccccccatnccanccttcctatttttcnnaaaccccccccttttttttctcctcccccttttttcccccccccccc

SEQ ID NO: 131328 - DNA, 485 bp, Zea mays
  unsure (1)..(485): unsure at all n locations
  Clone ID: MRT4577_51254C.1
gccagcacgnagactctagatcctccactaagtatgcaacttctagtgatgaggaaaattctagtgatgatgaggataacttgctcaccttttttgccaacttaaacatgcaacaaaaagaaaaattgaatgaattgattagtgttattcatgagaaggatgaactcttggatagccaagaggacttccttattaaagaaaataaaaagcatgttaaagttaaaaatgcttatgctcgggagatagaaaaatgtgaaaaattaactagtgagctaagcacttgccatgatgtcatctcaaaccttagaaatgacaatgctaaactaattgctaaggttgagaatttaaatgtttgtgatgattctcttgttagtcttagaaatgataatgctagtttggttactaagattgacaaggtgaatgcatcactgtctagccttaaaattgaaaatggaaaattaattgctaaggcttaagatttaaat

SEQ ID NO: 131329 - DNA, 449 bp, Zea mays
  Clone ID: MRT4577_51255C.1
gcctgcaggctctagagcttccactaaatatgcaacatctagtgatgaggctagctctagtgatgatgaggatgatttgctcaccctttttgccaacttaaacatgcaacaaaaggaaaaattgaatgaattgattagtgctattcatgagaaggatgaactcttggatagccaagaggatttccttattaaagaaaataagaagcatgttaaagttaaaaatgcttatgcttaggaagtagaaaagtgtgaaaaattaactagtgagctaagcacttgccatgatgtcatctcaaaccttagaaatgataatgctaatttaattgctaaggttgagaatgtaaatgtttgtgatgattctcttgttagtctttgaaatgataatgctagtttgattactaagattgacaatttgaatgcatcactctctagccttaaaattgagaatg

SEQ ID NO: 131330 - DNA, 2037 bp, Zea mays
  Clone ID: MRT4577_51256C.1
ctattggaagccaatgccatccttaatgacagggcgtctcccattataaaacatactacgagcaaatttaaatttttcattctctaattcatgctcggcaattttagcatctaattttgctatatgatcattttgttgtttaatcatagcaatgtgatcatggatagcatcaacattaacatctttacatctagtgcaaatagagacataactaatagtagatgtagagggtttgcaagcatttaatttatcaatcttagcatgtaaaatagcattctcatctctaagattggaaatagaaatattgcaaacatttaaatctttagccttagcaattaatttttcattctcaattttaaggctagagagtgatgtattcaacttgtcaatattagtaaccaaactagcattatcatttctaagactaacaattgaatcatcacagacatctaacttctcaaccttagctattaactttacattttcatttctaaggtttgagataatatcatggcaagtgcttagctcactagtcaatttttcacatttctctacttcctgagcataagcatttttaaccttaacatgcttcttgttctccttaataaggaagttctcttggctatccaagagttcatccttctcatgaatagctcctatcaattcatttaatttttctttttgttgcatgttgaggttggcaaaaagggcaagcaaattatcttcatcatcactagagttatcctcatcactagatgttgcatatttagtggaggctctagattttaccttctttttgccaccctttgtcatgaggcacttgtggccgaagttggggaagaggaggcccttgttgacggtgatgttggcggcgtcctcgtcggaggaggagtcggtgtagctctcatcggagtcccattcccgacatatgtgggcatcgccgcccttcttcttgtaatacctcttcttttccttcctctttcccttcttatcgtcgcccctgtcactatcacttgatgatggacattttgcaatgaaatgactgggcttaccacacttgtagcaaactttcttggagcggggtttgtaatccttctcccttctttgcttgaggatttggcggaagctcttgatgatgagcgccatctcctcgttgtcgagcttggaggcgtcgatggggagcctacttgatgtagactcttctttcttctccttcgtcgctttgaatgcgacgggttgcacctcaggtgtggaggtggcgccttgctcgatgatttgtttggagcctttgatcatcaattcaaagctcacaaactttcctataacctcctcgagagacattagcttatatctaggatcaccacgaattaattgaacttgtgtagggttaagaaaaacaagtgatcttagaataaccttgaccatttcatggtcatcccattttgtgctcccgaggttgcgcacttggttgaccaagatcttgagccggttgtacatagcttgtggctcctctccttggttgagcatgaaccgaccgagctccccctcgatcatttccctcttggtgatcttggtcacttcgtctccttcgtgcgcggtttttagtacgtcccaaatctctttggcactcttcaacccttgcaccttattatactcctcttgacttagagaggtgaggagtatagtagttgcttgggaattgaagtgctggatttgggcgactttgtccgcatcataatcttcatcccctatggatggtactataattttcaccataaaaaccggtggtttgcgctcatggcgcttagaagtgacggacggcgtgtcggagccggaggtggaaggcgacgaagaatcggtctcgtagtagaccactttcttcattttcttcttcttgttgccactccggtgcgacttgacgcggggaggtgattcctccctcttcttgttgccggactcccctgatggagctttcccgtggcttgtggcgggcttctcgccggtcaccatctccttcttggcgtgatctcccgacat

SEQ ID NO: 131331 - DNA, 413 bp, Zea mays
  Clone ID: MRT4577_51257C.1
cctccactaaatatgcaacatctagtgatgaggagaactctagtgatgacgaggataatttacttgccctttttgccaacctaaacatgcaacaaaatgaaaaattaaatgaattgataggtgctattcatgagaaggatgaactcttggatagctaagaggacttcctaattaaggaaaataagaagcatgttaaggttaagaatgttatgctcgggagatagaaaaatgtgaaaaattgactaatgagcttagcacttgccatgatatcatatccaaccttagaaatgataatgccaaattaattgctaaggttgagaagttaaatgtttgtgatgattcttttgccaatcttaaaaatgataatgctagtttacttgctaagattgacaaactaaatgaatcaatttcta

SEQ ID NO: 131332 - DNA, 226 bp, Zea mays
  Clone ID: MRT4577_51258C.1
gaatggccaaatacatatttttcattcataagtggtaagcggcagtcatgctgataaatttgaagtcaaaagtacgcggacaagtctacatttctatccttttttttgttagcaactataatctacagttcctccaacggagatgcagattatagttgcatctccgttggaggaactgtaagtttacagcaatattgtagagggcaagttcatcgtacagttcctc

SEQ ID NO: 131333 - DNA, 272 bp, Zea mays
  Clone ID: MRT4577_51259C.1
attcggctcgaggcagattttttaacagactttattttggcagccgtgtaattttacattcagggaggggttttttaaaggtgccggtagtagttcccgcatgctccttcaaaatgacctaaagcacctacgcataaccgtggacttagacgcgcgtgccaacaaacaatatccgcgacctactgcaatataaaaaagggaaactatcgacccagcctatggattggagaattaaactatcctcggaaccaaaagaaacagcactgcaaccg

SEQ ID NO: 131334 - DNA, 1604 bp, Zea mays
  Clone ID: MRT4577_5125C.1
gcggccgagaccgcatcgtcgccctcaaattcgttccgtccaggcaaggaagaaatcgagcagccaaggagaggagaagatggctcgtacgaagcagaccgcccgcaagtccaccggaggcaaggccccgcgcaagcagctcgccaccaaggcggcgaggaagtcggcgccgacgaccggcggcgtgaagaagccccacaggtacaggcccgggacggtggcgctgcgcgagatccgcaagtaccagaagagcacggagctgctgatccggaagttgcccttccagcgcctggtccgtgagatcgctcaggacttcaagacggatctgcggttccagagccacgccgtcctggccctccaggaagccgccgaggcctacctcgtcggcctgttcgaggacaccaacctctgcgccatccacgcaaagcgcgtcaccatcatgcccaaagacatccagctcgcccgccgcatccgcggcgagcgcgcgtaggcgtatctcgcgcccggccccagtggcggcggagggatggaggagtgcaatttgtaactttatgctgtttgttcgcttttagacggcgcggcgaagaagtagtgtaaaaacggctttacaagtctattttgtgcggtagttcgtgtaggccgcttcgtcccgaagcgatcttggtaaaagactgatcattcgtgttgccaaacgacacaattcgtatttttttgtgtgccgtgtagaacacggtttgttgttattggaatggttcaccgaaatctgtgtgcccgtttgggtaaaccattccaataacaacaaaccgtgttctacacggcacacaaaaaaatacgaattgtgtcgtttggcaacacgaatgatcagtcttttaccaagatcgcttcgggacgaagcggcctacacgaactaccgcacaaaatagacttgtaaagccgtttttacactacttcttcgccgcgccgtctaaaagcgaacaaacagcataaagttacaaattgcactcctccatccctccgccgccactggggccgggcgcgagatacgcctacgcgcgctcgccgcggatgcggcgggcgagctggatgtctttgggcatgatggtgacgcgctttgcgtggatggcgcagaggttggtgtcctcgaacaggccgacgaggtaggcctcggcggcttcctggagggccaggacggcgtggctctggaaccgcagatccgtcttgaagtcctgagcgatctcacggaccaggcgctggaagggcaacttccggatcagcagctccgtgctcttctggtacttgcggatctcgcgcagcgccaccgtcccgggcctgtacctgtggggcttcttcacgccgccggtcgtcggcgccgacttcctcgccgccttggtggcgagctgcttgcgcggggccttgcctccggtggacttgcgggcggtctgcttcgtacgagccatcttctcctctccttggctgctcgatttcttccttgcctggacggaacgaatttgagggcgacgatgcggtggctaggtttttttttttttttttttttttttttttttttttttttttttttttttttttttttttttcccggccgg

SEQ ID NO: 131335 - DNA, 474 bp, Zea mays
  Clone ID: MRT4577_51260C.1
gtccttaaagataacaattgtaaaagctaagcatgtccgagatgaagcaacaacgtatgcagccgtaattcttttgaattaccaggtagcattgcaggggaattaacaagtcttacaacatcaggggttgtaaaccatacaatactttggatcagacacgcttaacacgatagcaggagcatctaacggtggataacgggattagggcaccatactggcctgatgctgcgttatcaacgaacttgtataatactctttacccttgaggcgattattgacctcatcgaactcagcgcggaactcatgggaatcctttttgagcgccttcgggtcctgacgggccttagagaactgaccttcctgcataccctgagccgattaccagtgcactaatgcacgcttggcgtacatgagggaaaacttgtgtggcatgcgggagaacaccttcacaacactgggggagttggagatcat

SEQ ID NO: 131336 - DNA, 410 bp, Zea mays
  Clone ID: MRT4577_51261C.1
gcaggagcaaacaatgaacacaagtcagatcaaaggaaaaggcaatatgaccttatcgaaggtcctccgaaaaggttaagaaaaggatgtttacatatccaaagcagtgatgatgatgtccaagagaactaaagatggttgtttaaaacaccaaatttgcttgcttctcacacgctatcttttgcaaactttagcctaatccgctgtaaagcatatttgcttgataaagtcccctgaactttcttttgatgcaaacaagatctccatgctgaatcaaacatggtagataaaagggcatatctctatagttctgacatgccaccttttgcggtctctaggaccaatattttggtgcctcaacaaatatgtatgtatgactaatttgttatcaactgcgcttagttcacaaa

SEQ ID NO: 131337 - DNA, 220 bp, Zea mays
  Clone ID: MRT4577_51262C.1
ggcgcgtccgcccacgcgtccgatcatgagtagtgtttctgagctctagcccgtcacacgtcaagacctaaacgctttgagtttgacactacactacaacagttgctcagcttatctacctcccttttgacaccttagaggctggcctttttcacaaaggatgactcagaaacattatcatgagtagtgttttttttcaggactctttcctggatttaaa

SEQ ID NO: 131338 - DNA, 629 bp, Zea mays
  Clone ID: MRT4577_51263C.1
gcggcgcgggcgcgggaccctcttaccaactgtgttttttttttgtgacaacccaattcgtaaacgctactggatacatctggctgcgcagttggtatttcacctaaattactcttggaactacaacaatcatgagccctattacagggcaccccctttgatgcatttattggcacaaagcatctgggctcaacaactacagttgctcgagctagcacaccttgctgactactatcagggacagcaggttattccattcctgctgctagatgggttgaactttgttttttatttagcaacaacaacaacttcgattcacccagctcatttgctgcctacacggcagaaattgcttacattcaaccaactgacagcattgaactcttctgcttattgacagcaataacaactactaccattcagccaactagctggtgtgagccctgctacactgcttgacacaaccacaactgtgtgccgttctaccataacgctgttgctaacgatggcactttcttacaactgcgacaattgctgccattcaaccaacttgctttgacaaacccaacagccttctaccaacaacccatgattggcggtgccctcttttatatatcttatgagttata

SEQ ID NO: 131339 - DNA, 382 bp, Zea mays
  Clone ID: MRT4577_51264C.1
accacgccgacgcccgccttgacaacagccccacgtctaggtagtgtcgcaacatggacacgggggtcgcaatacctcttggagcaagtcctggtcaccctgcggtcacctctagatgctgagtagaagctgaacaccatgagtcccttgtctggtacaataggatctcatagatgaagaatttccatgctgatgctgatgatttctttgaagagatttgtaagtttgcttacacgaacagtgggagtatgtgcatagagtagaggagttgctgcattttgccactcttgaagtgagttagctctaaaccaaggcagcttttacctagtgcctgtttgtttagggctgttttaattggataattttattcgtttgtcttttg

SEQ ID NO: 131340 - DNA, 1417 bp, Zea mays
  Clone ID: MRT4577_51265C.1
aattcggcacgaggcggccgggaaaccctcctcccaccaaatttcaatgacgccgtcgaaaccccctggcaagcgccgccgttcggctccacctccgcgcttgccctcacccgctccacccgtggcgctctcgccgccgggcttcgtcgccgaccgcgccgaggccgcggcgcgcgtggagcgcctcctgcggtaccagttctgcgaccgcgcccttctagaggaggccctgacccaccaatccttctcggatggcgctctctcttaccagcggctcgagttcgtcggcgacgccgctctcggcctagccttctctaacttcctatacctcaccaaccccaccctcgggcccggcgcgctctccacgctccgcgccgccaacatctctaccgagaagctcgcgcgcgtcgccgtccggcacgacctctacccgctgctccggcgcaagtgcccccgcctcgacctactagtaggccagttcattgagtcagtgaagcaagaactaatgcatgaccttgccactgcaccgtatggtggtagcgtggttaaagctcccaaggtgcttgcagatattgttgaggccatcgctgctgcagtctacgttgattgcaaatttgaccttgagaagctttggaaggttacaaaaagacggtggctcttcacatgaaaggcatgtgagccaattatcacagcagaaacaatagatgagcaacctgtgactacattgcatgagttatgccaaaaacatggcaaagttgcacagttcaagacatggcagaaggatgggatgatcgtggtaaatgtatttgttggtggggagatggttggacttggttcctcggagcagaaggtaattgctaagctgaatgctgcacgagatgcactgggcaagcttattggtggtgcaaagcagcaagtgttgatcaattgtgccgccaatggattggtggatgacattgcagagcttagggagtgtaaacagaaacttattgagcagtgcatcagaaaacattggccaaaacctatctttaaattagaaaaagaaggtggccctgcacatgaaaggaactttgtgtgttctgttcaggtagatacccaaactggcacttttgtaaccataggtgaatctatgtcaagagttaaggatgcagagaattcggctgcgcataagatggtcgaactattgttgaaattgtgagatatattcatgtacatggctagatctttggtatacctctttcgagaaacaatttgttcaaggatacctattatggtagctttgtcattacatggatagatctttagccctctcgagaaacaatttgttcaagtacacctattatggtagctttgtcatagtgtgggtcatgtcatctagttaatacggtttataattgagcatttatctctcacaacc

SEQ ID NO: 131341 - DNA, 537 bp, Zea mays
  Clone ID: MRT4577_51266C.1
ctcgaggccggccgggtaaaactctaaggctgaaccgccgaaaatacgccacacccgccaaacccaaattggggcagccaaaaccctaccccgccgccgtagtaccgtaaaatccagatccccccatccgcgatcgccgctcgcaaacgccaagacactgaaccccagagaccgacgatgacatccacgcacgggtagacgggcggaagaggatgcggcagtggagtgttaccagttttgacccgcgcctcgagctcccggcaggtgaggagcttcttgcggtactcggcgatcgcagcacggcggcgggcttcttccccgccctcggccatcctcttcctcaaccttcctcggcggcggcggcggcgcgaggctttcttttttttttttttacggaggtggaccctgtttttccagaatgcagaagcagaacacaggctttgcttcttctctcgcaagaaatgtaaagcggaatttttcataaattaaataattccttatgtaaattgggacaaaaaaaaaaaaaaaaaagcggcc

SEQ ID NO: 131342 - DNA, 172 bp, Zea mays
  Clone ID: MRT4577_51267C.1
tctgaacttgggctggcgcgccaatctaatgttgcacaataatgcgaggggtgtgcatgtgctcctaccaaccatcggaccgattgtatttaaaaaagcgcccgcttagcttatctttgcccctaacaaccctgctattaaagttaataggggtgctaccctttaactgcta

SEQ ID NO: 131343 - DNA, 219 bp, Zea mays
  Clone ID: MRT4577_51268C.1
cctactcaaatatctaacacctcctcaaacaaacttttcacaacattactcattacaatactaatacctatactctttctacccataaaaatctctattcccaccctatactacaatgacatcctccccaaattccatatacattacacaataataccaataccatcaataatatcactttaaaccaactccatcacaactccaaacactaatccctct

SEQ ID NO: 131344 - DNA, 838 bp, Zea mays
  Clone ID: MRT4577_51269C.1
tttcccctcttgttataacggcggcgacacaaattaggcctcgcctcgacaggagcaagaaaattcagagcacaagagcacgcggtgacgcagggagcctgacgatcgacacggaggcaaaggcggccacggaaccagccaggccgccgccgccgccaccagcttccgtatccccaccactgtctcgcgggcccttgtcaacgcaattcctatcggaagagcgggagagggagggagcgctccccttctcccagttggacgtcgtcgtctcaagcgcggttgctgaggataagaagcattgcatttgaatcctcaaagtggaaaatggatctcatacagctcttcatcacggcatgtgtcccggtctttaacatgcttctggtgaccggtgttgggtcatttctagcaactgattttgctggcatactaagcaaagaagcaaggaaacatttaaacaatgtagtcttttatgtattcaatccctcctttgtttcaatctatttggcaaaaacaatcaccatggaaagcttggctaaactgtggtttatgccagtaaatattctccttgcttttacctttggtttattctttggatggatcgtggtaaaagttacaagagcacctgccaagctaagaggcctcattttgggttgttgttctgctggaaatttgggcaatatttttctcatcgtcattcccgctctttgcaaagagaaaggaagcccgtttggagcacctgatgtttgccaggacatcgggctagcatattcttcgctctcgagggctatcggcgctgtcttcgtatggtctatcgcgtataacattatcgcgtcacatc

SEQ ID NO: 131345 - DNA, 312 bp, Zea mays
  Clone ID: MRT4577_5126C.1
attgcatcacgacgggctcgatcggtcctgcccctgcaaggttcttgctgctgctgcgtcactggcacattggcaagctgcttatcaccatcagtgtcgaaacgtcgaggagaactcggcggctctccgtgagctcgtgtatctgctgcctggtgccctccagtacatcagcggtgtgatcctcttcgaggagaccctctaccagaagaccaaggatggcaagcattttgtcgatgtctcaaggagggaggcgtcatcctggtatcaaggtcgacaggggcaccattgaggttgttcgcaccggcaaggaga

SEQ ID NO: 131346 - DNA, 551 bp, Zea mays
  Clone ID: MRT4577_51270C.1
tcgagcggccgcccgggcaggtgaacaagctctctttctttgttcatacctttttgtttcaaaaaatgcagaaacgtcgcgctacctgtgatcaaccaacaaactcatggcaacacaaaactccctactctgagtcacaacaattaatcccattaaaacaagctgcctaccactgaaccctgctggttattgagggcaccaggtcttaccattcaagcaggtcaaataggtgactactgttagaaacaacaaagggttgcagggaaccactcgaactgactgaacaaaggtggttattggggatgtgacaaactactaccacggtagccagctagctgcaggaaaccgggcttccttcttgacacaggaacagatgctgcctttctaccagcagtctgcggctaaccccgacaacctcttacaactacaacaattgctgccctttgtccaacttgctttgacagacccagcggcctactaccaacaacacatcattggaggggccctcttttagattgcatattagttgcaattcaataataaagatgttt

SEQ ID NO: 131347 - DNA, 145 bp, Zea mays
  Clone ID: MRT4577_51271C.1
ggcctacacactgacagaacaatctgaatccttggccttattacaacaatgttttggacgcacacacactggtagccattatacaatgcgggggaacgggatccctttttttcagaaatactccctccgtttttttttatttggg

SEQ ID NO: 131348 - DNA, 468 bp, Zea mays
  Clone ID: MRT4577_51272C.1
acacctcttttgtacgcgacagaagtgtggtggctccgctgccgcgactctacaggacagcgaggggctgctcaagcgctggcacaagccctgccgggaggagttcaccaaggtggaggcgcgaacggcgattgtgtttactgccatgggcttagtacgtttcttcgttaatctcatgttgatacccatcaacaacatcattgtaagctccggataggcattacaaggagtccagggtggactagcatgggagtagtgaaatcatttgagggagcaatagataacgaggtatcctggtgtttccaatagtattgttaatgaaatttttcgataggatgtatcattgatgtaatcgcattactgaataaacgcttctaaatacctgattctgagtttacactttgaaacttcgtggatctatcaatttatgaaaggaatgttcgttgattacacttttgttgttctttg

SEQ ID NO: 131349 - DNA, 209 bp, Zea mays
  Clone ID: MRT4577_51273C.1
accacgcgtcctaaaaacttcttcatcgcctcctttgactgttggagtagtttggcccccaaaccccccgacagaaccaattacatacactcgcgaggcccccaaaaaaaaaatccaaactgaaccccctccttctaacaagatggtgatgcaatcatgaaatgattataatatacagacgcactcctgtttgtgttcagccccagccc

SEQ ID NO: 131350 - DNA, 291 bp, Zea mays
  Clone ID: MRT4577_51274C.1
cctgggcgtgtccttggccgtgtgtaaggcgggagcagctgagaagggggtccccctgtaccgccacatcgcagatctcgctgggaaccctgacctcatactcccagtgccagccttcaatgtgatcaacgggggctcccatgctggaaacaagctggccatgcaggagttcatgattctgcctgtgggagccagctccttcaaggaagccatgcgcattggcgccgaggtctaccaccacctcaagggggtcatcaaggccaagtatgggaaggatgccaccatgtgggt

SEQ ID NO: 131351 - DNA, 1725 bp, Zea mays
  unsure (1)..(1725): unsure at all n locations
  Clone ID: MRT4577_51275C.1
ccccgcgtccgccccgcgtccgccccgcgtccgctcaaaacctcggggctcaggttctccatttaaatgtatcggcatcggctttgtgcaacagatgaattctgagaaagatgaagagcttagtgctgcaaaacaacgtattgtggaacacaattgcatagcagctagtagaaactagtgcgtgatcatgttgaatgcgaaactagcaacaacaactcgtctgacgcacgatgtgattcgaagggtgcttggggttaaaatgaacatgacaacctgggcggctctagctgacaaccagcaaaagcgcgagccaatacatcccatcacttctcgtgtacaggagttcatacataacaatgagctgatgaatttgaagcggcagcttgatgaattcgttgaggattagcagagctggcttgacgaaataaaccagaagcaatcagagcttggagctgcccgcattactatagagaagttacgacaacgggaacactttatggtagctgaaataaagttgctaaaggctgagaattcaaactacaaaaccatcatccttaaccttgaagccgaagtgaagaaccttaccagacaacagaacctccagctccgaataaatcaccacgttaaaacgaaggaagagaacatcctgctgaagaggcagaacgaagagctaagtgcaaagctgaaacagctggggggcatccttacccgtacgaaggaagagctcgcccgctacagggtttcaaatggaagagatccgcacgaactgatcgaggaggaggagcttctgaggaagaaactagacgagagcgaacgagatagaagccagctggcggaaaacctatcaagcctatgctccagcattctgaaggtcgctggagtttcggactcagaatctgacgctactcttttgaaagcatcggagtgcttggatcagctccagtgccgtatcgcttctttggaaggccaagttgaggatctaaatctaaagtgcaaactagtgcgtgaaaaggcccgcctgtgcgagctccggagcaactcgtcgtctctgcgcacaggggcgaagggcaatctgacatcgcccagtccggacacatcgccaagcatttcgtccttccgatgacacaagcggacggatacatcgccgagaagctagtgtacattagtacgtacataacacattccgtgtaactattctagtgcagccgggctgcttagggaggattagttcagtccaacaatctccctttgctgattttatatatatctgctgtacaatatatataccgtgtgtgtacttgatgcagttccattcaacacttgtcttctctcttcgtctgtcgttttctttcttctaatgtaaagcaggacttgaaaattggaatacacatgcaatcaaagcagtgccatgtttatgcagttcttttaggggtgtttcgtttgaagaaaaaaaatgctatagatagggggggggtaatacccaaagatttgagaaataaagtaaccctttagacaaagggtttgagcgaattttgtttaattttttagcatctcaacaaatacaaggcgctggataaagcaattaataaatanttaaattaaataaaacaaatattgtattcatgcctgattaactccgggttgttggcantatattgtgaaccggtaaactgggatattgaaattggaattggatattaaaattagaaccaanataggaaatag

SEQ ID NO: 131352 - DNA, 445 bp, Zea mays
  unsure (1)..(445): unsure at all n locations
  Clone ID: MRT4577_51276C.1
accacgcgtccgggctgtcagcaatggaggaggcggctggtgagcagcaaccggctgctgaggtttgggaagaaagggagggagggaggagtggtgtggcttcataccatattggaaaccccaaaccctaatttgggttgggctgctatattaatagatggactagtatatgggctgggcctaagtccattacaactgtaacacacacatgtctaacagatatgacggttacctgatatacaagcgcattctattctaacatatgatacaaagagaagaggtagtttatgttggatcatgtcacagccttgcgactcatttggttttgtttcccagacctagcagatcttttacaaatcgtggaagcatgcatactgaaggaataactgaaactaaaaataaacaacacaggttttcattatctagctttgtanatggataatgt

SEQ ID NO: 131353 - DNA, 292 bp, Zea mays
  Clone ID: MRT4577_51277C.1
ttacttcgcacgccatcagcagcaagcgcgcggcgggagcccagcagagaacggccggcagcgccaaacggaatagccacgggctccaccgccggggacgaggccagggaggtggacgaggaggcgtgcatgaacgcgatgcagctggcggcggcgaccatcctgcccatgacgctgaagaacgccaacgagctgggccagctggaggagctgcagaaggaggccggaggcggcaaggcggcgctggcgcccgaggaggagggggcgcggatgcccacggagcccaacgacc

SEQ ID NO: 131354 - DNA, 101 bp, Zea mays
  Clone ID: MRT4577_51278C.1
gccccacgcattgatacttccaaacacttcgataagaccacggctaaagggaggagctcgccaaatctaaacataccccacgcacccaacaaatcccataa

SEQ ID NO: 131355 - DNA, 273 bp, Zea mays
  Clone ID: MRT4577_51279C.1
gttgaagctctttgaatccagggacttgaagaaagactaggtgtgtcccatccaagttgagcacgcgccttccccagcttgcagcagcacaccccaagcgctgtttttcacctgtacctttgttttattattattattattattgctgttgttgtcatcgttaactgtgggcatggaatgcgtgaggctggcttctaaatagtccacaccactctctgctgtgttgacttcctgttgtcttcatcaaagcttttttccgtggtattctaaaat

SEQ ID NO: 131356 - DNA, 157 bp, Zea mays
  Clone ID: MRT4577_5127C.1
ctataagcctacatagcgcccctacgattgaatttcactcctaagactatcataatactacgcgcaaaatctaaaagtacgaggaccattcatatctcacctcataacttacatctcaactcagcatccatgacaacaagtcataattttactcgta

SEQ ID NO: 131357 - DNA, 1424 bp, Zea mays
  Clone ID: MRT4577_51280C.1
tgggacaagcatggacgtgttgcacaatcaaacgccgcggagcccggaggaacgaaccattgatcgcaagctcctcatccatgactttcaagtgatcattctggctggaggtgttggcagaaatatgcgtcctatcaccagtgatacaatgccaaaatctcttctccctgtggctaacagaatcttgttgtcttatcagttagagtttgtcattaagatgcggtttcctgaggtgatagtggtcactgcagaaggctacgaagaagtcatacaactctttcttattacctatggtgaggccttcccagaattacgaattaagttacaggttgtgaacgactacacaaacacagctggtgtcctccttcaccttcgtcctatccttactagagacttcatcgtcatcggtggagacttgatagtcgaaggtaatttcctccatcacatggcagataagcacagagcaagagatgctgctgtcactgtcttgggtttcaggaggaagatagaagaggaaggagcaggtggtgcttcctcatcctctgctgctggagaagatgaagaatattttgctgtggaaccaacaactggaaggcttctcatgcttttcgattcgacatctgtgagctcagaattcatcagagtcaagaaaaaactatttcgaaagtttcctaattttacattacactcttcatcaatgcgcgacgctcatttttatatgttttctcgttggactttagatctcctcgaaaacgatccaagtcttagcatcaaatcagatttcgttccctttttaagcaggtgtcagtatgaccagcacctagtagaaaaattggaaattccttcgttcttgtcgcctgttgtggctgagatgtcttcagtgaaacatgaccccgaagacaaagttaagtgttatctattccaatttccagatgctgaaggaacaaaatactgcgaccgagtcgattctatttcgagcttcttccacatcaatcgcaccatcgctgaaggaggaaaagaatatcaacctactgaacctaggggtccatccaacaaagccattaacttcattgctacgaccgcgaagatcgagaagacgactgctattccttctggttccattgttggggctgacactataattggggatcgcgtaggagtaaagaaaactatgataggcaaacattgtaaagttcatagcaatgccaaagcgattaattctgttattttcgatcacgtgactgtcgaggaaggcgccaaaatacaaaactcgattatcggtcaacattgttacatagaaaagaatgcggagttgactgattgtattttgggagcagggaataaggtagaagcaggtgctgtctggagaggaaagaagctcaccgctcgaatttgataatgccaataccatgtttttttttttg

SEQ ID NO: 131358 - DNA, 863 bp, Zea mays
  Clone ID: MRT4577_51281C.1
ccctcttcgagtttttttttttttttttttttttttttttaaaaaacataaacaacttaagcaagttgcaattttgatacaatgacagtagctcgtcaggtactgaagaatcacagtccatcacagctattaaggaacagcaccccatgaagcaagaacaccttcatgtaggttctcttcggatacagttcagacaacacatgctaacataacaacattaccgctggtatccatctcgctactacgggaagctgaatccgccaccaccgatgagctccctggcacccgcaggagggctgatgtagacccacagcagcgagatggtcatggagatgagccccgaccagacgaacacgatggtcggcacacggccgcggcggcccaggaggcccttggcgaacgggtagaggtggcagagcacccagaagctgaagaaggcgccgccaagcagcttgctccactgcgggaactcgctgtacagcgtgcgtgccgacgccacggctaccgccaccgcgttcaccatcatgatcgtcacgggcggcaccatcaagaagctccaccgcacctcgtacagctccgcgaacgcgtcctcctcgccgtcgtcgccggtgccgggcttcgacgtcagcgtgaaggagatgtccacgccggcaatcaccttgaggaggccctgcagcacggccgccgggtgcgcgctagtcccgccgatcacccagaactgctcgttgcgccaccactcgtgcagcgtgatcccggaccacttgatctccagcagggccagcaggcagagcgtaatggtgatgacgagcagcagcgccaggaaggtggcgttgagcgactgcacgatgaaccggacgcgtggg

SEQ ID NO: 131359 - DNA, 1100 bp, Zea mays
  Clone ID: MRT4577_51282C.1
agttctaatccctgttatccgctgaaccatcgctgtgccgggttgcccttgattcatggagttcaccggcttccccgtgcgtagtcgcggatgccgtcgctcagcccttgtgtcttgccgagctcatcactgtcgtttatccctggcgctcgttcggctcaacgtctctgctctagcatgctgtgcaccactcggccgcgccctggatgtcgtgctcgttgtggtcggctctggtggtcggcatcgccacgctgtctgtcccgccaggcccttagacccactctgctccagccgtcagacatcgctagctcttgtgcctctctgagcgcgcgcctgtccacgtcgctagcagctcggtctctacgtgtgtctccctcagcatcttgacaccggaactccatcctgtctgtatgtgtgtggaagaacgaagtcgatggagaagaaattgaagcccgtgtggttcttgcgctcgtttggtgtggaattggagctatggaaattagggaagaaatttcgagaaattagtggacagtgatggtgatgttcgtgcgacactcgtcagatgctcgacaaaaagcccgaatcaggagtggctgctccgtcttctttgtcgaatgagaatcgtcgtgctgaaacaccgatgtcgtcgatcgccatcctcgtctatgccaactctgtgtagctcgttaccacaccctgtagccgcttccacgacgttgtcgaggggacttccgtgcgccacgtgtgcttcctctcgtcatgctaaatcaccatacttccatttgtgtcgacagcaagccgtgaagacgctcttgtgctggccacgcgccacttactcgaccaaacagatcccctaagtatctggttaagaaatgagattgtgtacatcgctcgtcaagtgtgtgcggtcaaaggcgtcaagcaaaaaccatcgtcgttcgtctgactatcgtgtcggattagttagggtaagccaatttgttattcgtgttagtggattgatgaatggtctgactaggtatattaattgtgatgattctgtggtgagttagattgctaattctgttattagttcgatgaagggaattgttaaatatact

SEQ ID NO: 131360 - DNA, 529 bp, Zea mays
  Clone ID: MRT4577_51283C.1
gcagctttgagctcagtagcaaacaagaagcagcaagatagtgatcctccatgggaaacaccctcggctttggcgtaggtgtcggcctcggcctcgacctcgccgtcggcgccgctgctctgatccaggttcgaatccacatcggtcttaacaaagtactgccagtgttcttaatttccttccgctttcgcatcgcgccatattgcaataatttacattgaaaagatgattgctaaactcaaaattttatcatgtggcttacgaatttctatattagttgatctgattgagtttccatcgcatccagggttgagatttttaaccctattgatccctatttcagtagtcctttgtatgtgcttgttcagacaccgctggctgcagactgcagtggtgattttaactcaaagtgtcgccgttaaatttagtaaaatgttctgtccttaacatagagctccactagaaagaatgtcatttaattcacagtacttttttttacctttctaggatgaaggttatgatttctttg

SEQ ID NO: 131361 - DNA, 325 bp, Zea mays
  Clone ID: MRT4577_51284C.1
aaaggacatcacccggtgccgctgccggtcgccctgcaatcggtggcagacgatgtcgccaacgccggacagacgaagcgcctaactcctggtgggcgcgtagcataggacaacgagaggggggttacggccgggccgtggaaacctgtcgaatcatccttctgaggaaggcgtacccgatccggcagcagcgcggccgcatgcgggtataacgacacccgcactcacgggtaacgctttcaatcagtgacccctcaccactgtgctgttcggtgactggcgcagcctgcggatgttcctaccatgtgcgatgcttgcacagccc

SEQ ID NO: 131362 - DNA, 453 bp, Zea mays
  Clone ID: MRT4577_51285C.1
cggacgtttgtgcggacgcgtggggccgcgcaccaccaccaccgctgcggctcacggctacgcagcccgctctcccgacccccccgtgccctcctctttttgctactagcacatagagtttcgcccgaatcgatcgccgactgactccgctagggttcggcccgatcgccgcttcgtcctcccgagcacaaagaagccaacaccgtcaattgaaatttgaagacaatgcaaaagccactaatgattctagatggcgcattccgatgtataaaatgccctatgcaccaccacctccagcagtgccacccccaggctatgtaccttctccacattttccttatccaggccgcctcttatcttctgggcatccatacggagatctcgctggtaacatggaaaactcagcaccacatagtctggatagatggattcagggtgatggctgtggagcgc

SEQ ID NO: 131363 - DNA, 3342 bp, Zea mays
  Clone ID: MRT4577_51286C.1
cctcgaggccggccgggattcacgaccttatcccaccagcagattcgaaattcacggacaggcccatggacccggcgaaagccagcggtggttcagcccctgacgtgcgggtcccactctccagccgcaccgcctagagaggcagaggcacctcgtggccgggagggaaacgaggcgtgataaagtggggctcctcggtcccggcgttggccgcatcgacactcgccgcgcaccaccaccaccgctgcggctcacggctacgcagcccgctctcccgacccccccgtgccctcctctttttgctactagcacatagagtttcgcccgaatcgatcgccgactgactccgctagggttcggcccgatcgccgcttcgtcctcccggctcccgcggggaccccgccgagatgtctgactggagctcgccggctgcgccgacgttcttcccttttggcccgcaggccgaggggtgggacgtcaccttcaaggtcaaatatggtgatacacttaaaaggttttatggttgtgccaatgggagtcattttgacatgaatttatctgctctacgggcgaggattgatactgcctttaagtttggtcctgacgttgactttgttctgacttacaccgatgaggatggtgatattgtcatgctagatgatgatgatgacttgcgtgatgcagctctccgtcagagattaaaccctctcaggattactgttcaactgaagaaaaatcaaccaactgaaaaaaaagatacttctgcaccagtgaaatccgctgctcaggatccactatcccagttaatgtcagctattgaaggtttgaagcctgttcaggaagatagtctggcccatataaaatcagctattggtgaagcaatcaagtctatcccagagccaatacctgatgcccttgcaaaactttctcatgaaatacttgatgcagcaccaccaccattagctgagctgatgaaaccttttgcacaattgatggcaccaaacaataatggcaatgggccatctgatgtgcatgctgaggggtcatctagctcttccagtgcacaggtgccagctgaagctaaaaatgagcccaaagttaggccaagtttgggtcttaagaccgtgttgaaagaggctgctggacctgttcctaatgctggagcttctcaggttcaacagccattaatgtatccatctgttgaggagatgctgttcccctgtaattcagtcgacaaatctgtttgcaaagggaagattgatgctcaaagtaagggaaaatctgttacgtcctcaggcatccaacctgctcctcattctcttcgtactcatgccccacctccaccacatccgtgcatttcagaatggtcccgagcacaaagaagccaacaccgtcaattgaaatttgaagacaatgcaaaaaccactaatgattctagatggcgcattccgatgtataaaatgccctatgcaccaccacctccagcagtgccacccccaggctatgtaccttctccacattttccttatccaggccgcctcttatcttctgggcatccatacggagatctcgctggtaacatggaaaactcagcaccacatagtctgcatagatggattcagtgtgatggctgtggagcgcaaccaattgttggtccacgttataaatctaatgtgaaggaagactatgatttatgtgattcctgtttccagcgcatgggaaatgaaatggagtacaccaaaatagacaagcctattttaccccacaggtttctaagagatccccatgtgtaccggaaggtgcaccatccacgggttctaatgaagtcaagacgggagaaacttgaaagtcgcttcattttggatgtgactgttcttgatggaacactgatgacaccttctaccccgttcactaagatttggcgcatgcataacaatgggtctgttgtgtggccacggggcacacagcttgtctgggttggtggagatcagtttgcattgcagacatctgttccattagagattcctgtggatggttttcctgtggacaaagagattgatgttcctgttgattttgtggcacctacaaggccagggaggtacatatcttactggaggttggcttccccttctggtcagaaatttggtcagcgagtttgggttcatatccaggtggaagacccttcttttgttaatgacaataacaggaatgctgctattaacctgaatctgcctccagagagctatagttcaaacacaaccaacttaattgatgtgaacattgagcctgctgactcagcccttagtgcacatgctaagcgcacaaaggagttccatttctgttcaactgattttcctgaacccagtaagtctgtgccttttacgttggccactacctctttgtctgcagcagctcctacaaaccaaactggtgatgttcccatgtccagtacacctgctgctgcttgtttgccctctgttaatgtgcctatgcatgaagtcgttactactcatacaccgtcacctattacgcctgtcttgcctacaactatacacttttcagccccagtatctgctcctgcaattgcccctgagcttgcatcaggggctgttggtgtgcctccacctgttagtgctgtggtacctgagctgtcagaactggatgttcacaatgaggagaagttgctgagggagctggaggaaatgggttttaggcaggtcgatctcaacaaggaaatcctcaggcagaacaattacaatctggagcagtctgtcgatgacctatgtggcgtcaatgaatgggatcctctccttgcagagctggaagagatgggatttgatgacacagagatgaacaaggagctgcttgcgaagaatgagggaagcatcaagcgagctgtgatggagctcattgccagggagaagaaggacaagtgaagatcgtgtgctatctagatccaagtatatattcgtaaataatgagacggctgtgccactgcggtgcagccctggtgcgtctcagagcttgcttatggtgaactcttcgtgttaggtttcttccttatatctgtcgtgtctgtggtgtcgatgaactatctagtatgtggagcgtgtgcgtctcagcagttaccctgccatgccacgtggactggctgtcgtgcctactgtctgttaccatgtatatatataaaaaatgatgcgtggaccaatgtttgatgctggcgctcttgccctcgtgataatgtattagcggttggcttgttgcttgctaaaaaaaaaaaaaaaaaaaaaaaaaaaaaaaaaaaaagcaaaaaaaaaaaaaaaaacttaacttccccttcct

SEQ ID NO: 131364 - DNA, 413 bp, Zea mays
  Clone ID: MRT4577_51287C.1
acgtaggcttgtatactgtagacgcgctcgccctttggtttttattgcttaaagaagagattacccgagctcctttattttttttaccgtgtgagcatcggataaatcatgaactggatgcgtgcaccacggctgtaacagttgaggctcaatctctagtgtggcctggcactgcttcgagatattagtggcagctgcttgcgcatggcccgccgacgtcggagctgcgcatgaactattcgaaatactactgacaggtggactcctgctgagatgactactaagcttattgtcacatcccggctgtactgatactggacctgggccgtactaaatgatgaggtatacagtggggccccccacaaggagcccttctgaccttgtccaactaacgggctttcatttcttaagac

SEQ ID NO: 131365 - DNA, 368 bp, Zea mays
  Clone ID: MRT4577_51288C.1
gcccaataaattgttcttgatagacaaagttccatacataagttgcaacggttgatcttaaaaccacgaggttacactactgattcttgcttactggccgggtggtgagaaaaaacatccggacgttcaaccaggagattaccccgcatgtacttaactttgcttaacaacaatggacgacgacgatgtacttgctagctagttactcacttgttacttgaagccggcatgggcgccgtttaaaatgccattgggccaacgcagccgtaaaaaccaaatagtggaaaattacacggggctggttttgttaatgaaaggatggaatcccaatgtattttccaagactggtattttccaaggtggaaggc

SEQ ID NO: 131366 - DNA, 598 bp, Zea mays
  Clone ID: MRT4577_51289C.1
attacaaagcgaaaaaggaccattaatttcctaatttatgggggcctttatactacaaaaggatgaatgacaaatgggggaaaaaaaataacttattgggggtctaaaccaaaatctcaacatgccttttgaacatttcctccctcggcaccggcagattcaaagtcacaagcccaacctcggggtcgaacgggaaatcagtctttgggctttcaacggggcattttaaaggaccctgaaaaaagtaagctccaaaacgaccacagcctttgacactgacaaataccaaagctgttggaaaacggttatcgctgagcgcgggaaaagccgaggaaatctctccatcgaaaaattcaggattcttggcggccacgggattgatatcaatcgactcgattgctccacttgagttgaacatgtctacaagtcctattggggcgaacgaaatgttttcagggatttccttcaaaggaaaaatggggaaaagttcatattcaaggactttgagggggaaaggaattgaagcacctttaggtagtcttaccacctcacctgatctgtatgcatagactattgaatctccactccaatcttcacc

SEQ ID NO: 131367 - DNA, 818 bp, Zea mays
  Clone ID: MRT4577_5128C.1
ccggccgggattcactatataaaaaaaaatcctagccaccgcatcgtcgccctcaaattcgttccgtccaggcaaggaagaaatcgagcagccaaggagaggagaagatggctcgtacgaagcagaccgcccgcaagtccaccggaggcaaggccccgcgcaagcagctcgccaccaaggcggcgaggaagtctgcgccgacgaccggcggcgtgaagaagccccacaggtacaggcccgggacggtggctctgcgcgagatccgcaagtaccagaagagcacggagctgctgatccggaagttgcccttccagcgcctggtccgtgagatcgctcaggacttcaagacggatctgcggttccagagccacgccgtcctggccctccaggaagccgccgaggcctacctcgtcggcctgttcgaggacaccaacctctgcgccatccacgccaagcgcgtcaccatcatgcccaaagacatccagctcgcccgccgcatccgcggcgagcgcgcgtaggcgtatctcgcgcccggccccagtggcggcggagggatggaggagggcaatttgtaaccttatgctgtttgttcgcttttagacggcgtggtgaagaactagtgtaaaaacggctttaaagtctattttgtgcggtagttcgtgtaggccgcttcgtcccgaagcgatcttggtaaaagactgatgattcgtgttgccaaacgacacaattcgtattttttttgtgtgccgtgtagaacacggtttgttgttattggaatggttcatcgaaaaaaaaaaaaaaaaaaaaaaaggccccta

SEQ ID NO: 131368 - DNA, 577 bp, Zea mays
  Clone ID: MRT4577_51290C.1
tataggtaaaggggaaacgccagcaggaccagtttgtatttccgggttgacttacgcgtccggtcgtaaacagagagagacaatgttgctacagccgtaacttgctacatgaaacagtacaagacatcaaaggaagaagcaagtgatctgctgtggaactcagtagagcaagcatggaagagtatgaatcatgagtacctcacttggacttcaataccatcctcattgcttattcgtgtgattaaccttgcacggatgatggagacaatgtacaaggagatagacggatacacggattcgaagttactgaaagagtggatatccaagctccttgatcaaccaattcccttctaaggcaccggtcctaagaatgttttcatccatcacgatgataaaagaatctggtccgcccacaagcaccacccctgcacaacaagagtatctggtacacaaaagcagatttcaagtatttggttcaagagcctcagttcttatttagcagtggcttttttgagttgttcaatgtatgttagaaccaggggttcatgatggattaatgatatggttcttgctttct

SEQ ID NO: 131369 - DNA, 663 bp, Zea mays
  unsure (1)..(663): unsure at all n locations
  Clone ID: MRT4577_51291C.1
cccgggcatcgacgcatcgagtcctcgnccgtnaggctattggacgaacagaaaagatggttggtgtagtatctgtcagcgaggcagttcagattgcagacgataatgatcttatactggcaatattatcaatggatggggaccccccagtacttcgactctttgaggagagagattacaaaaaacataggtatgaacaacagaagaagaaaaagattcagcagaaaagatctgtcgcgaaacgcatgggcttgaaggagctgaaaatggggtacgaatcacctcagtttgaattttgtttcagttccattggttattgacccttatatctaaactgctgcattttctggaactttttattagaccagaaggataggtcttattttattccaccttgcatagctaagtaacttctagcatgtaagaactaataaaacttttgaggcaaacttggctagagctactttgagctatttgccaattgccatattggaaatgcaaaatttcttagatagatcgattggtgttggcatagtatatttctggcaattgtgcaataatttattgatttgtctgtggcatcataaggctcctgaattacaacagacacatgtgttattataagttaatgagtttggtgttgaattctgtatgcatttgcct

SEQ ID NO: 131370 - DNA, 193 bp, Zea mays
  Clone ID: MRT4577_51292C.1
gggcatgcgggcaacgttataggggatccaatctaatcacctacatccaactaactgatcgttgttttacaacgtcacctctgttaaaaccattggccttcctaactcaacgtccttactggaaaaacccctttcttcccctacctaattagctatatagcccatcaccgattgcccatttgaccaattttcc

SEQ ID NO: 131371 - DNA, 426 bp, Zea mays
  Clone ID: MRT4577_51293C.1
ttttactttgaaagatcctcgtttcaatacagcgacgagggcatataccatataacctgtaccaggctgtggctgaaacaaaacctatgtgctgcgtacagccctaggtatagctcgtttaccgagtataacggcaaccctgacacaaatacgacgattggctctcactgcccattatactaccccctttgttgatcatgctggggagcagtataactgcttacggtcttgcggtacatgccttaaggccctgtgacagtccgggcgatgaacttcccggctttaccagggccactgctgacagcacccataccaaaggttacatggcctgggccagaaccaattcctgaaccaactaaaccgaagctcttggcaatggcagtacccacaaaggcaacaccggaaccaacagaatgcattgtgata

SEQ ID NO: 131372 - DNA, 595 bp, Zea mays
  Clone ID: MRT4577_51294C.1
ggtacccggcgccccccctcgagttttttttttttttttttttttttttttttttattttttttttttttttttttttttttttttttttttttttttttttttttttttttttttggggaaaaaaaagggggtttgaaaactctcttttcgccccccgctgccctcttaaaaggggggggggggctacaaaccctcgggcccaccatttgaaaaacttttccggcaaaggggagggttcaagaccaaaacaaaacccttaaagaaaggggggacaattaaaaccaaaaacaaacgcccctttgaaaaaaaaaacaaaaaattttttggggcttccccaggggggaacccaaaagaccccccacccgaaaaaaaccgaggtcccgaccccccccccccctccttgggggaccccccataggggcccccccccccaaaattttccccgagggggggccctcctggaaaccggggcccaaaaaaccctgccccaaccccttgtgcccgaccggctcaaaaaaaaccagcaaaaaatcgcgcctggggggttgggaacaaactcccaaagcccgaacaccccgcccccgccggggagc

SEQ ID NO: 131373 - DNA, 638 bp, Zea mays
  unsure (1)..(638): unsure at all n locations
  Clone ID: MRT4577_51295C.1
gaaaaaaaaaaggggggggggggggggggggcccccgccgnagactggaacgatagtacctgcagtagcgtcgcgaatgtgacagagtgagtccagagtccagcactgctacgtgcacacaaccgagacaaccgttctcgtctcttttttgcgtaaaccctgggggcacacactcttcctgagtgaggtggatcccaaaccccgtggagatagtcacctcatgcctgtacccctcaagttgtcgcgacgagtcactagcgtcggagagaggagagtgatcaggattacaccgatatgcggtttagcgatggcgtagcgagcatgagttgcggtacattagcctttctgcctttgccacttgtagtcattttctctgcttaggggacggattctagactacttagagaacctgcaagagagcatggtgaacttaatacactagaaggacaacatttacgtcgttacttccaggaactcgaccccgtttcgttgtccttgggttcaaactctactgtattggatggaaggtactagagccggtaaggggggtggtatactgtacagtcctagtaccttctaccgttttagagaactcgtaggggtcctctctacatatgggaggtttccgaacagtggcc

SEQ ID NO: 131374 - DNA, 328 bp, Zea mays
  Clone ID: MRT4577_51296C.1
ggggggtaagggaatctatgcaaatcaagatcgttccaaccaacactttggcttatttttgatcacacaagaagcaggtcctggtggaccgacgcctgcacacattcacacacacacacacaccattggtgggcttgggcaggtcaatagggtccatttccgaatccaggcagggttttgggagcgcaaggtcctgaacgcgtgggtgcaagcccctcttttcttaaagggtagagcttggccaaatcggctttgaatttggcctttaactgctcccttattaagcttaagcgccggcgtgaccagcccggactccggggttcacggt

SEQ ID NO: 131375 - DNA, 284 bp, Zea mays
  Clone ID: MRT4577_51297C.1
cgcacgacacgggactaagtcgaagagctcgagggcaccaatcatgggcggtatgaaccccagcgtcgtcgggctcaaactcgtcgcgggagtggcgtaggtcgccgtcgtctcatcgccggagaggccggtgcatctggtcgcgcccgagggcagcctctctgctctgctcaggttgtcggccgtcgtcgccgtcacgggttatgcacgggtcggtcagggccacgatgttcgatgagtatttcgacacgagcatggtcggagagggggctgggcgacaggaa

SEQ ID NO: 131376 - DNA, 672 bp, Zea mays
  Clone ID: MRT4577_51298C.1
gcacgaggacccgccggccggaccgggactctctctctctcactggctgacgccgcgaccgccccaacccaactgcccttttcggagatctcgccgcctccgccgtcgacttccgtcgcccccctatcccgcgtccgggcttacccgatggcacggctgcactggcttgaggccgtcctgccgctggggatcatcggcggcatgctctgcatcatgggcaacgcccagtatttcatccacaaggccgcgcacggcaggccgaagcacatcgggaacgatatgtgggacgtcgccatggagcgccgcgacaagaagctcgtggaacaatcctccggcaactagggtattgatcaacctcaaacttttctggatgttgacgaacctcgttcaaaagcacagaagtactgctcttttgtttcctgtacaattggaaccaagacttgtttgttttgctttgaaatatcaacagttcggagaataatctgtatctgacatctgtttaattgaacaaagccaaatactttgtcaaaaaaaaaaaaaaaaaagcggccgacagcctggcagatccatgaacaccgaaaaaaaacacgtttcacagttgttttggcttttgtttaatatatgttttgatctgtccatggtggatacaaaaaaaaaaaaaaaaaagcggcc

SEQ ID NO: 131377 - DNA, 364 bp, Zea mays
  unsure (1)..(364): unsure at all n locations
  Clone ID: MRT4577_51299C.1
cccgggcatcccgnagaggcggttaagggtgatcccaggccgaccatgcgcttacgtgcgaggggaggtnngttgtgaaagacaagctggtactatatggcgcactgagcataatgctcagacttctttcgggcctattgtcatacttcatcagnagatcttcttgtgacaccactgttctcagtggtactattatacttacagctacaagaaagggtatggtgctggtaagaagtgggatggtggacctggtggtggtggtgggcggggcccatatggaggtggaggtggtggttttggcggcggaggtggtggtggtnggggttctttttttgtttttttcttggtttgtggtgcgtttttg

SEQ ID NO: 131378 - DNA, 373 bp, Zea mays
  Clone ID: MRT4577_5129C.1
gacatgcgggccaaactcgcttgtatggagctggccaagagaccgaacgtgctcgacacgcgcacagggcgggaccacctgctctcatatgaccaatctcgcgaagttctcttgaccgacgagggcgtagcagtaacaatctgagccagatcagccgcgagttgaaacagcagccgcctggtgctccaaacagtcggcggaaggaggaggaccctgatcgcgccatgtgtttccactacgctgaggaacgtgtagacacgtccctgacggagaaccaatcaatatactgcgcctactttgcttgcatccgctttccaacgctgatcttcctagttcctggtcctccgacgcctggcgggatcgacaacaactt

SEQ ID NO: 131379 - DNA, 230 bp, Zea mays
  Clone ID: MRT4577_512C.1
acacgtccgcccaagcgtccgtctcaccctcgctcgttcacacatctaataacgaaaggtctcgcccttttcctccgacatccacaggggggaggggaaaacgactgcattcacccggcggcagtactggcctcggttccggctccggcgacgacgaccgccgctgtaatcctactcctatgcgtcgtcctctcactgtccactgctgacgaccccaacctctcagacta

SEQ ID NO: 131380 - DNA, 676 bp, Zea mays
  Clone ID: MRT4577_51300C.1
ccctcctcgagttttttttttttttttttttttttttttttttttttttttttttttttttttttttgcggcttggaaacatcatagttaatagaagaccccgggacacgtatacatacatgacggcttatataccaagtttttttgcaaaaagcaaatcgaactcaccctgtcccaagtacggggaggggaccgtctccgtttattattctcgaccaatactaaactctgcccaaaggggctcaagtagtaccatgaccgatcgaccgaccaggagggatcgacatcgccctgagggggcggaaaacaactcactcagaataagcacctgggcagggaccccttacaggggggaaaaacctttttgccgttgggggagttgacgaacccctgcatgctggggttccttttgaactggcaaaaccaggtccccgggggccccttgagcctggcccaacaccccggggggggccccgctttcccaacaatgggggccccccacggggtcatttgcgtcggcccccacgttttcggggggccggccggggccagccccaaaaggttccccgccgcgagccccgccagaaacagcgcgacacgccccttgttttccgccatgccgccgtttggacacttctttgttgcgggtgcgggggtccttttggcctgggggggg

SEQ ID NO: 131381 - DNA, 459 bp, Zea mays
  Clone ID: MRT4577_51301C.1
atgctggagaggaagatcaggcagaatgttgacctttctactaatctgattggtgtgttgttcaaaagtgatcttaatggccgtgcatacaagattactaagcatctgtacgacaatggatattacattaagatggaaaaactaatcgcgacactttgtgaggacaagaagttcatagatgccgcagagttttctttgttcagcttgcggaagcgccatgaactgggtgtggcagttcacagccaggttctggatggcctttgctcgaatggtagaacttcagaggcattccagcttttctatgagctaattgagaacaaaagaacttctgcggttgctgcgccccacagcctagtctttctgcatcatgctcttgaggaagctggaatggtgcaagaagctggttttgttgctaaacaaatgagacgtgcaactgccacaactaggcgaaggagctaa

SEQ ID NO: 131382 - DNA, 265 bp, Zea mays
  Clone ID: MRT4577_51302C.1
tctcgacgaatcggctcgaggagaaacatccggatattattcccaatagctcagtcccatgaaggaaggttttcttatagttcttgctcatcagatggattcctttcgtccaaagagagcactatacagcaaagtagcatccacaaccgtgacaagtgtaatggagcgccctgtgcatgtatcagacgaaacatcttatgaagctgcccctaaggcacataaatcagcagaggaccatgatgatagatcgatacctccacttata

SEQ ID NO: 131383 - DNA, 698 bp, Zea mays
  unsure (1)..(698): unsure at all n locations
  Clone ID: MRT4577_51303C.1
gccggccgggctgcgaattcaatcttctatcttgagagaatatcagcttttctccaccatcaaaatgatcccaatccataaccaacattcttcccttcctctggcacgcgttgctcttcgctgatcacctcgaacatcgacaatcggcctctgctcatctgggaacacaccaactgctgcgcatctgacgttgtcgaactcactcatctatactgcagctctcctaacgccaccgctgttggagagatggaggacctccatacccgctcttcttcgccacatgaccacaactgctgcctgatctttattctctccctgccacttatcagctctgaccataaacatactgacccgtagaccccgtctgatgatgattaagcatgctaacccaccacataccaatagtatggaatagcatgagactgtcgtgtcctgtgcatactgttatcacagtagtacaagattattgcctaatgtgacattctaaatatgattgacgaatcatcattgagaatctagtcaagatttctccttcacaactgttaatgcactcactgagcctattgatatatatagtgaatggattgatgagtgtgagcgtgtcaacactgttgaaggcgacgatggtgcctgagcttgccccatgtgatgaaactgttacctacaatcgtaatgnaatgtgctgatattctcgaatg

SEQ ID NO: 131384 - DNA, 351 bp, Zea mays
  Clone ID: MRT4577_51304C.1
attcaaggttttttctttttttatttaaccaagcaaaaaaggtcctttgaccaaagaacccgaaagggcatacaccttccccccggggggggaccatattaccaacattcccccttagcagggccaaaccccttaaatcccccccccttattgccaccccggtaaaaaaacctcggtttataacaacccggggatggcaccaccaggggggccaaaaccacggattttacccccagggaaccctcaaccaggggggagccccagaggggcgggccaccaaaagggggggtccaaaactccccttggccaacaacaactttggcaatggggcccgcggtgaacccaaccggg

SEQ ID NO: 131385 - DNA, 216 bp, Zea mays
  Clone ID: MRT4577_51305C.1
tttttgttttttatattttttttttttttttattttttatttttggggttttttaataagttgtttgggggacaacagcacaaggggtggtctaatccccgaaatattaagcacacgggggggaccaaaaggacagttacccagaaggacaagagccggggggacagaatctggacggacaccgacaccgaccaaaaaaactcactggaagaaaag

SEQ ID NO: 131386 - DNA, 380 bp, Zea mays
  unsure (1)..(380): unsure at all n locations
  Clone ID: MRT4577_51306C.1
ntttctagccngcngccccgctgnggcgatttccccacacaggcacccacccacacaaagcagcagccacgccaagcagacgcgagccacccaccgcgcgaccacagggagccggcgccggccaccgcagaaccggccgcaggggcaccgccagccaccncgccgcgccgcacggacacgccccgangccccgcggcggcgccncggcaggcgccggggccgacgnccggagcgcacggccgccaggcaccaagaaaccgagaggcggcgcagccagggcgacgaccggcggcgagggcgccacggaggaggagccggagaccgcgaaggccgcgcaggacgcgggggacagaggcgaggacaagnacgccgaggccacc

SEQ ID NO: 131387 - DNA, 289 bp, Zea mays
  Clone ID: MRT4577_51307C.1
gtcaagcaggggaagctgctcgctgatctggccaggcgcctgggcctccactatgtggtctacagcgggctggagaacatcaagaagctgacggcagggagattggccgccgcgcactttgacggcaaaggggaggtggaggaatatttccgggacattggcgttcccatgaccagtgtgcggctgccctgctattttgagaacctcctctcccacttcttgccccataagccccagacggaaagagctacttgctgagcttgcccacaggtgacgttcccatggatgg

SEQ ID NO: 131388 - DNA, 490 bp, Zea mays
  Clone ID: MRT4577_51308C.1
tagcatcagcataaccacttgcatatgttgatgaatcgattggtattttgagacttgtattatgtctcctttgaggaggttttattttcaccaggtacactacattatttgatgatcgtattatggttatttgatcactgtattttattatttgatcgctgtattatctggacaaattacgaatatgcctactactgtatcataattacttgttgcctactctatcgacctttgcaaagattgctactgttttgttgtctaaaccacttgctgtcaatatttcttaaagtgttgtgtatctaatcgtcctctaataagcacatcagttaagttcaagttaacacaattacactcccatacatgcatacaatgatgatgacctgttgtacattctgattgcttgggtattcattctctggtgctcatagtctaatggatggtatgatcaccgcttagtatgttctgttctgtttttgaactgaattatctc

SEQ ID NO: 131389 - DNA, 188 bp, Zea mays
  Clone ID: MRT4577_51309C.1
gtgggtggggaaaacgcccgggttcctttggttgactttagatcaggaaggaataagcacggggggccaaactgcaaagggtaaaaccgtggtaagctctccaaaaaacctaccaaaaaaaggttggggagcctttaaatgcaaagtctcaaaagcaggtggggaactaaaatttggataaaaggggg

SEQ ID NO: 131390 - DNA, 372 bp, Zea mays
  unsure (1)..(372): unsure at all n locations
  Clone ID: MRT4577_5130C.1
gaaacgcatgggagggcgcggccggagaggagcaggcggaaaggggaggnacaaangcgagcgcacgagggaaccaaaaaaaaagaggcgancgcncgagcgagcagcggggaaacacgccanggagagcgcgccggccacaagcaccggccaggagaaggacgccggccgaaccaaaccgggggaggggcgggcaancaacaccaccgcggagcaaaagacacnccaacagccgggggccaacgngnccccccgcggccggaaccgcaccgggcaaggagaagagggggccgccgccgcggaggccggcccccngcgggggcgggcccggcccgagggccgggggggggcccacgcggggaccccggcggg

SEQ ID NO: 131391 - DNA, 504 bp, Zea mays
  Clone ID: MRT4577_51310C.1
acataaaagtttagtgcacatgatttatatattaaattatcactatctattttagatctaaataaaaaaaaaaaaaaaaaaaaaaaaaaaaaaaaaaaaaaaaaaaaaaaaaaaaaaaaaaaaaaaaaaaaaaaaaaaaaaaaaaaaaaaaaggggggaaaaaaaaaaaaaaaaaaaaaaaaaaaccccccccggggggcccctcaaaaggggaaaattggggcaaattcccacaaaaggggggccctttgaaactgctttgaaagggccaaaacccccctaaggggggggaaaaaaaaaacaaacgccccctgttttaaaaggctcgaaagggaaaaacccgggggtgccccaattaaaaggggttgaaaaaaaagccctttttccaaaaggggcgaaagcgaaaaaggccctgaacgaaccccttttcaaaaaattagcccccccgaaggggaaagggaccccccctttaacggcccataaaggcggggggggggggggggc

SEQ ID NO: 131392 - DNA, 939 bp, Zea mays
  Clone ID: MRT4577_51311C.1
gttgtattgaaaataagtttgcctgaaaccatcagtattatgatctttcatgtttgcttctcctgtaacagtatgagaactaaagctttgattagtttcttttctcaggacaagcttaaaaacaaaacaaaataactgctgctataaagttacagtttagggaaggtcttttaagttgaaccaccagaaggttaagaaaaagtacaaaacaaaggcggacgttgtttctgatctgttggtgggtgctgtgactgcataccgggaatcagaacaactggtaacttcgtcatagcatgaagcatccatggacctggcatgatggtgaatgacttgcacaactgtatctcttttcttcctgaaaacacacaactgtgtctttcagtgtttttttccagtgcaaagcctctcatacatcaagcaaatggatggtcaaaggaagcagaatcgttctttgatgtagtagagcttgctggctctgcctccccagtcctgaaccagtatgactgctggaatgaagctgcgcttgtggggacatcctccatgacccattcaaagcccttggggtagtagatccctgtcattggatgtgggacccacaatgatgtttctggggacttcacttcagtaggctccagtcgcttcacaaggttagtagtcctttgcttgttcttgacttcccggagcagagctgccgatttcgcaagcgcatggcggcccatcgaatgcaggctggggcgtttgctaagatgccactggtggttatccttggtagcaaccagctgatagcagttccttcttgtttgttccttccggcctcgaggttccccatcctcaaaccaggtatttatacactagccgtaaccttacagacacaatgccaccaccaaccacgttcagcaatgaaacatacaccgtacattcattggatgatagagaatt

SEQ ID NO: 131393 - DNA, 216 bp, Zea mays
  unsure (1)..(216): unsure at all n locations
  Clone ID: MRT4577_51312C.1
cggnncggggggggcgggaaaacgcccttcgagcggtcgcccgcacagttacaagattaaactttgcaaaagcattatgctcacaagcaaatttttacatcaggggaaaaccctccacacctcagtcatatggattaaaacattaaatgcagcgatatctagttaagatttccctaatatttgtgaacaacaccatttgtagtaatacgtccaaac

SEQ ID NO: 131394 - DNA, 861 bp, Zea mays
  unsure (1)..(861): unsure at all n locations
  Clone ID: MRT4577_51314C.1
ccagaagtttaagaaaaagtcaaaacaaaggcggacgtgtttctgatctgttggtgggtgctgtgactgcataccgggaatcagaacaactggtaacttcgtcatagcatgaagcatccatggacctggcatgatggtgaatgacttgcacaactgtatctcttttcttcctgaaaacacacaactgtgtctttcagtgtttttttccagtgcaaagcctctcatacatcaagcaaatggatggtcaaaggaagcagaatcgttctttgatgtagtagagcttgctggctctgcctccccagtcctgaaccagtatgactgctggaatgaagctgcgcttgtggggacatcctccatgacccattcaaagcccttggggtagtagatccctgtcattggatgtgggacccacaatgatgtttctggggacttcacttcagtaggctccagtcgcttcacaaggttagtagtcctttgcttgttcttgacttccctgcaaatggcaatttaatcagttacttcaaagagctgaaatggtgctgcatgtgccaatacaagtcttctgcagtataatatgagaccaatccttgttgttcagccattcaagatcatcatggtggaagcaaccagaatgaacacatgtctaatcaatgttggtttgtcgttgcaggttcaacatggattactagttaccggagcagagctgccgatttcgcaagcgcatggcggcccatcgaatgcaggctggggcgtttgctaagatgccactggtggttatccttggtagcaaccagctgatagcagttccttcttgtttggtgctttttttttttgnnnnnnnnnnnnnnnnnnnnnnnnnnn

SEQ ID NO: 131395 - DNA, 181 bp, Zea mays
  Clone ID: MRT4577_51315C.1
aacttgcccaaaattctgagtcgaattttaatcactctcaggtcagactcaattttccaagtgcggattcatacaattgatgggtggttaaataattaccggatacaccgattttccgaacaacgatgttccaaacatcacgaaaatttacgaagactccgtatagattaaatatcataat

SEQ ID NO: 131396 - DNA, 287 bp, Zea mays
  Clone ID: MRT4577_51316C.1
cccccccacggcggcgccccccgccgccgcctcatcctcctcaccgctaggggcgccgccatcatcccgccccatccgccgctgccatgcaccacctccttctatcgccttcggccgctcgccgacggcggagagcgccgcgagcggaagaggcagatgaatcctctgttagcactcatctcaacacgcgcgaaatcaccgcatacaagaaagaaacagggcagcagatccacgccgtttttttttttacccaccaccagggggagagtcatgctattatggaaaag

SEQ ID NO: 131397 - DNA, 121 bp, Zea mays
  Clone ID: MRT4577_51317C.1
tcggatgaaaccaaatgcaaggtgtttgttaagcatgatgatgccactaaaggttggaaagacattggtgttgggcaggtttttattacaagttaagaagggacatagaaaggtttcaaag

SEQ ID NO: 131398 - DNA, 190 bp, Zea mays
  Clone ID: MRT4577_51318C.1
acgcgtccacgagagcggcccccttttttttttttttttattctaacgttttttgtttgtttgtgtacaacaaatgagtacatgtgtaatttttcattacaggtgaaaatggacacggggtgtcgcgaaatagggctcaactcagatttacattttaaacgcgtatatgtgcatcatcacagggacacgc

SEQ ID NO: 131399 - DNA, 314 bp, Zea mays
  Clone ID: MRT4577_51319C.1
gtttttgtggccgcctacggcgttaaagatattctgcccgaaaagcccaggtactacacgatcctgaagcttgtggtggacaccaatggcgagacagacgcgaataatgttctgcaggagactctactgtgcgtgcgcgacaaacttgccaagcctatggtgcttatgcccaacgataacgtgctcccggcgcaggataaccacagacttcatagttacttcgacccgatcaagctggacgagagtaagacactcaccaccattctccacacgctgctctaggacactgacaagaaactcgagagtctaaacta

SEQ ID NO: 131400 - DNA, 618 bp, Zea mays
  unsure (1)..(618): unsure at all n locations
  Clone ID: MRT4577_5131C.1
attccctttcaggaatccaagttaaggcttcaaggatgcccatttatgtcccccgaggtggtccaaactcccaatttgggctggttaaaatgggtaagcttggtgcaaaactcggcgttccaattggggtactgatctagttgcctgtaagcatttttttttggggtgatggaaacccttagctcagaaaatagatgtgaaaaatagcattgaaccgtctgttgttggcagtcgcaaatcattgccagcagttcccatatagatgagctgattgtgttttgaaaaaaaaatcccccgcaggtgtatgggccagaagcgactatgactggaatctgcaaacaagcaattgaatgcatcatggctgcagcgtaatcagagcgtagctctgggtagtttgggatctgcaaacacgcaattgaatgtgtcatggactcagcataaatgagagatggatagtagttgcattatatagttcacacatggtgtttctgttttttgtttcagatatgttgtagcgtgttgtttgaacgaaaccttcacagatcattactgcaaagaaattgctgtgtgttaaaataaaaaaaaaaaaaaaaaaaaaaaaaaaaaaaaaaannnaaa

SEQ ID NO: 131401 - DNA, 546 bp, Zea mays
  Clone ID: MRT4577_51320C.1
gcaacacatgttggcagaggtggaccttgaagccctgctcctggggtacagacaggcgctgtatgccgcaaaaatgctgccaaaagcgccctaccagcgtgaagataactgaatgactgaaaacgcgtctgcgaaactgaggcagagatcgactttgaatgttgaaaggtgttcattcaactctacatctccctttcgaccataatatgtatggcacagaaccttactggacaaaatttcttcaacgcatcagatactgtatctgtgcaagcaacctttccttataaatgcgatgagagcaagatcttgcagactgtagcttatgatctggttggttacatagtgtatgagatcgaccaacacccttaccataatgtattctacaatggcactatagacgacgttgaggctggaggcttactcagtgctgagtctgggctcctcatcacccttgaaatcgctcttgttggcctcctctggatatggacatatggcgcagatgtcagcagctctcgaagaaaacgaagaaggcccccaaggtggagc

SEQ ID NO: 131402 - DNA, 257 bp, Zea mays
  Clone ID: MRT4577_51321C.1
tcgatcgaatccgtggcgcacttgctggggggtcactctcaagccgccgacgtcgtcgtgaggactccggcaaatggtgtcccgcgtggcctcgggcctgctcctccgccgtgccggcagccacactattgcctcctaaggagttatgcacatgtcaaaagctgcaacagacaactttcacctttggtctttgatagatctgaatgctaaaatatgaggagaagatgctattacttacctaatccctctacatacca

SEQ ID NO: 131403 - DNA, 569 bp, Zea mays
  unsure (1)..(569): unsure at all n locations
  Clone ID: MRT4577_51323C.1
ggcggccgggcgggggggcacacttgacatatctcacaccagatcgaaatagtctgtaatatctctatttactggaggatcccatctttaacggacccactcacctttntttagaataacacactctgtcggcagcctcagcattgctgtgtcaagcatcgagcagagacagctgcttttagcctgaggagtagtagaccatagattgctatatcttgagggtaattcactagctagatactgatcacacttaaccttagtacattcgtcgggaggggtttattacgctatngaccctgccgcatgctgcatctgcctcttaaagcgccagagatgtgcagtcacacttgaccagcccatgactatcagccttctatctctcaacactagctccacctactttcccacccatctgctaactgcgccagaaagaataccttcctgttccacacaacacacaagccagcaccataagggcgcaaacctggtacgtctaacgagagcactctctcgcataatttcagcacacctcactgccctattaccagatccgagctctgtcccgccct

SEQ ID NO: 131404 - DNA, 680 bp, Zea mays
  unsure (1)..(680): unsure at all n locations
  Clone ID: MRT4577_51324C.1
aatttccccgttctctcgacagaagttgcttctttttatttgtattgttgtgatcccatagacattagtgaattcaaccaccgagcttactccagttcttgctctgttttgttatattcaggaaatgttaccattgtcttccgatagctcgatatgataatcattgccatggacttaatgtttgacattgttacatttcgacggtcccaggagtcagcaactagacatgaagaaatgcagcaaaagacaggattagtagaggctattattgttgagatccaggacagagacaaaatcgggggttcttacttgcactctgatgcaatatgctgcacccctgagcttgacaaggagaagtcctgtaaagtaggtgaagttattatacggccaaatcctgataatccagactggccaaaaagaattcagacattctttgatggtaaaaatgaagaaactaccatgggaacacagagtgtctctataaacaaaacagggatgtactatctctactttatgttctgtgatcctcaactccggggattgaagattacaggcaggacagtttggcggaatcctcatggttatatccctggaaaaatggccccgatgatgacattttttggtttcatgtcacttgcgtatcttgcacttgngcttctatggtttcttcagtttgtgag

SEQ ID NO: 131405 - DNA, 454 bp, Zea mays
  unsure (1)..(454): unsure at all n locations
  Clone ID: MRT4577_51325C.1
ccggaccggnacggcagttccgactcagagcgaccgctggcttctactccccctcttaccaagtcctcttcgggttagggttacttagggttttctagaggggcgggggctgtggctgatgtgcagtaccgttgcttcgtcggcgggcttagcctgggccaccagcaacgagtcgctggagaatgccttcgcctcctactgtgagatcctcgactccaaggtcatcaccgaccgggtgacagcgaggtctcggggcattagcttcattaccttttccttcgagaactacatgctctgccctatctagatacgtgcaggtctttgaaggaacttctggaatagacaacaaatacacaaccgtgctatttacaggcgaggttgtgaaaactccggtctcactggatatgctggggcgcatttttagtggttctggaaaacctagggacaatggccc

SEQ ID NO: 131406 - DNA, 759 bp, Zea mays
  unsure (1)..(759): unsure at all n locations
  Clone ID: MRT4577_51326C.1
actcctatgggcgattgggttcctcgaggccggccggggcaacttccgattcctaattccaacacttacactagtacatggcttcggatcgtcatgttctcatcctcggcggaaatgggaagatcagccgccttcttacagttatgctgctgaagaagtcatggactgtcacgagtctcatccgtaacccagaccaaatcgaggacgtgaagaggatctccgagggtttgccagggacgcacaagatagtagtgcatgatctcatcaccataactagcaaggagaaggccgccgctgtcattgatgaagtgaagccagattcggtcgtcttcagcgctggacccggtagaggaaccgaccaagacacgatcatccgaatcgatcgtgatgccgccattttcttcgtccaagcctcagttgccaacaaggccatcactcatcatgtgcaagtatcctaccttggcgctcgtcgtgagcaagcgccctggtggactcctgaagattgggagggctggaagaaggtcaactcgaccttcctaggcccttactatgagcccaaggtcgccgccgacgaggctcttgtgactgaaggcaagaagagagagagtctgactgcagtatcggttcgtcctggcggtctaacggataaggantgaaggcggtgttcttctgggccagacgaagcaagccaggggtatgacaactcgagcgtcaacggcgagagtaatgggcgttggtgttggaacaggagcatgtcaa

SEQ ID NO: 131407 - DNA, 461 bp, Zea mays
  Clone ID: MRT4577_51327C.1
ttttattaacaagtcaacacgttatatatcaacatacgctagaagcttgggggctttgcccaaggcctaaagggcccattagttttcaattatgcaaaaatcaattctaaaatgccgatgaacccaaaacattacttgctttaaatttttcaactttcctacataattttcaaacacaccatttcatgtcacactatgtgaagatccgtgccttggatagtctagttgaggcaatcttgttccattgagtgatagagacacctctcctctccacaaaaccgaagacaacatttacagcattgatatccaaatctacgaggaaacaactcgacctttttacaaatgaagaatctgcaagaagctttgaactagttctacactaatgttcttgggaaatggaaatgtgatctgccctcagatgagaatgttaccttgcagcatcctgagcacctgagacattc

SEQ ID NO: 131408 - DNA, 1512 bp, Zea mays
  Clone ID: MRT4577_51328C.1
ctgtgcggcgctcgagccggccgggcggggagaaaaaaaaaaaaaaaaaaaattgggacctcgaggccggccgggacagaacagcccgtcgcgcgccgctgcgttgagccaaggcgcaatggcaacctccacctcagttcccgtcctcctgctcctcgccgccgccgccggcctcctcctgctccccggctcgctggcgtggcagagcagcaactgtgcaccgggcgcgcccggcagtggctcgccgacgtggccttcacccggctccggctccggcggcggccacagcaagccgcccaagcaccaccatggcaagccgcccaagtgcccgccgtgcacccctccgtacgtgcctccgacgcctcgcccgtcaccgccgtacgtgccaccatatgtcccgccgacgcctcggccatcaccaccaccgtacgtgccaccatacgtccccgtcccgccgacgcctcggccctcaccgccctacgtgccaccatacgtccccgtccccccgacgcctcggccgtcaccgccgtacgttcccccgacgccacggccgccgactccgccctacgtcccaccgacgccgccctacgtcccaccgacgcctcggccatcaccgccgtatgtgccaccctacgtccccccgacgcctcggccatcaccaccctacgtgccaccgtacgttccgccgacgccgccggcggtgcggacgtgcccgatcgacacgctgaagctgaacgcgtgcgtggacgtgctgagcgggctgatccacctggtgatcgggcaggaggccaggtccaagtgctgcccgctggtgcagggggtggcggacctggacgcggcgctgtgcctctgcaccaccatccgcgcgcgcctgctcaacatcaacatctacctccccatcgcgctcaacctgctcatcacctgcggcaagcacgcgccgtcgggcttccagtgcccgccgctctacgactgatgaacaccaccaccagccaacacttctatacgcgccgccatgcatgcatgatgtgatggcatcctgtgcaagctagcgctagctagtagtagcatgtctaccatttgctccgtgatttctctagttcttgctctcgcgagtatgcgtacgtaatgcgttgcttctcgtcaggactcgggaacttttccaactccgatgctaagcgtgtagcttgcttaatcagtcgatgtaccatgttaatcaaaaaaaaaaaaaaaaaaaaaaaaaaaaaaaaaaaaaaaaaaaaaaaaaaaaaaaaaaaaaaaaaaaaaaaaaaaaaaaaaaaaaaaaaaaaaaaaaaaaaaaaaaaaaaaaaaaaaaaaaaaaaaaaaaaaaaaaaaaaggggggggcccctttaaaagaaccaaatttaactccccggggttgggaacataaaattttttttttggggcccccaaaattaatttacggggcggggttttaaaacgggggggaggggaaaaccctgggcttccccaaataaaatgcttggggaaaa

SEQ ID NO: 131409 - DNA, 278 bp, Zea mays
  Clone ID: MRT4577_51329C.1
gggggaaaattcacaggatggtggattgaaagctgggctcgtgtatgacaatgagaataggggtggcttggttttaatggctgtaagctgaggtgccatacgcatatccgctgttttaatttctaacgtcctacgagaggtgctgtataaatcttcactacatactgatgtataggtgtgtggacttcctacattcttacaacctgtggctgccagtgatggcaatctcattgcatattcctgcctgccatcatttttttatttgctacatttttctt

SEQ ID NO: 131410 - DNA, 392 bp, Zea mays
  Clone ID: MRT4577_5132C.1
agagactcccctaaatttgtgaagcatgaattgaattctaaatttggcatgagaagccaagttgctgatacatgaaactcttctcattgccaatactgatctctagatttacgctacggatgtgattttgatgtcttcaaaggtgctccagatgacttagcattgtcagtctgatcaacatcctttgccttgatttgcttgtgatatttagccagaagttgctcaatagtaacattcgaccttttacccttctgtttatcacgaccttcacctccaaaacatttacatttgggcatacttggttcaccatgccctctgacgcctccggtcttagtagccctttcttatgtctggagtcttccgagtaaccaccccgtgtgaaatatttggta

SEQ ID NO: 131411 - DNA, 918 bp, Zea mays
  unsure (1)..(918): unsure at all n locations
  Clone ID: MRT4577_51330C.1
accanagagtcagagtgcggagggacctcgtcgcaaacctcacttgcccggcccaaccgtacgtgacgctcctcctctataaaaggagacgcgtgcgctgcagtgtgcacagaacagcccgtcgcgcgccgctgcgttgagccaaggcgcaatggcaacctccacctcagttcccgtcctcctgctcctcgccgccgccgccggcctcctcctgctccccggctcgctggcgtggcagagcagcaactgtgcaccgggcgcgcccggcagtggctcgccgacgtggccttcacccggctccggctccggcggcggccacagcaagccgcccaagcaccaccatggcaagccgcccaagtgcccgccgtgcacccctccgtacgtgcctccgacgcctcgcccgtcaccgccgtacgtgccaccatatgtcccgccgacgcctcggccatcaccaccaccgtacgtgccaccatacgtccccgtcccgccgacgcctcggccctcaccgccctacgtgccaccatacgtccccgtccccccgacgcctcggccgtcaccgccgtacgttcccccgacgccacggccgccgactccgccctacgtcccaccgacgccgccctacgtcccaccgacgcctcggccatcaccgccgtatgtgccaccctacgtccccccgacgcctcggccatcaccaccctacgtgcccgatcgacacgctgaagctgaacgcgtgcgtggacgtgctgagcgggctgatccacctggtgatcgggcaggaggccaggtccaagtgctgcccgctggntgcaggggggtggcggacctggaacgcggcgctgtgcctctgcaccaccatccgcgcgcgcctgctcaacatcaacatctacctccccatcgcgctcaacctgctcatcacct

SEQ ID NO: 131412 - DNA, 1450 bp, Zea mays
  Clone ID: MRT4577_51331C.1
cattgggacctcgagccggcctggatgactcctcgaggccgccgggagaacagcccgtcgcgcgccgctgcgttgagccaaggcgcaatggcaacctccacctcagttcccgtcctcctgctcctcgccgccgccgccggcctcctcctgctccccggctcgctggcgtggcagagcagcaactgtgcaccgggcgcgcccggcagtggctcgccgacgtggccttcacccggctccggctccggcggcggccacagcaagccgcccaagcaccaccatggcaagccgcccaagtgcccgccgtgcaaccctccgtacgtgcctccgacgcctcggccgtcaccgccgtacgtgccaccgtatgtcccgccgacgcctcggccgtcaccgccctacgtgccaccatacgtccccgtcccgccgacgcctcggccctcaccgccgtacgtgccaccatacgtccccgtccccccgacgcctcggccctcaccgccctacgtgccaccatacgtccccgtcccgccgacgcctcggccgtcaccgccgtacgtacccccgacgccacggccgccgactccgccctacgtcccaccgacgccgccctacgtcccaccgacgcctcggccatcaccaccaccgtacgtgccaccctacgtccccccgacgcctcggccatcaccaccctacgtgccaccgtacgttccgccgacgccgccggcggtgcggacgtgcccgatcgacacgctgaagctgaacgcgtgcgtggacgtgctgagcgggctgatccacctggtgatcgggcaggaggccaggtccaagtgctgcccgctggtgcagggggtggcggacctggacgcggcgctgtgcctctgcaccaccatccgcgcgcgcctgctcaacatcaacatctacctccccatcgcgctcaacctgctcatcacctgcggcaagcacgcgccgtcgggcttccagtgcccgccgctctacgactgatgaacaccaccaccagccaacacttctatacgcgccgccatgcatgcatgatgtgatggcatcctgtgcaagctagcgctagctagtagtagcatgtctaccatttgctccgtgatttctctagttcttgctctcgcgagtatgcgtacgtaatgcgttgcttctcgtcaggactcgggaacttttccaactccgatgctaagcgtgtagcttgcttaatcagtcgatgtaccatgttaatcaagtgctagccctttctctgctctgtcgtcgaagttcttcggtcttcacttcttgatctgcagatgatatatgaaaacgttatacgaaatggaatataatattctatcttgttgacaacgacagactctggcactgcgaagtgttgcatgcagaacttttatatgaataccaaagttttttttttgcctaaaaaaaaaaaaaaaaaaaaaaaaaa

SEQ ID NO: 131413 - DNA, 350 bp, Zea mays
  Clone ID: MRT4577_51332C.1
gcggccggttgtggccaaatgggtatcgaaatattgtgcctaatcttcatcttcctcctgctggggcgcgtgctcaccaggagctacgccgtctccccatcgtcgcccgccatgtccgggtcggcggaactccgtctttcaccggggccatggcagctgccgctgatcggcagccaacaccacctcctgctgtcacggttcagcgacctgcctcacggggcgctgcgcgagatgtccggaacatacggaccgctcatgctgctccgcctcggctccgtgcccacgcttgtggcctccttcgccgaggccgctagggaggtgatgcgcattcacgacgtggccttctgcag

SEQ ID NO: 131414 - DNA, 659 bp, Zea mays
  Clone ID: MRT4577_51333C.1
agcttcgactatgggtggagcaagaagccgggcgcggccatgggcaccagctgagatgcgcacggtaagggtcaagctcggcagggcaccggacttgggagcaggaaagcgccgagcgcgggatggaacgcgcgcgcagggaagaacagaggcgctggagctgccgaacgacggcgaggtcgcggccgagccccaaggagcagtgtgcgcggcgctgggagcgaagacggccagagggactcgcgcgcgacgcaggagcagatgagaaacagaaaccgggctgaagaaagggcgagctcgtcgcggccaataggggagcagcgcgcgcgtagactccacggcgagcagaggcaggaaccaggggcgcggctggcgtccatgggaggtagagggagtcggctgccagtgagcagggaatagagagagagagcagagaagggatgcgctggccgagcaggatggcggcgagcagggcaagcatccagggagccggacgccgagccctagtcaccggagcagggagctgggcgaactccataggcgagcaggagtcgagctcgcaggggaagaggctaggggaagccgagcggtcgagctggaggagctccggcgagcacagcagggagaagacgccactggagcaccgcgcgctgggactt

SEQ ID NO: 131415 - DNA, 334 bp, Zea mays
  unsure (1)..(334): unsure at all n locations
  Clone ID: MRT4577_51334C.1
ttatanttttttttaactttggggccagaccacctgctgttactggaccggtatcaggaaaatggcgccaaaggtttttaccgcgtaaccttcctggaccttacacggagttggtattactactaaatgttgaatgctgggtaactaaagggaagcaacccgggcttttccacgatgcattacagaattacatttaccagagagcttcggcttttacccccgtgttcaggaaggaacgacttccttggcccccccgatttgaacgggagcagcccgttgtaaatgaggcacccgccccacctaatcttggtggagggggttacaccaaaagctg

SEQ ID NO: 131416 - DNA, 206 bp, Zea mays
  Clone ID: MRT4577_51335C.1
cttctaatactttcttctatatgaaaaaacacggaaagacaccaaccagcgaagataactattggagaacaaccaacagccggcccacgggttccatacatacacggagtacggacagcacctcgtaatgaagtcacccagctagattcacaccaagcccgtctttatatctgcacacctccggggcccgtgaaaactgagacgcc

SEQ ID NO: 131417 - DNA, 762 bp, Zea mays
  Clone ID: MRT4577_51336C.1
cctcgaagccggccgggactatcctcccattcccctcgccaagccgccacgggctgactttccctcccgcacacccgcgaccatacaggcaagtcaggcatacaccaacaacgctcgtcgtgcacctcgcgcctcaggtcaccccaccaaattcctcttgatacgccgaatttcctttgctaattctgctacctcctgtcgctaagccaccatattcagtctaacccctgctctgagctcacctgattggcggctccgttcggcctctgggcctgggtgtaccgactaccgagggctctttcgaaatgtcaattgggtcgagtttggtgggctacgtgaagcatggatgaatttcccggctggaagcgggaggcggcagcagcatccggggccggagcacctgtcgccgatgacgccgctcccgctggcgcggtaggggtcggtctactcgctcacgctcgacgagttccagagctcgctcggtggggccaccaaggacttcggatccatgaacatggacgagctcctccgcaacatctggtcggcggaggagacacacagcgtcacagctgcggaccatgccgcgcgggcgccgtacgtccagtgccagggctcgctcaccctcccctgcacgctcagccagaagaccgtcgacgaggtctagcgtgacctcgtgtgcaacggtggaggaccctccggacgagctgtggcgccgccccaccggcccaacggcagccgaacgcttcgggagatcatgctgga

SEQ ID NO: 131418 - DNA, 287 bp, Zea mays
  Clone ID: MRT4577_51337C.1
taccctctttaaactttaaatacaacatctaactgtgatccggctacctttctttgttttcaaccacccactccttcttaaacacccttaacaatcccgccttatacatcttcaactaccaccccaatgtattctccattaatcaccacacctaactctatatccccgaactcaccatccactagcacattatctcacatttactatacatccttttcatcaaccactccttcttactgcactccaagatcaacatattcacattcgctctcaatctctccaccaat

SEQ ID NO: 131419 - DNA, 433 bp, Zea mays
  Clone ID: MRT4577_51338C.1
caggtcgggggaccggaaatgggaaaaaaaatttcggggggccaaatgggaaacttttttggggaaggggccaatcccccccccctaaccggaaaaacacccccattttgttaaaaaattggggccccaagagaggcaccctaaacaaaactttttaagtaacaacggggtaacccctccggggccttacaaaaaaattcactttttcccaagttaggggtccccggttccttttcaaaaaccaaagaaaaccaggcttaggggccctttctttttaaaagggttcaaagttttggtttttgattggcaaagggggaaatttcccagttcctgaaccaatcccccccttaaaataagccggggggggaaatgccccaatgcttacccccccaaatgcccggggaggggggatttttgggtaaaattccttttg

SEQ ID NO: 131420 - DNA, 686 bp, Zea mays
  Clone ID: MRT4577_51339C.1
aggaccggatcctcgccaaacgtcacgcacgctagcagcacagcaagagccagagccatcccctctcctcgctacgctacgcttcctcggcgccgagtcctgctcgtgctcctgcacggtcggccggaccggccacgcggcgcgagctcgcccaagcaggcaaacgctagaccggccgtcagctgcgaacgatgagtacgtgctgcagtgtgaagagctgctgccgactaagctacaccgatacctaacttgtacgaaggaccacacgctcaaggggattgcgggacaccaggacctacatcgagctctcaggtacgatgaccgtacacacagtctatgtgggaatcactgtcgagccccaagctatgactctgaccgtgttactggagaggacgcacatattagctggatcttatatatctctatggtgcccatcctccgccaaggtgaggagcgcgaggcttgatgcaagctgaaaccagaaatacatgagtgggctgagcggcattcatggtggacttcatgccacagatgcgagcgaaatcagcctcaatgagatcaaggatcggtcacgctaggcgcaccgtcatcgcgagtttcatgatcacgcatcatggcctcgcctactactgaggatttgtatgccattatagacttggtgctgcgaaagactgctttggtgattt

SEQ ID NO: 131421 - DNA, 905 bp, Zea mays
  unsure (1)..(905): unsure at all n locations
  Clone ID: MRT4577_5133C.1
cgggatttaggtgacactagacatacatacgcagattgtatcagccatatcttgtaagtggaagtatccggatgcaatggcaccgagctggcctaattgccttatgggagttctctgaagagcatcttaagcaaagaagtgggcaagatgtgcccctacagcaagtagataatcccattgagaagagttggggcgtcatggttgtaatcaagtctctccagtttgtagcaactgcaattgatgttgcactgaaggagacttcacagtacggaattggtgtcagaagtgtctctaacagtaaccatgtacattctaatcaaagcaatatgcttcatattgctttggttggtatcaataatcagatgagtactctgcaagacagtggtgatgaggatcaaacacaagaaagggtcaacaaactattcaagattttgaaggataatactattacatcacatcttaatgtctctagtgttaaggttgtcagctgtattatccaaagggatgaagggcgtccaccaatgcgacactccttccaatggtctgttgacaaactttattatngaggaggatccaatgcttcgccatgtggaacccccgttgtctacattccttgagctggaaaaagtaaacttagaaggttacaatgaagtaaaatacactccatcacgtgatcgtcagtggcatacgcgtacgcttatcaagaacaagaaagatcagagattaaatgaccagaggatgttccttcgtaccatagtcagacaaccaagtgcaacaaatagtttcctgacaggtaatattgacaatgaagtagggcacacacaagcttcgtcatcgttcacatcaaacagcattctcagatcattgatgggagcactagaagaaatagagctacatgctcatag

SEQ ID NO: 131422 - DNA, 365 bp, Zea mays
  Clone ID: MRT4577_51340C.1
atagaaaccaaacagcatgccattttttgggggggtccacacatcacataacagcccaaagcacagtcaaagaaccactcgcttctattacaaaaaaggctcgcaaactcactcactacctaactaaatggcacattccaacagctgtctggcccggatcaaaacccaactccagtcgcattcaggggccgagggggggccttccaaaaacaagcattgggggccaaaccccccgatgaacgcatcggctttgacttgcaccttttaaaaacaaaaggagcataggctgccccattggtaactgggggaaactccaacttaaacttttgttttggggaaactggtttgagggggggggtcttttg

SEQ ID NO: 131423 - DNA, 133 bp, Zea mays
  Clone ID: MRT4577_51341C.1
gatgttcaactgtgcaagatcttttagtccaattttagctcatgatgtcaccacttcttgatcccatgctatgtctacagattgtgtaatatgctatctttaaatctggttgcgtggactacagtcgctataa

SEQ ID NO: 131424 - DNA, 229 bp, Zea mays
  Clone ID: MRT4577_51342C.1
cgtcgacccactcggctttgtctattggcctgaaatattcagaggtgattgctgggtgctggtttcatgtctgctactttgtgctgtaaattcggccacattgaaacttgcagcgaggtctgatcgtgcggatattcctgtgcctgggctgtgttgtgaacttattttacaactgatagtatttacatctggttgactatcagaaaacacactttcatggggtacctca

SEQ ID NO: 131425 - DNA, 364 bp, Zea mays
  Clone ID: MRT4577_51343C.1
aaaccggggggagaaacaaaaaccccccctttggcacaaacatgggtaattttaggggacaacgccaactcaaaatttggacttgcctatgcaaggcaaggggaaaaaaaagacacacaggcctttgggaggataaataaatccacgggcgtacccccttttcgatccaaaaaaaatgaagttgcatagcatagccggtgagcttaattgccggggaaaaagttgggggcaaaggcccatgcgttggtggtgactgggccaacgaagtggacagggggggtctcgaggggccccttgccgggaacaatggcctggacaaagaacccgacctggaaaacagggggggggggcgtcctggggctcc

SEQ ID NO: 131426 - DNA, 694 bp, Zea mays
  unsure (1)..(694): unsure at all n locations
  Clone ID: MRT4577_51344C.1
cnncggccgggaaaaaanaaataccaaaaaaaaaaaaaaaaaaaaaaaaaaaaaaaaaaaaaaaaaaaaaaaaaaaaaaaaaaaaaaaaaaaaaaaatttttctgggaaaagcccaaaaggggcgggacccaaattcaattcaacttttcaaaatttttcccgaagggcctttccggattcccattgaaaatttcccttttcttaatttttggaaaaacgggggctggcccccttccagttggggggggtccgaaggactggaaactttttggccccccaactattatcttccccgaacccggttttacaaggcccaacaaaattggaaacccagttggcccccccgggggtgccccggacaattatctgaaaaagaaaaaaggcaaaacaaacccgcttcccacaaaaaaaaattttgaaagggctacaaaggaaaaaaaaccttctaaaatggtcaggcccgaaaattccctggaaaaaaggggtgggactggaacagggggcccggcatcaaaaactgccacaattgatgaagaaacccctttgaacccttttggaccccccccctaagttacccggacccaaaaagggaggtcccggaacaaaaaaccatgggggacccggtccgggggttgacccccaaaaatttttggtcccgggaacccgaaaaaggggccggtataccgggggaaa

SEQ ID NO: 131427 - DNA, 424 bp, Zea mays
  Clone ID: MRT4577_51345C.1
aagcacgcacgcctgcacgagccggtactgaattatattgaaggttcaaccattattttagtcggctggcagactatggtcatggacgactttagagagagataatcctttgagagagtaactacatgacaacgactgcacgggacctaaaccaagaccaaatgtaacacacgcgcgcactgcagagctggtgaaacaaaataaggggatcggaaccaaccatcggcacctaagtggatctgatcaatgatgggagcatcctggatcacggcaaccaccacacggacgcccgccattgctgcacagacaagccccgctgatgacgcgttgctcttgaaagagcctagggccttgatggcaccagcctggaggatgtactgtggagagaaggcctctatggcagccacaacaagggggcccacac

SEQ ID NO: 131428 - DNA, 346 bp, Zea mays
  Clone ID: MRT4577_51346C.1
aaaacccaaacaggaaatgcaaagggtttcctaatttacaacagcccatggtggccccaaaatttacaggggtggaaaatttcccctttcctcctggcgggccaaaaacaaacagggggggaagcaaaccttatttgggctttgcatcatgggggccggttgctcccctaacaggggacatttccaaaaaaaaaacaaaaaaaaaggggtaagcttggctcgaagatgaagggtccccccgggggacgggagcaaacgaggaaacccaggctcgagcattggttgcccccttccttaaatctggtgccctgttgctcaaccccagcttggtgcacagcctccttac

SEQ ID NO: 131429 - DNA, 490 bp, Zea mays
  Clone ID: MRT4577_51347C.1
ggccgcttttttttttttttttttatttgttttttttttttttttgtttttttttttttttttaggcaatcatgagtgtgtttttattaagttggtattttcccatacaagccagacacggacaaaggccgcgcataaaaacgaagaaagggaaacacaactaggatgaagaaaggcacactagacaaaagcaaaaactaggcagggccaaaaataagtaagcaaagactacaaactggacgaagcaagaagctccccaaaatgggaaggcccacaatatagggcacaagaataaacagggcccttacaccccgggaagcctgaagccccccaatcttgggaggcccagcctgaactaggaaagaagcaacattctcgctatgaaccccgagaagcggaatgacctgtcctagcaatgggacccgaactacagtaccattgcagcataattccctcttcacatcctggaggatctcgcaatacgctgaac

SEQ ID NO: 131430 - DNA, 193 bp, Zea mays
  Clone ID: MRT4577_51348C.1
cgcacaggcagcagcacagcgatctgccttcggcgcgggtcccatccagcccagagcagcagcagctcggtgccggccggcaaccgcagctggtcatcaggtctctgggcctcctcctcctcctccatgctgcctcaacagtccccgtggctgctccgcccgaatcctcacaagtagccccgctcgccacctc

SEQ ID NO: 131431 - DNA, 431 bp, Zea mays
  Clone ID: MRT4577_51349C.1
cgcgtccgcggacgcgtgggcggacgcgtgggtgccgctggagagagagagagagaggttcttctaatgcccttctgttctgtcccgcccccgcgccgcatttttttttcatttttttttaccttgcgtgacgcttcgttttcacagtgcggcggcggcggctgcttggctcgttgctcctcccattctgctcagctcagcttctgatgagttcgcctttgccgctgctagttaccagcatactagaccactgactgatcacgttataaggcttccgcgcaggcgagcttctgccgccttgtcgggtaaccaaacggacctcgccggccctctccagtggtcacatcacatcacatcacatgctcgaggtcgtcctggacatgacgccgtcgccgccgccgtcgtaggcgcggtttcaccaggggtcatca

SEQ ID NO: 131432 - DNA, 229 bp, Zea mays
  Clone ID: MRT4577_5134C.1
attgatacacactcccatcatattttgctaacaacaacctaacaacaatgggtaccaagatattattccttcttgcgcttcttgcgctttttgcgagcagcaacaaacgcggctattattacacacagttcactagcttctaatcaatttatatcaagatcaccgctccagatacttcaatggcctttgaacacctccttcgtggagccgatgcgcttcaacaagcgat

SEQ ID NO: 131433 - DNA, 658 bp, Zea mays
  Clone ID: MRT4577_51350C.1
ctcgaacccggccgggccgggtacgccgaagcccgcccacacccacgtgaggagaggatatttccgccgccaggagagaaggtgatggccatcaccttggtgcttcacctgcgacgccgcatggtgctgacccacgcccccaccattgcatagcctagtagtgtggttctggagaatcttcagtgtgcacggatcctgtgttcagtcagatgagccccatagccaagatcaccgtcgttgtacgcgatgatgggttactgcggcaccgggcttattgggtggtcctggaaagtcaccataccactccgcacctcttcatggcctccccgtgtgaagctatcgaccaaagcgccaccagtttcacgccggagttggtgctccaccgtgacgcctgcttgctccgcgggctggctactctgcaacacattcgcagcgaggtttcgagtcacctgaagatcaccctggtaactggaatctcaagtgccaggtcaagaacaggtaccacaggatgaggcgcatggaggatgctgtgatgagttcgtgagagatctaggccgtcgtctcccagtcaactttgggttgctggatcgtttcctcatatgatgtaattatttaattatttttgcaaaaaaaaaaaaaaaaaaaggcccctagggcc

SEQ ID NO: 131434 - DNA, 1995 bp, Zea mays
  Clone ID: MRT4577_51351C.1
aaccgaccagaggacggctggaaagggtaacttcgcctcctgatttcctcccccgcccgcgctcacccggtgaccgcatctcgggcgcagccacctcccaatctccgatggcgctccaaaccctaaacccctaccggcacgcggcggccgtctccccggtcccgtcgcccgtcccgcaccgcggccacccgccgccgcatgccgtcctgcacctccctccccgccgccgcctagcgggcggcgccgcccggccgctcgccgtcgctgccgccgtctcgggggccgtcaacgaggccaggaggcgtggggttcctcaagagggcggggaggacgggaggaaggacacggacctcgccacgctcggaaacctatgcgtcgacgtcgtgctcagcgtgccccagctcccgccggcgcagcaggaggagcggaaggcctacatggagcgactcgccgcctcaccgcccgatcagaaattttgggaggctggtggaaactgcaatttagcatttgctgcagctaggcttgggcttaactgttccactctgggacatgtaggagaggaaatatatggaaaatttcttcttgatgtgcttcaagcagagggcattagtgttgttgggatgcttggaaataccaatgctgctgcatgccgccaggcctatgaaacacttctatgctgggttcttgtagacccatttcagaaacatggtttttgcagccgtgcagacttcagtaaagagcctgctttcagttggatacgtaaactcccagtggatatcaggacagctattcatcactccaaaatactgttttgtaatggctacgcttttgatgagttcttccctgatgtgaacaaatggtttatcgacgctcgttgtggatgttcctattcccggagtagtttttgaactttcgccgggaaatctctcttacatgggaacttggatgagcagagagcacttgagcatgcactgaggcttagtgatgtcctcctcttgacatcagacgaggctgaatctttaaccaaccgcagaaacccagttcaggctgggcaagagttgctaaagagggggatccgcacaaaacaggttgtcatcaaaatgggctccaggggttcgatcatgatcactaagaacacaatatcctgtgcgaatgctttcaagatcgacgttgtggacacagttggatgtggagatagctttacggctgctatagcttttgggttcctccatgacttgccagcagttaacacattaaccctggcaaatgcagttggtgccgcaaccgctactggctgtggggctggcagaaatgttgctcgcctggataaagtactacagctcatgagagaagccgatctcaatgaagacatcacgttgtggactgagctgactgaaggaaactctctccgtatagaggtctcgattctgtctgggatagcaagaaatggttttagtgagaacattgtggctgttcctgttaccaaagtggtttctgaacttttgccaatgttcgaagcagtgccagtgcgaagcgctgtccaggcttgattccatactgagctgactgaaggaaactctccacgctgaggtctcaattctgtctgggatgacaagaaatggttttagcgagcacgttgtggatgttcctattaccggagtagtttctgaacttttgcctacgttcgaagcagtgccagacgaagggctgtccaggcttgattccatactgaatagttgatggttgtattcattttgtcattcacatagattcttattttacctccacgattacacgctgttttctggtgatgagtggtagttgggggctagcctccaggtaaagatactttctgaacagaatatggttgctgaagctattgatagctgtacagttatggccgcttgggatggtataccatctggagttttgtgctaacatgcatgtgatttgacgctgcaatgtgtactagcaacagacttggttttcttggtt

SEQ ID NO: 131435 - DNA, 175 bp, Zea mays
  Clone ID: MRT4577_51352C.1
gacccacgcgtcccaatctcaaactttaaacccactctacatttccaatgataaccctccctctgaggctagaatcttctcataacatgccatcatcatctaccaccctggacacatacacaactcctactcccaagacccattctgtcacacactcccacatcacacctcaact

SEQ ID NO: 131436 - DNA, 651 bp, Zea mays
  Clone ID: MRT4577_51353C.1
ttaaactcccagcagatatcaggacagctattcatcactccaaaaactgttttgtaatggctacgcttttgatgagttcttccctgatgtgatcgcatcctctattgactgtgcgatttgttcggggacagcagtgttttttgatcctggtccccgtggaaaatctctcttacatgggaccttgggtgagcagagagcacttgagcatgcactgaggcttagtgatgtcctcctcttgacatcagacgaggctgaatcgctaaccaacatcagaaacccagttcaggctgggcaagagttgctaaagaggggaatccgcacaaagcaggttgtcatcaaaatgggctccaggggttcgatcatgatcactaagaacacaatatcctgtgcgcctgctttcaagatcgacgttgtggacacagttggatgtggagatagctttacggctgctatagcttttgggttcctccatgacttgccagcagttaacacattaaccctggcaaatgcagttggtgccgcaaccgctactggctgtggggctggcagaaatgttgctcgcctggataaagtactacagctcgtgagagaagccgatctcaatgaagacgtcacgttgtggactgagctgactgaaggaaactctctccg

SEQ ID NO: 131437 - DNA, 401 bp, Zea mays
  Clone ID: MRT4577_51354C.1
atgcacgcacacgtaacgctcgctattaatttggagggtgtgctgaatctttcttccacccacgcacagaactgaagggcaactagtgcactgtgcctgtggcagatggcatcgacactggtgaaggcgctttgacgcctgtggatgccactggcggtgatgggtggtagctgcgttggtggtgtgctggaataacgcggttgctagtggatgctgaagcatagaaattactataaggtcggcataatgctgaataaacgtttactcgggcgttgataatctagccgtaacgtgagaactgccacgtggaactgactcactagctcaccgaactagtatgtgggatgggtacaactgcatcttgacgggatatatattaatgtgaaaaattcagctgccta

SEQ ID NO: 131438 - DNA, 1319 bp, Zea mays
  Clone ID: MRT4577_51355C.1
ttgggtacctcgaggccggccgggtaggtgacaataatatttttctccgtccctcgtcttcaccagtctctcttctctgtcgcgtttcctccgtgcttcccggcgcgaaccctagccgagattagattggaggcgagcgccatcaccggaggaagagggcgacacgatgctgcgggttgcgggaagaaggctctcgtcttccgtctcctggcgccccgccgtggcggcggccaggggcccccttgccggtgctggcgcccccgaccgggacgacggctcggctcgcggccggagccagacgcggttctccatcgactcccccttctttgtcactgccaggggtttctcttcaactgaaacacttgtcccacgaaaccaagatgctgcgtcgaagcctcgagagcagagactgcagaactgaacatcccaacccaagtcccgaaccctccccaccactcccccgatctccgccactccaaaatgtggcgccgccaccacctcctccggctacttccgcctccggccaccgccgccaccgccgcggccccttctcacttcctgcgccacctctctacctcaagcaccccgaccccggccgcctccctggcctcgtccctcgcgtcggcgctcaccgcgctctccacgaccccgccccccgccaccaccccggacgcttacttctccctccacttctccgacgtgcggcctaccaacgcgctcctcgccgaggcgctcgcgctctccccgcccgccacctcccgcgccgctgccgatctcttccgcttcctcgtccgccgccgctcgctccacccctccgacggcgcgctcgcgcccatcgttcgccacctcgcccgccgccgcgacttccccgccgtgcgcgcgctcatccaggagtttccaaccgctctcgggcccaccacgctcgacgcctatctccagcagctcaccagagccgggcgcccaacggacgctgtcaaggtgttcgacgaattgccggagcagctccgtaaccgcgaggctctcactttgctggtctcctcgctttcttccgagggattcccctcgcacgcagagcgagctgccaagaaggtcgccagtgagatcttcccagatgataatatctgcactttgcttgtatctggttatgccaatgctggtaagctcgaccatgcgctaaggttgattggtgagacacgtacaggtgggttccatccaggactggatgcgtataatgctgatcttgattgtgtctgccggctctgacgcaagaaggatccactgaggacgccaatagaagcggagaagctcttagttgacat

SEQ ID NO: 131439 - DNA, 603 bp, Zea mays
  Clone ID: MRT4577_51356C.1
cgcccccgctcctctcgtctctatcttcgcctcttccatcgcaggattcagcggccatgggcggcggcaacgcccagaagtccaagatggcgcgcgagaggaacgccgagaagaacaagggcggcaaaggcagccagctggaggtcaacaagaaggccatgaacatccaggtatcttcctcctcttgcttgccctgtgttcctgtcgagattttgggggttttcccagattcgcttgggtttcaggctactccgtctggattcggcagatccagccacggcgcgattctcgaaccctaattgtcaaccatggctatgcctctagttttagggttgatttggtggtggatcccgaatcaccaaatcaaaccttatactgctttatatatgtatgggcaacgacagttcttctgttacacatgcaacatctgatccatagatacaactatggtttgttaggttttttttataaaaattattgagctggtggtggaagtgtttaagtgttagatatgatctacggttgtatcacgatctaatgtatcagatggtttgcttacacgcttgaacagaagaactgcttgtatagcagtcattgccgaag

SEQ ID NO: 131440 - DNA, 309 bp, Zea mays
  Clone ID: MRT4577_51357C.1
acactatagcagagctatgacgatgccctgcacaccgtagtaagctcgctatatagtagacggccgccctttttttttttgtttattttaaagcacgcaagttctgattgaaatgtttataactacactaatctacaaaaaatttatgcgcacggtagaaccccatgttcaaggaaatactgtacttacattattcatgtaaactacattttttttctattaccaacagcttcttacatagtggatgggtgacagtttcaatggaaccctataccaatccactaaggcagggttcattgaataatggaa

SEQ ID NO: 131441 - DNA, 407 bp, Zea mays
  Clone ID: MRT4577_51358C.1
actctcgtatattagtcgtgatcgagtgcctctgtcgtcgccagatgtttctaacggagttccatcggcctccgcccgaggctacatcgatgctccaagaacaacactcgatatgctcgactccccggtagaacgtcgagaaggtcaggcgacacagaacaagagactcgtacagtcgcccagctccttcttcatggatgttaagcgccaccggtgattcagacataaccacggttttcagccactcccagactgatgatgtgaggcatgcctgccagactgtcctctgtgaacccacaggaggaaaggtaaggctcactgatgtgtgttctttccgcaggaagggagactagagcgaatgcgcccttcaagccttgctctatgcccacatactaacgccccgaact

SEQ ID NO: 131442 - DNA, 252 bp, Zea mays
  unsure (1)..(252): unsure at all n locations
  Clone ID: MRT4577_51359C.1
tcggtaaaagataccgaaacgacaactgtttgtttctatctggccaggtgtanggcggaagggtcactggtggatagatggcagattgtgacggtacctgactcggactgcaccattcaggatatggacatttttcatgataatttagttctctttcttcgaaagaatggtactcctcttttttgttccatcagtatgccaattgatgttcaggagccaaaggaacttgatgatctcaacccaatgtttttt

SEQ ID NO: 131443 - DNA, 384 bp, Zea mays
  Clone ID: MRT4577_5135C.1
atcccatgctgccccacggtgcatgactacgcgataatccaggtgctaattgaagctgagacatgggcggttccagggggaattctcacctgcgattgaattgatggcgagcctgaccacggaattgagcagcacacggcggagacgacacggcagcgagcaattcccccggccccgatccctcctctgtttggcaatggcgacatggttatctgattgtttggggtagatctagattggttgggtctaactcctgcgctagccatgattatatagggcaaagtatttcagagtgttgaggggtattcgatcgaggagattgagtccgtcgtcccggacggaaaacccggcgcggataatgcaacggccaaggggcccaacggc

SEQ ID NO: 131444 - DNA, 418 bp, Zea mays
  Clone ID: MRT4577_51360C.1
gctcgatgtagcacgctggcgtggcggtcttgaggcaccacgctcacggacgcgtggctgcgacgtgataagtacagtatagcggaagctaagtagcactctcttggacagggactgacaggacaaccactggtaaacgcactcgagatccatacacaaacaaggttggcagatatgggatgtaggtatcactggatagagcaggacatagggctcaaccgaacaaggctttgctacaacgctgcagactgtgctgcagaatgatgcacgcacactctgagacagatgcatatcaacgcatcatatgtggcatgtacacttcacaatgtcgtccttacagttgaataggacataacgcgccgctcctacatgcggtatatcggcctatctatggaacaattatccatatgcctcaata

SEQ ID NO: 131445 - DNA, 529 bp, Zea mays
  Clone ID: MRT4577_51361C.1
ggggggggggcccgggacacgacctaaaaatttaaggggggatggttttacctgacacaggaaaaccttctcggtaaaaacaaccatggaaaatctgctttttactggtacaagaagccaaaacttgcgctttcacacaggaaaatttcctggtttttagcccaaggggggggaagcccattttcttttgggactccttattagcctccggggcctctgaattatccttggaatcggttgatttcccccacccccctttgaacccggtgggagaggcgaaagggaggggggcaccttgggggacccttggctgttgcaaacagggcgggttggttaatggggaaggggggaaccgccaaccccttgttgtccccacggaggacccagagaagctcagcacccgggttcaggctacgacagtccctgttaaggggggctaacctggggaaccccggggcaaaatgtttataaaccgcttctttggaagggtggggcccttccggattgagaacgaaccgttggttaaaaa

SEQ ID NO: 131446 - DNA, 429 bp, Zea mays
  Clone ID: MRT4577_51362C.1
atggctatggtggagcagcgactggagcggcttgccactagggaaaggaggaggagaggcgctcgcatcgagggactagggaaaggatgggcgcatggcttacttggcgtcgacgtcgcgcgagctgtggatggtgctcagggtcctaggcgatggttattgcgcgtgtggggagggggagaggaggggaaggagcagaggcgctgggcgaggtggttggcatcatgggcgagatgggtgggggaaggcggtttggagaagatgaataggagatgggcgacctggtgggtggggcccacacgcaggaggcggcggcggcgttggatggctccctggctatggcgtgcgatgcgcagctcgggcgctgggccgcgcgaggccgaacgggccggcggggtaggcctgggtggggagcatgggagggggtag

SEQ ID NO: 131447 - DNA, 277 bp, Zea mays
  Clone ID: MRT4577_51363C.1
ctaaggttttttttttttttttttttttttttttttttttttttttttttttgaccccaacaaatgctatataaatggacacccttggatgttccctttaacattcaatctatttgatttaaataatcactgaaagcataatccaacccaagctttggcaataataaacttatttgtgtggagggaacaattgatcacatgccctcacgtattatataaattatattgcaacccaaacagcacgggggtcggcctcggatatgggcgcttatttata

SEQ ID NO: 131448 - DNA, 302 bp, Zea mays
  Clone ID: MRT4577_51364C.1
ataaaaaaacccaaactacgcgtggccaaaagagatacaggggttctgttccaagaaacttctaccattgcaacaaaacaaaacaaagcaaaaagggtttttacctagcagggcttcccattttccttcccgacagaaagggggggcatcctacccctgctggttgtagaccttggtgaggccacacttaccgcattattgggggtcgaagtggttggccattaaaacccccgcgccgcactcggggttgggggactccttgcggaggggggggaccttggcggtggggtcttcaaccttgt

SEQ ID NO: 131449 - DNA, 546 bp, Zea mays
  Clone ID: MRT4577_51365C.1
ggcgtcggctccggcgatctcgggcagcgccactaagtaaccgcatcagtttacgttactcaagcacagtgattagtagttgtatatgtagtggtaggttacagtaggttacatgtaatgattaaccgcggtagtttgtaggttataggggccgattaatcgcgttcgtttctccactggtctctggtgttcgtccaaacatgcccttggtgtttcgctcgtccatcatgcatggcttgccatggttctcggcggatcagtgtaaagatgccgtgtaccatcgacgaagcgatcagctagcctccgttttcccagcaggtggacacaaacacacacgtagtactactgtattcatcaatgtgcggttggatggcgtcgtggtggcaacgcaggtcatgaatggagcagtagtatgcttcctgcctgccactcgttgtctgtctgcaggtgtacaaaatgaaaaggaaaaaaaaaggaaagcccagccgtttcagcagaaaaaaaaaaaagaaaaataaaagagattacaaagcatgaaatataaaa

SEQ ID NO: 131450 - DNA, 215 bp, Zea mays
  Clone ID: MRT4577_51366C.1
cctcgaggccggccgggagaccggtgcctacgccgtccttcactcctgcgtcttgcctcggcgcctaccacgagtaccagaccacaggcggccaggctcccagcctcccatgtccccggtggcggcagcagggtcccaggcccagatggccaccagctctaaaccctaggcgccaaaccaacacgagcagctgccgacctcgaggccgaaggagc

SEQ ID NO: 131451 - DNA, 365 bp, Zea mays
  Clone ID: MRT4577_51367C.1
caacactgaaggccagctctattccctgtacattgataaccgtggggtcagatggatccaagacttgagctcacatggcaaagtgatgacagttgcgccgggaaacagtgggtgcctatacacagtctttccacggaagtctatcgtggtggggattaatgcttcgacaggaaacatttcttggacgcagaatactggcccaatcagtaatgagaaaaacttaccaactgtcgattccaacggttggatgtcaattggttcgctagatggagccctctactcgatttctcctgatggtgagatgagaaagtttcttggagaaacagcaaatggttcagtgatccatgtaggtccagttcttgact

SEQ ID NO: 131452 - DNA, 238 bp, Zea mays
  Clone ID: MRT4577_51368C.1
gtgctcgttgcttggcatagcaatgacgctagtcattgcgtcgccttcgcgttgcagcaatggcgccacatgggacttctgtttgtaggcgagagcatctggctgatctggagctcagtgagggtggcattcagcacgagctgctgccccacatagagaagccgcaaatcctgaccatacccggaattggggtcgcacaagtgaggagctatggggctagggttatggtggagtgcag

SEQ ID NO: 131453 - DNA, 323 bp, Zea mays
  Clone ID: MRT4577_51369C.1
gccatatccatggtcggtgttcccacactctcatgttctgatttgaagatgctatgtaagttgtcccatttcatatgaccgtgcctatcctgagatgtcgtgtgcttctgttagatccatttgcaaggatgaattaacttccgtctttaggacgatttaatttagctaatgttgtcatttgtctcccagatcagaggttagagtttggccatttttcagcttgccggatgggggcaaagtcatggtggcatgctacaaccatgtgtgtgggtacagacaaattatgtacataatctgaggttatgttgggctaattattagct

SEQ ID NO: 131454 - DNA, 155 bp, Zea mays
  Clone ID: MRT4577_5136C.1
ctctgtgaccgcactaagctctgactcggctcgagaagtaatatggcttggtcttgtgctcgttccgatgatcatcaccctcgctgccgtcctcttgtgcgcgtgggcggaggcgcgcccccaccacagggatgacagacagcagcaccgacatt

SEQ ID NO: 131455 - DNA, 677 bp, Zea mays
  Clone ID: MRT4577_51370C.1
ctctgaatccaaataaagcaccatccccccattttctatccattgctcacttgaactagagggatggctaatggttgccccacgactaccacaagctccctgctcctcttcttccttctttcttacctgctcatcggtcatgctctctgcagccaaggccacaatggcagaacatcaggtgctgattatgtggtgcaatatctccaccaggaattacctggtaaacatatagttttgcaggagaccgtcaagggtctaaacaaaggcatattgccaaagtatgcacggagaatgttgatcggctcaattgcgccaatatgcacatacaacgagtgcagagggtgtcgattcaagtgtactgctgagcaagtcccagtggatgcaaatgaccccatgaacagtgcttaccactacaagtgtgtttgccacaggtgatcttcaatgagtaggaggagcttctatgttattgtgtgtcctggagaatagtagtattttcccccgtttttggttctccctctccttttctttctattctttggtttctctgttgaaaaaaggcttctttgtctcatttctattttacaagaggttagctagtagaggactggagtctggaggagcattttgtactttaaaatgcctagctcaggttatggactagtaattttgttaggaaa

SEQ ID NO: 131456 - DNA, 443 bp, Zea mays
  unsure (1)..(443): unsure at all n locations
  Clone ID: MRT4577_51371C.1
gtgttgtgcccgacacaaaaaaagctnggggtgggggtcgntgctgaacactcgagccctccggatgactcgtgttcaatgagccggctctccatgattgtcaaatcatgaaaaagcaggtctaggtaatttaaaccatactccttgtatctgttttttttgttctgaggctatccgtggggggaggggagggattttttttttttctgcagcanagccggancgcagggggggcgtgtacgcccgccggtggagcccctttaacaatgcggccgttgtgatgttgcataggcaggtcctattatgacatgtgaggatcgtgagcagacgatgttagggcagcttaccggtagctgctctcgtcagatgaatgctgcataggagcgactgtctgttatggatgaaccaggtgccgtgcacgaagtgacgtgccatagtgtgca

SEQ ID NO: 131457 - DNA, 759 bp, Zea mays
  Clone ID: MRT4577_51372C.1
gccggccgggcttcgattgctcacttgaactagagggatggctaatggttgccccacgactaccacaagctccctgctcctcttcttccttctttcttacctgctcatcggtcatgctctctgcagccaaggccacaatggcagaacatcaggttattcccttccttgtacaaacaccgagttgtttatttcctttctttttcttgcatgggacgagccgcttctttcttttagcatttgcttctcgttcacttccactgattatttgctcatttcaatctaacttgtggtgaaggtgctgattatgtggtgcaatatctccaccaggaattacctggtaaacatatagttttgcaggagaccgtcaagggtctaaacaaaggcatattgccaaagtatgcacggagaatgttgatcggctcaattgcgccaatatgcacatacaacgagtgcagagggtgtcgattcaagtgtactgctgagcaggtcccagtggatgcaaatgaccccatgaacagtgcttaccactacaagtgtgtttgccacaggtgatcttcaatgagtaggaggagcttctatgttattgtgtgtcctggagaatagtagtattttccccccgtttttggttctccctctccttttctttctattctttggtttctctggtgaaaaaaggcttctttgtctcatttctattttacaagaggttagctagtagaggactggagtctggaggagcattttgtactttaaatgcct

SEQ ID NO: 131458 - DNA, 830 bp, Zea mays
  unsure (1)..(830): unsure at all n locations
  Clone ID: MRT4577_51373C.1
gcagtcgctcttttcttccccagtgccacgcgcatgcccctgtcgcgcagctcctggctcgcccctgcgctcgccatggcgattccccctatgtcagcttcctcggcgttcatatccctactcccctcgccggcgccgagttcctgccccatcttcctcgccgagcttctcggctgcgctggtttctcccccatggcgcatcactgctcggttccatggccagccgaagctccctaacgttcgtcctggccgccgcgccttctctctctgcttgctgcgcgtcggtgccctctgtctgttctcaaccgcaccttgctccctggatgcgcgcgcagcgttccgtcgtccctcgtcgtgccgagttctcctctgcgcgcagtcgcgtccctctgcttggctatggccaccgtcatgcccaggatttgtgcatccttctctgttcgtcctcagcaaaaaaaactctggacactcggaccccgcctcgaccaagtcttctgtttcggccngtcgtaggttgtcatcgttcgtcttcgtatcgtgtagcagcgcgtcccttatcgtgcccatggttaatactgccattcctgctgtgcctcgncttctgttgtgtttgattaaatgtcggaccaagattccacgatgtcaannnnnnnnnnnnnnnnnnaaaaaaaaataccgatcgngtggaaagatttgaatccgaagtttgtgctgcagttttatagagatgttgtagccacaggcgacaaatcctttgctcgagctgtttggncatcagtttatatagcaatggcatatatggagcaattgataaaggataagatgggatg

SEQ ID NO: 131459 - DNA, 417 bp, Zea mays
  Clone ID: MRT4577_51374C.1
tggcagaaaacaataattccagaacaatgcgtttgcaattacaggattccccgtgaacagtaaaggaatactgctcactatttataggcacaggacacaacctgtaaggaattacaatcataccccttattaaagtttacaacaatgactcagacccttatgtactaaaaagtcattccatctttaagtcggttcgatccttcatcttcgaatacgctataacaccgaagcttcatgagtggtagcttcggcatcacgtataagcagcttttgccaaagctgtttcttcgtgcaggaccttcggcgacgaagcatggtcccaacaccactcaattaaggatagacttggttttcgataggaaaccaagaacttaacaagcaatggacttccggtctcaacaaggagaaagggaaggc

SEQ ID NO: 131460 - DNA, 216 bp, Zea mays
  Clone ID: MRT4577_51375C.1
atagtctacccacgcgttctatttcgagacagcggcaccatacccgggggggcttttataaagctgagcgagcgctcaaaacgagcgttgcggctcaagtaccctacattcattgtggacaactgctccgtacttttcctgtacctgaaccgacagttttaacctgctcccgtcaagaacaacattatccattttctattttcttacgacttaatt

SEQ ID NO: 131461 - DNA, 250 bp, Zea mays
  Clone ID: MRT4577_51376C.1
atcagccacccaccctctgtttaggagatcaaggagaaactggcggggagcctattcttgatggcgccccgatggcaacctaatgaaagggtattccttcaacggcatggagaaggaggccatggattgctatgcagaggtgcttggagagggctccacggtgaggttccgcgctgcgagctacaacatggtgctagatgcactcgccaagaatggcaagttgacctattccctcctccggtaccgcaga

SEQ ID NO: 131462 - DNA, 464 bp, Zea mays
  Clone ID: MRT4577_51377C.1
tgggtaccctcgggctcggccggggaactacaatcatcttttccatctcgccatcattatatgctcatgatcaaagagctctatcaggtctctctaatggaccccacaaaccagatggcaagggcagcaactgtggaggcggcgctgcacgcactgaagtcacccacgacggcccgcaactgacttccgcacacacgactcgtaaagaacttcgtacacactgcaccccgtcttagtcattgtactcgagatccttacttccacaagagcacagatgcctttgatactcacgctcaacctcatgctcatgcctcgggagagccagctcaacttctaaagcgagctttgtctgcagacataggatctatgactcctgctggagcccggcagacacggtattccgctctatctctaaggatcaccagcatactgcgccatcacccaccttagggtgctcatcatgc

SEQ ID NO: 131463 - DNA, 292 bp, Zea mays
  unsure (1)..(292): unsure at all n locations
  Clone ID: MRT4577_51378C.1
cnttccaaaaannnnaaaagagcaaccagccggaggcaaaagaagngacgcgccccacacacannagacagcgcacgcagacgannannnnanaggacacaaacaccgcagangagganananananananacgnacacacacaanacnnannaaggggcgcgcgcacacgcagnacgngancgancgagnagccacgccaagcacacgcagangcgngcgcacacngcaagcagccgggcncaangccncnaccnggcagccgcgncgaggangaggaacgggcgcaggcc

SEQ ID NO: 131464 - DNA, 409 bp, Zea mays
  Clone ID: MRT4577_51379C.1
gccgaggacgcggagtacattctttacgaccggctgcggagcgcatccgggaggagacacacggtggccggcaacatggccacccccggggagcgcctgcagacattgctcagctggagcgacccaagggcaacgtgcctcatcgcaaggtccaccctactcgcggcgagggtgctctaccacacgccgatgcgcatcgtcgcgctcaccgcgacgcttgacgttgtaggccccccgaggcaaccgagcaggaagaccttcattgtgcagaaactattttcaaaccaggaacctttatttggaaaagccccccacgagccgggggaaccactcaaaggggcttccgcggcctgcctaagccctccaaaacccggcaacaaaaaaaaaaaagcctaaaaaactggccccc

SEQ ID NO: 131465 - DNA, 320 bp, Zea mays
  Clone ID: MRT4577_5137C.1
cattcaaggggctttccccagaccggattggggaaatttggggggccggtaccattactttacttggcgacctggaacttgggttccaggtgtgccggacgggatttattttggattttggaacaaaatcccaggacttgacgcttttctaacaaaaaacttgaatgtgcccaaattttaaaaatgggaaagactaaaaggtgggcgggacccaaggggtgatacatagggacccgcacgggggaaaaatgccccaacctttagggggtgggtttataccaggccctgccctggggaaaggcggcatttcgggggtcccc

SEQ ID NO: 131466 - DNA, 332 bp, Zea mays
  Clone ID: MRT4577_51380C.1
gtggttttggtgaacaaaaagtggctttcaataaaaattctgaatctgtgcttgctaacaacagggcactgcatgacaacagcatagtggcataccaaacaaaataggcttgccgccgacaaatgacttcctgagcttaaattctttggatggaacattacttctctattcataccattagcaaagatcgaaaaacacaagagaagatcaccattactctataggatgggaggaaccagattattgcattgaagacactgacgtacgcatactttctttgcacgcagttggcgtcatgaattcatactgcgcagacacttgagcgagttctt

SEQ ID NO: 131467 - DNA, 419 bp, Zea mays
  Clone ID: MRT4577_51381C.1
gcatcctcgttagctttctccatgccggcagcttccacgctcatgcggttcgctagtgccggtcgctcagctgcggcgaccgcatctctcttcgcccgtttagctgaacgagcggccctctccacgaaggcggtggcggtcgaatgtcacgctcccaccttgggttcccaccgtgcagcctccgtagatctgcgtctgcaccgtcctcccgtcgtcgttcctccccccgccatgaccgcacctgcctcccagacgctcagctacttaaaagaacaaacgccggaaggtaaggtgaaatttgtggcagaggagaaagaccttgagtcagatgaaaccctttgggccttgtacgagcgctggtgcgaggctttcaaccaaaagcgtgaccatgatgagaaggttcgccggttcagcacatt

SEQ ID NO: 131468 - DNA, 314 bp, Zea mays
  unsure (1)..(314): unsure at all n locations
  Clone ID: MRT4577_51382C.1
aaaaagtgctttcttatttctgggaagcgcacaaacatcanacaaaaaactttattattgagctataactcataagaaactaaaagagggaccaccaatgagggggtgtggggaaaatgcggctgggggtgggagagcgagtgttgttaatgggancaattgtggcggttgtgaaagggggccancgtgangggcagcgtgctgggaaaacggggacaactgtgggggtgtgaagaaggggcanggctcacaccagctagctgggtgaatgggantantggtggcggcggtgaataancaggagagttcaatgc

SEQ ID NO: 131469 - DNA, 531 bp, Zea mays
  unsure (1)..(531): unsure at all n locations
  Clone ID: MRT4577_51383C.1
ccggccggagtctacaacggctgccgtcgtgttcctgccgctgcttgctgtgctgctgctggctgcttgtgacgaccgaccgcccctgctctgctggacactcatagacacggaaaacgccatgcttgatagacctatagggctataccaaagacctctcatgattcgtattatagatcaatcatcactatatatatacttgtgtttgtgtattgtatgccttggtctactggtgcctccgccgctcaatcttgacctatgatatggactgcgtgaccatatgtctggacactgcagagacatacgacagaagcgactaatcctgatgcgcactaggcactatcgtttcaccatatcaatattttgacatggcgtaatgaatgtaatgccangactgctactacctgctctgctacttccaaaaaaaaaaaaaaaaaacccgtagacttaaagatccaacttttgtcccctttacaggcgtttaattgcccgcttgncctaatcatggccataacttttaccagtgagaaa

SEQ ID NO: 131470 - DNA, 356 bp, Zea mays
  Clone ID: MRT4577_51384C.1
ctatagcaaggctaagcatcataaaattcctttcataaaaaagtatcaaggaagggtaatcaattttccaaggaaagaaatgcatcaattgtttagcacacaacttctatcacctaacgcatcatataaggtgataaagattttgaaacaacaaggaggtagcaaatgcaccagggcttgcctggataacactacgttagtgtttttaggtggcgaccacttggcgatcagcttttgtcttgtcacttgttcagattatccatctttaggttcgtccatcagcatcaccttgagattaatccagctcttgcccttcacatcatgtgatcaactagcgtgcctcatgagatgcatga

SEQ ID NO: 131471 - DNA, 333 bp, Zea mays
  Clone ID: MRT4577_51385C.1
agcagtggtaacaacgcagagtactttttttttttttttttttttttttttttttttttttttttttttttttataaacaataatcatttacaaatattggggggcatttccgccagtattcatgatgctacccctgtccacaatgttaaaaacttacagcagcaattgtcaagagccccggtccgtacacattgataagtacaaaaatcaataccttctctacaaataaatcataaattggtgcaacaaaaagaaaagaaaagaaaagaaaaatgggtcttttttcagagctttaagttaccaaccccgtcctctgggttgttaccactgct

SEQ ID NO: 131472 - DNA, 212 bp, Zea mays
  unsure (1)..(212): unsure at all n locations
  Clone ID: MRT4577_51386C.1
ngcggccgggaaaaaccttgttcctgctcctcacgccgccgccgccgtcgtcgccgccgtcgccgccaccacatccgtagcgcccagtcgccggagaataggagggagccagcaccagccaccatggctcgcgtccgcaccaagatcgcgaacaagacctccaggcaggtgatcgacaactactactcccgcttgatcctcgacttctacac

SEQ ID NO: 131473 - DNA, 725 bp, Zea mays
  Clone ID: MRT4577_51387C.1
cctcgaggccggccgggccgagaaatgccactacgctatatatcgcgcgacgcaacgcacgttccgggaactggtcctacaacactctccctaccacaccgaaccaaacacaaccacaaggagcaagaggtagacacagagctgcgcgctgagagtgtgctgtgctttgctcatcgatcgaccgatctcggcatggcggactgggggccggtgctgatcgggctggtgctcttcatcctgctctccccgggcctgctcttccagatccccggcaagggccggatcatcgagttcggcaacttccagaccagcggcctctccatcctcgtccacgccgtcatctacttcgccctcctcgccatcttcctcctcgccgtcggcgtccacatttacctcggctagctagtcgccggcgggcggccggctgagcgaggctagctgctggcgcgcggcggcccggcccggctttatttgacatcatctgggtggctggattaggtactgcgtggttcagaggcatatactactatatacatttacatgttcatctccatctgcttgctagctgtatgttgatttatttagctactactttatcaacgacatcctcgagtccagatacagtatatccaattaatcccttatgagcatgcttctgatgtccattaataatacatatgtcatgttttcaaaaaaaaaaaaaaaaaaggcccctagggccggcc

SEQ ID NO: 131474 - DNA, 165 bp, Zea mays
  Clone ID: MRT4577_51388C.1
ctcgagccgacataattacttattgccctttcagttcgccatcggcagccgaacaccatgaactccacaggcagcggcgacgatggcgacaagaagtcttggacggaagtggtcgggctcagcctggaagaagccaagagggtgatcctatgcgagaagcccgac

SEQ ID NO: 131475 - DNA, 413 bp, Zea mays
  Clone ID: MRT4577_51389C.1
cgacccacgcatgcgaaagattttccttctcttctacaaagatctttttttaccaaccgacaccatataatatatggctgagattcctctcatctcctttctctcgctcctaaccccatcttcacacatacaatcttcgattgcttcttccaaccacactccaaccttcatatacctacgcacctgcattttccacctcaagttcaccagacacctccttatcactttccaccagcttctcaccttcctactacactccaccttccaccaccgatccattttcctgcgcacacttctcttcaatcgtcaccatcccaataccctactctaccgccccgatctcagcctcatcctcatccacacccatgcccattccaacagactaattcataccctttccaaataaaagcaac

SEQ ID NO: 131476 - DNA, 361 bp, Zea mays
  Clone ID: MRT4577_5138C.1
ggctgagaaccaccgccatcacacagagagataataacggggtgttatcgccgccgcgggcgatgccggggaaaccatcgctgatggaggagcacggtcgccatcgatcctggatttaatcgtcgggggtgtggaatttgggccttgtcgggccgagctgatggtgggcatgatctcggttggcaagatcgggggccagaacaccttgaattctccagcgctctgtcgaggatcatcccactcgcgtgggcagcctcatcggcactttatctccagtaaagatactcacacacgaattgccctacactctgcttcttgtagagccatttaggttacaggatagagccctgctgcgaggatt

SEQ ID NO: 131477 - DNA, 2589 bp, Zea mays
  Clone ID: MRT4577_51390C.1
atgaacaaagtgcaaatcaagagtaaagaaagaagaagaaaagagaagagttggctgtatacagccaagaggctgtttcggtctggggcaccggacagtgtccgatttgtactacggactgtccgggggactagtccggacagtactgtctcaggtctcggaccgttcgaccttataggcggacgatccgcccgtgttatctattcctggtccgaggtccgggtgcctcaagttgccaggtcgcggacggataagtctgaaacccaagggaccctcaagcgcttcctcaggagagctcaaaatgagtttgagctcaaggtgaagaagataaggagcgacaacgggtccgaattcaagaaccttcaagtggaggagttccttgaggaagaaggaatcaagcacgagttctccgctccctacacaccacaacaaaatggtgtggtagaaaggaagaacaggacgctcatcgatatggcgaggacgatgctaggagagttcaagacccccgagtgcttttggacggaagccgtgaacacggcttgccacgccatcaacagggtctaccttcatcgcctcctcaagaagacctcatatgagctactaaccggtaacaaacccaatgtatcttactttcgtgtatttgggagcaagtgctacattctggtaaagaagggtagaaattctaagtttgctcccaaagctgtagaagggtttttgttaggttatgactcaaatacaaaggcgtatagagtcttcaacaaatcatcgggtttggttgaagtctctagcgacgttgtatttgatgagactaatggctctccaagagagcaagttgttgattgtgatgatgtagatgaagaagatgttccgacggccgctatacgaaccatggcgattggagaagttcggccacaggaacaagatgaacgagatcaaccttcttcctcaactatggtgcatcccccaactcaagacgatgaacaggttcatcaacaggaggcgtgtgatcaagggggagcacaagatgatcacgtgatggaggaagaatcgcaaccggcacctccgacccaagttcgagcgatgattcaaagggatcatcccgtcgaccaaattctgggtgacattagcaagggagtaactactcgatctcgattatttaatttttgtgagcattactcctttgtctcttctattgagccgttcagggtagaggaggccttgctagatccggattgggtattggccatgcaagaggagctcaacaacttcaagcgcaatgaagtttggacactggtgcctcgtcctaagcaaaatgttgtgggaaccaagtgggtgtttcgcaacaaacaggacgagcacggggtggtgacgaggaacaaggctcgacttgtggcaaaaggttatgcccaagtcgcaggtttggactttgaggagacatttgctcctgtggctaggctagaatcaatttgtatcttgctagcatatgccgctcaccattctttcaggttgtaccaaatggatgtgaagagcgccttcctcaacgggccaatcaaggaggaggtgtacgtagagcaaccccctggcttcgaggatgaacggtaccccgaccacgtgtgtaagctctctaaggcgctctatggacttaagcaagccccaagagcatggtatgaatgccttagagactttctaattgttaatgctttcaagaaattcgagatgtcaatgatgggcgagttgaactacttccttgggttccaagtgaagcaactcaaggacggcaccttcatctcccaaacgaagtacacgcaagatctgctaaagcggtttgggatgaaggacgccaagcccgcaaagactccgatgggaaccgacggacacaccgacctcaacaaaggaggtaagtccgttgatcaaaaagcataccggtcaatgatagggtctttactttacttatgtgctagtagaccggatattatgcttagcgtatgcatgtgtgctagatttcaatctgatcctaaggagtgtcacttagtggcagtgaagcgaattcttagatatttggttgctacgccttgcttcgggctctggtatccaaaggggtctacctttgacttggttggatactcagattccgactatgctggatgtaaggtcgataggaagagtacatcggggacgtgccaattcttaggaaggtccctggtgtcatggaactctaagaaacaaacttctgttgccctatccaccgctgaggccgagtatgttgccgcaggacagtgttgcgcgcaactactttggatgaggcaaaccctcagggacttcggctacaatctgagcaaagtcccactcctatgtgataatgagagtgctatccgcatggcggaaaatcctgttgagcacagccgcacaaagcacattgacatccggcatcactttttgagagaccaccagcaaaagggagatatcgaagtgtttcatgttagcaccgagaaccagctagccgatatctttaccaagcctctagatgagaagaccttttgcaggttgcgtagtgagctaaatgtcttagattcgcggaacttggattga

SEQ ID NO: 131478 - DNA, 2673 bp, Zea mays
  Clone ID: MRT4577_51391C.1
atgggaatcaaggcaagaagatgtgatggttcactagcttttaagggtgtactagacggcaagctttacctagttgattttgcaaaagaagaggccggtctagatgcatgcttaatggctaagacttgcatgggctggctgtggcatcgccgcttagcacatgtggggatgaagaacctccacaagcttctaaagggagaacatgtgataggtctaactaatgttcatttcgaaaaagatagaccttgtgcagcttgtcaagcagggaaacaagtgggaggctctcatcacaccaaaaatgtgatgacaacatcaagacccctggagctgctacatatggacctcttcggacccgtcgcctatctgagcataggaggaagtaagtatggtctagttattgttgatgacttttcccgcttcacttgggtgttctttttgcaggataagtctgaaacccaagggaccctcaagcgcttcctaaggagagctcaaaatgagtttgagctcaaagtgaaaaagataaggagcgacaacgggtccgagttcaagaaccttcaagtggaggaatttcttgaggaggaggggatcaagcacgaattctccgctccctacacacctcagcaaaatggtgtggtagagaggaagaacaggacactcatagatatggcgaggactatgcttggagaattcaagacccccgagtgcttttggtcggaagccgtgaacacggcttgccacgctatcaacagggtctaccttcaccgcctcctcaagaagacgtcgtatgagctgctaaccgatgaagaagacgttccaacggccgcgatacgcaccatggcgattggagatgtacggcctcaagaacatttggagcaagatcaaccttcttcctcaacaacgttgcaacccccaactcaagacgatgaacaggttcatcaaaaggaggcgtgtgatcaagggggagcacaagatgatcacgtgatggaggaagaagcgcaaccggcacctccaacccaagttcgagcgacgattcaaagggatcatcccgtcgaccagatattgggtgatattagcaagggagtaactactcgctcgagattagttaatttttgtgagcattactcttttgtctcttctattgagcctttcagggtagaagaggccttgctagatccggactgggtgttggccatgcaggaggaactcaacaacttcaagcgcaatgaagtttggacactggtgcctcgtcctaagcaaaatgttgtgggaaccaagtgggtgtttcgcaacaaacaagacgagcacggagtggtgacaaggaacaaggctcgacttgtggcaaaaggttatgcccaagtcgcaggtttggactttgaggagactttttgctctgtggctaggctagagtccattcgtatcttgctagcatatgccgctcaccattctttcaggttgtaccaaatggatgtgaagagcgctttcttaaatgggccgatcaaggagaaggtgtacgtagagcaaccccctggctttgaggatgaacggtaccccgaccatgtgtgtaagctctctaaggcgctctatggacttaagcaagccccaagagcatggtatgaatgccttagagactttttaattgctaatgctttcaaggttgggaaagctgatccaactctttttacaaagacatgtgatggtgatttgtttgtgtgccaaatttatgtcgatgacataatatttggttctactaaccaaaagtcttgtgaagagtttagcagggtgatgacacagaaattcgagatgtcaatgatgggcgagttgacctacttccttgggttccaagtgaagcaactcaaggacggtaccttcatctcccaaacgaagtacacgcaagatctgctaaagcggtttgggatgaaggacgccaagcccgcaaagactccgatggggaccgacggacacaccgacctcaacaaaggaggtaagtccgttgatcaaaaagcataccggtcaatgatagggtctttactttatttatgtgctagtagaccagatattatgcttagcgtatgcatgtgtgctagatttcaatccgatcctaaggagtgtcacttagtggcggtgaagcgaattcttagatatttggttgctacgccttgcttcgggctctggtatccaaaggggtctacctttgacttggttggatactcagattccgactatgctggatgtaaggtcgataggaagagtacatcggggacgtgccaattcttaggaaggtccctggtgtcgtggaactctaagaaacaaacttctgttgccctatccaccgctgaggccgagtatgttgccgcaggacagtgttgcgcgcaactactttggatgaggcaaaccctccgggactttggctacaatctgagcaaagtcccactcctatgtgataatgagagtgctatccgcatggcggaaaattctgttgaacacagccgcacaaagcacattgacatccggcatcactttttgagagaccaccagcaaaacggagatatcgaagtgtttcatgttagcaccgagaaccagctagccgatatctttaccaagcctctagatgagaagaccttttgcaggttgcgtagtgagctaaatgtcttagattcgcggaacttggattga

SEQ ID NO: 131479 - DNA, 1062 bp, Zea mays
  Clone ID: MRT4577_51392C.1
ccggccgggacccgccgctctgcctcccccgcggcgaatcccgcccgcgcctcccccgccatagaacccgcctccaaccgtgaatcgcccgccgtgccttcacccgccgctcctccatctcctcctcctcgtcgtcgccgccgccgcgctgcggggggcgccgttggcggacgccggcgcggacacctgcaaggcgtggttggtgcagtccatccccacggacatgccgcacctgagccgcatccccggggtcctatccacgggagatgtgctccagtggctctcggggaatgcaacgaagagtctggacatccttgcgcagtactggcagttcttgccccagccgaacaatccgaaatcgggggactacgggttctccaagagtgacatgaggagattcggggccgacgagggccgccgggtttacaaggcactggaaaatgctgcagaccgtaagatcaaaatcaggattgtccagcactctggatttgctcctgattttgaccaagagagcgcagatctggctgcaggaagaccaaatgttgagaacgcaactgttcttttcgaggactggtggggatctggtgttgtgcacgcaaaggtctggatatcagataagaaggatgtgtatataggttccgcaaacaacgactggaaatcccttactcaggtcaaggagcttgggatttattttgctggttgcccacatatagcaaaaactgtggaggtctattttcaaaacctgtggacgctttcaaccctcaactcaactttttacaccaaacaagcctgggatacgcagtggcaaatttctagaaaggttccatgctggtctcatttcctacagcccaaagaaagatgcaggtttgcatctccctctgcaggtcacagcgatctactacttagtgcacaaatttgaaggggaaaaatggctggtacatagatggcaataaattatgtacaatctaagcacacaaatttgaaggaaaaaatggctggtacatagatgggaaataaattatgtacaatctatccattaaaaaaaaaaaaaaaaaagcggcc

SEQ ID NO: 131480 - DNA, 1802 bp, Zea mays
  Clone ID: MRT4577_51393C.1
gcccggattctagcacttagacaaatattttagtgcacaaaaaccaatgtcctaagtctagaatcatactttcttattgattggcacttcattcatcatctggcacataattactcactcaatatgggtggggcccttaatcatcaaaatatattagaaatggcctaagggcacatttccctttcaatctccccttttttggggatttatgccaacacatcaaaaagcacccaatagaagggcaacatccatatacttgaaaacaaaaattgtttttgattcaaatttggcgtatttggatcattctttgccaccatttggtttgtttttgaaattaaactcattttcctatctctaagttaaacacacttgtttaggcataaagagagatattccaagagaaaattgatcaagagccaaaaactcccccttttcccataatcaaatattctccccgcgagagaccaaattttgcacattaagagtattttgacaaatcaaaagttctaactctctactattttcaaatttctcaagtggtagttgatccatttgctttggcctttaatttctccccctttggcattaagcaccaaaacgggatcattattggccctaaaaccccattgcctcacaaaaatcgtcaactaagagtaaaaaggcaataagagtatggagatgaacttggaataaattactcttttcatcggagtgcatggtccaagtccaccttttccctttcaatcctcctttgagactaaaacaaccaaactcaagtacatggttagtctcaaagggtcaagttgtagcacagctccccctaaatatgtgcatcacttgcaaaaaggacttgtgaggtccagggagtgtttgtacaacttgagcaccacaataagcaacaacatgcagaatgaacatgatcaaaggcataaacacatgtatgctataattcaatccaggttccgcgaatctaagacatttagctcactacgcagcctgcaaaaggtcttctcatctagaggcttggtaaagatatcggctagctggttctcggtgctaacatgaaacacttcgatatctcccttttgctggtggtctctcaaaaagtgatgccggatgtctatgtgctttgtgcggctgtgctcaacaggattctccgccatggttcgtatagcggctgtcggaacatcttcttcatctacatcatcacaatcaacaacttgctctcttggagagccattagtatcatcaaatacaacgtcgctagagacttcaaccaaacccgatgatttgttgaagactctatacgcctttgtatttgagtcataacctaacaaaaacccttctacagctttgggagcaaatttagaatttctacccttcttcactagaatgtagcacttgctcccaaatacacgaaagtaagatacattgggtttgttaccggttagtagctcatacgaagtcttcttgaggaggcgatgaaggtagaacctgttgatggcgtggcaagccgtgttcacggcttccgaccaaaaacgctcgggggtcttgaattctccaagcatcgtcctcgccatatcgattagcgtcctgttcttcctttctaccacaccattttgctgtggtgtgtagggagcggagaactcgtgcttgatcccttcctcctcaaggaactcctccacttgaaggttcttgaactcggacccgttgtcgctccttatcttcttcaccttgagctcaaactcattttgagctctcctgaggaagcgcttgagggtcccttgggtttcagacttatc

SEQ ID NO: 131481 - DNA, 3057 bp, Zea mays
  Clone ID: MRT4577_51394C.1
gtttatgcatccgggggttcaagctggattatcgacagcggatgcacaaaccatatgacgggggagaagaagatgttcacctcctacgtcaagaataaggattcccaagattcaataattttcggtgatgggaaccaaggcaaggtaaaagggttagttgagtctctgggatataatttactatctgttagtcaattatgcaatatgggatacaattgtttattcacaaacatagatgtgtctgtctttagaagaagtgatggttcattagcttttaaaggtgtattagacggcaagctttacttagttgattttgcaaaagaagaggctggtctagatgcatgtttaattgctaagactagcatgggctggctgtggcatcgtcgcttagcacatgtagggatgaagaaccttcacaagcttctaaagggagaacacgtgataggtttaactaacgtgcaattcgaaaaagatagaccttgtgcagcatgtcaagcaggtaaacaggtgggaggagcacatcacagcaagaatgtgatgaccacatcaaggcccctggagctgctacatatggacctcttcggacccgttgcctatctaagcataggaggaagtaagtatggtttagttattgtggatgacttttcccgcttcacttgggtattctttttgcaggataagtctgagacacaaggaaccctcaagcgcttcctaaggagagctcaaaacgagtttgagctcaaggtgaagaagataaggagcgacaacgggtccgagttcaagaaccttcaagtggaggagtaccttgaggaggaagggatcaagcacgagttctccgctccctacacaccacagcaaaatggtgtggtagagaggaagaacaggacgcttatcgatatggcaaggacgatgcttggagaattcaagacccccgagcgtttttggtcggaagctgtgaacacagcttgtcacgccatcaacagggtctaccttcaccgcctcctcaagaagacgtcgtatgagcttctaaccggtaacaaacccaatgtatcttactttcgtgtatttgggagcaaatgctacattctagtaaagaagggtagaaattctaagtttgctcccaaagctatagaagggtttttgttaggttatgactcaaatacaaaggcgtatagggtcttcaacaaatcatcaggtttggttgaagtctctagcgacgttgtatttgatgagactaatggctctccaagagagcaagttgttgatcttgatgatgtagatgaagaagatgttccgacggccgctatacgaaccatggcgattggtgatgtgcgaccacaggaacaagatgagcaagatcaaccttcttcctcaactatggtgcatcccccaactcaagacgataaacaggttcatcaacaggaggcgtgtgatcaagggggagcacaggatgatcatgtaatggaggaagaagcgcaaccagcgcctccaacccaagttcgagcgatgattcaaagggatcatcccgtcgatcaaattctgggtgacattagcaagggagtaactactcgatctcgattagttaatttttgtgagcattactcctttgtctcttctattgagcctttcagggtagaggaggccttgctagatccggactgggtgttggccatgcaagaggaactcaacaacttcaaaaggaatgaagtttggacactggtgcctcgtccgaagcaaaatgttgtgggaaccaagtgggtgttccgcaacaaacaggatgagcacggggtagtgacgaggaacaaggctcgacttgtggcaaaaggttatgcccaagtcgcaggtttggactttgaggagacttttgctcctgtggctaggctagagtccattcgtatcttgctaacatatgccgctcaccattctttcaggttgtaccaaatggatgtgaagagcgctttcctcaacgggccaataaaggaggaggtgtacgtgcagcaaccccctggcttcgaggacgaacggtaccccgaccacgttgggaaagccgatccaactctttttacaaagacatgtgatggtgatttatttgtgtgccaaatttatgtcgatgacataatatttggctctactaaccaaaagtcttgtgaagagtttagcagggtgatgacgcagaaattcgagatgtcgatgatgggcgagttgaactacttccttgggttccaagtgaagcaactcaaggacggcaccttcatctcccaaacgaagtacacgcaagatctgctaaagcggtttgggatgaaggacgccaagcccgcaaagactccgatgggaaccgacggacacaccgacctcaacaaaggaggtaagtccgtcgatcaaaaagcatatcggtccatgataggttctttgctttatttatgtgctagtagaccggatattatgcttagcgtatgcatgtgtgctagatttcaatccgatcctaaggagtgtcacttagtggcggtgaagcgaattcttagatatttagttgctacgccttgctttgggctctggtatccaaaggggtctacctttgacttggttggatactcagattccgactatgctggatgtaaggtcgataggaagagcacatcggggacatgccaattcttaggaaggtccctggtgtcatggaattctaagaaacaaacctccgttgccctatccaccgctgaggccgagtatgttgccgcaggacagtgttgcgcgcaactactttggatgaggcaaaccctcagggactttggctacaatttgagcaaagtcccactcctatgtgataatgagagtgctatccgcatggcggaaaatcctgttgagcacagccgcacaaagcacatagacatccgacatcactttttgagagaccaccagcaaaagggggatatcgaagtgtttcatgttagcaccgagaaccagctagccgatatctttaccaagcctctagatgagaagaccttttgcaggctgcgtagtgagctaaatgtcttagattcgcgaaacttggattga

SEQ ID NO: 131482 - DNA, 5496 bp, Zea mays
  Clone ID: MRT4577_51395C.1
atggatcctatgggaaaggggatggtggtcaacaacaacgagaaggagtctatcttcaacgagccgaaggatgacaagcctaccgactcgggctcgagccacaagcgcaaggacgggaagaagaagaagacaaggcgcatcaaggagatcgtctactacgacagcgacgaatcttcctcttcccaaaaggacgacgacgactacgagaaaaagaaaacggtcaattcgaacttttcatttgattactctcgtattcctcaaaatacaaatgctcatttattatctattccacttggtaaacctcctcattttgatggagaggactacggattttggagtcacaaaatgcgtagtcatttgttctctctccatccaagcatatgggagatagttgagaatggaatgcattttgatagtagtgataatcccatgtttatcaatgagcaaattcataaaaatgcacaagctactactgttcttctagcttctttgtgcagggatgaataccacaaagtgagcggcttggataacgccaagcaaatttgggacaccctcaagatctctcatgaggggaatgatgtcacaatgctcaccaagatggagttggtggaaggcgaactcgggagattcgctatgataaggggagaagagccaactcaaacgtacaaccggctaaagacccttgtcaacaagataagaagctatggaatctatggaagcacgcgatggacggatcacgacgtcgtctgcctaatgctaaggtcttttactgtccttgatcctcatcttgtaaacaatattcgtgagaatcctaggtacaccaagatgacgcccgaggagatacttggaaagttcgtgagcgggcgaatgatgatcaaggaagcaagatacgtggacgacgcattgaatggtccaatcaatgagcctcaacctcttgctctcaaggcaacaagaagcaatgagacgctacctagcaaggtggcacaaattgaggcggccggacttaatgatgaagagatggctctcatcatcaagagattcaagacggcgctaaaaggtcgcaaggggcagccaagcaagaccaagacaaaggggaagcgctcatgcttcaaatgtggtaagcttggtcattttattgctaactgtcctgacaatgatagtgatcaggatcaagggaacaagagggaaaagaagaagaactataagaaggcaaagggcgaggcgcatctaggcaaggagtgggattcgaattgctcctcttccgactccgacaatgaaggactcgccgccaccgccttcaacaagtcatccctcttccccaacgagcgtcacacatgccttatggcaagggagaagaaggtatgtactcgaaacactacttatgcttcttcaagtgaggacgaatctagtgatgaggatgaaatagattattcatgtttatttaagggcctagatagaaccaaggtagataaaattaatgaactgattgatgccttgaatgataagaataggcttttagaaaagcaagaggatttgttgtatgaagaacatgacaaatttgtagaagcacaaaaatctcatgctctagaagttaaaagaaatgaaatgctttcttgtgaattatcttcttgccatgagacaatttctaacttaaggagcattaatgatgatttgaatgctaagttagaaatagctagtaaatcaacatcttgtgtagaaaatgatgttatttgcaataggtgtaaagattttgacattgatgcttgtagtgaacacatagcctctattgcaaaattaaatgatgaaattgctagtcttaatgaccaacttaagactagcaaaagtgaatttgacaaattaaaatttgcaagggatgcctacacaattggtagacacccctcaattaaggatggtcttggcttcaagagggaagtcaagaacttaacaagccataaggcttccatctccacaaaggagaaagggaaggcccctatggcgagtaatgctaaaaagaaccatgcctttatgtaccatgatagaaaattttctggaaatgttcatgatgataggagttgtaatgcttataatgcttttgactctcatgccatgtttgcttctagttcttcctatatgcacggtagaaatgtgtttagaagaaatgttgttcatcatatgcctaggagaaatgttgtcaatatacctaggaaagttaatgaaccttctacaatttatcatgcttgtgatgcttcatttgcaatttgtggaaaggatagaaaggtttatgcatccgggggttcaagctggattatcgatagcggatgcacaaatcatatgacaggggagaagaagatgttcacctcctacgtcaagaacaaggattcccaagattcaattatattcggagatgggaatcaaggcaaggtgaaaggattaggcaaaattgcaatatctaatgagcactctatatctaatgtgtttttagttgagtctcttggatataacttgctatctgttagtcaattatgcaatatgggatataattgtctatttacaaatgtagatgtgtctgtctttagaagaagtgatggttcactatcttttaagggtgtattagacggcaaactttatgtagttgattttgcaaaagaggaggccggtctagatgcatgcttaattgctaagactagcatgggctggctgtggcatcgccacttagcacatgtggggatgaagaaccttcacaagcttctaaagggagaacacgtgataggtctaaccaatgttactttcgaaaaagatagaccttgtgcagcttgtcaagcaggtaagcaagtgggaggagcgcatcacagcaagaatgtgatgaccacatcaagacccctggagctgctacatatggacctcttcggacccgtcgcctatctaagcataggaggaagtaagtatggtctagttattgttgatgacttttcccgcttcacttgggtgttctttttgcaggataagtctgaaacccaagggaccctcaagcgcttcctaaggagagctcaaaatgagtttgagctcaaggtgaagaagataaggagcgacaacgggtccgaattcaagaaccttcaagtggaggagtttcttgaggaggaagggatcaagcacgagttctccgctccctacacaccacaacaaaatggtgtggtagagaggaagaacagaacgctcatcgatatggcgaggacgatgcttggagagttcaagacccccgagtacttttggtcggaagccgtgaatacggcttgccacgccatcaatagggtctaccttcatcgcctcctcaagaagacgtcgtatgagctgctaaccggtaacaaacccaatgtatcgtactttcgtgtatttgggagtaaatgctacattctagtgaagaagggtaggaattccaaatttgctcccaaagctgtagaagggtttttgttaggttatgactcaaatacaaaggcgtatagagtcttcaacaaatcatcaggtttggttgaagtctctagcgacgttgtatttgatgagactaatggctctccaagagagcaagttgttgatcttgatgatgtagatgaagaagatgttccgacggccgctatacgaaccatggcgattggtgatgtacgaccacaggaacaaaaggagcaagatcaaccttcttcctcaaccatggtgcatcccctaactcaagacgatgaacaggttcatcaacaggaggcgtgcaatgaagggggagcacaagatgatcatatgatggaggaagaaactcaaccggcacctccaacccaagttcgagcgatgattcaaagggatcatcccgtcgatcaaattcttggtgatattagcaagggagtaactactcgatctcgattagttaatttttgtgagcattactcttttgtctcttctattgagcctttcagggtagaggaggccttgctagatccggactgggtgttggccatgcaagaggagctcaacaacttcaagcgcaatgaagtttggacacttgtgccttgtcccaagcaaaatgttgtgggaaccaagtgggtgttccgcaacaaacaagacgagcacggagtggtgacaaggaacaaggctcgacttgtggcaaaaggttatgcccaagtcgcaggtttggactttgaggagacttttgctcctgtggctaggctagagtcaattcgtattttgctagcatatgccgctcaccattctttcaggttattccaaatggatgtgaagagcgctttcctcaacgggccaatcaaggaggaagtgtacgtggagcaaccccctggcttcgaggatgaatggtaccccgaccacgtgtgtaagctctctaaggcgctctatggacttaagcaagccccaagagcatggtatgaatgccttagagatttcttaattgctaatgctttcaaggttgggaaagtcgatccaactcttttcactaagacttgtgacggtgatctatttgtgtgccaaatttatgtcgatgacataatatttggttctactaataaaaagtcttgtgaagagtttagcagggtgatgacgcagaaattcgagatgtcgatgatgggcgagttgaactacttccttgggttccaagtgaaacaactcaagaacggcaccttcatctctcaaacgaagtacacacaagacttgctaaagtggtttgggatgaaggacgccaagcccgcaaagactccgatggggaccgacggacacactgacctcaacaaaggaggtaagtctgttgatcaaaaggcataccggtcaatgatagggtcattactttacttatgtgctagtagatcggatattatgcttagcgtatgcatgtgtgctagatttcaatccgatcctaaggagtgtcacttagtggcagtgaagagaatccttagatatttagttgctacaccttgcttcaggctctggtatccaaaggggtctacctttgacctaattggatattcagattctgactatgctggatgtaaggtcgataggaagagtacatcggggacgtgccaattcttaggaaggtccctggtgtcatggaactctaagaaacaaacttccgttgccctatccaccgctgaggccgagtacgttgccgcaggacagtgttgcacacaactactttggatgaggcaaaccctcagggactttggctacaatctgagcaaagtcccactcctatgtgataatgagagtgctatccgcatggcggaaaatcctgttgagcacagccgcacaaagcacattgacatccgacatcactttttgagagaccaccagcaaaagggagatatcgaagtgtttcatgttagcaccgagaaccagctagccgatatctttaccaagcctctagatgagaagaccttttgcaggttgcgtaattttggtgaggcaatggggttcttgggccaagattcatcccgttttggtatttga

SEQ ID NO: 131483 - DNA, 4719 bp, Zea mays
  Clone ID: MRT4577_51396C.1
atggatcctaagggcaaggggatggtgatcaacgacaaggagaaggagaccttcgtcaacgagctcaatgatgacaagcccaccgactcaggctcgagccacaaaagaaaagacgggaggaagaagaagacaaggcgcatcaaggaaattgtctactacgacagcgacgaatcttcctcctcccaaaaggacgacgacgaccacgatagacgaaagacggttaactcaaacttttctttcgattattcacgcatcccgcatagttcaaatactcaattgctccccattccacttggcaagccccctcactttgatggagaggactacggattttggagccacaaaatgcgtactcacctgttttctctccatccaagcatttgggagattgtggaaagtggaatgaaatttgatagctcggatagtcctgtgtttattaatgaacagattcataaaaatgcacaagctactactgtgttgctagcctctttgtgcagggacgagtatcacaaggtgagcggcttggacaatgccaagcagatctgggacaccctcaagatctctcatgagggaaacgacgtcaccttgctcaccaaaatggagttggtggaaggcgagcttggacggttcgcaatgataaggggcgaggagccaacacaaacatacaaccggctcaagacccttatcaacaaaataaggagctacgggagcacgcaatggacggaccacgacgtcgtccgcctaatgctaaggtcatttaccgttcttgatcctcatttagtgaacaatattcgtgaaaatcccaggtacaccaagatgtcgcccgaagaagttcttgggaaattcgttagcgggcgaatgatgatcaaggaggcgagatacgtggacgacgccttgaatggtccgatcaacgagccgcaacctcttgctctcaaggcaacacgaagcaaggaggcgctacctagcaaggtggcacagattgaggcggccggacttaatgatgaagagatggctctcatcatcaaaagattcaagacggtgcttaaaggtcgcaagggacagccaagcaagaccaaagccaaggggaagcgctcatgcttcaaatgcggtaagcttggtcattttattgctaactgtcccgacaatgatagtgaccaggatcaagggaataagagggagaaaaagaagaactataagaaggcaaagggtgaggctcaccttggcaaggagtgggattcggactgctcctcgtccgactccgacaatgagggactcgccaccactgccttcaacaagtcatccctcttcccaaacgagcatcacacttgcctcatggcaagggagaagaaagtaagcactcctaatactagtacttatgcttcttcaagtgaggatgagtctagtgatgatgatgagatagattactcatgcttattcaagggattagatagaactaaggtagacaaaattaatgaattgattgatgccttgaatgataggaatatactgttagaaaagcaagaggatctgttgtatgaagaacatgataaatttgtagaagctcagaaatctcttgctctagaaattaagaggaatgaaatgctctctagtgaattatcttcttgtcatgaaactattgctaagttaaaaatttttaatgatgatttaaatgctaaactagaagtagttagtaaatctaactcttgtgtagaaattgttgaaacttgtaataggtgtaaagattttgacattgatgcttgtagtgatcatttagtttcaatttctaaattaaatgaggaattagctagtcttaatgcccaacttaagactagcaagaatgaatttgacaagctaaaatttgcaagggatgcctacacgattggtagacacccctcaattaaggatggacttggctacaagagggaagccaagaacttgacaagccataaggctcccatctccgccaaggagaaaggaaaagcccctatggctagtagtgtgcaaaagaaccatgcttttatgtaccatgataggagacaatctagaaatgcttataggagttgtaatgcatataatgtctttgattctcatgccatgtttgcttctagttcttcttatgtgcatgatagaaatgttggtaggagaaatgctattcataatttgcctaggagaaatgttgttaatgttcctaggaaagtttatgcatccgggggttcaagctggattatcgacagcggatgcacaaaccatatgacgggggagaagaagatgttcacctcctacgtcaaaaacaaagattcccaagattcaataatattcggtgatgggaatcaaggcaaggataagtctgaaacccaagggaccctcaagcgcttcctcgggagagctcaaaatgagtttgagctcaaggtgaagaagataaggagcgataacgggtccgagttcaagaactttcaagtggaagagttccttgaggaggaagggatcaagcatgagttctccgctccctacacaccacagcaaaatggtgtggtagagaggaagaacaggacgctaatcgacatggcgaggacgatgcttggagaattcaagacccccgagcgtttttggtcggaagccgtgaacacggcttgccacgccatcaacagggtctaccttcatcgcctcctcaagaagacttcgtatgagctactaaccggtaacaaacccaatgtatcttactttcgtgtatttggaagcaagtgctacattctagtgaagaagggtagaaattctaaatttgctcccaaagctgtagaagggtttttgttaggttatgactcaaatacaaaggcgtatagagtcttcaacaaatcatcgggtttggttgaagtctctagtgacgttgtatttgatgagactaatggctctccaagagagcaagttgttgattgtgatgatgtagatgaagaagatgttccgacagccgctatacgaaccatggcgattggagaagtgcggccacaggaacaagatgaacgagatcaaccttcttcctcaactatggtgcatcccccaaccgaagatgacgaacaggtacctcaagtggaggcgcttgatcaagggggagcacaagatgatcaagtgatggaggaagaagcgcaactggcacctctgacccaagttcgagcgatgattcaaagggatcatcccgtcgaccaaattctgggtgatattagcaagggagtaactactcgatctcgattagttaatttttgtgagcattactcctttgtctcttctattgagcctttcagggtagaagaggccttgctagatccggactgggtgttggccatgcaggaggaactcaacaacttcaagcgcaatgaagtttggacactggtgcctcgtcctaagcaaaatgttgtgggtgtttcgcaacaaacaagacgagcacggagtgatgacaaggaacaaggctcgacttgtggcaaaaggttatgcccaagtcgcaggttgtaccaaatggatgtgaagagcgctttcctcaatgggccgatcaaggaggaggtgtacgtggagcaaccccctggtttcgaggatgaacggtaccccgaccacgtgtgtaagctctctaaggcgctctatggacttaagcaagccccaagagcatggtatgaatgccttagagactttctaattgttaatgctttcaaggttgggaaagccgatccaactctttttacaaagacatgtgatggtgatttgtttgtgtgccaaatttatgtcgatgacataatatttggttctactaaccaaaagtcttgtgaagagtttagcagggtgatgatgcagaaattcgagatgtcgatgatgggcgagttgaactacttccttgggttccaagtgaagcaactcaaggacggcaccttcatctcccaaacgaagtacacgctagacctgctgaagcggtttgggatgaaggacgccaagcccgcaaagactccggtggggaccgacggacacaccgacctcaacaaaggaggtaagtccgttgatcaaaaagcataccggtcaatgatagggtctttactttatctatgtgctagtagaccggatattatgcttagcgtatgcatgtgtgctagatttcaatccgatcctaaggagtgtcacttagtggcggtgaagcgaattcttagatatttggttgctacgccttgcttcgggctctggtatccaaaggggtctacctttgacttggttggatactcagattccgactatgctggatgtaaggtcgataggaagagtacatcggggacgtgccaattcttaggaaggtccctggtgtcgtggaactctaagaaacaaacttctgttgccctatccaccgttgaggccgagtatgttgccgcaggacagtgttgcgcgcaactactttggatgaggcaaaccctccgggactttggctacaatctgagcaaagtcccactcctatgtgataatgagagtgctatccgcatggcggaaaatcctgttgaacacagccgcacaaagcacattgacatccggcatcactttttgagagaccaccagcaaaagggagatatcgaagtgtttcatgttagcaccgagaaccagctagccgatatctttaccaagcctctagatgagaagaccttttgcaggttgcgtagtgagctaaatgtcttagattcgcggaacttggattga

SEQ ID NO: 131484 - DNA, 269 bp, Zea mays
  Clone ID: MRT4577_51397C.1
ggcttcttggtccaaccgctggttagcctgtccagcgatatgtgcacaggacgatggggacaacgcatgcgatttatcctgataagatgcatgctcatctgccttgccgtcattgttgttggcttctcgatcgacatctgagctgctctaagggacacaaaggaatactgcagtctctaccacgatcatgcatagcatgctgtgatcgtgtacgttctggggttttggctccttgacttctcgaatcatactgtgtaaggtccaacgcg

SEQ ID NO: 131485 - DNA, 572 bp, Zea mays
  Clone ID: MRT4577_51398C.1
aaatatccccaaggctaaaaccctaaatctctaatcctcactggccgggcctctcctctcacgtggtcgcgttggcggctggccagtggccactccctgtctcgtgctcacggcgggcggcagaccgccaggcgccagactggcaggcggcagtgcaggctgtcacggctcacgggctcacggccgacggcagaccgccagaggccaggtcggcagtgcagccgtgcaggcggccgaccctctccggctctccctcaggccctcactcccttggcggcggcggcggcaagctgaggttataagtgaagtcaaatactcccttgtttgcttattaatccattctggacgccacgagatcctactcccgcgggcagaatattgaagaatatgcatctccgttcatggacttgttaatccatttcaggtttttttgatttctatttgtaatatcaactccgggagacagtgcgttcattttatcttagcaaatattgtaatgactcattatcaggatatgtttgaggaataaatcaaaaaaaaaaagcggccaaaaaaaaaaaactcgagcccgg

SEQ ID NO: 131486 - DNA, 2506 bp, Zea mays
  Clone ID: MRT4577_51399C.1
ttcttcctataagcatgatagagatatgtgtaggagaaatgttgtgcatatgcctaggagaaattttgctcatgttcctagaaaagttgtgaacaaaccttttaccatttattatgcttgcaatgcttcctttgctatttgtagaaagggtaagaaggtttatgcatccgggggatcaagctggattattgacagcggatgcacaaaccatatgacgggggagaagaagatgttcacttcctacgtcaagaataaggattcccaggattcaattatattcggtgatgggaatcaaggcaaggtaaaagggttagatgtgtctgtctttagaagaagtgatggttcattagcttttaagggtgtattagacggcaagctttacctagttgattttgcaaaagaagaagccggtctagatgcatgcttaatggctaagacttgcatgggctggctgtggcatcgccgcttagcacatgtggggatgaagaacctccacaagcttctaaagggagaacatgtgataggtctaaccaatgttcatttcgaaaaagatagaccttgtgcagcttgtcaagcagggaaacaggtgggaggagcgcatcacagcaagaatgtgatgaccacttcaagatccctggagctgctgcatatggacctcttcggacccgtcgcctatctgagcatagggggaagtaagtatggtctagttaatgttgatgacttttcccgcttcacttgggtgttctttttgcaggataagtctgaaacccaagggaccctcaagcgcttcctaaggagagctcaaaataagtttgagctcaaggtgaagaagataaggagcgacaacgggtccgaattcaagaaccttcaagtggaggagttccttgaggaggaagggatcaagcacgagttctccgctccctacacaccacagcaaaatggtgtggtagagaggaagaacaggacgctaattgatatggcgaggacgatgcttggagaattcaagacccccgaatgtttctggtcggaagctgtgaacacggcttgtcacgccatcaacagggtctaccttcatcgcctcctcaagaagacttcatatgagctactaaccggtaacaaacccaatgtatcttactttcgtgtatttgggagcaagtgctacattctagtgaagaaaggtagaaattctaagtttgctcccaaagctgtagaagggtttttgttaggttatgactcaaatacaaaggcgtatagagtcttcaacaaatcatcgggtttggttgaagtctctagcgacgttgtatttgatgagactaatggctctccaagagagcaagttgttgattgtgatgatatagatgaagaagatgttccggcggccgctatacgaaccatggcgattggagaagtgcggccacaggaaaaagatgatcaaccttcttcctcaacaacggtgcatcccccaactcaagacgatgaacagcctttcagggtagaggaggccttgctagatccggactgggtgttggccatgcaggaggagctcaacaacttcaagcgcaatgaagtttggacactggacgagcacggggtggtgacgaggaacaaggctcgacttgtggcaaaaggttatgcccaagtcgcaggtttggactttgaggagacttttgctcctgtggctaggctagagtcaattcgtatcttgctagcatatgctgctcaccattctttcaggttgtaccaaatggatgtgaagagcgctttcctcaacgggccaatcaaggaggaggtgtacgtggagcaaccccctggcttcgaggatgatcggttccccgaccatgtgtgtaagctctctaaggcgctctatggacttaagcaagccccaagagcatggtatgaatgccttagagatttcttagttgctaatgctttcaaggttgggaaagccgatccaactctttttacaaagacatgtgatggtgatttgtttgtgtgccaaatttatgtcgatgacataatatttggttctactaaccaaaagtcttgtgaagagtttagcagggtgatgacgcagaaattcgagatgtcgatgatgggcgagttgaactacttccttgggttccaagtgaagcaactcaaggatggcaccttcatctcccaaacaaagtacacgcaagacttgctaaagaggtttgggatgaaggacgccaagcccgcaaagacaccgatgggaaccgacggacacacagacctcaacaaaggaggtaagtccgttgatcaaaaagcataccggtcaatgatagggtctttactttacttatgtgctagtagaccggatattatgcttagcgtatgcatgtgtgctagatttcaatccgatcctaaggagtgtcacttagtggcggtgaagcgaattcttagatatttggttgctacgccttgcttcgggctctggtatccaaaggggttgaaagcatctaggcccctggttggttttagtgattaa

SEQ ID NO: 131487 - DNA, 224 bp, Zea mays
  Clone ID: MRT4577_5139C.1
ccggccgggatacattggctgatgctgcaggaaaatgagcatgtaggttctgcatgatatcacaattctcacggctgactggaaagaggtaacaccctgattaatttctctggtactcaagagctcctggtgaatgccctggcttggcagagctaactacaaaaaattggtgctcggctgataccttagagatgatggggggggggggtctggtacatgacgat

SEQ ID NO: 131488 - DNA, 619 bp, Zea mays
  Clone ID: MRT4577_513C.1
agccggccgggaggtacgcattccatccaaggccctctaaaagtaccgaaggacgccgacgcccgccagctcatcatggtcgcgtagttcttcctcctcggagtcattgtcgtcgtcaggtacccctcggggtgcttccctctgctgccctattcctccggacggccttgccactcggtacacttcgtggccgtgccgaggggggccgcctggctccagggtgctcatctgcgcggacgccactagacaaggccgcatacgttctcaagggcagcgatctgaggccgaggatgtgggcgcgctcacgcaggacatacgatggacctactaactgggaatgaccgaatcactggacttacccgtgtgcttcattggctaccaccgccaccagcttggtgacacgtaccaatgggtgcatatagacaggaccacattttactcctgacaatctgacgcacgcaggaccagaagacgaagtccgttgtgcggtcgacctggaaaacattgagtgaactgctgagggtatagccgaggctaccattgttgataccagagtcctctgactcgaccaaattcagttgctgggacgatatttgcagcctcatgagcttgaagatga

SEQ ID NO: 131489 - DNA, 4824 bp, Zea mays
  Clone ID: MRT4577_51400C.1
atggatcctaaagggaagggaatcgtgatcaacgacaaggagaaggagttcttcgtcaacgagccaagggatgacaagtccaacgactcgggctcgggccacagccgcaaagatgggaagaagaagaagacaagacgcatcaaggagatcgtctactacgacagcgatgagtctacttcctcccaaaaggacgacgaccacaacgaatacgagagaaagaaaccggtcaattcgaacttttcttttgattactctcgtattcctcaaagtactaatgctcatttattatctattccacttggtaaacctcctcattttgatggagaggactacggattttggagtcacaaaatgcgtagtcacttgttctctctccatcctagcatatgggagattgtagaaagtggaatgcactttgatagtacggatagtcccatgtttattaatgaacagattcataaaaatgcacaagctactactgtgttgctagcctctttgtgcagggacgagtaccataaggtgagcggcttggacaatgccaagcagatctgggacaccctcaagatctctcatgaggggaatgatgtcaccttgctcaccaagatggagttggtggagggcgagcttggacggttcgcaatgataaggggcgaggagccaactcaaacatacaaccggctcaagacccttatcaacaaaataaggagctacggaagcacgcgatggacggatcacgacgtcgttcgcctaatgctaaggtcctttactgttcttgatcctcatttggtgaacaatattcgtgaaaatcctaggtacaccaagatgtcgcccgaagaagttctggggaagttcgtaagcgggcgaatgatgatcaaggaggcaagatatgtggacgacgcgttgaacgatcctattcatgagtctcaacccattgctctcaaggcaacgaggagcaaggaggcgctaccgagcaaggtggcgcaagttgaggcggccgggctaaataatgaggagatggccctcatcattaagcgcttcaagacggtgcttaaaggtcgcaagggacagccaagcaagaccaagacaaaggagaagcgctcgtgcttcaaatgtggtaagattggtcatttcattgctaactgtcccgataatgaaagtgaccaggaaaaggggaacaaaagggagaagaagaagcattacaagaaggccaagggcgaggcacatatcggaaaggagtgggattcagattgctcctcctccgactccgacaatgaaggactcgccgccaccgccttcaacaagtcatccctcttccccaacgagcgtcacacttgcctcatggcaagggagaagaaagtaagcactcatgatactagtacttatgcttcttcaagtgaggatgagtctagtgatgatgatgagatagattactcatgcttattcaagggattagatagatctaaaattaataagattaatgagttgattgatgctttgaattacaagaatagattactagaagaacaagaggatcttttatatgaggagcatgataaatttgttagtgcacaaaattctcttgctctagaaatcaaaaggaatgaaatgctctctagtgaattatctacttgtcatgaatccatctctaaattaaaaagtgttaatgatgatttgaatgctaagttagaaatagctagtaaatcaacatcttgtgtagaaattgttgaaacttgcaataggtgtaaagattttgacattgatgcttgtagtgaacacctagtttcaatttccaaacttaatgatgaattggctagtcttaatgctcaacttaagactagcaagagtaattttgataagctaaaatttgcaagggatgcctacacaattggtagacacccctcaattaaggatggacttggctacaagaaggaagccaagaacttgacaagacataaggctcccatctccgccaaggagaaagggaaggcccctatggctagtagtgtgcaaaagaaccatgcctttatgtaccatgataggagagaatctagaaatgcttataggagatgtaacgcatatgatgcttttgattctcatgacatgtttgcttctagttcttcttatgtgcatgatagaaatgttggtaggagaaatgttgttcataatatgcctaggagaaatgttgttaatgttcctaggaaagtttatgcatccgggggttcaagctggattatcgacagcggatgcacaaaccatatgacgggggagaagaagatgttcacctcctacgtcaagaataaggattcccaagattcaattatattcggtgatgggaatcaaggcaaggataagtctgaaacccaagggaccctcaagcgcttcctcaggagagctcaaaatgagtttgagctcaaggtgaagaagataaggagcgacaacgggtccgagttcaagaaccttcaagtggaggagttccttgaggaggaaaggatcaagcacgagttctccgctccctacacaccacagcaaaatggtgtggtagagaggaagaacaggacgctaatcgatatggcgaggacgatgcttggagaattcaagacccccgagcgtttttggtcggaagccgtgaacacggcttgccacgccatcaacagggtctaccttcatcgcctcctcaagaagacttcgtatgagctactaaccgataacaaacccaatgtatcttactttcgtgtatttgggagcaggtgctacattctagtgaagaagggtagaaattctaaatttgctcccaaagctgtagaagggtttttgttaggttatgactcaaatacaaaggcgtatagagtcttcaacaaatcatcgggttttgttgaagtctctagcgacgttgtatttgatgagactaatggctctccaagagagcaagttgttgattgtgatgatgtagatgaagaagatgttccgacggccgctatacgaaccatggcgattggagaagtgcggccacaggaacaagatgaacgagatcaaccttcatcctcaacaacggtgcatcccccaactcaagacgatgaacaggttcatcaaaaggaggcgtgtgatcaagggggagcacaagatgatcacgtgatggaggaagaagcgcaaccggcacctccaacccaagttcgagcggtgattcaaagggatcatcccgtcgaccaaattttgggtgacattagcaagggagtaactactcgatctcgattagttaatttttgtgagcattactcctttgtctcttctattgagcctttcagggtagaggaggccttgctagatccggattgggtattggccatgcaggaggaactcaacaacttcaagcgcaatgaagtttggacactggtgcctcgtcccaagcaaaatgttgtgggaaccaagtgggtgttccgcaacaaacaggacgagcacggggtggtgacgaggaacaaggctcgacttgtggcaaaaggttatgcccaagtcgcaggtttggactttgaggagacgtttgctcctgtggctaggctagaatcaattcgtatcttgctagcatatgccgctcaccattctttcaggttgtaccaaatggatgtgaagagcgctttcctcaatgggccaatcaaggaggaggtgtacgtggagcaaccccctggcttcgaggatgaacggtaccccgaccacgtgtgtaagctctctaaggcgctctatggacttaagcaagccccaagagcatggtatgaatgccttagagacttcttaattgctaatgctttcaaggttgggaaagccgatccaactctttttactaagacttgcgactgtgatctttttgtgtgccaaatttatgccgatgacataatatttggttctactaaccaaaagtcttgtgaagagtttagcagggttatgatgcagaaattcgagatgtcgatgatgggcgagttgaactacttccttgggtttcaagtgaagcaactcaaggacggcaccttcatctcccaaacaaagtacacgcaagacttgctaaagcggtttgggatgaaggacgccaagcccgcaaagactcctatggggaccgacggacacaccgacctcaacaaaggaggtaagtccgttgatcaaaaagcataccggtcaatgatagggtctttactttatttatgtgctagtagaccggatattatgcttagcgtatgcatgtgtgctagatttcaatccgatcctaaggagtgtcacttagtggcggtgaagcgaattcttagatatttggttgctacgccttgcttcgggctctggtatccaaaggggtctacctttgacttggttggatactcagattccgactatgctggatgtaaggtcgataggaagagtacatcaaggatgtgccaattcttaggaaggtccctggtgtcgtggaactctaagaaacaaacctccgttgccctatccaccgctgaggccgagtatgttgccgcagggcagtgttgcgcacaactactttggatgaggcaaactcttcgggactttggctacaatctgagcaaagtcccactcctatgtgacaatgagagtgctatccgtatggcggaaaatcctgttgaacacagccgcacaaagcacattgacatccggcatcactttttgagagaccaccagcaaaagggagatatcgaagtgtttcatgttagcaccgagaaccagctagccgatatctttaccaagcctctagatgagaagaccttttgcaggctgcgtagtgagctaaatgtcttagattcgcggaacttggattga

SEQ ID NO: 131490 - DNA, 3147 bp, Zea mays
  Clone ID: MRT4577_51401C.1
atgacgggggagaagaaaatgttcacctcctacgtcaagaacaaggattcccaagattcaatcatattcggtgatgggaatcaaggcaatgtgaaaggcttaggcaagattgcaatttcaaatgagcactctatttctaatgtgtttttagttgagagtcttggatataatttgctatctgttagtcaattatgtaatatgggttataattgtctatttacaaatatagatgtgtctgtctttagaagaagtgatggttcactagcttttaagggtgtattagatggcaaactttatttagttgattttgcaaaagaggaggccagtctagatgcatgcttaattgctaagactagcatgggctggctgtggcatcgccgcttagcacatgtggggatgaagaaccttcacaagcttctaaagggagaacacgtgataggattaactaatgtgcaattcgaaaaagatagaccttgtgcagcttgtcaggcaggtaaacaagtgggaggagcacatcacagcaagaatgtgatgaccacatcaagacccctggagctgctacatatggacctcttcagacctgtcgcctatctaagcatagggggaagtaagtatggtttagttattgtggatgacttttcccgcttcacttgggtattctttttgcaggataagtctgaaacccaagggaccctcaagcgcttcctaaggagagctcaaaacgagtttgagctcaaggtgaaaaagataaggagcgacaatgggcccgagttcaagaaccttcaagtggaggagttccttgaggaggaagggatcaagcacgagttctccgctccctacacaccacagcaaaatggtgtggtagagaggaagaacaggacgctaatcgatatggcgaggatgatgcttggagagttcaagacccccgagcgcttttggtcggaagccgtgaatacggcttgccacgccatcaacagggtctaccttcaccgcctcctcaagaagacgtcgtatgagcttctaaccggtaacaaacccaatgtatcttactttcgtgtatttgggagcaaatgctacattctagtgaagaagggtagaaattctaagtttgctcccaaagctgtagaagggtttttgttaggttatgactcaaatacaaaggcgtatagggtcttcaacaaatcatcgggtttggttgaagtctctagcgacgttgtatttgatgagactaatggctctccaagagagcaagttgttaatcttgatgatgtagatgaagaagatgttccgacggccgctatacgaaccatggcgattggtgatgtacgatcacaggaacaaaaggagcaagatcaaccttcttcctcaacaatggtgcatcccccaactcaagaagatgaacaggttcatcaagaggagacgtatgatcaagggggagcacaagatgatcaagtaatggaggaagaaggacaaccggcacctccaactcaagtccgagcgatgattcaaagggatcatcccgtcgaccagattttgggtgacataagcaagggagtaactactcggtctcgattagttaatttttgtgagcattactcctttgtctcttctattgagcctttcagggtagaagaggccttgctagatccggactgggtgttggccatgcaagaggagctcaacaacttcaagaggaatgaagtttggacgctggtgcctcgtcctaagcaaaatgttgtgggaaccaagtgggttttctgcaacaaacaagacgagcacggagtggtgacaaggaacaaggctcgacttgtggcaaaaggttatgcccaagttgcaggtttggactttgaggagacttttgctcctgtggctaggctagagtccattcgtattttgctagcatatgccgctcaccattccttcaggttgttccaaatggatgtgaagagcgctttcctcaacgggccaatcaaggaggaggtgtacgtggagcaaccccctggcttcgaggatgaacggtaccccgaccacgtgtgtaagctctctaaggcgctctatggacttaatcaagccccaagagcatggtatgaatgccttagagatttcttaattgctaatactttcaaggttgggaaagccgatccaactcttttcactaagacatgtgatggtgatttgtttgtgtgccaaatttatgtcgatgacataatatttggttccactaaccaaaagtcttgtgaagagtttagcagggtgatgacgcagaaattcgagatgtcgatgatgggcgagttgaactacttccttgggttccaagtgaagcaactcaaggacggcaccttcatctcccaaacgaagtacacgcaagacttgctaaagcggtttgggatgaaggacgccaagcccgcaaagactccgatggggaccgacggacacaccgacctcaacaaaggaggtaagtccgttgatcaaaaggcataccggtcaatgatagggtcattactttacttatgtgctagtagaccggatattatgcttagcgtatgcatgtgtgctagatttcaatccgatcctaaggagtgtcacttagtggcggtgaagcgaatccttagatatttagttgctacgccttgcttcgggctctggtatccaaaggggtctacctttgacttaattggatattcagattccgactatgctggatgtaaggttgataggaagagtatatcggggacgtgccaattcttaggaaggtccctggtgtcatggaactctaagaaacaaacttccgttgccctatccaccgttgaggccgagtatgttgccgcaggacagtgttgcgcgcaactactttggatgaggcaaaccctcagggactttggctacaatctgagcaaagtcccactcctatgtgatattgagagtgctatccacatggcggataatcctgttgaacacagccgcacaaagcacatagacatccggcatcactttttgagagaccaccaacaaaagggggatatcgaagtgttccatgttagctccgagaaccagctagccgatatctttaccaagcctctagatgagcagaccttttgcaggttgcgtagtgagctaaatgtcttagattcgcggaacctggattga

SEQ ID NO: 131491 - DNA, 3034 bp, Zea mays
  Clone ID: MRT4577_51402C.1
aaaggataggaagatagttgctaggaaattaggggcaaaatgcaagggtgataaaacttgcatttgggtccctaagacaattgtgactaaccttgtaggacccaacaagagttgggtttatgcatccgggggttcaagctggattatcgacagcggatgcacaaaccatatgacgggggagaagaagatgttcacctcctacgtcaaaaacaaggattcccaagattcaatcatatttggtgatgggaaccaaggcaaggtgaaaggcttaggcaagattgcaatttcaaatgagcactctatctctaatgtatttttagttgagtcccttggatataatttgttatctgttagtcaattatgtaatatgggatataattgtctatttacaaatgtagatgtgtctgtctttagaagaagtgatggttcattagcttttaagggtgtattagacgacaaactttatttagttgattttgcaaaagaggaggccggtctagatgcatgcttaatagctaagactagcatgggctggctgtggcatcaccgcttagcacatgtagggatgaagaaccttcacaagcttctaaagggagaacacgtgataggtttgactaacgtgcaattcgaaaaagatagaccttgtgcagcttgtcaagcaggtaaacaagtgggaggagcgcatcacaacaagaatgtgatgaccacatcaagacccctggagctgctacatatggacctcttcgaacccgtcgcctatctaagcataggaggaagtaagtatggtctagttattgttgatgacttttcccgcttcacttgggtattctttttgcaggataagtctgaaacccaagggaccctcaagcgcttcctaaggagagctcaaaatgagtttgagctcaaagtgaagaagataagaagcgacaacggatccgaattcaagaaccttcaagtggaggagtttcgtgaggaggaagggatcaagcacgagttctccgctccctacacaccacaacaaaatggtgtggtagagaggaagaacaggacgctcatcgatatggcgaggacgatgcttggagaattcaagacccccgagtgcttttggtcggaagccgtgaacacggcttgccacgccatcaacagggtataccttcatcgtctcctcaagaagacgtcatatgagcttctaaccggtaacaaacccaatgtatcttactttcatgtatttgggagcaaatgctacattctagtgaagaagggtagaaattctaagtttgctcccaaagctgtagaagggtttttgttaggttatgactcaaatacaaaggcgtatagagtcttcaacaaatcattgggtttggttgaaatctctagcgacgttgtatttgatgagactaatggctctccaagacagcaagtttgtgattttgatgatgtagacgaagaagaagttccaacagccgcaatacgcaccatggcgattggagatgtgcgaccacaggaacaagatgggcaagatcaaccttcttcctcaactatggtgcattccccaactcaagacgatgaacaggttcatcaaaaggaggcgtgtgatcaagggggagcacaagatgatcatgtgatggaggaagaagcgcaaccggcacctccaacccaagttcgagcgatgattcaaagggatcatcccgtcgaccaaattctgggtgatattagcaagggagtaactactcgatctcgattagttaatttttgtgagcattactcctttgtctcttctattgagcctttcagggtagaagaggccttgctagatccggactgggtgttggccatgcaagaggagctcaacaacttcaagaggaatgaagtttggacgctggtgcctcgtcctaagcaaaatgttgtgggaaccaagtgggtgttccgcaacaaacaagacgagcacggggtggtgacaaggaacaaggctcgacttgtggcaaaagcttatgcccaagtcgcaggtttgcactttgaggagacttttgctcctgtggctaggctagagtccattcgtatcttgctagcatatgccgctcaccattctttcaggttgttccaaatggatgtgaagagcgctttcctcaacggtccaatcaaggaggaggtgtacgtggagcaaccccctggcttcgaggatgaacggtaccccgaccacgtgtgtaagctctctaaggcgctctatggacttaagcaagccccaagagcatggtatgaatgccttagagatttcttaattgctaatgctttcaaggttgggaaagccgatccaactcttttcactaagacgtgtgacggtgatctttttgtgtgccaaatttatgtcgatgacataatatttggttctactaataaaaagtcttgtgaagagtttagcagggttatgacacagaaattcgagatgtcaatgatgggcgagttgaactacttccttgggttccaagtgaagcaactcaaggacgacaccttcatctctcaaacgaagtacacgcaagacttgctgaagcggtttgggatgaaggatgccaagcccgcaaagactccgatggggaccgacggacacaccgacctcaacaaaggaggtaagtccgttgatcaaaaggcataccggtcaatgatagggtcgttactttacttatgtgctagtagaccggatattatgcttagcgtatgcatgtgtgctagatttcaatccgatcctaaggagtgtcacttagtggcagtaaagcgaatccttagatatttagttgctacgccttgcttcgggatctggtatccaaaggggtctacctttgacctgattggatattcagactccgactatgctggatgtaaggtcgataggaagagtacatcggggacgtgccaattcttaggaaggtccctggtgtcatggaattctaagaaacaaacctctgttgccctatccaccgctgagaccgagtatgttgccgcaggacagtgttgcgcgcaactactttggatgagctaa

SEQ ID NO: 131492 - DNA, 246 bp, Zea mays
  Clone ID: MRT4577_51403C.1
tcgggccgtaccagggctgccgttacgccgcatcaccatgcgcaagaccgtggtcaagcccaaggtggcggcgtctgctagtacctgttacggctccgaccgcgtcaagtacttcggccggtctatactctatcaaatatgctctatattgtgctaatttatcttcttcaaatttctctcccatcatccttatccatctctcccatgcaaaatcttttaattcatgactcctatatcttcatattc

SEQ ID NO: 131493 - DNA, 1315 bp, Zea mays
  Clone ID: MRT4577_51404C.1
cggcgccgccgcggcccgccccaccccggggctcaacctgcgctcgtacagcgcctcctacgcggcctcctacgggcccagccttgtcggcggcggcggcggcggtggcggtggcggcggggagctgaagcgctccggcagcgtcaccaactggacctccgccaaccgccgctccgtcaacctcagggggtacacgccgtccttcgccgcgctggacgacaccgccgcggcggtcccggcgcccaggaaggtgcaggcggtgatggacgacgccgagctgcagcggaggaagcgcctggtcgtgtacaagacctacgacgtcgaggggaaggtccgggagtcggtgcgccgcggcgtaaactggatcaaggggaagtgctccagcgtggtgtacggctggtggtgatcgctagctccatcgtcggcccagcccaccccgccaccggccgatctctccgccgttccggtccatcagagtggtactactacctatgagttgagcttttcttggtgcacgcccaccgtacctcctcttatttcttcccccttgatctgttttccctcttggagttaggatcttttttttatctttaggagatggatttggtggtatgtagaatgccgtgcttcaggctgtggtgtcctactcctttgtacagatgagatatatcatctttccagcctacttgctagtaggtctatgtaaatataggtgctgcatatatagaataagacttttgtaaattaaaaaaaaaaaaaaaaaaaaaaaaaaaaaatttttcccctcttcccgagctcccttgctaggttcctcgtccgcctctctgtcctagtctcgtcagcaacagcacagtgttgttactgacgcgccttcactctgttgacctgcatctagccaagtttatttggagactccaacctttggtctcccaaacttggagctcccaaggggagaggttctgccaaaattttggcttctgagcatccattttcagggggaggttctgccaaaatctgctcctgtgaacatagatttctcaaggggaggttctgccaaaatttcctcctgtaaccaccagctttccagggggagattctgccaaaatttcctgcactgatcatcattcttctaaggggaggttctgccgaagttttcttgtgtgacgacgacgatcagtttccacggggagattctgccaaaattttctgcactgaccatcagtcttccaggggaggttctgccaaaattttcttctctcactatcacttctccaaggccaagccctgccaaaaattccttcatatatcacatgca

SEQ ID NO: 131494 - DNA, 398 bp, Zea mays
  Clone ID: MRT4577_51405C.1
ttcttttttttttttttgtcttttttttttttttttttttttgatcttcttttttggggcaaagcatatctttctacataggaacagacaaatctctagaaaccaaaactcacaacatcagctccgctgcattcctgggaaacatcggacgggccatacccgacacagaaatgataggggggaaaaaaaaatttctttttgagaggatcggctctttgccctgggggcctccaggccggagccgaccactcccccccccgggagggcccgtgggccggctgcgcctcctcggggccctggttggggaccccaacagcgaacatggcggcggggggatcttgggtgcggccctcgtcgcctggcccggcgccgtcctctttctccggcggcggggcccc

SEQ ID NO: 131495 - DNA, 471 bp, Zea mays
  Clone ID: MRT4577_51406C.1
cccacgcgtccggacccacgcgtccgggcaagtgctccagcgtggtgtacggctggtggtgatcgctagctccatcgtccgcctagcccaccccgccaccggccgatctctccgccgttccggtccatcagagtggtactactacctatgagttgagcttttcttggtgcacgcccaccgtacctcctcttgtttcttctcccttgatcagagttaggatcttttttttttgttttatctttaggggatggatttggtggtatgtagaatgagtagtcgagcttctcttggggatttgtgagggtggggaggttgggtggtggtgacatggatgttgggatgtgtcctcctttgtacagatgagatatatcatctttccggcctacttgctagtatctggtctatgtaaatatatgtgctgcatatatagaataagacttttgcaaaaaaaaaaaaaaaaaaggggcggcc

SEQ ID NO: 131496 - DNA, 520 bp, Zea mays
  Clone ID: MRT4577_51407C.1
agcagtggtaacaacgcagagtactttttttttttttttttttttttttttttgcaaaagtcttattctatatatgcagcacctatatttacatagacctactagcaagtaggctggaaagatgatatatctcatctgtacaaaggagtaggacaccacagcctgaagcattctcttgggatttgtcatcccaacagccatgtcaccaccacccaaccctccccaccctcacaaatcaccaagagaagctccactactaattctacataccaccaaatccatctcctaaagataaaaaaaagatcctaactccaagagggaaaacagatcaaaggggaagaaataagaggaggtacggtgggcgtgcaccaagaaaagctcaactcataggtagtagtaccactctgatggaccggaacggcggagagatcggccggtggcggggtgggctgggccgacgatggagctagcgatcaccaccagccgtacaccccgcgtactctgcgttgttaccactgct

SEQ ID NO: 131497 - DNA, 354 bp, Zea mays
  Clone ID: MRT4577_51408C.1
aacagaagaaattttttgaagaaaaaaaggagaaccttcttagattgcagcattacttacatttgtaaactgacatgatttgaacattacatagccaggggaggggcccatggagaccataaatagccacaagagcgggattagagtggtacactgacacctggtaactaatgcaagcacatggattaaatattaactctgcagtttgatagcttgctaattaacctcaccagttgctggtatagtacaggcacagttagagtttagtgataagatagtgacggagcatgtttgagacgacctgaattggttcatctaagtagatgattgctctatcagatccaccactctatg

SEQ ID NO: 131498 - DNA, 1168 bp, Zea mays
  Clone ID: MRT4577_51409C.1
ctcgcgccgcttgctttgtccgttgtcgcagagcgaggaagcacgcagagagtgagtaaaaaagaaagagagggatgccaatggagaggtcggtgtcgtgcgcggagaggggcagcacgttcggcggcggggcggcggtggacgtccggagctacagcgcctcctacgcgaggccccagccgcggccgccgacgtccagggtgcagcgcgccaggagcgtgagcgcgtggacgcgcccggcgccgccgcccgtgcagcggaccgggagcaccaagagcggcgccgccgcggcccgccccaccccggggctcaacctgcgctcgtacagcgcctcctacgcggcctcctacgggcccagccttgtcggcggggcggcggcggcggtggcggcggggagctgaagcgctccggcagcgtcaccaactggacctccgccaaccgccgctccgtcaacctcagggggtacacgccgtccttcgccgcgctggacgacaccgccgcggcggtcccggcgcccaggaaggtgcaggcggtgatggacgacgccgagctgcagcggaggaagcgcctggtcgtgtacaagacctacgacgtcgaggggaaggtccgggagtcggtgcgccgcggcgtaaactggatcaaggggaagtgctccagcgtggtgtacggctggtggtgatcgctagctccatcgtcggcccagcccaccccgccaccggccgatctctccgccgttccggtccatcagagtggtactactacctatgagttgagcttttcttggtgcacgcccaccgtacctcctcttgtttcttctcccttgatctttttcccctcttggagttaggatcttttttggttttatctttaggagatggatttggtggtatgtagaatgagtagtggagcttctcttggtgatttgtgagggtggggaggttgggtggtggtgacatggctgttgggatgacaaatcccaagagaatgcttcaggctgtggtgtcctactcctttgtacagatgagatatatcatctttccagcatacttgctagtatctggtctatgtaaatataggtgctgcatatatagaataagacttttgtaaattaatactccctccgatgtctttccgacaacggcccagtatataaagtatagctttaatc

SEQ ID NO: 131499 - DNA, 251 bp, Zea mays
  Clone ID: MRT4577_5140C.1
gacccacgagtccacaaaatatccccaaaccctagctcccgatctcgatggcgaatcctcgcgtcttctgcgacatgaccgtcggcggcgccccggcgggccggatcattatggagctgtacgccactgatgttttactcaccgcgtaggaggtggcattgaagatcatcttctttaagttctacctatcgctgattacatcggttcagaagtaacttttcaaagctaacgctcgtccgatcaatctgaac

SEQ ID NO: 131500 - DNA, 479 bp, Zea mays
  Clone ID: MRT4577_51410C.1
tccaggcgccgactcaagaatacactatcattactgcctaataaccgcgtccacgccctggcgacgcccggagcgcgtgatagagccggtactacggcgggaagacgacgcaggaccgccgagaggcatggggaggcgatgggcagccgctccactcacgcccccgtgaccccggcagtttcacgtgggtgccagccgtggccgtcgcttacctcacgcttagctctgcgatggtcctggaccgatgctggccacaccccggcgacgtcgtgttcgtactgtcagcttacgttgatcttgtgctgcttttgtggtgactagcgaggtacgagtgcgcggagcctgagtcggcggttaaggatcggctcaagcttgctgagtggctgcttaactctgctctgacgctattatgttgctataaggatgccggccgcatgccctgccatggtgctgctattgggtgtctcatgggtctgacc

SEQ ID NO: 131501 - DNA, 419 bp, Zea mays
  Clone ID: MRT4577_51411C.1
atataacacaggcatattggacattgatggaagttcacacaaactaaaatggttgacagaagtccacacagattgaatctggcacaagttcacacaactacatggtggcgtccaatacaagctcatggaagtacacgaaactaattcatactacattgcaacggtttacttagtgtaagcttatttagacggataccaacacctgaaccttgacttgggcttacttggctggatgtagcctaaacttcggtggcactgccttgctctggtgaggcccgccacccttcaactactactgcatgcatcacttgtgctgcttcagcttgtgtaacctggactccagcactagacacagttgaggatggacatacacttattgaaaatagcacgcgactactacagggaatctatcatatact

SEQ ID NO: 131502 - DNA, 2486 bp, Zea mays
  Clone ID: MRT4577_51412C.1
aattcggcacgaggctttgtccgttgtcgcagagcgaggaagcacgcagagagtgagtaaaaaagaaagagagggatgccaatggagaggtcggtgtcgtgcgcggagaggggcagcacgttcggcggcggggcggcggtggacgtccggagctacagcgcctcctacgcgaggccccagccgcggccgccgacgtccagggtgcagccgcgccaggagcgtgagcgcgtggacgcgcccggcgccgccgcccgtgcagcggaccgggagcaccaagagcggcgccgccgcggcccgccccaccccggggctcaacctgcgctcgtacagcgcctcctacgcggcctcctacgggcccagccttgtcggcggcggcggcggcggcggtggcggcggggagctgaagcgctccggcagcgtcaccaactctacctccacgccccccgtacctgtcatcctttctgggtacttgatcacattggagatggttttggtggtatgtagaatgagcaggggagcctctcgtggtgagttgtgagggtaggggggctgggtggtggggacatggctggtgggagggcaaatcccaagggaatgcttgaggctgtgatgtgtccccgagccttgccacgcccttttcccctcttcccgagctcccttgctaggttcctcgtccgcctctctgtcctagtctcgtcagcaacagcacagtgttgttactgacgcgccttcactctgttgacctgcatctagccaagtttatttggagactccaacctttggtctcccaaacttggagctcccaaggggagaggttctgccaaaattttggcttctgagcatccattttcagggggaggttctgccaaaatctgctcctgtgaacatagatttctcaaggggaggttctgccaaaatttcctcctgtaaccaccagctttccagggggagattctgccaaaatttcctgcactgatcatcattcttctaaggggaggttctgccgaagttttcttgtgtgacgacgaccatcagttttccaggggggagattctgccaaaattttctgcactgaccatcagtcttccaggggaggttctgccaaaattttcttctctcactgtcacttctccaaggccaagccctgccaaaatttccttcatatatcacatgcatcgtagacatacagacaataaactctaatttgcaaaggtaacaaaaaaaagagagagagtgctttcctccttggccttgatggtaggctagtagagaaaaccgcgcgcagcatctgtttacatgttgttgctcgtcctgtccgagcaccttctttccagatttatggtcggttctgccctaacccgccttgtccagtccttctctgttgttttcctctactggttttatgtcttctcagtaagccgccagtagttggactcaccttttcaagttatctaggcatttcctatatatttaccacatataaaaattatactaaggcagtaacaaaagaggtgcctttatatctgacaaacagaagggagtgaaaaagtttagattacacctcagtttgcctgtggtgacaactatgtcaagtggcacttcgtccggatcgagccggtgggtccaaagttctagatccgaggatgacctagatctccaggcccagatggagaggaggagaaagcggaggaaggagtcgaatcgggagtcagctcggaggtctaggcaacggaagcaagaacaccttgacgacctcacctcacaggtaaatcagctgaaggaccagaacaagcagctcagcatggcactgagtataaccagccaaaaccttgtggcagtgcaagcgcagaactctgttctgcagacccagaagatggagctggacagcaggctgggtgccctgacggagatcctctggtacatgaactcaagcaccagcaccagcactgctcctacaaatccagccatagcgaacgacttcacagcatggagcagagcctctgatattcttggtggaaccagctacagcgccatagacctgtaccaatgcttctagctctaagctctagctctagaagagagaaggtggctgtggcatatgacatagtggtagggccaggaagaaaggaggcgggcaggcatcaagttctgttcaatcgtgtggggcctttgtgtcactgttgatgtgtgcagtgtgtgcttgatgcttctccctccactgtttattttcgaggcgacggcgatgttttggtttggtagagactcaaggacggacaaaatggcagaaagttgccttggctttgtgtgacgtaaatgcagttgttctccggtatttatatggcaaataatattgggccagctagtgaaaaagacaggcagatgatttgatgtggctcttgatatatagggaaataatatgcgtaacgatgattataatgtttattaagatgtcgatttgatgtcaattgatatccgtttccagtctc

SEQ ID NO: 131503 - DNA, 540 bp, Zea mays
  Clone ID: MRT4577_51413C.1
tcggtttgagtgatcacttgggtttacgacgcgtgtccaccagacatttaaattcctgagtttagttgtgttataaatgaatgcgacacaaataggatcaatcacagagaagacacggatttaacgtggaaaacccctccaaagtgaaggggaaaaaaccacgggcgccggccgggaacttctcactattttcggggggttacagatcacaggagatttacaattgagatcgatatctgttgcgggttacaaagatatttatagaggtgaaaccctaaaacgatccgtactaagccttccggcgacgggccttcgtttcgatcgccaacttggccgacttcttcagaatttggatcacaaactcaacaagttgacgtagtgattttaatccattcttcacggactagtactgtctgtttattggatgacttacagttagtgcaggcatgaatgtttgcatgactcaaaatcttattttgatcagctggattttgtcttttatgaagcgagaatatctgctattctgtttaatataatttt

SEQ ID NO: 131504 - DNA, 205 bp, Zea mays
  Clone ID: MRT4577_51414C.1
agcttgcaaaagcttcaaaaggctttattacggtttttaattgttattaataataaggggcgggacgccacatgacacccaattacaggcctccacggggggggggggggccaaaggtggcccaaggttttactaaagcccaccacagacaagccccgggaggccaagggggttttaagagcactccttaaaacccctttaggaa

SEQ ID NO: 131505 - DNA, 619 bp, Zea mays
  unsure (1)..(619): unsure at all n locations
  Clone ID: MRT4577_51415C.1
gtagtaagttcatcgcgccatcaagcgtgattaggagctgaataagcgtaaaaacatacgtgtctccacttgttaatactacaaccggaaggaaggcaaaaagaaaggtacgcaaaggggattgacaggatgaaatagaggagctgttggagatgtcctaacacgcagatttactacagacaagcatagacgtctaaatgctcctacgacggaatacttccgcgagtgcctatttctgcaagtgggtgacgatggatgagatgaggacatgaggtctttattcgtcaagggccttctggatgtccttctgaatcgacattggagctgtcgacgttccgtatctcccaacgaccttcccgttcttgtccaccagaaacttggtaaagttccatttgatgatccgaacaggccaggcttggcagacgtaattttagacgaacagttctcaccttctgaaaaacggggtacacacagcttcaaatgctgaactcacgacaaagcacatttgattctcttcctcttccctctacccgaacggngctctctcaacccccgtctcttgatttgattcttcctcttctcgacatcttttttgttccggtagtaatagtaatgggga

SEQ ID NO: 131506 - DNA, 202 bp, Zea mays
  unsure (1)..(202): unsure at all n locations
  Clone ID: MRT4577_51416C.1
attagaagcctggaagtaataaattacatgggggattggatccttaaccatttcttttttttgacaccaagaactaatctctatcccactgaaccgcgctccttgccttcttcctcgctaagggcccattgggaagacgggcatcacacttttttttttcncgagcntcctgccagaggccccaattcgacctctaaggaga

SEQ ID NO: 131507 - DNA, 800 bp, Zea mays
  Clone ID: MRT4577_51417C.1
ggccgctttttttttttttttttacaaaaattgagatagagaatgaaatagggtaaccaatacacagatttactacagacaagcatagacgtctaaatgctcctacgacggaatacatccgcgagtgcctatttctgcaagtgggtgacgatggatgagatgaggacatgaggtctttattcgtcaagggccttctggatgtccttctgcaaaaatcgaagaaaacaccaatccatcaaaagcaagcagacgactagaaagggatggagagaaaggggagagggaatgaaggaggaacctcaatcgacattggagctgtcgacgttccgtatctcccaacgacctttccgttcttgtccaccaaaaacttggaaaagttccatttgatgatccgaacaggccaggcttggcagacgtaattttagacgaacagttctcaccttcttgacggtgaattcgtgtatggaggtctccggcacggactcggccgcccccatctcgccaccgctccgctccgcctctcctcttcctcttccctacccgatcggggctctctcaaccccccgtctcttgatttgattcttcctcttctcgacatctttttttgttccgatagtaataatggggagagaagagagtgagaagagcgcgtggttcacaggctgcgtttagtttcaggatgagatggtccaggtaggatatcctttcggtggctgagttagcgaacacgtttgagcctttgaggcatcatgaatcccggccggcttctatcccggccggcctcgaggaacccaatcgcc

SEQ ID NO: 131508 - DNA, 342 bp, Zea mays
  Clone ID: MRT4577_51418C.1
ccggacaggagggtccatcaactaagttcatctgcagcagctctcgcagagaagtctcctgaaaaccataaggagcacatagattaattttggtcaaacagattcagatctgtttcatgtttctctaccatctcctgctccgacaccggcattaaccccaattgaaagagtggctgcaatcgcatggtccactagaaagcgatatattctccaccaagacagtagctcgactcttcgcgtcatctctgtgcatctcttcagcatatcagtatctcagggggatgtgtcaaggagtgataggaggttactacagagttctgatgcagtattgaggttaagatg

SEQ ID NO: 131509 - DNA, 313 bp, Zea mays
  Clone ID: MRT4577_51419C.1
gcaaagcaaagcgctagccttcctactgtcccgatggcccgcacgaagcagacggccaggaagttcactggcggcaaggcgcctatgaagcacctggccactaaggccgctcgcaagtttgccacggctaccggctgagtgaagaagccccaccgtttccgtcccgacaccgtcgagctcctggagatccgcatgtaccagaagagcacagatctgctgattcacaagctgccgttccagcatcatgtgcgtgagatcgcccaggatttcaagaccgaccttcgcttgcagagctgcgtcgtcgccgcgctga

SEQ ID NO: 131510 - DNA, 860 bp, Zea mays
  Clone ID: MRT4577_5141C.1
cattgggtacctcgaggccggccgggtcttctcagccgcaaacactactggcatctccttcacaccgcacctgcgcctctgctatatctcaaacccggcccagcccaacacccgtactcgaccaacaacctccctcccccttcctgccagacaccacccaaagaaatcatggccgattctctcaccgaggagcaagtctccgagttcaaggaggccttctctctgttcgacaaggatggcgatggtcaaatcaccaccaaggagctaggtaccgtcatgcgctcgctcggccaaaatcccagcgagtctgagctccaggacatgatcaacgaggtcgatgccgacaacaacggcaccattgacttcccagaattccttaccatgatggcccgcaagatgaaggacaccgactccgaggaggagatccgggaagccttcaaggtcttcgaccgcgataacaacggtttcatctccgccgccgaactgcgtcacgtcatgacttctattggcgagaaattgaccgatgacgaggtcgacgagatgatccgggaggctgaccaggacggtgacggccgcatcgactacaacgagttcgtccagttgatgatgcagaagtaagcgtttgaagttgcgggtgctgaatgaatacacgtatcatgacggtgacacggccgagggttaacggcgacgagtgacgggacaatttgagcttcttggcgtgtctttgtacgacggatccgaatgcttgcaacctgagtcggttggctcatttgtcagcatctccggaggaatgactccaataccttatcctcaatccacattctcacgtgaaaaaaaaaaaaaaaaagcggccctcgagc

SEQ ID NO: 131511 - DNA, 312 bp, Zea mays
  Clone ID: MRT4577_51420C.1
ctaatgtgtttgaaaatcaaaacgacaaacttattcatggtttgacaaaggtcggggggggccgcacccccaacaccaccggcccattattaaaccaaaactgcccccactaatgaccagcgcgggggtttcttcggccccctccacagggggggggccccagaccgcgcaggcccatggggggttaaaacgactcaggacttgccgcccaccatggagacggaccacacgggggggggagccctcctttcggacgatggagcctggaaaggggcggccctcccccaggtgtttgccggcaaaaataaagcc

SEQ ID NO: 131512 - DNA, 396 bp, Zea mays
  Clone ID: MRT4577_51421C.1
acttgtgttcttttcacatatagcagacacaggctaaactactcgtgcgtgcataaaaatactatgtttatggggaaatgcacatacaacacaaacatccaagacttgcaacaacttgacatgatgatgcacgataaaacagatcgatggatgctctgtcctctaaacataagctgagctactcaaaacttaactacagttgccgatcactgagtcacgccaagccactttgagaatgtatgaaactcggggcacgcgctgtccgagaccatggactcgtaccatgccttgcagcagccttaaccttggcatgcattcccgtaagctttgcctcttggagtcgagcttcgtctttctggtcttcacaccagcagccttattaagggtggacaattt

SEQ ID NO: 131513 - DNA, 1223 bp, Zea mays
  Clone ID: MRT4577_51422C.1
aaccggacacccgacgcgggtacaaaccctccccacccaccaaggacaccaggatccggccaaaatgcgacgacgacacgacaccaacaaagaaatctccctagtaccagtactactgaataccactccattttttttttttttttatcagtagcaaccagacggaatcatcactcacgatcacggcgagatagcagagtatctacaaggggatcagaatcagatcacacaaccgacaccacgacgcggtacaaaccctccccacccaccaaggacaccagatccgaccaaaatgcgacggcgacacgacaccaacaaagaaatctccctagtaccagtactactgaataccactccattttttttttttttttatcagtagcaaccagacggaatcatcactcacgatcacggcgagatagcagagtatctacaaggggatcagaatcagatcacacaaccgacaccacgacgcggtacaaaccctccgacaaagcctccgacacccaagccgaccccgccgacgtacaccccttctcccaagcctccgacgcccaagccgaccccgccgacgtacactccaagccccaagcctcccacacacccgacgcccaagccgaccccgccgacgtacaccccttccccaaagcctccgacacctaagccgaccccgccgacgtacacgccttcccccaagcctccgacacccaagccgaccccaccgacgtacactccaagccccaagccaccggctaccaagcctcccacgcccaagccgaccccaccgacgtacactcccacaccgaagccgccggccaagccgcccacctacactccgacgccgccggtgtctcacaccccctgcccgccgccaccatactactagaaagcgatgcctaccataccacactgctgtcagtatatggagcatttaggtggtctggatcaatggaagagttgtgtcctagccagccggcaaagatagctgctgatggtaatgatgatgataagaggccactgctaccctactacgtaccctcctctttgtgtgctgccatccgtccccgttagacgatcgaggagagaataacgcagagctcgccgcgccgcgccgcgtataactgtgtgttcgtcccatatgtttagccggccggcaggcgtattgtgcgggtatgtaatggcattgcaaccgatattgggtgtgaaaaccataataaatgtgg

SEQ ID NO: 131514 - DNA, 178 bp, Zea mays
  unsure (1)..(178): unsure at all n locations
  Clone ID: MRT4577_51423C.1
acacagaggacgaggggcgaggcacgcgaacaaacggggcgcccaacaagagcaaccaggaacccacagcagcgacaaagggaggaaanagggcggcggngancccacacgccagggggggacaccagacgccgcacgngacgaaacggggcgaagcaccnactcccgaggggggcag

SEQ ID NO: 131515 - DNA, 411 bp, Zea mays
  Clone ID: MRT4577_51424C.1
acgaacgacactggctcattaaatttccagttccaggaaatggacaggtacttttaggggtaccaacaattaacccggggttttcaaagcacaatggggtcaaaaaagcgttgcaaaatcaccaggacgcgggggtcaccggtgggcaaatgatgcaacttctggtggaggcggagccccggggaacctgatcatgctgtccattaaataaaaactaccgggtttcttgccatgaaattcattcccagcccccttgggggggttgggatttcccccacttaaacaacgagcgggcgcctgccaattggagtttttcaacacttctcccacctcaaaagttattaaatgctggtggattccattgaagaaaatccaacggacggggggggcggtggggaatttcttgtagta

SEQ ID NO: 131516 - DNA, 693 bp, Zea mays
  Clone ID: MRT4577_51425C.1
gtcccacagcagtagatcgaggtagtgctaggcagcaggcacgctacggcgtatggtgcaccctcacggcgacggcggccaacaacctaaaacgacagtgtgtcctccctcttcggccgtattcgctggtccccttccatagtacgacgctgaatgactctcaacgggctggggacgaacttgccaccgacgaaagcgatgatcatggaccctaacgacgtgcagacccatgccaacctgagctcgctccacgacgagaactacttcacatgtgggatcacctcgctgcacttcaacgtcaaacagaataaatatgctgttagttaatgcaccttctccatgtgcttgctaaaaaaacttaccaatgcacgaccatcattcttaaatcaacccatgtagtccatatacgcaaatcaaccaatgctggaagcatggagattgaccagagacatccgaaaaaatggggacagaaatgcactatagcaagatcacataacatgagtgtatgtgatccgcacaagtacacaataacatcgcggacgttgtgagaacgacgaatactgagcctctggaactttgtgcatggcaaccagatgaatgatgaatgtgattcacaaagcgagaagctgatgagaagtcctgctgagagacatgcaagtcacaggtactggataattgccgcgactaatgaga

SEQ ID NO: 131517 - DNA, 175 bp, Zea mays
  Clone ID: MRT4577_51426C.1
ccgtaaccggctccgtttgggtctcatttcataaacagcttcatgaagtggccagatcaagtcggtttggacaactggctgactttgggtgcttcgggatgttcattcatcccgggaatcaagtggaaacaacacggattacatgttgtctgggcgtgctgggattgcacaggct

SEQ ID NO: 131518 - DNA, 423 bp, Zea mays
  Clone ID: MRT4577_51427C.1
tttctaaaaaaaaaaaaaaaaaaaaaaagagggggggtggaggaaaaaaaaaaaaaaaaaaaaaaaaaaaaaaaaaaaaaaaaaaaaaaaaaaaaaaaaaaaaaaaaaaaaaaaaaaaaaaaaaaaaggggcggccctttttaggaggtcccaattttccttccccttctttccaacttattacttttttttggggggggccaaatttaatttatttgcccgtgttttaaaaccttcgggcttggaaaaacccttggctttcccaattttattcgctttgcaaaatttccctttttcccaagttgggttattaccaaaaagccccccccctttcccttttccaaacatttccccctcttaattggcaattggacccccccttttaacggccttttaaccgcgggggttttggggtttcccccc

SEQ ID NO: 131519 - DNA, 425 bp, Zea mays
  Clone ID: MRT4577_51428C.1
cgggcttcggtcccagccgccgccgcagcctctcccttccctcacctgggtcctctgtgtgctgaccaagcagcaacgggtgaggcctggccgagccgctctgcctggatgcacctgcaccgaccctagagccactatgagagttcggagcgatggccgagcggtacctatggagggggcgatctgggttcgatctcaggaggcgaggaccaaggcaacgcacaacggcgaccgagtgaacagtatcccgctctgacaccagctcctcgtatagcatcgtccatactagggctgcgtacaccgacatgctactgaaaaagagatagatctttatatacgcaaactggtggagatcgctttggcgaaagaaatgtattgctagcatcaagtctgtcgagacaatacaaccaatacaagcttgtgcc

SEQ ID NO: 131520 - DNA, 279 bp, Zea mays
  Clone ID: MRT4577_51429C.1
cgtggtggcgttcgttacgtggtagtgaggcgaggttattgactgggtgtccggtcagtggtggagttcattaatgtctaacgagtgacggtctcgctcgtgatgtcatggaccctctccagtgctatggctcccggggtctcggtgcgtgagtccggcgatacttctgaaaataaaaagttcgtctctgggatcatcacttcaggaaaggacgcttatactcgtatgcccttaagagacttgatctccgtgactgggagttcggttaccgcggtatcc

SEQ ID NO: 131521 - DNA, 614 bp, Zea mays
  unsure (1)..(614): unsure at all n locations
  Clone ID: MRT4577_5142C.1
ccggccgggnctctacgaaaaacctagtcctatgttacttataaccgaacgacaacaataacataaaagaactaaaaacaaagaaaataaaaataaaaaaaaaaaaaaaaatatgctgatagcgagttgagatgccccccctccggtgaggttccgggggtcgggtggttttttgcaccacctactccggcgttaaaatgtggtaaaacgaccgccaaaaaattttgggcaaccccaaaccttcttgaaaaaaccctaatgcgttttctaaagggactaaaaccaaattttcaaggtttttttcaagatcggggaagttataaacaaaatcaacaccaaatttttttccgggggttttttttaccaggggaacagtgttggccaaaaatcacggggttttacaactttggttttttgaaaaccccccctgggaagggggagaaaaaaataaataggcccccttttccccttgagggagaaacttttttggaaaaaagagaccccttcctttttgggctcaaaaagggtgcaacccctggggtttaccacgggggggttttgaagattggtgcaaaaaaaggcttgtcttcttgccctattgggagaggcaaaac

SEQ ID NO: 131522 - DNA, 2916 bp, Zea mays
  Clone ID: MRT4577_51430C.1
atgggaatcaaggcaagaagaagtgatggttcattagcttttaagggtgtattagacgacattcatttagttgattttgcaaaagaggaggccggtctagatgcatgcttaattgctaagactagcatgggctggctgtggcatcgccgcttagcacatgtggggatgaagaaccttcacaagcttctaaatggagaacacgtgataggtctaaccattgttacgttcgaaaaagatagaccttgtgcagcttgtcaagcaggtaaacaagtgggaggagcgcatcacagcaagaatgtgatgaccacatcaagacccctggagctgctacatatggacctcttcggacccgtcgcctatctaagcataggaggaagtaagtatggtctagttattgttgatgacttttcccgcttcatttgggtattctttttgcaggataaatctgaaacccaagggaccctcaagcgcttcctaaggagagctcaaaacgagtttgagctcaaggtgaagaagataaggagcgacaatgggtccgagttcaagaaccttcaagtggaggagtaccttgaggaggaagggatcaagcacgagttctccgctccctacacaccacaacaaaatggtgtggtagagaggaagaacaggacgcttatagacatggcgaggacgatgcttggagagttcaagacccccgagcgcttttggtcggaagccgtgaacacggcttgccacgccatcaacagggtctaccttcatcgcctcctcaagaagacatcgtatgagctactaaccggtaacaaacccaatgtttcgtattttcgggtttttgggagtaaatgctacattctagtgaagaagggtaggaattccaaatttgctcccaaagccgtagaagggtttttgttaggttatgactcaaatacaaaggcgtatagagtcttcaacaaatcatcgggtttagttgaagtctctagcgacgttgtatttgatgagactaatggctctccaagagagcaagttgttgatcttgatgatgtagatgaagaagatgttccgacggccgcaatacgaaccatggcgattggtgatgtgcgaccacaggaacaagaggagcaagatcaaccttcttcctcaacaatggtgcaacccccaactcaagaagatgaacaggttcatcaagaggaggcgtgtgatcaaggaggagcacaagatgaacatgtaatggaggaagaagcacaactggcacctccaactcaagttcgagcaatgattcaaagggatcatcccgtcgaccagattttgggtgacattagcaagggagtaactactcggtctcgattagttaatttttgtgagcattactcttttgtctcttctattgagcctttcagggtagaggaggccttgctagatccggactgggtgttggccatgcaagaggagctcaacaacttcaaaagaaatgaagtttggacactggtgcctcgtcccaagcaaaatgttgtgggaaccaagtgggtgttccgcaacaaacaagacgagcacggcgtggtgacaaggaacaaggcacgacttgtggcaaaaggttatgcccaagtcgcaggtttggactttgaggagacttttgctcctgtggctaggctagagtccattcgtattttgctagcatatgccgctcaccattctttcaggctgttccaaatggatgtgaagagcgctttcctcaacgggccaatcaaggaggaggtgtacgtggagcaaccccctggcttcgaggatgaacggtaccccgaccacgtgtgtaagctctctaaggcgctctatggacttaagcaagccccaagagcatggtatgaatgccttagagactttttaattgctaacactttcaaggttgggaaagccgatccaactctttttaccaagacttgtgatggtgatctttttgtgtgccaaatttatgtcgatgacataattttttgttctactaatcaaaagtcttgtgaagagtttagcagggtgatgactcaaaagtttgagatgtcgatgatgggcgagttaagctatttccttgggttccaagtgaggcaactcaaggatgggaccttcatctcccaaacaaagtacacgcaagacttgatcaagcggtttgggatgaaggacgccaagcccgcaaagactccaatgggaaccgacggacacactgacctcaacaaaggaggtaagtccgttgatcaaaaggcataccggtctatgataggatctctactttatttatgtgctagtagaccggatattatgcttagcgtatgcatgtgtgctagatttcaatctgatccaagggaatgtcacttagtggcggtgaagcgaattcttagatatttagtcgctacgccttgcttcgggatctggtatccaaaggggtctacctttgacttgattggatattcagactctgactatgctggatgtaaggtcgataggaagagtacatcggggacgtgccaattcttaggaaggtccctggtgtcttggagttctaagaaacaaacttccgttgccctatccaccgctgaggccgagtacgttgccgcaggacagtgttgcgcgcaactactttggatgaggcaaaccctcagggactttggctacaatctaagcaaagtcccactcctatgtgataatgagggtgctatccgcatggcagataatcctgttgaacacagccgcacaaagcacatagacatccggcatcactttttgagagaccaccagcacaagggggatatcgaagtgtttcatattagcttcgagaaccagctagccgatatctttaccaagccattagatgagcagaccttttgcaagttgcgtagtgagctaaatgtcttagattcgcgaaacttggattga

SEQ ID NO: 131523 - DNA, 5454 bp, Zea mays
  Clone ID: MRT4577_51431C.1
atggatcctaaagggaagggaatcgtgatcaacgacaaggagaaggagtccttcgtcaacgagccaagggatgacaagtccaacgactcgggctcgggccacagacgcaaagatgggaagaagaagaagacaagacgcatcaaggagatcgtctactacgacagcgatgagtctacttcctcccaaaaggacgacgaccacaacgaatacgagagaaagaaaccggtcaattcgaacttttcttttgattactctcgtattcctcaaagtactaatgctcatttattatctattccacttggtaaacctcctcatgttgatggagaggactacggattttggagtcacaaaatgcgtagtcacttgttctctctccatcctagcatatgggagattgtagaaagtggaatgcactttgatagtacggatagtcccatgtttattaatgaacaaattcataaaaatgcacaagctactactgtgttgttagcctctttgtgcagggacgagtaccataaggtgagcggcttggacaatgccaagcagatttgggacaccctcaagatctctcatgaggggaataatgtcaccttgctcaccaagatggagttggtggagggcgagcttggacgattcgcaatgataaggggcgaggagccgacacaaacatacaacaggctcaagacccttatcaacaaaataaggagctacgggagcacgcgatggacggaccacgacgtcgtccgcctaatgctaaggtcatttaccattcttgatcctcatttggtaaacaatatacgtgaaaatcccaggtacaccaagatgtcgcccgaagaagttcttgggaaattcgttagcgggcgaatgatgatcaaggaggcgaggtacgtggacgacgccttgaatggtccgatcaacgagccgcaaccccttgctctcaaggcaacacgaagcaaggaggcgctacctagcaaggtggcacaaattgaggcggccggacttaatgatgaagagatggctctcatcatcaaaagattcaagacggtgcttaaaggtcgcaagggacagccaagcaagaccaaagccaaggggaagcgctcatgcttcaaatgcggtaagcttggtcattttattgctaattgtcccgacaatgatagtgatcaggatcaagggaacaagagggagagaaagaagaactataagaaggcaaagggcgaggctcatcttggcaaggagtgggattcggactgctcttcgtccgactccgacaatgaaggactcgccgccactgctttcaacaagtcatccctcttccccaacgagcgacacacttgcctcatggcaagggagaagaaagtaagcactcataatactagtacttatgcttcttcaagtgaggatgagtctagtgatgatgatgagatagattactcatgcttattcaagggattagatagaaccaaggtagacaaaattaatgaattgattgatgccttgaatgataggaatatacttttagaaaagcaagaggatttgttgtatgaagaacatgataaatttgtagaagctcagaaatctcttgctctagaaattaagagaaatgaaatgctctctagtgaactatcttcttgtcatgaaactattgctaagttaaagagttttaatgatgatttaaatgctagactagaagtagctagtaaatctaattcttgtgtagaacatgttatggattgcactaggtgtaaagattttaatgttgatgcttgtagtgaacacctagtttcaatttctaaattgaatgatgaagtggctagtcttaatgcccaacttaagactagcaaaagtaattttgataaactaaaatttgcaagggattcctacacaattggtagacacccctcaattaaggatggacttggctacaagagggaagccaaggacttgacaagccataaggctcctatctccgccaaggagaaagggaaggctcctatggctagtagtgctaaaaagaaccatgcctttatgtaccatgataggagacatactagaaatgcaaatagaagttataatgtttttgattcatatgcttatgattctcatgacatgtttgcttctagttctttctatgtgcatggtaggaatgttggtaggagaaatgttgttcataatatgactaggagaaatgttgttaatgttcctaggaaagtcaatgaaccttctacaatatatcatgctttgaatgcttcctttgcaatttgtagaaaggatagaaaggtgattgctagaaagttaggggcaaaatgcaagggtgataaaacttgcatttggatccctaaggaaattgtgactaaccttgtaggacccaacaagagttgggtttatgcatccgggggttcaagctggattattgacagcggatgcacaaaccatatgacgggggagaagaagatgttcacctcctacgtcaagaataaagattcccaagatttaataatattcggtgatgggaatcaaggcaaggtaaaagggttagatgtgtctgtctttagaaggtgtgatggttcactagcttttaagggtattctagatggcaagctttacttagtggattttgcaaaagaagaggccggtctagatgcatgcttaatggctaagacttgcatgggctggctgtggcatcgccgcttagcacatgtggggatgaagaacctccacaagcttctaaagggagaacacgtgataggtctaaccaatgttcatttcgaaaaagatagaccttgtgcagcttgtcaagcagggaaacaggtgggaggctctcatcacaccaaaaatgtgatgacaacatcaagacccctggagctgctacatatggacctcttcggacccgtcgcctatctgagcataggaggaagtaagtatggtttagttattgttgatgacttttcccacttcacttgggtgttctttttgcaggataagtctgaaacccaagggaccctcaagcgcttcatcaggagagctcaaaatgagtttgagctcaaggtgaagaagataaggagcgacaacgggtctgagttcaagaaccttcaagtggaggagttccttgaggaggaagggatcaagcacgagttctccgctccctacacaccacagcaaaatggtgtggtagagaggaagaacaggacgctaatcgatatggcgaggacgatgcttggagaattcaagacccccgagtgtttctggtcggaagccgtgaacacggcttgccacgccatcaacagggtctaccttcatcgcctcctcaagaagacttcgtatgagctactaaccggtaacaaacccaatgtatcttactttcgtgtatttgggagcaagtgctacattctagtaaagaagggtagaaattctaagtttgctcccaaagctgtagaagggtttttgttaggttatgactcaaatacaaaggcgtatagagtcttcaacaaatcatcgggtttggttgaagtctctagcgacattgtatttgatgagactaatggctctccacgagagcaagttgttgattgtgatgatgtagatgaagaagatgttccgacggccgctatacgaaccatggcgattggagaagtgcggccacaggaacaagatgaacgagatcaaccttcttcctcaacaacggtgcattccccaactcaagacgatgaacaggttcatcaaaaggaggcgtgtgatcaagggggagcacaagatgatcacgtgatggaggaagaagcgcaaccggcacctccaacccaagttcgagcggtgattcaaagggatcatcccgtcgaccaaattctgggtgatattagcaagggagtaactactcgatctcgattagttaatttttgtgagcattactcttttgtctcttctattgagcctttcagggtagaagaggccttgctagatccagactgggtgttggccatgcaggaggagctaaacaacttcaaaaggaatgaagtttggacactggtgcctcgtcctaagcaaaatgttgtgggaaccaagtgggtgtttcgcaacaaacaagacgagcacggagtggtgacgaggaacaaggctcgacttgtggcaaaaggttatgcccaagtcgcaggtttggactttgaggagacttttgctcctgtggctaggctagagtccatttgtatcttgctagcatatgccgctcaccattctttcaggttgtaccaaatggatgtgaagagcgctttcctcaatgggccgatcaaggaggaggtgtacgtggagcaaccccctggctttgaggatgaacggtaccccgaccacgtgtgtaagctctctaaggcgctctatggacttaagcaagccccaagagcatggtatgaatgccttagagactttttaattgctaatgctttcaaggttgggaaagccgatccaactctttttactaagacatgtgatggtgatttgtttgtgtgccaaatttatgtcgatgacataatatttggttctactaaccaaaagtcttgtgaagagtttagcagggtgatgacgcagaaattcgagatgtcgatgatgggcgagttgaactacttccttgggttccaagtgaagcaactcaaggacggcaccttcatctcccaaacaaagtacacgcaagacttgctgaagcggtttgggatgaaggacgccaagcccgcaaagactccgatggggaccgacggacacaccgacctcaacaaaggaggtaagtccgttgatcaaaaagcataccggtccatgataggttctttgctttatttatgtgctagtagaccggatattatgcttagcgtatgcatgtgtgctagatttcaatccgatcctaaggagtgtcacttagtggcggtgaagcgaattcttagatatttagttgctacgccttgcttcgggatctggtatcctaaggggtctaactttgacttgattgggtactcagattccgactatgctggatgtaaggtcgataggaagagtacatcggggacgtgccaattcttaggaaggtccctggtgtcatggaactctaagaaacaaacctccgttgccctatccaccgctgaggccgagtacgttgccgcaggacagtgttacgcgcaactactttggatgaggcaaaccctccgggactttggctacaatctgagcaaagtcccactcctatgtgacaatgagagtgctatccgcatggcggaaaatcctgttgagcacagccgcacaaagcacatagacatccggcatcactttttgagagaccaccagcaaaagggagatatcgaagtgtttcatgttagcaccgagaaccagctagccgatatctttaccaagcctctagatgagaagaccttttgcaggttgcgtaatgagctaaatgtcttagattcgcggaacttggattga

SEQ ID NO: 131524 - DNA, 2616 bp, Zea mays
  Clone ID: MRT4577_51432C.1
atggccacctcaagacctctggagctgcttcacatggacctcttcggacccgtcgcctatctgagcataggaggaagtaagtatggtctagttattgttgatgacttttcccgcttcacttgggtgttctttttgcaggataagtctgaaacacaagggaccctcaagcgcttcctcaggagagctcaaaatgagtttgagctcaaggtgaagaagataaggagcgacaacgggtccgagttcaagaaccttcaagtggaggagttccttgaggaggaagggatcaagcacgagttctccgctccctacacaccacagcaaaatggtgtggtagagaggaagaacaggacgctaattgatatgacgaggacgatgctaggagaattcaagacccccgagtgcttttggtcggaagccatgaacacggcttgccacgccatcaacagggtctaccttcaccgcctcctcaagaagacgtcgtatgagctactaaccggtaacaaacccaatgtatcttactttcgtgtatttgggagcaagtgctacattctagtgaagaagggtagaaattctaaatttgctcccaaagctgtagaggggtttttattaggttatgactcaaatacaaaggcgtatagagtcttcaacaaatcatcgggtttggttgaagtctctagcgacgttgtatttgatgaaactaatggctctccaagagagcaagttgttgattgtgatgatgtagatgaagaagatgttccgacgaccgctattcgaaccatggcgattggagaagttcggccacaagaacaagatgaacgagatcaaccttcttcctcaacaatggtgcatcccccaactcaagacgatgaacaggttcatcaacaggaggcgtgtgatcaagggggagcacaagatgatcatgtgatggaggaagaagcggaaccggcacctccaacccaagttcgagcgatgattcaaagggatcatcccgtcgaccaaattttgggtgacattagcaagggagtaactactcggtctcgattagttaatttttgtgaacattactcttttgtctcttctattgagcctttcagggtagaagaggccttgctagatccggactgggtgttggccatgcaagaggagctcaataacttcaagagaaatgaagtttggacgctggtgcctcgtcctaagcaaaatgttgtgggaaccaagtgggtgttccgcaacaaacaagacgagcacggagtggtgacaaggaacaaggctcgacttgtggcaaaaggttatgcccaagtcgcaggtttggactttgaggagacgtttgctcctgtggctaggctagagtccattcgtatcttgctagcatatgccactcaccattctttcaggttgttccaaatggatgtgaagagcgctttcctcaacgggccaatcaaggaggaggtgtacgtagagcaaccccctggcttcgaggatgaacggtactccgaccacgtgtgtaagctctctaaggcgctctatggacttaagcaagccccaagagcatggtatgaatgccttagagatttcttaattgctaatgctttcaaggttgggaaagccgatccaactcttttcactaagacatgtgatggtgatttgtttgtgtgccaaatttatgttgatgacataatatttggttctactaataaaaagtcttgtgaagagtttagcagggtaatgacgcagaaattcgagatgtcaatgatgggcgagttgaactacttccttgggttccaagtgaagcaactcaaggacggcaccttcatctcccaaacgaagtacacgcaagatctgctaaagcggtttgggatgaaggacgccaagcccgcaaagactccgatgggaaccgacggacacaccgacctcaacaaaggaggtaagtccgttgatcaaaaggcataccggtcaatgataggttcattactttatttatgtgctagtagaccggacattatgcttagcgtatgcatgtgtgctagatttcaatccgatcctaaggagtgtcacttagtggcggtgaagcgaatccttagatatttggttgctacgccttgcttcgggctctggtatccaaaggggtctacctttgacttgattggatattcagactccgactatgctggatgtaaggtcgataggaagagtacatcggggacgtgccaattcttaggaaggtccctggtgtcgtggaactctaagaaacaaacttccgttgccctatccaccgctgaggccgagtatgttgccgcaggacaatgttgcgcgcaactactttggatgaggcaaaccctcagggactttggctataatctgagcaaagtcccactcctatgtgataatgagagtgctatccgcatggcggaaaatcctgttgagcacagccgcacaaagcacatcgacatccggcatcactttttgagagaccaccagcaaaagggagatatcgaagtgtttcatgttagcaccgagaaccagctagccgatatctttaccaagcctctagatgagaagaccttttgcaggctgcgtagtgagctaaatgtcttagattcgcggaacttggattga

SEQ ID NO: 131525 - DNA, 152 bp, Zea mays
  Clone ID: MRT4577_51433C.1
aagctggctctcttgctggtactgatcctgaatactgggtcggtctactctatccttcttgagagctaatttcatcagggactgagctactattacttgagggagttcctcctgtttctagaagttgtaaagaggtaaatgacttagttggt

SEQ ID NO: 131526 - DNA, 2616 bp, Zea mays
  Clone ID: MRT4577_51434C.1
atgaccacttcaagacctctggagctgctgcatatggacctcttcggacccgtcgcctatctgagtataggaggaagtaagtatggtctagttattgttgatgacttttcccgcttcacttgggtgttctttttgcaggataagtctgaaacccaagggaccctcaagcgcttcctcaggagagctcaaaatgagtttgagctcaaggtgaagaagataaggagcgacaacgggtccgagttcaagaaccttcaagtggaggagttccttgaagaggaagggatcaagcacgagttctccgctccctacacaccacagcaaaatggtgtggtagagaggaagaacaggacgctcatcgatatggcgaggacgatcctaggagagttcaagacccccgagtgcttttggacggaagccgtgaacacggcctgccacgccatcaacagggtctaccttcatcgcctcctcaagaagacgtcgtatgagctactaaccggtaacaaacccaatgtatcttactttcgtgtatttgggagcaagtgctacattctagtgaagaaaggtagaaattctaagtttgctcccaaagcagtagaagggtttttattaggttatgactcaaatacaaaggcgtatagagtcttcaacaaatcatcgggtttggttgaagtctctagcgacgttgtatttgatgagactaatggctctccaagagagcaagttgttgatcttgatgatgtagatgaagaagatgttccaacggccgctatgcgcaccatggcgattggtgatgtgcgaccacaggaacacttggagcaagatcaaccttcttcctcacccatggtgcatcccccaacccaagatgacgaacaggtacctcaagtggaggcgcatgatcaagggggagcacaagatgatcaagtaatggaggaagaagcgcaaccagcacctccaacccaagttcgagcgatgatacaaagggatcatcctgtcgaccaaattatgggtgacattagcaagggagtaactactcgatctcgattagttaatttctgtgagcattactcctttgtctcttctattgagcctttcagggtagaggaggccttgctagatctggactgggtgttggccatgcaagaggagctcaacaacttcaagaggaatgaagtttggacactggtgcctcgtccgaagcaaaatgttgtgggaaccaagtgggtgttccgcaacaaacaggatgagcacggggtggtgacgagaaacaaggctcgacttgtggcaaaaggttatgcccaagtcgcaggtttggatttcgaggagacttttgctcctgtggctaggctagaatcaattcgtatcttgctagcatatgccgctcatcattctttcaggttgtaccaaatggatgtgaagagcgctttcctcaacgagccaatcaaggaggaggtgtacgtggagcaaccccctggcttcgaggatgaacggtaccccgaccatgtgtgtaagctctctaaggcgctctatggacttaagcaagccccaagagcatggtatgaatgccttagagactttctaattattaatgctttcaaggttgggaaagccgatccaactctttttacaaagacatgtgatggtgatttgtttgtgtgccaaatttatgtcgatgacataatatttggttctactaataaaaagtcttgtgaagagtttagcagggtgatgacgcagaaattcgagatgtcaatgatgggcgagttgaactacttccttgggttccaagtgaagcaactcaaggacggcaccttcatctctcaaacgaagtacacgcaagacctgctgaagcggtttgggatgaaggacgccaagcccgcaaagactccgatggggaccgacggacacaccgacctcaacaaaggaggtaagtccgttgatcaaaaagcataccggtcaatgatagggtcattactttacttatgtgctagtagaccggatattatgcttagcgtatgtatgtgtgctagatttcaatccgatcctaaggagtgtcacgtagtggcagtgaagcgaatccttagatatttagttgctacgccttgcttcgggctctggtatccaaaggggtctacctttgacttgattggatattcagactccgattatgctggatgtaaggtcgataggaagagtacatcagggacgtgccaattcttaggaaggtccctggtgtcatggaactctaagaaacaaacctccgttgccctatccaccgctgaggccgagtatgttgccgcaggacagtgttgcgcgcaactactttggatgaggcaaaccctcagggactttggctacaatctgagcaaagtcccactcctatgtgataatgagagtgctatccgcatggtggaaaatcctgtagagcacagccgcacaaagcacatagacatccggcatcactttttgagagaccaccagcaaaagggagatatcgaagtgtttcatgttagcaccgagaatcagctagccgatatctttaccaagcctctagatgagaagaccttttgcaggctgcgtagtgagctaaatgtcttagattcgcggaacttggattga

SEQ ID NO: 131527 - DNA, 1945 bp, Zea mays
  Clone ID: MRT4577_51435C.1
cgagctcgacgcccctcccctcgacgccctgcctctgtcttcctcctcgcgtcttcttccctcgcttccatttcttttcaaaccctaagaacccgattacccgctcaaaaccctaatcctagctcccccgcctcctcccctccgcgtcacccactgctccgcgtcatacctcgcgacttccgcgcccccgcgcgcccggccctcccactcggccctcgcggacctagggtttctcccgggccggagctgctcgttcgttcactgcctttgggcgagccggtgcgggcgggtggttgggcgaggaggtggtgggcggagatgagatgaggttgcagcggctgtgggggcggtgtgaactatgagtaggctctcgttcagaccgcggccgctcgacatccataagaagctccccatcctcaagtctgtgcgggagttcgaggatgaggagccaggggtcgcgccgctttcttctgcgagggctggggtgctgctgcggcactcaggaactgagctccccgcgtctggggccaacaatgccacagaaggcgagggaaatcaagcactcagtaagaaaaatgcccaggaaatacctacaccacaatttgatggtgttgacacatatgaaagggactatactcgtacctttgcacaaccgacatcttatatacgtggaagaggagccagggctgagatcagtgaatttgtcgagtatgaccttgacaatgaagacgaggactggcttgaagaattcaatagcgagcggaagaatataaaccctgaaaagttggaggccctcctattcaagttggaagttttggaccacagagctcgtgaaagagcaggagccataacaccaactttcataggaccagtgccagtcctcttacagctagatgctgctatggaggctttgcagtacttatctgttcgaaatgccgttttccaagctgtatacaactactggaaatcaaagagggagcgatggcaaaagcctattcttcggcgtttgcagccgcctccaccagtgaatgatacaaatccatacaatgtcttcagaccaagagaaaaggctcatcgtcttcatacaagaaggatgcaaagaagggaaaacaatatccaatcattcgaaaaactccgcttggtgcgacgcaacttggagcaagcaaaagcactaatggatgctttgattaagagggaggagacaaagcgggaggccatggagtgccaagttaacctgcagcgtgttcagatgaaatataagcatgaggcccagcttgttgaggatgggactaccttgtctggcttccagcaaacttcgagcagatttgaatcgagcgatgatgatgtggattcagatgatactgcaactgaacagacatacatacgtccagcagttttccatccaaggttttctgctaataagctatctgtgatccctccacttcgcataaagcgtgaacgagagctaaaaaggagacctcagcagaatggctgtgtatttaaaagggatcctgaggagccagtattcttattcacaagaccgcttgatccggagaagttggttgcagcaggtatcaagccaccaccagatcctcctattgagaatggtgccacatcaccaccatttcggtgtcgaggtaggattggacgaggcggccgcatcatctttgatcgatggaatcctcttctccggacaccaattgaccaggagacttattatgtgccatacggtcacaggcccccctcacctgaaggttgaagcggtttttcatatgcacatagtgcttaatggcactggcacagctatggaatttgtgaagcctctgagcaattgtttttccataggtgccaaattggcccttggagagtccattgtgagttgagcccaagggcgaattctgcagaaaggcagagaaagctccttgataagcagcagcctcagtgg

SEQ ID NO: 131528 - DNA, 2118 bp, Zea mays
  Clone ID: MRT4577_51436C.1
gataattctgaaacccaagggaccctcaagcgcttcctcaggagagctcaaaatgagtttgagctcaaggtgaagaagataaggagcgacaatgggtccgaattcaagaatcttcaagtggaggaattccttgaggaggaggggatcaagcacgagttctccgctccctacacacctcagcaaaatggtgtggtagagaggaagaacatgacgctcatagatatggcgaggactatgcttggagagttcaagacccccgagcgcttttggtcggaagccgtgaacacggcttgccacgccatcaacagggtctaccttcaccgcctcctcaagaagacttcatatgagctgctgactggtaacaaacccaatgtgtcttattttggtatttgggagcaaatgaagaagacgttccaacggccgcgatacgcaccatggcgattggagatgtgcggcctcaggaacaattggagcaagatcaaccgtcttcctcaactttggtgcatcccccatcccaagatgacgaataggtacctcaagtggaggcacatgatcaagggggagcaaaggatgatcaagttgaagaggaagaagcacctcaggcacctccaacccaagttcgagcgacgattcaaagggatcatcccgtcgaccaaatattggtgcaatgaagtttggacactggtgcctcgtcccaagcaaaatgttgtgggaaccaagtgggtgttccgcaacaaacaggacgagcacggggtggtgacaaggaacaaggctcggcttgtggcaaaaggttatgcccaagtcgcaggtttggactttgaggagacttttgctcctgtggctaggctagaatcaattcgtatcttgctagcatatgccgctcactattctttcaggttgtaccaaatggatgtgaagatcgctttcctcaacgggccgatcaaggaggaggtgtatgtggagcaaccccctggcttcgaggatgaacggtaccccgaccacgtgtgtaagctctctaaagcgctctatggacttaagcaagccccaagagcatggtatgaatgccttagagactttttaattgctaatgctttcaaggttgggaaagccgatccaactgtttttactaagacttgcgatggtgatctttttgtgtgccaaatttatgtcgatgacataatatttggttctactaaccaaaagtcttgtgaagagtttagcagggttatgacgcagaaattcgagatgtcgatgatgggcgagttgaactacttccttgggttccaagtgaagcaactcaaggacgacactttcatctcccaaacaaagtacacgcaagacttgctaaagcggtttgggatgaaggacgccaagcccgcaaagacgccgatgggaattgacggacacaccgacctcaacaaaggaggtaagtccgttgatcaaaaagcataccggtccatgataggttctttgctttatttatgtgctagtagaccggatattatgcttagcgtatgcatgtgtgctagatttcaatccgatcctaaggagtgtcacttagtggctgtgaagcggattcttcgatatttagtcgctacgccttgcttcgggatctggtatccaaaggggtctaactttgacttgattggatattcagattccgactatgctggatgcaaggtcgataggaagagtacatcggggacgtgccaattcttaggaaggtccctggtgtcatggaactctaagaaacaaacttccgttgccctatccaccgctgaggccgagtacgttgccgcaggacagtgttgtgcgcaactactttggatgaggcaaaccctccgggactttggctacaatctgagcaaagtcccactcctatgtgataatgagagtgctatccgaatagcggaaaatcctgttgagcatagccgcacaaagcacattgacatccggcatcactttttgagagaccaccagcaaaagggagatatcgaagtgttttatgttagcaccgagaaccagctagccgatatcttcactaagcctttagatgaaaagaccttttgcaggctgcgtagtgagctaaatgtcctagattcgcggaacttggattga

SEQ ID NO: 131529 - DNA, 2616 bp, Zea mays
  Clone ID: MRT4577_51437C.1
atgaccacttcaagacctctggagctgctgcatatggacctcttcggacccgtcgcctatctgagcataggagggagtaagtatggtttagttattgttgatgacttttcccgcttcacttgggtgttctttttgcaggataagtctgaaacccaagggaccctcaagcgcttcctcaggagagctcaaaatgagtttgagctcaaggtgaagaagataaggagcgacaacgggtccgaattcaagaaccttcaagtggaggaatttcttgaggaggaagggatcaagcacgagttctccgctccctacacaccacagcaaaatggtgtggtagagaggaagaacaggacgctaatcgacatggcgaggactatgcttggagagttcaagacccccgagcgtttttggtcggaagccgtgaacacggcttgccacgtcatcaacagggtctaccttcaccgcctcctcaagaagacgtcgtatgaacttctaaccggtaacaaacccaatgtatcatactttcgtgtatttgggagcaagtgctacattctagtgaagaagggtagaaattctaagtttgctcccaaagcagtagaagggtttttgttaggttatgactcaaatacaaaggcgtatagagtcttcaacaaatcatcgggtttggttgaagtctctagcgacgttgtatttgatgaaactaatggctctccaagagagcaaattgttgattgtgatgatgtagatgaagaagaggttccgacggccgctatacgaaccatggcgattggagaagtacggccacaggaacaagatgaacgagatcaatcctcttcctcaattatggtgcatcccccgactcaagacgatgaacaggttcatcaaaaggaggcgtgtgatcaagggggagcacaagatgatcacgtgatggaggaagaagcgcaaccggcacctccaacccaagttcgagcgacgatccaaagggatcatcccgttgaccaaattctgggtgacattagcaagggagtaactactcggtctcgattagttaatttttgtgaacattactcttttgtctcttctattgagcctttcagggtagaagaggccttgctagatccggactgggtgttggccatgcaagaggagctaaacaacttcaagcgcaatgaagtttggacactggtgcctcgtcccaagcaaaatgttgtgggaaccaagtgggtgttccgcaacaaacaggacgagcacggggtggtgacgagaaacaaggctcgacttgtggcaaaaggttatgcccaagtcgcaggtttggatttcgaggagacttttgctcctgtggctaggctagaatcaattcgtatcttgctagcatatgccgctcaccattctttcaggttgttccaaatggatgtgaagagcgcgttcctcaacggaccaatcaaggaggaggtgtacgtggagcaaccccctggctttgaggatgaacggtaccccgaccatgtgtgtaagctctctaaggcgctctatggacttaagcaagccccaagagcatggtatgaatgccttagagatttcttaattgttaatgctttcaaggttgggaaagccgatccaactctttttacaaagacatgtgatggtgatttgtttgtgtgccaaatttatgttgacgacataatatttggttcaactaaccaaaagtcttgtgaagagtttagcagggtgatgacgcagaaattcgagatgtcgatgatgggcgagttgaactacttccttgggttccaagtgaagcaactcaaggacggcaccttcatatcccaaacgaagtacacgcaagatctgctaaagcggtttgggatgaaggacgccaagcccgcaaagactccgatgggaacagacggacacaccgacctcaacaaaggaggtaagtccgttgatcaaaaagcataccggtccatgataggttctttgctttacttatgtgctagtagaccggatattatgcttagtgtatgcatgtgtgctagatttcaatccgatcctaaggagtgccacttagtggcggtgaagcgaattctgagatatttagttgctacgccttgtttcggactctggtatccaaaggggtccacctttgacttggttggatactcagactccgactatgctgggtgtaaggtcgataggaagagtacatcagggacgtgccaattcttaggaaggtccctggtgtcgtggaactctaagaaacaaacctccgttgccctatccaccgctgaggccgagtatgttgccgcaggacagtgttgcgcgcaactactttggatgaggcaaaccctcagggactttggctacaatctgagcaaagtcccactcctatgtgataatgagagtgctatacgcatggcggagaatcctgttgagcacagccgcacaaagcacattgacatccggcatcactttttgagagaccaccagcaaaagggagatatcgaagtgtttcatgttagcaccgagaaccagctagccgatatcttcactaagcctctagatgagaagaccttttgcaagttgcgtagtgagctaaatgtcttagattcgcggaacctggattga

SEQ ID NO: 131530 - DNA, 4872 bp, Zea mays
  Clone ID: MRT4577_51438C.1
atggatcctaaagggaagggaatcgtgatcaacgacaaggagaaggagtccttcgtcaacgagccaagggatgacaagtccaacgactcgggctcgggccacagacgcaaagatgggaagaagaagaagacaagacgcatcaaggagatcgtctactacgacagcgatgagtctacttcctcccaaaaggacgacgaccacaacgaatacgagaaaaagaaaccggtcaattcgaacttttcttttgattactctcgtattcctcaaagtactaatgctcatttattatctattccacttggtaaacctcctcattttgatggagaggactacggattttggagtcacaaaatgcgtagtcacttgttctctctccatcctagcatatgggagattgtagaaagtggaatgcactttgatagtacggatagtcccatgtttattaatgaacagattcataaaaatgcacaagctactactgtgttgctagcctctttgtgcagggacgagtaccataaggtgagcggcttggacaatgccaagcagatctgggacaccctcaagatctctcatgaggggaacgatgtcaccttactcaccaagatggagttggtggagggcgagctaggacggttcgcaatgataaggggcgaggagccaactcaaacatacaaccggctcaagacccttatcaacaaaataaggatctacggaagcacgcgatggacggatcacgacgtcgtccgcctaatgctaaggtcctttaccgttcttgatcctcatttggtgaacaatattcgtgaaaatcctaggtacaccaagatgtcgcccgaagaagttctggggaagttcgtaagcgggcgaatgatgatcaaggaggcaagatatgtggacgacgcgttgaacggtcctattcatgagcctcaacccattgctctcaaggcaacgaggagcaaggaggcgctaccgagcaaggtggcgcaagttgaggcggccgggctaaataatgaggagatggccctcatcattaagcgcttcaagacggcgcttaaaggtcgcaagggacagccaagcaagaccaagacaaaggagaagcgctcgtgcttcaaatgtggtaagattggtcatttcattgctaactgtcccgataatgaaagtgaccaggaaaaggggaacaaaagggagaagaagaagcattacaagaaggccaagggcgaggcacatatcggaaaggagtgggattcggattgctcctcctccgactccgacaatgaaggactcgccgccaccgccttcaacaagtcatccctcttccccaacgagcgtcacacatgccttatggcaagggagaagaaggaaatagattactctagtttgttcaagggattggatagaactaaagtagaaaagattaatgaattgattgatgccttgaatgaaaaggatagactcttagaaaaacaagaggatcttttatatgaagagcatgacaaatttgtagaggcacaaaaatcttatgctttagaagttaaaagaaatgaagtgctttctagtgaattatcttcttgtcatgaaaccattgctactttaaaaggtgttaataatgatttaaatgctaaactagaagtggctagtaaatctaactcttgtgtagaacatgttatggtttgcactaggtgtaaagattttaatgttgatgcttgtagtgaacacctagtttcaatttctaaattgaatgatgaagtggctagtcttaatgcccaacttaagactagcaaaagcgaatttaataaattaaaatttgcaagggatgcctatacgattggtagacatccctcaattaaggatggacttggcttcaagagggaagccaagaacttaacaagccataaggctcccattcccgccaaggagaaagggaaggcccctatggctggtagtgctaaaaagaaccatgcttttatgtatcatgataggagacatactagaaatgcaaatagaagttataatgtttttgattcatatgtttatgattctcatgacatgtttgcttctagttctttctatgtgcatgataggaatgttggtaggagaaatgttgttcataatatgcctaggagaaatgttgttaatgttcctaggaaagttaatgagccttctacaatatatcatgctttgaatgcttcctttgcaatttgtagaaaggatagaaaggtgattgctaggaagttaggggcaaaatgcaagggtgataaaacttgcatttggatccctaaggaaattgtgactaaccttgtaggacccaacaagagttgggtttatgcatccgggggttcaagctggattattgacagcggatgcacaaaccatatgacgggggagaagaagatgttcacctcctacgtcaagaataaggattcccaagattcaataatattcggtgatgggaatcaaggcaaggtaaaagggttagatgtgtctgtctttagaagaagtgatgattcactagcttttaagggtgtattagacggcaaactttatttagttgattttgaaaaagaggaggataagtctgaaacccaagggaccctcaagcgcttcctcaggagagctcaaaatgagtttgagctcaaggtgaaaaagataaggagcgacaacgggtccgaattcaagaaccttcaagtggaagagttccttgaggaggaagggatcaagcacgagttctccgctccctacacaccacaacaaaatggtgtggttgagaggaagaacaggacgctaatcgatatggcaaggacgatgcttggagaattcaagacccccgagcgtttctggtcagaagccgtgaacacggcttgccacaccatcaacagggtctaccttcatcgcctcctcaagaagacttcgtatgagctactaaccggtaacaaacccaatgtatcttactttcgtgtatttgggagcaagtgctacattctagtaaagaagggtagaaattctaagtttgctcctaaagctgtagaagggtttttgttaggttatgactcaaatacaaaggcatatagagtcttcaacaaatcatcgggtttggttgaagtctctagcgatgttgtatttgatgagactaatggctctccaagagagcaagttgttgattgtgatgatgtagatgaagaagatgttccgacggctgctatacgaaccatggcgattggagaagtgcggccacaggaacaagataaacgagatcatccttcttcctcaacaacggtgcctcccccaactcaagacgatgaacaggttcatcaacaggaggcgtgtgatcaagggggagcacaagatgatcatgtgatggaggaagaagcgcaaccggcacctccaacccaagttcgagcgatgattcaaaggaatcatcccgtcgatcaaattctgggtgatattagcaagggagtaacaactcgatctcgattagttaatttttgtgagcattactcctttgtctcttctattgagcctttcagggtagaggaggccttgctagatccggactgggtggtggccatgcaggaggagctcaacaatttcaagcgcaatgaagtttggacactggtgcctcatcccaagcaaaatgttgtgggaaccaagtgggtgttccgcaacaaacaagacgagcacggggtggtgacaaggaacaaggctagacttgtggcaaaaggttatgcccaagtcacaggtttggactttgaggagacttttgctcctgtggctaggctagaatcaattcgtatcttgctagcatatgctgctcaccattctttcaggttgtaccaaatggatgtgaagagcgctttcctcaatgggccgatcaaagaggaggtgtacgtagagcaaccccctggcttcgaggatgaacggtaccccgaccatgtgtgtaagctctctaaggcgctctatggacttaagcaagccccaagagcatggtatgaatgccttagagactttctaattgttaatgctttcaaggttgggaaagccgatccaactctttttactaagacatgtgatggtgatttgtttgtgtgccaaatttatgtcgatgacataatatttggttctactaaccaaaagtcttgtgaagagtttagcagggtgatgacgcagaaattcgagatgtcgatgatgggcgagttgaactatttccttgggttccaagtgaagcaactcaaggacggcaccttcatctcccaaacaaagtacacgcaagatctgctaaagcgatttgggatgaaggacgccaagcccgcaaagactccgatggggaccgacggacacaccgacctcaacaaaggaggtaagtccgttgatcaaaaagcataccggtcaatgatagggtctttactttatttatgtgctagtagaccggatattatgcttagcgtatgcatgtgtgctagatttcattccgatcctaaggagtgtcacttagtggcggtgaagcgaattcttagatatttggtcgctacaccttgcttcgggatctggtatccaaaggggtctaactttgacttgattgggtactcagattccgactatgctggctgtaaggtcgataggaagagtacatcggggacgtgccaattgttaggaaggtccctggtgtcatggaactctaagaaacaaacctccgttgccctatccaccgctgaggccgagtacgttgccgtaggacagtgttgcgcacaactactttggatgaggcaaacccttcgggactttggctacaatctgagcaaagtcccactcctatgtgataatgagagtgtatccgcatggcggaaaatcctgttgagcacagccgcacaaagcacatag

SEQ ID NO: 131531 - DNA, 3456 bp, Zea mays
  unsure (1)..(3456): unsure at all n locations
  Clone ID: MRT4577_51439C.1
atggctagtagtgtgcaaaagaaccatgcctttatgtactatgatagaagacaacctagaaatgcttataggagttgtaatgcatataatgcctttgattctcatgccatgtttgcttctagctcttcttatgtgcatgatagaaatgttggtaggagaaatgttgttcataatatgcctaggagaaatgttgttaatgttcctaggaaagtaaatgaaccttctacaatatatcatgctttgaatgcttcctttgcaatttgtagaaaggatagaaaggtgattgctaggaagttaggggcaaaatgcaagggtgataaaacttgcatttggatccctaaggaaattgtgactaaccttgtaggacccaacaagagttgggtttatgcatccgggggttcaagctggattatcgacagcggatgcacaaaccatatgacgggggagaagaagatgttcacctcctacgtcaagaataaggattcccaagattcaattatattcggtgatgggaatcaaggcaaggtaaaagggttagatgtgtctgtctttagaagaagtgatggntcactagcttttaagggtgtattagacggcaagctctacttagttgattttgtaaaagaagaggccggtctagatgcatgcttaattgctaagactagcatgggctggctgtggcatcgccgcttagcacatgtggggatgaagaacctccacaagcttctaaagggagaacacgtgataggtctaaccaatgttcatttcaaaaaagatagaccttgtgcagcttgtcaagcagggaaacaggtgggaggctctcatcacaccaaaaatgtgatgacaacatcaagacccctggagctgctacatatggacctcttcggacccgtcgcctatctgagcataggaggaagtaagtatggtctagttatcgttgatgacttttcccgcttcacttgggtgttctttttgcaggataagtctgaaacccaagggaccctcaagcgcttcctcaggagagctcaaaatgagtttgagctcaaggtgaagaagataaggagcgacaacgggtccgagttcaagaatcttcaagtggaggagttccttgaggaggaagggatcaagcacgagttctccgctccctacacaccacagcaaaatggtgtggtagagaggaagaacaggacgctaatcgatatggcgaggacgatgcttggagaattcaagacccccgagtgtttctggtcggaagccgtgaacacggcttgccacgccatcaacagggtctaccttcatcgcctcctcaagaagacttcgtatgagctactaaccggtaacaaacccaatgtatcttactttcgtgtatttgggagcaagtgctacattctagtaaagaagggtagaaattctaagtttgctcccgaagctgtagaagggtttttgttaggttatgactcaaatacaaaggcgtatagagtcttcaacaaatcatcgggtttggttgaagtctctagcgacgttgtatttgatgagactaatggctctccaagagagcaagttgttgatcttgatgatgtagatgaagaagacgttccaacggccgctatgcgcaccatggcgattggtgatgtgcgaccacaggaacaagatgaacgagatcaaccttcttcctcaacaacggtgcatcccccaactcaagacgatgaacaggttcatcaaaaggaggcgtgtgatcaagggggagcacaagatgatcacgtaatggaggaagaagcgcaaccggcacctccaacccaagttcgagcggtgattcaaagggatcaccccgtcgaccaaatattgggtgacattagcaagggagtaactactcgatctcgattagttaatttttgtgagcattactcatttgtctcttctattgagcctttcagggtagaggaggccttgctagatccggattgggtattggccatgcaggaggaactcaacaacttcaagcgcaatgaagtttggacactggtgcctcgtcccaagcaaaatgttgtgggaaccaagtgggtgttccgcaacaaacaggacgagcacggggtggtgacgaggaacaaggctcgacttgtggcaaaaggttatgcccaagtcgcaggtttggactttgaggagacatttgctcctgtggctaggctagaatcaattcgtatcttgctagcatatgccgctcaccattctttcaggttgttccaaatggatgtgaagagcgctttcctcaacgggccaatcaaggaggaggtgtacgtggagcaaccccctggcttcgaggatgaacggtatcccgaccacgtgtgtaagctctctaaggcgctctatggacttaagcaagccccaagagcatggtatgaatgccttagagactttttacttgctaatgctttcaaggttgggaaagccgatccaactctgttcactaagacatgtgatggtgatttgtttgtgtgccaaatttatgtcgatgacataatatttggttctactaaccaaaagtcttgtgaagagtttagcagggtgttgacgcagaaattcgagatgtcgatgatgggcgagttgaactacttccttgggtttcaagtgaagcaactcaaggacggcaccttcatctcacaaacgaagtacacgcaagatctgctaaagcggtttgggatgaaggacgccaagcccgcaaagactccgatggggaccgacggacacactgacctcaacaaaggaggtaagtccgttgatcaaaaagcataccggtcaatgatagggtctttactttatttatgtgctagtagaccggacattatgcttagcgtatgcatgtgtgctagatttcaatccgatcctaaggagtgccacttagtggcggtgaagcgaattcttagatatttggttgctacgccttgcttcgggctctggtatccaaaggggtctacctttgacttggttggatactcagattccgactatgctggatgtaaggtcgataggaagagtacatcggggacgtgccaattcttaggaaggtccctggtgtcgtggaactctaagaaacaaacttctgttgccctatccaccgctgaggccgagtacgttgccgcagaacagtgttgcgcgcaactgctttggatgaggcaaaccctccgggactttggctacaatctgagcaaagtcccactcctatgtgataatgagagtgctatccgcatggcggagaatcctgttgagcacagccgcacaaagcacatagacatccgacatcactttttgagagaccaccagcaaaagggagatatcgaagtgtttcatgttagcaccgagaaccagctagccgatatctttaccaagcctctagatgagaagaccttttgcaggttgcgtagtgagctaaatgtcttagattcgcagaacttggattga

SEQ ID NO: 131532 - DNA, 466 bp, Zea mays
  Clone ID: MRT4577_5143C.1
gtgggggggggggttttttttttttttttttttttttttttttttttttttttttttttttttttttttttttttttttttttaaaaaaaagaaggccgggtttaggatatatatagtatcaaatcatatcatcggggaccaattaagaggggtttgcccggggggcaatccgatcaaccaacatgcagggggacacccctccctacatgagcccaaagactgaccccaaacatgcgggggggggtagcaaactgaaaaactctgtttttttttttttccaccccccacacaatacctatgtatggcagccccctcggccccccttattgtgggtcaaccccccccccaagctagatagataaaaaacatatccatgggcctccatcgatgtgatcagcagttgcagggggcgcacttgcaggtgccaccgcagctgcaaccgggggcgggctccccggactcccc

SEQ ID NO: 131533 - DNA, 3018 bp, Zea mays
  Clone ID: MRT4577_51440C.1
gtttatgcatccgggggttcaagctggattatcgacagcggatgcacaaaccatatgacgggggagaagaagatgttcacctcctatgtcaagaataaagattcccaagattcaattatattcggtgatgggaatcaaggcaaggtaaaacggttaggtgtgtctgtctttagaagaagtgatggttcactagcatttaagggtgtattagacggcaaactttatttagttgattttgcaaaagaggaggccggtctagatgcatgcttaattgctaagactggcatgggctggctgtggcatcgccgcttagcacatgtggggatgaagaaccttcacaagcttctaaagggagaacacgtgataggtttgactaatgtgcatttcgaaaaagatagaccttgtgcagcttgtcaagcaggtaaacaagtaggaggagtgcatcacagcaagaatgtgatgaccacttcaagacccctggagttactacatatggacctcttcggacccgtcgcctatctaagcataggaggaagtaagtatggtctagttatcgttgatgacttttcccgcttcacttgggttttctttttgcaggataagtctgaaacccaaggaaccctcaagcgcttcctaaggagagctcaaaatgagtttgagctcaaagtgaagaagataaggagcgacaacgggtccgagttcaagaaccttcaagtggaggagtttcttgaggaggaggggatcaagcacgagttctccgctccctacacaccacagcaaaatggtgtggtagagaggaagaacaggacactcattgatatggcgaggacgatgcttggagagttcaagacccccgagtgcttttggtcggaagccgtgaacacggcttgtcacgccatcaacagggtctaccttcaccgccttctcaagaagacgtcgtatgagcttctaaccggtaacaaacccaatgtatcttactttcgtgtatttgggagcaaatgctacattctagtaaagaagggtagaaattctaagtttgctcccaaagctgtagaagggtttttgttaggttatgactcaaatacaaaggcgtatagagtcttcaacaaatcatcgggtttggttgaagtctctagcgacgttgtatttgatgagactaatggctctccaagagagcaagttgttgattgtgatgatgtagatgaagaagatgttccgacggccgctatacgaaccatggcgattggagaagtgcggccacaagaacaagatgaacgagatcaaccttcttcctcaacaacggtgcatcccccaactcaagacgatgaacaggttcatcaacaggaggcgtgtgatcaagggggagcacaagatgttcatgtgatggaggaagaagcgcaaccgacacctccaacccaagttcgagcgatgattcaaaggaatcatcccgtcgatcaaattctgggtgatattagcaagggagtaacaactcgatctcgattagttaatttttgtgagcattactcctttgtctcttctactgagcctttcagggtagaagaggccttgctagatctggactgggtgttggccatgcaagaggagctcaacaacttcaagagaaatgaagtttggtcgctggacgagcacggggtggtgacgaggaacaaggctcgacttgtggcaaaaggttatgcccaagtcgcgggtttggacttcgaggagacttttgctcctgtggctaggctagaatcaattcgtatcttgctagcatatgccgctcaccattctttcaggttgtaccaaatggatgtgaagagcgcgttcctcaacgggccgatcaaggaggaggtgtacgtagagcaaccccctggcttcgaggatgaacggtaccccgaccatgtgtgtaagctcgctaaggcgctctatggacttaagcaagccccaagagcatggtatgaatgccttagagactttttaattgctaatgctttcaaggttgggaaagccgatccaactctttttactaagacttgcaatggtgatctttttgtgtgccaaatttttgtcgatgacataatatttggttctactaaccaaaagtcttgtgaagagtttagcagggtgatgacgcagaaattcgagatgtcgatgatgggcaagttgaactacttccttgggttccaagtgaagcaactcaaggatggcaccttcatctcccaaatgaagtacacgcaagatctgctaaagcggtttgggatgaaggacgccaagcccgcaaagactccgatgggaaccgacggacacaccgacctcaacaaaggaggtaagtccgttgatcaaaaagcataccggtcaatgatagggtctttactttatttatgtgctagtagaccggatattatgcttagcgtatgcatgtgtgctagatttcaatccgaacctaaggagtgtcacttagtggcggtgaagcgaattctaagatatttggttgctacgccttgcttcgggctctggtatccaaaagggtctacctttgacttggttggatactcagattccgacaatgctggatgtaaggtcgataggaagagtacatcagggacgtgccaattcttaggaaggtccctggtgtcgtggaactctaagaaacaaacctccgttgccctatccaccgctgaggccgagtatgttgccgcaggacagtgttgcgcgcaactactttggatgaggcaaaccctccgggactttggctacaatctgagcaaagtcccactcctatgtgataatgagagtgctatccgcatggcggaaaatcctgttgaacacaatcgcacaaagcacatagacatccggcatcactttttgagagaccaccagcaaaagggagatatcgaagtgtttcatgttagcaccgagaaccagctagccgatatctttaccaagcctctagatgagaagaccttttgcaggctgcgtagtgagctaaatgtcttagattcgcggaacttggattga

SEQ ID NO: 131534 - DNA, 668 bp, Zea mays
  Clone ID: MRT4577_51441C.1
gagaaattttgctcatattcctagaaaaattgtgaacaaaccttccaccatttattatgcttgcaatgctccctttgctatttgtagaaagggtaagaaggtttatgcatccgggggttcaagctggattatcgacagcggatgcacaaaccatatgacgggggagaagaagatgttcacttcctacgtcaagaataaggattcccaagattcaattatattcggtgatgggaatcaaggcaaggataagtctgaaacccaagggaccctcaagcgcttcctcaggagagctcaaaatgagtttgagctcaaggtgaagaagataagaagcgacaacgggtccgagttcaagaaccttcaagtggaggagttccttgaggaggaagggatcaagcacgagttctccgctccctatacaccacagcaaaatggtgtggtagagaggaagaacaggacgctaatcgacatggcgaggactatgcttggagagttcaagacccccgagcgtttttggtcggaagccgtgaacacggcgtgccacgccatcaacagggtctaccttcaccgcctcctcaagaagacgtcatatgagcttctaaccggtaacaaacccaatgtatcgtactttcgtgtatttgggagcaagtgctacattctagtgaagaaag

SEQ ID NO: 131535 - DNA, 816 bp, Zea mays
  unsure (1)..(816): unsure at all n locations
  Clone ID: MRT4577_51442C.1
acctcctaccgctccactcgtcacgcgtccgtccgtccactccagctgccggccggcccccactaccgcgacacgctccgcacgcgatctccactcgctccgtccgtccggatccccttcctccctccccagccatgtcgtcgtcgtcggacaaccccaacacggtcaccgaccgcggcctcttcagcaagagcagcaaggacgacgccgccgacaagaagaagaagcaggaggagaagacagaggaggaggagggcggcggcgggttcatcgacaaggtcaaggacttcatccacgacatcggggagaagatcgaggaggcggtggggttcggcaagcccagcgccgacgtggcccggatccacgtgccccacatcggcctccaccgcgccgacctcgtcgtcgacgtgctcatcaagaaccccaacccggtgcccatcccgctcgtcgacatcgactacctcatcgacagcgacggccggaagctcgtcgcgggcctcatcccggacgccggcaccatccgcgcgcacggcgaggagacggtcaaggtgcccatcacgctcgacttcgacgacatccggagcacctacgcggatatcaagcccgggagcatcatcccctacctgctccgggtcatctccctcgtcgacgntcccgtcttcggccgcatcaagatcccgctggacaagtccggcgagatccccatccccgtacagcccgacgtggacgtgnacaagacaagttccaccacttctccttcgaggagacgacggccaccatccacctgagcctggagaaccagaacgacttcgacct

SEQ ID NO: 131536 - DNA, 568 bp, Zea mays
  Clone ID: MRT4577_51443C.1
ggccctaggggcctttttttttttttttttggtttttttttttttttttttttttttttttttttttttttttttttttttttttttttttttaaacccaaaaaaatcccccccccactccattttactggtgacaaaaaatgaacaaggggggaaatggaaagcctcccccaaatgaagcaacaacgtaaaccgccataattattcccaaaaacccgggagcaatgggggggaattaacaactcttacaacatcagggggtggaaaccccccaatacttcaaaacagacccccataacccgatagcaggggcaactcccggcaaatcccgggataagggcaacacactggcctgatgctgcgtcatcaaaaaacttctctaaaactcgtcaccctcggcgccatcctccccctcattgaaatcagcaccgaccccctcgtaatccttctcgagggcccccaggtccccacgggcctcaaaaaactcaccttcctccataccctcaccgaagtaccagtgcacaaaggcacccttggcgtacatgagggccaacttggggtccatggg

SEQ ID NO: 131537 - DNA, 813 bp, Zea mays
  Clone ID: MRT4577_51444C.1
gtccgctacagctgccggccgcgacacgctccgcacgcgatctccactcgctccgtccatccggatccccttcctccctccccaggtacttccgcagtccatcgccatcccctcctgttcgatttgatttgattccgaagaatcctcctcgaatcttcactttccatctcggccggccgagatctgaagcaaagctccgatcttgccagccagccagcggccatgtcgtcctcgtcggacaaccccaacacggtcaccgaccgcggcctcttcagcaagagcagcaaggacgacggcgccgacaagaagaagaagcaggaggagaagaaagaggatggggaggagggcggcggcgggttcatcgacaaggtcaaggacttcatccacgacatcggggagaagatcgaggaggcggtggggttcggcaagcccagcgccgacgtggcccggatccacgtgccccacatcggcctccaccgcgccgacctcgtcgtcgacgtgctcatcaagaaccccaacccggtgcccatcccgctcgtcgacatcgactacctcatcgacagcgacggccggaagctcgtcgcggggctcatcccggacgccggcaccatccgcgcgcacggcgaggagacggtcaaggtgcccatcacgctcgacttcgacgacatccggagcacctacgcggacatcaagccgggcagcatcatcccctacctgctccgggtcatcttcctcgtggacgtgcccgtcttcggccgcatcaagatcccgctggacaagtccggggagatccccatcccgtacaagcccgac

SEQ ID NO: 131538 - DNA, 490 bp, Zea mays
  Clone ID: MRT4577_51445C.1
actctctccgtccgtccggatccccttcctccctccccaggtactcgctcaatcaccatccgaatccgctcttgtttgatttgatcccaaagaatcctcttcgcatctccactttccatctcatctcggccgggatctgaagcaaagctccgatcttgccagccatgtcgtcgtcgtcggacaaccccaacacggtcaccgaccgcggcctcttcagcaagagcagcaaggacgacgccgccgacaagaagaagaagcaggaggagaagacagaggaggaggagggcggcggcgggttcatcgacaaggtcaaggacttcatccacgacatcggggagaagatcgagggggcggtggggttcggcaagcccagcgccgacgtggcccggatccacgtgccccacatcggcctccaccgcgccgacctcgtcgtcgacgtgctcatcaagaaccccaacccggtgaccatcccgatcgtcgacatcgaata

SEQ ID NO: 131539 - DNA, 835 bp, Zea mays
  Clone ID: MRT4577_51446C.1
ccttggcgaccgatcagctgaagtggatcgctgaagtgaggtggaagcggcaggccaaccccatccctgcacgtgcacccactaccgctccactcgtcacgctccagctgccggccgcgacacgctccgcacgcgatctccactcgctccgtccatccggatccccttcctccctccccagccagccagcggccatgtcgtcctcgtcggacaaccccaacacggtcaccgaccgcggcctcttcagcaagagcagcaaggacgacggcgccgacaagaagaagaagcaggaggagaagaaagaggatggggaggagggcggcggcgggttcatcgacaaggtcaaggacttcatccacgacatcggggagaagatcgaggaggcggtggggttcggcaagcccagcgccgacgtggcccggatccacgtgccccacatcggcctccaccgcgccgacctcgtcgtcgacgtgctcatcaagaaccccaacccggtgcccatcccgctcgtcgacatcgactacctcatcgacagcgacggccggaagctcgtcgcggggctcatcccggacgccggcaccatccgcgcgcacggcgaggagacggtcaaggtgcccatcacgctcgacttcgacgacatccggagcacctacgcggacatcaagccgggcagcatcatcccctacctgctccgggtcatcttcctcgtggacgtgcccgtcttcggccgcatcaagatcccgctggacaagtcccgggagatcccatcccgtacaagcccgacgtggacgtggacaagatcaagttccaccacttctccttcgaggagaccacg

SEQ ID NO: 131540 - DNA, 377 bp, Zea mays
  Clone ID: MRT4577_51447C.1
tggacttgctctgatcctatgtgtgtgtggctatgcttgtgctcaatggtgggcacttttcagttaaagttttgtagtgctgtctgtcagttgctgcctcaaacttggaatactacttctgtttggcacctgaactgcttatcaaaaactttatgtataccagttacattccacttttaaccaaaaaaaaaaaaaaaaaaaaaaaaaaaaaaaaaaaaaaaaaaaaaaaaaaaaaaaaaaaaaaaaaaaaaaaaaaaaaaaaaaaaaaaaaaaaaaaaaaataaaaaaaaaaataaataataaaaaaattaaaaatattataataaaataaaaataatataaatataatttaaaaaataaaagggggggttttttta

SEQ ID NO: 131541 - DNA, 391 bp, Zea mays
  Clone ID: MRT4577_51448C.1
ggctatagcggcgatctgctcggagtagaccccgtaaggcgagtcggcggtggcacgggccttgggagcgaccggtgggtagggcgcggcgcgagcggggtgcgcgcggcgggcaggccccgacgaggacgcggggttggccttgggtcgggacttagactgcttgatgaggtcgtccagggacatgtctagaccgctcgacatggtctccggcagctcgagcgaaaatggccctacggcggggagcggccgagacgacgccgacgccgctgcgatgtcacggcggcggcggcgcgtttcgtgggcgctgcggacgagggcgagtgagtcgcagcttgcggatgcgtctagggtttttgttgtaaaacccacgcgtccgcggacgcgtggg

SEQ ID NO: 131542 - DNA, 380 bp, Zea mays
  Clone ID: MRT4577_51449C.1
tgttattgttgtttttttttgtttttttttttactctttatttgggagaggaacctacccttctataacagatatataaggggggaaaagactcccccgctcggcaagaccaacagtggaggtggctttgcctcacacatataaacgggctgagcccaagagcttctaacaaggagggtccgcacaagggtccgacccgtgggcggaagcgatggtaaaccccggacatacggaccggtgcccgcaggcaaagcaccaaccgctatagatgagccggattaaatggtggcctaacaatggagaacgctgatccccgtgggaagaaggtacccgctcacagaatgacactagctacgaggcggaagccaaaaggggcaaga

SEQ ID NO: 131543 - DNA, 450 bp, Zea mays
  Clone ID: MRT4577_5144C.1
cgctggttctggttgtccccttccccgtcaacctcctgctgctctcgcggtctcgccactcctcgcggcacaccccagacagacctgcatgtcaatgaagtagcggtcagttggtcactccctgagcccagctccaccttgacgctctgggagatggagctgttgagccgccgggtggctgacggtgacgggtgaccttgtactcgccgtggacgagctcggcctcgaagtagctctgcgccgctgcgcgtccgtggcgccggcccgcagagtcgtcagccaggccgccactccgcgatgaggtgtagccgcagcgaggagcaggtgcgccggggggccggggtcgagctcgcttcttgacggaggggcgagggcacgagctggacggcggcggcgtcgggtactcaggtgggaattggggagtggagagagattgaatcgacagcaacg

SEQ ID NO: 131544 - DNA, 990 bp, Zea mays
  Clone ID: MRT4577_51450C.1
caggccgggccgggcgctctgctcctcccagtcccagactcccatcctcgcctccgccatggccgccgtcggcatcccctcccctccggcgccacacgtcttcgcgcccgccgcatctccttcctcctccacgtactccacactgggcccccgccgtctccgcctctccacccgactcggactcgccgccgcggcggcgtcgtgccgtacgcggtgcgctgccgctgccgatggcggggccgcggcttcggagggtgcctctgcggtggcggagctggagggggaccccgacgctggcacagacgttgccggaggcgccgcgacctccacgcggccgccctactcgctcatctccgcggacaacgtgcagaaggcgatgcgcggcctcgcaattacagatgctgaccactatgggaggcttggagtcaccaggctagcttctactgatgaggtaaaagctgcgtacgagaagatgtgtgaagaactaaatagcaaagaactagaagaagaggagcttaacaaggaacatgagctcctaaaggaatcatttactatactatcaacggaggaagaacgaagattatatgattggagcttgtcaagaagtggacagcctgagcgatatgtctggccatttgaagttgatccattggagttggcaccagatcctccaaaggaaccagaagatgagttcccaaccaagctcgttggctacttcttactggcgtggttcatactctctgttggcctctcggtggccctcaacaaatgaagattttctccccaaaagaacatgaattgtaatccaataatctctctgccatgtacatcaatgacgctgttgtgtgcacagaagcatatggatgtacatgccatgctcttggcaattagccgaaacatataactacacgttctgcacagattgaagtcgtgaatcttgtgccaggagttttcccaataatgaattacccatatccccattttcaaccg

SEQ ID NO: 131545 - DNA, 453 bp, Zea mays
  unsure (1)..(453): unsure at all n locations
  Clone ID: MRT4577_51451C.1
agtcaccaggctagcttctactgatgaggtaaaagctgcgtacgagaagatgtgtgaagaactaaatagcaaagaactagaagaagaggagcttaacaaggaacatgagctcctaaaggttctcggcataaatcaggagtcataatgcctcacttcactaatttcctgtgcttcaatcatatatgcgccattgtaggaatcatttactatactatcaacggaggaagaacgaagattatatgattggagcttgtcaagaagtggacagcctgagcgatatgtctggccatttgaagttgatccattggagttggcaccagatcctccaaaggaaccagaagatgagttcccaaccaagctcgttggctacttcttactggcgtggttcatactctctgttggcctctcggtggccctcaacaaatgaagattttctncccaaaagaacatgaa

SEQ ID NO: 131546 - DNA, 322 bp, Zea mays
  Clone ID: MRT4577_51452C.1
tatagcatgcccatgcatgcgcgctggtcttgtgttatttctcgatctttgccacacggcgacgacatgcatgcgtcttgattattattgagcacaagcatgatgcatcacatgtttggcttcaagttgagccgggtggcaatgttcatacccagcgacggcgtccacttggcgaggaggtgcatccagatggaccgagcactcctggctgacctgtgggggcccgagcgagtatgctaatggacgcacagaatcgtgcctgtgaaggggcgtcccatgacgcggagctcttccctgagcgcttgaagcacgcgcgcttgcg

SEQ ID NO: 131547 - DNA, 610 bp, Zea mays
  Clone ID: MRT4577_51453C.1
gcccttgtcttttttttttcctgttcttctttttcttgcaaacattaaacattcttttctactgcctcactaacaaggcctaaccaacacaaaaaaagaaacccgatcctgaggcgcacgcccacccccccccagaagaacaaggagcccccgactttgccatgcaggcgaggcagttccggcacaggagcactgccagccgaggcatgcccccccccctggcggggggacccgcccgacaccccccccaatctcaagaacaggcacaccggggctgcagcgagggggggggagcacactggagcaaccacagaaatggctggggggctcctctggccccgtaagagagggaaggaacaaacccccgcctctcggcggcataaaaaccaaacccgtggggcagaacaggaaagggggagggccttggccgcccaatcatcccagggggggcccacatggggaagccgaagttctaaggatggaaaactttactttccaccgcaggtccagaaaaaacattgccgggggaagccgtcggaaagaactgggtgtggtggttctttggggccccagtcacagggaactggggggaccccttcttatccggaaa

SEQ ID NO: 131548 - DNA, 243 bp, Zea mays
  Clone ID: MRT4577_51454C.1
gcggccgggccgggaatgtttcccgacgatgcatttcacgtctgctcgtactcgcgtagcaagcacagagcagaaaagatcgccgggtgagcacgggctgcgctcgcggaccggcgacgtggttatgcctcccttcagctaaaaaaggtactgccccactcaccacctacccgccgcagctacaagaaggaacactacacacccagcacggcaggatcctcctccagctcctgttcgagatgg

SEQ ID NO: 131549 - DNA, 629 bp, Zea mays
  Clone ID: MRT4577_51455C.1
cccacgcgtccggccactcgttgtgagtacacagtacactcgcgaaccgctccatcaacactaggccaccgggaggcggcaggccccggaggggattggcagacgcgcgcagaggcacgtaccactaccgcagcagcgcgggagcagggaccagggacccgggccggcggcatgggcgtccttcggagcacgcagagccttcaggcggaggtggacgagctgcgcgccgcgctcctggcaggcggcgggcacgaggccgcgggcgggtggcgccggtcggcgggccacgcggacgccaagcgcagccccggcggcgacgccggaggggccgcggcgcgcgccgtgtgcgtcacgggagggatctccttcgtcgggttcgccgtcgtcgaccgcctcctccggcacgggtacaccgtccgcctcgcgctggagacgcaaggtatatatccagacgtcgtcctcccgcactactacctcggcggaacctacccgtccgcttctctctcccccggccgctcgctctcgctgccgtttgcgccttcttctggttctgggctctggccttggccttggagcggctgtacgtgtgctcggttctgctcgttaatttgctcctcgtccccggcagg

SEQ ID NO: 131550 - DNA, 431 bp, Zea mays
  Clone ID: MRT4577_51456C.1
cgggtactcaatttctgaaggtcgtggcgtgaaataaaaactgcggaggtcgaaatggcggcggaggataatcccgcggcggtgcgcccagcggaggatctgttggagagggagatggcctggcgctacttatcacacgactccgggcacgcgctgtgggtccgacacctttcactatctctcgaaggcgaagagggcctctacgtttcagagcgactctttacctggcgaactggtcactcttctgtacgactttcaatatcacaagtctaccatgaacattgtggaggatatgagacttctatagatattgtttatatataaagcgctgaatgccacccgggttaaagagtgatggtgtttatactaattgcactcaaaaatagaagtgtaacttgatatgttgatgcacccactgttgctgttccatt

SEQ ID NO: 131551 - DNA, 348 bp, Zea mays
  unsure (1)..(348): unsure at all n locations
  Clone ID: MRT4577_51457C.1
cacgttcgtttgtgctcgatgtagactttggttcaagggaagtaccgtcgtagtgttgtgttcgtggtaacaagaataaagttttatgctagtggcggatgccacacatgtggtgctanaaaaaaaaaaaaaaaaaaaaaaaaaaaaaaaaaaaaaaaaaaaaaaaaaaaaaaaaaaactcaagcctccagctctctctcttcctctgtctcgcctcctccctccccctgaagaaagctcgtcaaaatgtcgtccaaggcggcaaaaatggtggtgccgaagtcggggctcctcaaaagaaagcggaaggagctctgggccgccaaaaaaaaaaccaaggccgtcaag

SEQ ID NO: 131552 - DNA, 368 bp, Zea mays
  unsure (1)..(368): unsure at all n locations
  Clone ID: MRT4577_51458C.1
cctcnttttttttttttttttttttttttttttttttttttttttttttttttttttttttttttttttggggccgcaacccaatttttactttttttggccccacccacatttatggttataaccccatttacaaaaggggcttaagggcacaccattccaacttaaaaaaaaggtttggactggttggttgtttaaaggttgggccgggcacggatttatactttttaagggacgggcaaaacttacccatgcgctaccgggggggacccctggggaagcggccctctgctccctggggaaaaaaaccccccggctggggggagttaccgggggcgtacacaatggcgaggattttctcccggggg

SEQ ID NO: 131553 - DNA, 235 bp, Zea mays
  Clone ID: MRT4577_51459C.1
ttccctatcgaccactcgtcctcccactcgtaccaaaaactaaaataccatttctaatatttaaacacaacttaaaaaacaactagaaaatgtataaatataaacctctccatacctctaaacacacaccttacttcaaacacataccataaatatcatcctcctactaataactcacactttacttacattcaaactctaccatttaatttatcaaaatttttccaacataatc

SEQ ID NO: 131554 - DNA, 1467 bp, Zea mays
  Clone ID: MRT4577_5145C.1
aaatagtttacgtggttattattttgagccgtcgcagcatacggacaaccgacccgggctagtattatttactctgttgttgttttttttttctttttacggacacaaaattgtgttattactgcaaaagaaaaaaaatgaacgcacagaccaaaagttgcatctgaaaataaaagaaacatatggatttacacttgggagttgtttcagtttcagctccactcatcatcagtctacgccgccgggaagaagcttgcgagtagtcgctctggacgccgacgaggccgtcccaatgcgtgcagcggtcgtcccagtgcggcggcctgcgacagcagggatcacacgtgacggcgtgacgacttcgaccacggataggttgtaggaatccgttccgagacggctctgcgcccaccctttccggccagagaagccgccggccatgacccagcagttcttgaaccccacgctgtccagcgtcttcgccacagtcttggcgacgtcgctgtacgagtccatgatgatgacgttggagccctttccgatcttcttgaggtaggatatcttcagagcggcgatctccgcctcggctttcttcgcgttgcgcaccatgcccttcagcttgctcggaaggtcttccagcggcacagagacgagcttgttcttcgcgttcgatggcagctgcggcaatcctgccttggccttgtccttgtcgctccgcacgtcgatcaggacgtagccctgcgtggtcaccttgtccagtgcttgcgccggggtcaggtcgcctttgtaaccgcggaggctggacgagaccagcgaccagaccggcggcacgaggaggtacgcgagaaacgccgctccggcggccacgacgtagtcctcggggcccagcgacgtgatggtctccacggccgccgaggccacgggcttcgcggcgtcgatcaccttcgtgctctgctccgctgcggtcttggcgacggacagaacgggggcggggtcgacgccggcgccctggagtgcctccgtggcctgcttggaggcggcggacaccacgggcgcggccagcttgagggcctcgtcgctggcgctcttcaggaccggaagcgccggcttgacggcctcgcccaacgccttgagcacggccgccacctgctcagcggccttgccgccgacgtcgatggcctggctcaccgtgtccacggccttggtaagcgagccggcgacgtcctccttggacaaggccgcggcgggcgcgaccggcgtcagtgtcagcaacgcggccgagatggcgacggaagagacggccgcgaacgcggcgtcagccggcgcacgccgttcccagctcctggatgtcgcctttggcggcggcggcgcgagggtggccgacaccgacacggggacgggggccatgggtgggtggtggcttcggcagctctgctcggctggccggcctcgaggtacccaatggga

SEQ ID NO: 131555 - DNA, 323 bp, Zea mays
  Clone ID: MRT4577_51460C.1
tcgccccacccaccaaagggaacaacaggggtaccaacgcctaatccaaaggtagaacggacactaacacggtgacagaagcgaacggtaacacgatactattgatagatatagataactcggccgaagccaggatgggcccacacataaataccttcagccggcgccgacaccgtcggcgaaaccgccgtcaccacccttgcgccgaccggcgttgccgccatcgtcttcgtagccggcggcaccacccttgtgccgtacgatgtagccgtcatcggcgtcattaccggcgtcacggggttcggcttcattagccgcctctt

SEQ ID NO: 131556 - DNA, 113 bp, Zea mays
  Clone ID: MRT4577_51461C.1
gcaggcatcaggatattaagggaaacaggcatcaggataagcggaaacgggtcagggtaggaaaccaggacacaagcgggacttcacaggggtaatacatggagttcaacagg

SEQ ID NO: 131557 - DNA, 4929 bp, Zea mays
  Clone ID: MRT4577_51462C.1
atggatcctaaggggaagggaattgtgatcaacgacaaggagaaggagtccttcgtcaatgagccaagggatgacaagtccaacaactcgggctcgggccacaagcgaaaagatgggaagaagaagaagacaagacgcatcaaggagatcgtctactacgacagcgatgagtcctcttcttcccaaaaggacgacgacaacgactacaggaagacggtcaattcgaacttctcatttgattattcgcgtattccacatagttcgaattcgcatttgctttccattcctcttggcaaacctccacactttgatggggaggactacggattttggagtcacaaaatgcgtagtcacttattctctctccatccaagcatatgggagatagtagagaatggaatgaaatttgatagctcggatagccctatgcttataaatgaacaaattcatagaaatgcacaagctactactgttctcttagcatctttgtgcagggaagagtacaataaggtgagcggcttggacaatgccaagcagatatgggacaccctcaagatctctcacgaggggaacgacatcaccatgctcaccaagatggagttggtggagggcgagcttggacgattcgccatgataaggggagaagagccaactcaaacttacaaccggctcaagacccttatcaacaaaataaggagctacggaagcacgcgttggacggatcacgacgtcgtccgcctaatgctcaggtcctttaccgttcttgatcctcatctcgtgaacaatattcgtgagaatcccaggtacacgatgatgacgcccgaggaagtacttggaaaattcgtgagcgggcggatgatgatcaaggaggcaagatacgtcgacgacgcgttgaacggtccactccacgagcctcaacccattgctctaaaggcaacaaggaacaaggagtcgctacctagcaaggtggcgcaagttgaggcggccgggctcaatgatgaagagatggctctcatcatcaagagattcaagacggtgctgaagggtcacaaggggcagccaagcaagaacaagacaaaggggaaacgctcatgcttcaagtgcggtaagattggtcattttatcgctaactgccccgataacgatagtgaccaggaacagggaaacaagagggaaaagaagaagaattacaagaaggccaagggcgaggcgcatctaggcaaggagtgggattcggattgctcctcctccgactccgacaatgagggactcgccgccactgccttcaacaaatcggccctcttccccaacgagcatcacacttgcctcatggcaagggaaaagaagactagcaaaagtgattttgaaaaactaaaatttgctagggatgcctacacggttggtagacacccctcaattaaggatgggcttggcttcaagagggaagccaagaacttaacaagccataaggctcccattcccgccaaggagaaagggaaggcccctatggctagtagtgcaaaaaggaaccatgcctttatgtatcatgataggagacatgctagaaatgcttgtaatgattttgattcatatgtttatgattctcatgccatgtttgctcctagttcttcatatgtgtatgatagaaatgttactaggagaaatgttgttcctaaaaagaatgttattcatgctcctaggaaagtagcaaatgaaccttctaccatttattatacttgcaatgctccctttgctatttgtagaaaggacaagaaggtttatgcatccgggggttcaagctggattatcgacagcggatgcacaaaccatatgacgggggagaagaagatgttcacctcctacgtcaagaataaagattcccaagattcaattatattcggtgatgggaatcaaggcaaggtaaaaggtttagtagagtctcttggatataacttgctatctgttagtcaattatgcaatatggggtataactgtctattcacaaatatagatgtgtctgtctttagaaggtgtgatggttcactagcatttaagggtgtattagacggcaaactttacttagttgattttgcaaaagaggaggccggtctagatgcatgcttaattgctaagactagcatgggctggctgtggcatcgccgcttagcacatgtggggatgaagaaccttcacaagcttctaaagggagaacatgtaataggtctaactaatgttcaattcgaaaaagatagaccttgtgcagcttgtcaagcagggaaacaagtgggaggctctcatcacaccaaaaatgtgatgacgacatcaagacccttggagatgctgcatatggacctcttcggacccgtcgcctatctgagcataggaggaagtaagtatggtctagttattgtagatgatttttcccgcttcacttgggtgttctttttgcaggaaaaatccgaaacccaagggaccctcaaacgcttcctcaggagagctcaaaatgagtttgagctcaaagtgaagaagataaggagcgacaacgggtccgagttcaagaaccttcaagtggaggagttccttgaagaggaagggatcaagcacgagttctccgctccctacacaccacagcaaaatggtgtggtagagaggaagaacaggacgctcatcgacatggcgaggacgatgctaggagagttcaagacccctgagtgcttttggacggaagccgtgaacacggcttgccacgccatcaacagggtctaccttcatcgcatcctcaagaatacgtcgtatgagctactaaccggtaacaaacccaatgtatcgtactttcgtgtatttgggagtaagtgctacattctagtaaagaagggtagaaattctaagtttgctcccaaagctgtagaagggtttttattaggttatgactcaaatacaaaggcgtatagagtcttcaacaaatcatcgggtttggttgaagtctctggcgacgttgtatttgatgagactaatggctctccaagagagcaagtggttgattgtgatgatgtagatgaagaagacattccaacggccgcaatacgcaccatggcaattggagaagtgcggccacaggaacaagatgaacgagaacaaccttctccctcaactatggtgcatcccccaactcaagacgatgaacaggttcatcaacaggaggtgtgtgatcaagggggagcacaagatgatcatgtgttggaggaagaagcgcaaccggcacctccaacccaagttcgtgcgatgattcaaagagatcatcccgtcgaccaaattttgggtgacatcagcaagggagtaactactcgatctcgattagttaatttttgtgagcattactcctttgtctcttctattgagcctttcagggtagaagaggccttgctagatccggactgggtgttggccatgcaagaggagctcaacaacttcaagaggaatgaagtttggacactggtgcctcgtcccaagcagaatgttgtgggaaccaagtgggtgttccgcaacaaacaggacgagcgcggggtggtaacgagaaacaaggctcgacttgtggcaaaaggttatgcccaagtcgcaggtttggatttcgaggagacttttgctcctgtggctaggctagaatcaattcgtatcttgctagcatatgccgctcaccattctttcaggttgtaccaaatggatgtgaagagcgctttcctcaacgggcctataaaggaggaggtgtacgtagagcaaccccctggcttcgaggatgaacggtaccccgaccacgtgtgtaagctctctaaggcgctctatggacttaagcaagccccaagagcatggtatgaatgccttagagatttcttaattgctaatgcgttcaaggttgggaaagccgatccaactcttttcactaagacatgtgatggtgatttgtttgtgtgccaaatttatgtcgatgacataatatttggttctactaatcaaaagtcttgtgaagagtttagcagggtgatgacgcagaaattcgagatgtcgatgatgggcgagttgaactacttccttgggttccaagtgaagcaactcaaggacggcactttcatctcccaaacgaagtatacgcaagatctgctaaagcggtttgggatgaaggacgccaagcccgcaaagactccgatgggaaccgacggacacaccgacctcaacaaaggaggtaagtccgttgatcaaaaagcataccggtcaatgatagggtctttactttatttatgtgctagtagaccggatattatgcttagcgtatgcatgtgtgctagatttcaatccgatcctaaggagtgtcacttagtggcggtgaagcggattcttagatatttggttgctacgccttgcttcgggctctggtatccaaaggggtctacctttgacttggttggatactcagactccgactatgctggatgtaaggtcgataggaagagtacatcggggacgtgccaattcttaggaaggtccctggtgtcgtggaactctaagaaacaaacttctgttgccctatccaccgctgaggccgagtatgttgccgcaggacagtgttgcgcgcaactactttggatgaggcaaaccctcagggactttggctacaatctgagcaaagtcccactcctatgtgataatgagagtgctatccgtatggcggaaaatcctgttgagcacagccgcacaaagcacatagacatccggcatcactttttgagagaccaccagcaaaagggagatatcgaagtgtttcatgttagcaccgagaaccagctagccgatatctttaccaagcctctagatgagaagaccttttgcaggctgcgtagtgagctaaatgtcttagattcgcggaacttggattga

SEQ ID NO: 131558 - DNA, 2322 bp, Zea mays
  Clone ID: MRT4577_51463C.1
atgaccacatcaagacccctggagctgctacatatggatctcttcggacccgtcgcctatctgagcataggagggagtaagtatggtttagttattgttgatgacttttcccgcttcacttgggtgttctttttgcaggataagtctgaaacccaagggaccctcaagcgcttccttaggagagctcaaaatgagtttgagctcaaggtgaagaagataagaagcgacaacgggtccgagttcaagaaccttcaagtggaggagttccttgaggaggaagggatcaagcatgagttctccgctccctacacaccacagcaaaatggcgtggtagagaggaagaacaggacgctaatcgacatggcaaggactatgcttggagaattcaagacccccgagcgtttttggtcggaagccgtgaacacggcttgccacgccatcaacagggtctaccttcaccgcctcctcaagaagacgtcatatgagcttctaaccggtaacaaacccaatgtatcgtactttcgtgtttttgggagcaagtgctacattctagtgaagaagggtagaaattctaagtttgctcccaaagctgtagaagggtttttgttaggttatgactcaaatacaaaggcgtatagagtcttcaacaaatcatcgggtttggttgaagtctctagcgacgttgtatttgatgagactaatggctctccaagagagcaagttgttgattgtgatgatgtagatgaagaagatgttccgacggccgctatacgaaccatggcgattggagaagtgcggccacaggaacaagatgaacgagatcaaccttcttcctcaactatggtgccacccccaactcaagatgatgaacaggttcatcaacaggaggcgtgtgatcaagggggagcacaagatgatcatgtgatggaggaagatgcacaacctgcacctccaacccaagttcgagcgatgattcaaagggatcatcccgtcgaccaaattctgggtgacattagcaagggagtaactactcgttctcgattagttaatttttgtgagcattactcctttgtctcttctattgagcctttcagggtagaggaggccttgctagatccggactgggtgttggccatgcaggaggagctcaacaacttcaagagaaatgaagtttggacgctggtgcctcgtccgaagcaaaatgttgtgggaaccaagtgggtgttccgcaacaaacaagacgagcacggagtggtgacaaggaacaaggctcgacttgtggcaaaaggttatgcccaagtcgcaggtttggactttgaggagacttttgctcctgtggctaggctagagtccattcgtatcttgctagcatatgccgctcaccattctttcaggttgaaccaaaagtcttgtgaagagtttagcagggtgatgacgcagaaattcgagatgtcgatgatgggcgagttgaactacttccttgggttccaagtgaagcaactcaaggacggcaccttcatctcccaaacgaagtacacgcaagatctgctaaagcggtttgggatgaaggacgccaagcccgcaaagacgccgatgggaaccgacggacacaccgacctcaacaaaggaggtaagtccgttgatcaaaaagcataccggtcaatgataggttctttgctttacttatgtgctagtagaccggatattatgcttagcgtatgcatgtgtgctagatttcaatccgatcctaaggagtgtcacttagtggcggtgaagcgaattcttagatatttggttgctacgccttgcttcgggctctggtatccaaaggggtctacctttgacttagttggatactcagactccgactatgccggatgtaaggtcgataggaagagtacatcggggacatgccaattcttaggaaggtccctggtgtcatggaattctaagaaacaaacttccgttgccctatccaccgttgaggccgagtatgttgccgcaggacagtgttgcgcgcaactactttggatgaggcaaaccctccgggactttggctacaacctgagcaaagtcccactcctatgtgataatgagagtgccatccgcatggcggaaaatcctgttgaacacagccgcacaaagcacatagacatccgacatcactttttgagagaccaccagcaaaagggagatatcgaagtgtttcatgttagcaccgagaaccagctagccgatatctttaccaagcctctagatgagaagaccttttgcaggctgcgtagtgagctaaatgtcttagattcgcggaacttggattga

SEQ ID NO: 131559 - DNA, 2616 bp, Zea mays
  Clone ID: MRT4577_51464C.1
atgaccacctcaagacctctggagctgctgcatatagacctcttcggacccgtcgcctatctgagcataggagggagtaagtatggtctagttattgttgatgacttttcccgcttcacttgggtgttctttttgcaggataagtctgaaacccaagggaccctcaagcgcttcctcaggagagctcaaaatgagtttgagctcaaggtgaagaagataaggagcgacaacgggtccgagttcaagaaccttcaagtggaggagttccttgaagaggaagggatcaagcacgagttctccgctccctacacaccacagcaaaatggtgtggtagagaggaagaacaggacgctcatcgacatggcgaggacgatgctaggagagttcaagacccccgagtacttttggacggaagccgtgaacacggcttgccacgccatcaacagggtctaccttcatcgcctcctcaagaagacgtcgtatgagctgctgaccggtaacaaacccaatgtatcttactttcgtgtatttgggagcaagtgctacattctagtgaagaaaggtagaaattctaagtttgctcccaaagcagtagaagggtttttgttaggatatgactcaaatacaaaggcatatagagtcttcaacaaatcatcgggtttggttgaagtctctagcgacgttgtatttgatgagactaatggctctccaagagagcaagttgttgatcttgatgatgtagatgaagaagaggttccgacggccgccatacgaaccatggcgattggtgatgtgcgaccacaggaacaagatgagcaagatcaaccttcttcctcaactatggtgcatcccccaactcaagacgatgaacaggttcatcaacaggaggcgtgtgatcaagggggagcacaagatgatcatgcaatggaggaagaagcgcaaccagcacctccaacccaagttcgagcgatgattcaaagggatcatcccgtcgaccaaattcttggtgacattagcaagggagtaactactcgatctcgattagttaacttttgtgagcattactcctttgtctcttctattgagcctttcagggtagaagaggccttgctagatccggactgggtgttggccatgcaagaggagttaaacaacttcaagcgcaatgaagtttggacactggttcctcgtcccaagcaaaatgttgtgggaaccaagtgggtgttccgcaacaaacaggacgagcacagggtggtgacaaggaacaaggctcgacttgtggcaaaaggttatgcccaagtcgcaggtttggactttgaggagaagtttgctcctgtggctaggctagaatcaattcgtatcttgctagcatatgccgctcaccattctttcaggttgtaccaaatggatgtgaagagcgctttcctcaacgggccaataaaggaggaggtgtacgtagagcaaccccctggcttcgaggatgaacggtaccccgaccatgtgtgtaagctctctaaggcgctctatggacttaagcaagccccaagagcatggtatgaatgccttagagactttctaattgttaatgctttcaaggttgggaaagccgatccaactctttttacaaagacatgtgatggtgatttgtttgtgtgccaaatttatgtcgatgacataatatttggttctactaaccaaaagtcttgtgaagagtttagcagggtgatgacgcagaaattcgagatgtcgatgatgggcgagttgagctacttccttgggttccaagtgaagcaactcaaggaaggcaccttcatctcccaaacgaagtacacgcaagatctgctaaagcggtttgggatgaaggacgccaagcccgcaaagactccgatgggaaccgacgggcacaccgacctcaacaaaggaggtaagtccgttgaccaaaaagcataccggtctatgatagggtcattactttatctatgtgctagtagaccggatattatgcttagcgtatgcatgtgtgctagatttcaatccgatcctaaggaatgtcacttagtggcggtgaagcgaatccttagatacttagttgctacgccttgcttcgggctctggtatccaaaggggtctacctttgacttggttggatactcagactccgactatgctggatgtaaggtcgataggaagagtacatcggggacgtgccaattcttaggaaggtccctggtgtcatggaactctaagaaacaaacatccgttgccctatccaccgctgaggccgagtatgttgccgcaggacagtgttgcgcgcaactactttggatgaggcaaaccctccgggactttggctacaatctgagcaaagtcccactcctttgtgataatgagagtgctatccgcatggcggaaaatcctgttgaacacagccgcacaaagcacatagacatccggcatcactttttgagagaccaccagcaaaagggggatatcgaagtgtttcatgttagcaccgagaaccagctagccgatatctttaccaagcctctagatgagaagaccttttgcaggctgcgtagtgagctaaatgtcttagattcgcggaacttggattga

SEQ ID NO: 131560 - DNA, 341 bp, Zea mays
  Clone ID: MRT4577_51465C.1
tttctattatttatctattttgtacagaaccctgttatatattaatgttgtgacattcatttctgtactatgagtcatcatatgtgtgagacttgatcctagcacacttggtgaagttcgcgcccgggttttagacccctgaaatctggttgtgacaatgtacttttgcttgggctgcgcccgttgcctataaatagatgaacagtacccccgtactgttcacactagattggaatcaccctctcgctttcgccttcgaacaagctaaaggtacaatgtaatgtacattgtgtatcactttgtcaatatatgatatggatcttaatgttgtttaacatttg

SEQ ID NO: 131561 - DNA, 276 bp, Zea mays
  Clone ID: MRT4577_51466C.1
cggagccgtggtgctgagcgacgcgcttcgagctggtctcggcggctctacgaggcggtgggcagggaccacgtggtcggtagcagcgctggcggcagtcgggttcgctgccagagagtgcacggaccctcccccggcgccgctggtcgacgcggcggagctgggggtcctggtcgctgtgccgcgccgtggtcgccgggttcatcgccaggctggtgttcctgtagatcacggtggccagcgtgatcgggtacaagcaccagaccgacgcgtcgg

SEQ ID NO: 131562 - DNA, 5439 bp, Zea mays
  Clone ID: MRT4577_51467C.1
atggatcctaagggaaaggggatggtggtcgacaacaacgagaaggagtctatcttcaacgagctgaagaatgacaagtctaccgacttggggtcaagccacaagcgcaaagatgggaagaagaagaagacaaggcgcatcaaggagatcgtctactacgacagcgacgaatcctcttcttcccaaaaggacgacgaccacaacgactacgagagaagaaaaccggttaattcgaacttttcttttgactactctcgtattccgcaaagttcaaattcgcatttgctccccattccacttggcaagccccctcactttgatggagaggactacggattttggagccacaaaatgcgtactcacttgttctctctccatcctagcatatgggagattgtagaaagtggaatgcaatttgatagctcggatagccctatgtttatcaatgaacagattcataaaaatgcacaagctactactgtgttgctagcctctttgtgcagggacgagtacaataaagtgagcggcttggacaatgccaagcaaatatgggacaccctaaagatttctcacgaagggaacgacatcaccatgctcactaaaatggagttggtggagggtgagcttggaaggtttgcgatgataaggggcgaggagccaacccaaacatacaaccggctcaagacccttatcaacaaaataaggagctatggaagcacgatatggacggaccatgacgtcgtccgactattactaaggtcctttaccattcttgatcctcatttggtgaataatattcgtgagaatcccaggtacaccaaaatgtcgcccgaagaagtcctaggaaaattcgtcagcgggcgaatgatgatcaaggaagcaaggtacgtggacgacgccttgaatggaccgatcaacgagccgcaaccttttgctctcaaagcaacaagaagcaaggaggcgctacctagcaaggtggcccaaattgaggcggccggacttaatgatgaagagatggctctcatcattaaatgcttcaagacggtactaaagggtcacaaggggcagccaagcaagaccaagacaaaggggaagcgctcatgcttcaagtgcggtaagattggtcattttatcgctaactgccccgataatgatagtgaccaggaacagggaaacaagagggaaaagaagaagaattacaagaaggcaaagggcgaggcgcatctaggcaaggagtgggactcggactgctcctcttccgactccgacaatgaaggactcgccgccaccgccttcaacaaatcaaccctcttcccaaacgagcgtcacacatgccttatggcaagggagaagaaggtatgtactcggaactctacctatgcttcttcaagtgaggacgaatctagtgatgaggatgaagtagattactcgtgtttgtttaagggcctagatagaaccaaagtagacaaaattaatgaattgattgatgccctgaatgagaagaacatacttttagaaaagcaagaggatttgttgtatgaagaacatgataaatttgtagaagctcaaaaatcccttgcattagaaattaaaaggaatgaaatgcttgcttgtgagttgtccacatgccatgattcaatttctaaattaaagagcattaatgatgacttaaatgctaaactagtagaagcacataaatccaactcttgtgttgaacatgttgaaatttgcactaggtgtaaggatgttgatattaatgcttgtagtgaacacttagtttccatttcaaaattgaatgatgaattagctagtcttaatgcccaacttaagactagcaagagtgaatttgaaaaactaaaatttgcaagggatgcctacactattggtagacacccctcaattaaggatgggcttggcttcaagagggaagccaagagcttaacaagccataagactcccatctccaccaaggagaaagggaaggctcctatggctaatagtgttaagaagaatcatgctttcatgtactatgataggagatattctagaaatgcttttagaggtcataatgtttttgattcacatgcttatgactcttatgctatgactgcttctagttctcatgttatgcatggtagaaatgtgcttagaaaaaatgttgttcatcaaatgcctaggagaaatgttgttcataatgctcctaggaaagtagtgaatgaaccttctacaatttattgtgctttaaatgcttcctttgctatttgtagaaaggataagaaaattgttgctaggaagttaggggcaaaatgcaagggagacaaagcttgcatttgggtccctaaggatatttgcactaaccttgtaggacccaacatgagttgggtttatgcatccgggggttcaagctggattatcgacagcggatgcacaaaccatatgacgggggagaagaagatgttcacctcctacgtcaaaaataaggattcccaagattcaattgtattcggtgatgggaatcaaggcaaggtaaaagggttagttgagtctcttggttacaatttgctatctgttagtcaactatgcaatatgggatataattgtctgtttacaaatgtagatgtgtctgtctttagaagaagtgatggttcactagcttttaagggtgtattagacggcaaactttatttagttgattttgcaaaagaggaggccggtctagatgcatgcttaatagctaagactagcatgggttggctgtggcatcgccgcttagcacatgtggggatgaagaaccttcacaagcttctaaagggagaacacgtgataggattaactaatgtgcaattcgaaaaagatagaccttgtgcagcttgtcaggcaggtaaacaagtgggaggagcacatcacagcaagaatgtgatgaccacatcaagacccctggagctgctacatatggacctcttcggacctgtcgcctatctaagcatagggggaagtaagtatggtctggttattgttgatgacttttcccgcttcacttgggtgttctttttgcaggataagtctgaaacccaagggaccctcaagcgcttcctcaagagagctcaaaatgagtttgagctcaaggtgaagaagataaggagcgacaacgggtccgaattcaagaatcttcaagtggaggagtttcttgaggaggaggggatcaagcacgagttctctgctccctacacacctcagcaaaatggtgtggtagagaggaagaacaggacgctcatcgatatggcaaggaccatgcttggagagttcaagacccccgagcgcttttggtcggaagccgtgaacacggcttgccacgccatcaacagggtctaccttcaccgcctcctcaagaagacgtcatacgagcttttaaccggtaacaaacccaatgtatcgtattttcgtgtatttgggagtaaatgctacattctagtgaagaagggtagaaattctaagtttgctcccaaagctgtagaagggtttttattaggttatgattcaaatacaaaggcgtacagggtcttcaacaaatcatcgggtttggttgaagtctctagcgacgttgtatttgatgagactaatggctctccaagagagcaagttgttgattgtgatgacgtagatgaagaagatgttccgacggccgctatacgaaccatggcgattggagaagtgcggccacaggaacaagatgaacgagatcaaccttcttcctcaacaacggtgcatcccccaactcaagacaatgaacaggttcatcaaaaggaggcatgtgttcaagggggagcacaagatgatcacgtgatggaggaagaagcgcaaccggcacctccaacccaagttcgagcggtgattcaaagggatcatcccgtcgaccaaattttgggtgacattagcaagggagtaactactcgatctcgactagttaatttttgtgagcattactcctttgtctcttctattgagcctttcagggtagaggaggccttgctagatccggattgggtattggccatgcaggaggaactcaataacttcaagcgcaatgaagtttggacactagtgcctcgtcccaagcaaaatgttgtgggaaccaagtgggtgttccgcaacaaacaggacgagcacggggtggtgacgaggaacaaggctcgacttgtggcaaaaggttatgcccaagtcacaggtttggactttcaggagacgtttgctcctgtggctaggctagaatcaattcgtatcttgctagcatatgccgctcaccattctttcaggttgtaccaaatggatgtgaagagcgctttcctcaatgggccaatcaaggaggaggtgtacgtggagcaaccccctggcttcgaggatgaacgataccccgaccacgttgggaaagccgatccaactcttttcactaagacttgtgacggtgatctttttgtgtgccaaatttatgtcgatgacataatatttggttctactaaccaaaagtcttgtgaagagtttagcagggttatgacgcagaaattcgagatgtcaatgatgggcgagttgaactacttccttgggttccaagtgaagcaactcaaggacggcaccttcatctcccaaacgaagtacacgcaagatttgctgaagcggtttgggatgaaggacgccaagcctgcaaagacgccaatgggaaccgacggacacaccgacctcaacaaaggtggtaagtccgttgatcaaaaagcataccggtccatgataggctctttgctttatttatgtgctagtagaccagatattatgtttagcgtatgcatgtgtgctagatttcaatccgatcctaaggagtgtcacttagtggccgtgaagcggattcttagatatttagttgctacgccttgcttcgggatctggtatccaaaggggtcgaactttgacttgattggatattcagattccgactatgctggttgtaaggtcgataggaagagcacatcggggacgtgccaattcttaggaaggtccctggtgtcgtggaactctaagaaacaaacttctgttgccctatccaccgctgaggccgaatatgttgccgcaggacagtgttgtgcgcaactactttggatgaggcaaaccctccgggactttggctacaatctgagcaaagtcccactcctatgtgacaatgagagtgctatccgcatggcggaaaatcctgttgaacacagccgcacaaagcacattgacatccggcatcactttttgagagaccaccagcaaaagggagatatcgaagtgtttcatgttagcaccgagaaccagctagccgatatctttaccaagcctttagatgagaagaccttttgcaggctgcgtagtgagctaaatgtcttagattcgcggaacttggattga

SEQ ID NO: 131563 - DNA, 3022 bp, Zea mays
  Clone ID: MRT4577_51468C.1
aaaggatatgaagatagttgctaggaaattaggggcaaaatgcaagggtgataaaacttgcatttgggtccctaagacaattgtgactaaccttgtaggacccaacaagagttgggtttatgcatccgggggttcaagctggattatcgacaacggatgcacaaaccatatgacgggggagaagaagatgttcacctcctacgtcaaaaacaaggattcccaagattcaatcatatttggtgatgggaaccaaggcaaggtgaaaggcttaggcaaaattgcaatttcaaatgagcactctatctctaatgtgtttttagttgagtcccttggatataatttgctatctgttagtcaattatgtaatatgggatataattgcctatttacaaatgtagatgtgtctgtctttagaagaagtgatggttcattagcttttaagggtgtattagacggcaaactttatttagttgattttgcaaaagaggaggccggtctagatgcatgcttaatagctaagactagcatgggctggctgtggcatcgccgcttagcacatgtagggatgaagaaccttcacaagcttctaaagggagaacacgtgataggtttgactaacgtgcaattcgaaaaagatagaccttgtgcagcttgtcaagcagggaaacaggtgggaggctctcatcacaccaaaaatgtgatgaccacatcaagacccttggagatgcttcatattcacctcttcggacccgtcgcctatctaagtataggaggaagtaagtatggtcttattatagtagatgattttccccgcttcacttgggtattctttttgcaggataagtctgaaacccaagggaccctcaagcgcttcctaaggagagctcaaaatgagtttgagctcaaagtgaagaagataagaagcgacaacgggtccgagttcaagaaccttcaagtggaggagtttcttgaggaggaggggatcaagcacgagttctccgctccctacacacctcagcaaaatggtgtggtagagaggaagaataggacgctcatcgatatggcgaggacgatgcttggagagttcaagacccccgagtacttttggtcggaagccgtaaacacggcttgccacgccatcaacagggtataccttcatcgtctcctcaagaagacgtcatatgagcttctaaccagtaacaaacccaatgtatcttactttcgtgtatttgggagcaaatgctacattctagtgaagaaaggtagaaattctaagtttgctcccaaagctgtagaagggtttttgttaggttatgactcaaatacaaaggcgtatagagtcttcaacaaatcatcgggtttggttgaagtctctagcgacgttgtatttgatgaaactaatggctctccaagagagcaagttgttgatcttgatgatgtagatgaagaagacgttccaacggccgcaatacgcaccatggcgattggagagcctttcagggtagaggaggccttgctagattcggactgggtgttggccatgcaagaggagctcaacaacttcaagcgcaatgaagtttggacactggtgcctcgtcccaagcaaaacgttgtgggaaccaagtgggtgttccgcaacaaacaggacaagcacggggtggtgacaaggaacaaggctcgacttgtggcaaaaggttatgcccaagtcgcaggtttggactttgaggagacgtttgctcctgtggctaggatagaatcaattcgtattctgctagcatatgtcactcaccattctttcaggttgtaccaaatggatgtgaagagcgctttcctcaacgggccgatcaaggaggaggtgtacgtggagcaaccccctggctttgaggatgaacggtaccccgaccacgtgtgtaagctctctaaggcgctctatggacttaagcaagccccaagagcatggtatgaatgccttagagactttttaattgctaatgccttcaaggttgggaaagccgatccaactcttttcactaagacttgcgatggtgatctttttgtgtgccaaatttatgtcgatgacataatgtttggttctactaataaaaagtcttgtgaagagtttagcagggtgatgacacagaaattcgagatgtcgatgatgggcgagttgaactacttccttaggttccaagtgaagcaactcaaggacggcaccttcatctctcaaacaaagtacacgcaagacttgctgaagcggtttgggatgaaggacaccaagcccgcaaagactccgatggggaccgacggacacaccgacctcaacaaaggaggtaagtccgttgatcaaaaggcataccggtcaatgatagggtcgttactttacttatgtgctagtagaccggatattatgcttagcgtatgcatgtgtgctagatttcaatccgatcctaaggagtgtcacttagtggcagtgaagcgaatccttagatatttagttgctacgccttgcttcgggctctggtatcccaaggggtctacctttgacctgattggatattcagattccgactatgctggatgtaaggttgataggaagagtacatcggggacatgccaattcttaggaaggtccctggtgtcatggaattctaagaaacaaacctctgttgccctatccaccgctgaggccgagtatgttgccgcaggacaatgttgcgcgcaactacttttgatgaggcaaaccctccgggactttggctacaatcttagcaaagtcccactcctatgtgataatgagagtgccatccgcatggcggaaaatcctgttgaacacagccgcacaaagcacatagacatccggcatcactttttgagagaccaccagcaaaagggagatatcgaagtgtttcatgttagcaccgagaacaagctagctgatatctttaccaagcctctagatgaaaataccttttgtaggttgcgtagtgagctaaatgtcttagattcgcggaacttggactga

SEQ ID NO: 131564 - DNA, 352 bp, Zea mays
  Clone ID: MRT4577_51469C.1
gaaagaattaaagcaccaactcagcctcatgctttccgccctaaaatccctttttcctggggaggctttgtccactacccatcctaatatggactcatagctccgcaaccagacaaggatcatactcttcaatcgcaaggacatcatctcaactgatgatatgaatgcataggctacttactttcgtaatcagggcatcaaacatgttttctccaactgccatatatgatatgcttacaatgaaattatgtaggatggcaaaatcagtaccatctgttgctaacacatacagaaacgagaacggattgcttcctccaccgattcgagctaaaatacctacatatccaaatgt

SEQ ID NO: 131565 - DNA, 394 bp, Zea mays
  Clone ID: MRT4577_5146C.1
cggacgcgtgggcggacgcgtgggcggactcttgggtttctcttggcacatgctactgcggttgcaagataccgtacgaaatatcagggtctatatatgcttggaagttggaacaatggctgctcagaagggtaaggtcggaatagtcctggacttcaactgtgacgaggctcttacaaactcacctgatgaccaagcatcatcccaaagagcctgggacttctacattggctggaatgttgatccattgataaacggactctattcacagataatgcaagatctcgtgtaggagatgctgcctaggttcacttctgagcttgctaatctggtgaatggctcggcagactacatcgttatcaacgagtacacatccatctacgttaaggggcag

SEQ ID NO: 131566 - DNA, 259 bp, Zea mays
  Clone ID: MRT4577_51470C.1
gactcctatagggcgattggtggcttcacccgggccggggtccgccccttctagaccgattaaacccgcccgttccccgtgtccgagccacgcaagccgagttcaacccccagaggccagagccagctgctcggcgctccacgcgatggcgcagaaggagaccaatggcagcaacggcgagcacatctccacccgcccgccgccgaccccggcgcccctccggttctccccgctcttccaagctaacctgccaatcctg

SEQ ID NO: 131567 - DNA, 304 bp, Zea mays
  Clone ID: MRT4577_51471C.1
tgaacgaccggggcgaccgacgcgttcagaccattagcgttccggtaacagttatggcattagaacacgatgatgatggtcgtgcagttggtcgcgcaccatctgtatactatgattcagtttgagcgtgccgttgacgccagcaacaggctgttcgagccagctctgatgcagcagcagcagcagttgctggcagcccaaggtctcaaccccatggccatgatgatggcgcagaacatgccggccatgggtggactctaccagtaccagtaccagtttgccagctaccgcaccaacccctgtg

SEQ ID NO: 131568 - DNA, 4944 bp, Zea mays
  Clone ID: MRT4577_51472C.1
atggatcctaaggggaagggaatcgtgatcaacgacaaggaaaaggagtccttcgtcaacgagccaaaagatgacaaatccaacgactctggctcgggccacagacgtaaagatgggaagaagaagaagacaagacgtatcaaggagatcgtctactacgacagcgacgagtctacttcttccgacaaggacgacgactacgacaaacaaaagacggtcaattcaaacttttcatttgattattctcgtattccacatagttcgaattcgcatttgctttccattcctcttggcaaacctccacactttgatggggaggactacggattttggagtcacaaaatgcgtagtcatttattctctctccatccaagcatatgggagatcgtagagaatggaatgaaatttgatagctcggatagccctatgtttattaatgaacaaattcataaaaatgcacaagctactactgtgttgctagcctctttgtgcagggacgagtacaataaggtgagcggcttggacaatgccaagcagatatgggacaccctcaagatttctcacgaggggaacgacatcaccatgctcaccaaaatggagttggtggagggcgagcttggaaggtttgcaatgataaggggcgaggagccaacccaaacatacaaccggctcaagacccttatcaacaaaataaggagctacggaagcacgcgatggacggatcacgacgtcgtccgcctaatgctaaggtcatttaccgttcttgatcctcatctcgtgaacaatattcgtgagaatcccaggtacacgaagatgacgcccgaggaggtactcggaaaattcgtaagcgggcggatgatgatcaaggaggcaagatacgtggacgacgccttgaatggaccgatcaacgagcatcaacctcttgctctcaaggcaacaagaagcaaggaggcgctacctagcaaggtggcacaaattgaggcagccggacttaatgatgaagagatggctctcatcatcaaacgcttcaagacggtgctaaaaggtcacaaggggcagccaagcaagaccaagacaaaagggaagcgctcatgcttcaagtgcggtaagattggtcattttatcgctaactgccccgataacgatagtgaccaggaacaggggaacaagagggaaaagaagaagaattacaagaaggccaagggcgaggcacacatcggaaaggagtgggattcggattgctcctccgactccgacaatgaaggactcgccgccaccgccttcaacaagtcatccctcttccccaacgagcgtcacacatgccttatggcaagggagaagaaagtgagtactcgagactccacttatgcttcttctagtgataatgagtctagtgatgatgacatagactattcatgcttattcaagggtttagatagatctaagatagacaaaatcaatgaattgattgatgccttgaatgataagaatgtgcttttagaaaagcaagaagatttgttgtatgaagaacatgacaaatttgtagaagcacaaaaatcacttgcattagagattaagagaaatgaaatactttcgtgtgagttgtctacatgtcatgattcaattgctagtttaaagagcaaaaatgatgatttaaatgctaaactagaaaaatctagtaaatcaacatcttgtgtagaacatgttgagatttgcactaggtgtaaagatttcgatgttgatgcctgtagtgatcatttagtttcaatttccaaactaactgaggaattggctagtcttaatgcccaacttaagactagcaagaatgaatttgataaactaaaatttgcaagggatgcctacacgatcggtagacacccctcaattaaggatggacttggcttcaagagggaagccaagaacttaacaagccataagactcccattcccgctaaggagaaagggaaggcccctatggctactagtgttaaaaagaaccatgcctttatgtatcatgataaaaaaaattctagaaatgcttatgattcttatgctatgactgcttctagttctcatgttgtgcatgatagaaatattggtagaaggaatgttgttcataatatgcctaggagaaatgttcctaggaaagttaatgagccttctacaatatatcatgctttgaatgcctcctttgcaatttatagaaaggatagaaaggtttatgcatccgggggttcaagctggattattgatagcggatgcacaaaccatatgacgggggagaagaaaatgttcacctcctacgtcaagaataaggattcccaagattcaattatattcggtgatgggaatcaaggcaaggtaaaagggttagatgtgtctgtctttagaagaagtgatggttcactagcttttaagggtgtattagacggcaaactttatttagttgattttgcaaaagaagaggataagtctgaaacccaagggaccctcaagcgcttcctcaggagagctcaaaatgagtttgagctcaaggtgaagaacataaggagcgacaatgggtccgagttcaagaatcttcaagtggaggagttccttgaggaggaagggatcaagcacgagttctccgctccttatacaccacagcaaaatggtgtggtagagaggaagaacaggacgctaatcgacatggcgaggactatgcttggagagttcaagacccccgagcggttttggtcggaagcagtgaacacggcttgccacgccatcaacagggtctaccttcaccgcctcctcaagaagacgtcatatgagcttctaaccggtaacaaacccaatgtatcgtactttcgtgtatttgggagcaagtgctacattctagtgaagaagggtagaaattctaaatttgctcccaaagctgtagaagggtttttgttaggttatgactcaaatacaaaggcgtatagagtcttcaacaaatcatcgggtttggttgaagtttctagcgacgttgtatttgatgagactaatggctctccaagagagcaagttgttgattgtgatgatgtagatgaagaagatgttccgacggccgctatacgaaccatggcgattggagaagtgcggccacaggaacaagatgaacgagatcaaccatcttcctcaactatggtgctacccccaactcaagacgatgaacaggttcaccaacaggaggcggatgatcaagggggagcacaagatgatcatgtgatggaggaagatgcgcaaccggcacctccagcccaagttcgagcgatgattcaaagggatcatcccgtcgaccaaattctgggtgatattagcaagggagtaactactcgatctcgattagttaatttttgtgagcattactcctttgtctcttctattgagcctttcagggtagaggaggccttgctagatccggactgggtgttggccatgcaggaggagctcaacaacttcaagagaaatgaagtttggacgctggtgcctcgtccgaagcaaaatgttgtgggaaccaagtgggtgttccgcaacaaacaggacgagcatggggtggtgacgagaaacaaggctcgacttgtggcaaaaggttatgcccaagtcgcaggtttggatttcgaggagacttttgctcctgtggctaggctagagtcaattcgaatcttgctagcatatgccgctcaccattctttcaggttgtaccaaatggatgtgaagagcgctttcctcaacgggccaatcaaggaggaggtgtacgtggagcaaccccctggcttcgaggatgaacggtaccccaaccacgtgtgtaagctctctaaggcgctctatggacttaagcaagccccaagagcatggtatgaatgccttagagatttcttaattgctaatgctttcaaggttgggaaagccgatccaactctttttactaagacttgtaatggtgatttgtttgtgtgccaaatttatgtcgatgacataatatttggttctactaaccaaaagtcttgtgaagagtttagcagggtgatgacgcagaaattcgagatgtcgatgatgggcgagttgaactacttccttgggttccaagtgaagcaactcaaggacggcactttcatctcccaaacgaagtacacgcaagacttgctaaagaggtttgggatgaaggacgccaagcccgcaaagacgccgatgggaaccgacggacacacagacctcaacaaaggaggtaagtctgtcgatcaaaaagcataccggtcaatgatagggtctttactttatttatgcgctagtagaccggatattatgcttagcgtatgcatgtgtgctagatttcaatccgatcctaaggagtgtcacttagtggcggtaaagcgaattcttagatatttggttgctacgccttgcttcgggctctggtatccaaaggggtctacctttgacttggttggatactcagactccgactatgctggatgtaaggtcgataggaagagtacatcggggacgtgccaattcttaggaaggtccctggtgtcttggaattctaagaaacaaacctccgttgccctatccaccgctgaggccgagtatgttgccgcaggacagtgttgcgcgcaactactttggatgaggcaaaccctctgggactttggctacaatctgagcaaagtcccactcctatgtgataatgagagtgctatccgcatggcggaaaatcctgttgaacacagccgcacaaagcacatagacatccggcatcactttctgagagaccaccagcaaaagggagatatcgaagtgtttcatgttagcaccgagaaccagctagccgatatctttaccaagcctctagatgagaagaccttttgcaggctgcgtagtgagctaaatgtcttagattcgcggaacttggattga

SEQ ID NO: 131569 - DNA, 954 bp, Zea mays
  Clone ID: MRT4577_51473C.1
ggttacaaagggtgcagggtattctccacgtcagtgtgtccaataatcctaaacaaggcaatatgtatttgctctttattatcaattcatgtgaaaatctgaaagaacgtggagcctgaaactattgtctggtgggctggtggctgattttcattcaattgggctggtacacctctgttttgactcccatacaccaaggtatttagacacccagaatcgagggcgcctgcatccgtgggagtaagactctccggctttgaaggaggagacaaaggccgaagggcagacacattgccttctgttcatgttgcttgatgttgaaacaccaaccactcaccagtcatttactctctcacttgctcattggatcatgtgcaccaccatagttagaaacctttatgtcacagttagagcaatgcattgggattttttttgctatgcacagaatacttgtatttggatctggcataattacaatcatcctgtcatcatcagtttcactcctctggctgctccttgtgtgtgtgtgtccactaatgcgttcagcattgcaactgctgctgccaaatgctgaggcagcagtatacataactggttcaatttgtgcagcattcgttgccaacatagatggtcactctgataaaactgtcaccttcaatgggaggatgctcaggttttgagaccgaacctatatgtaccaccaaaacaatatcctaattgcaaggaaggtgaccttcctctcatcatcgcgattgactagcaaccaatggccctgataggtgttatgcaagtgtagggcgacatcactaatgctcggacaacggatgtggcatttcgatggatgcaaagcagacttggttgtttgcgatggaggcttcggatagtaagatatcatatgagtgtctgataactactctaaccattgactataacaaattttgtcaccaaaatttg

SEQ ID NO: 131570 - DNA, 5532 bp, Zea mays
  Clone ID: MRT4577_51474C.1
atggatcctaagggaaaggggatggtggtcgacaacaacgagaaggagtctatcttcaacgagccgaagaatgacaagtctaccgacttgggttcaagccacaagcgcaaagatgggaagaagaagaagacaaggcgcatcaaagagatcgtctactacgacagcgacgaatcctcttcttcccaaaaggacgacgaccacaacgactacgagcaaaggaaaccggttaattctaacttttcttttgactactctcgtattccgcaaagctcaaattcacatttgctttccattccactcggcaagcccccacactttgatggggaggactacggattttggagccacaaaatgcgtagtcacctattctctctccatcctagtatatgggagattgtagatagtggaatgcactttaatagttcggatagtcctatattcattaatgagcaaatccataagaatgcacaagctactactgttcttctagcttcattgtgcagggatgaatataacaaagtgagtggcttggataacgccaagcaaatctgggataccctcaagatctctcatgagggaaatgacgctaccttgctcaccaaaatggagttggtggagggagagcttggacggttcgcgatgataaggggcgaggagccaactcaaacatacaaccggctcaagacccttatcaacaaaataaggagctacggaagcacgcgatggacggaccacgacgtcgtccgactaatgctaaggtcctttaccgttcttgatcctcatttggtgaataatattcgtgagaatcccaggtacaccaaaatgtcgcctgaagaagtcttaggaaaattcgtcagcgggcgaatgatgatcaaggaagcaaggtacgtggacgacgccttaaatggaccgatcaacgagccgcaaccttttgctctcaaagcaacaagaagcaaggaggtgctacctagcaaggtggcacaaatcgaggcggccggacttaatgatgaggagatggctctcatcattaaacgcttcaagacggttctaaagggtcacaaggggcagccaagcaagaccaagacaaaagggaagcgctcatgcttcaagtgcggtaagattggtcattttatcgctaactgccccgataatgatagtgaccaggaacagggaaataagagggaaaagaagaagaattacaagaaggcaaagggcgaggcgcatctaggcaaggagtgggactcggattgctcctcttccgactccgacaatgaaggactcgccgccaccgccttcaacaaatcaaccctcttcccaaacgagcgtcacacatgccttatggcaagggagaagaaggtatgtactcgcaactctacctatgcttcttcaagtgaggacgaatcaagtgatgaggatgaagtagattattcatgtttgttcaagggcttagatagatctaagatagataaaattaatgaattaattgatgccttgaatgaaaagaatatacttttagaaaagcaagaggatttgttgtatgaagaacatgataagtttgtagaggctcaaaaatcccttgcattagaaattaaaaggaatgaaatgcttgcttgtgaattgtctacatgccatgattctatttctaaattaaagagcattaatgatgacttaaatgctaaactagtagaagcacataaatctaactcttgtgttgaacatgttgaaatttgcactaggtgtaaggatgttgacattaatgcttgtagtgaacacttagtttccatttcaaaattgaatgatgaattagctagtcttaatgcccaacttaagactagcaaaagtgattttgataaactaaaatttgctagggatgcctacatggttggtagacacccctcaattaaggatgggcttggcttcaagagggaagccaagaacttaacaagccataagactcccatctccaccaaggagaaagggaaggctcctatggctaatagtgttaagaagaaccatgctttcatgtactatgataggagatattctagaaatgcttttagaggtcatgatgtttttgattcacatgcttatgactcttatgctatgactgcttctagttctcatgttatgcatggtagaaatatgcttagaagaaatgttgttcatcaaatgcctataaagaatattactcatgctcctaggaaagtagtaaatgaactttctacaatttattgtgctttaaatgcttcctttgctatttgtagaaaggataagaaaattgttgctaggaagttaggggcaagatgcaagggagacaaaacttgcatttgggtccctaaagatatttgtgctaaccttgtaggacccaacatgagttgggtttatgcatccgggggttcaagctggattattgacagcggatgcacaaaccatatgacgggggagaagaagatgttcacctcctacgtcaagagtaaggattcccaagattcaattgtattcggtgatgggaatcaaggcaaggtaaaagggttagtagagtctcttggttataatttgctatctgttagtcaattatgcaacatggggtataactgtctatttacaaatgtagatgtgtctgtctttagaagaagtgatgattcactagcttttaagggtgtattagatggcaagctttacttagttgattttgcaaaagaagaggccggtctagatgcatgcttaatagctaagacttgcatgggctggttgtggcatcgccgcttagcacatgtggggatgaagaaccttcacaagcttctaaagggagaacacgtgataggattgactaatgtaaaattcgaaaaagatagaccttgtgcagcttgtcaggcaggtaaacaagtgggaggagcgcatcacagcaagaatgtgatgaccacttcaagacccctggagctgctgcatatggacctcttcggacccgtcgcctatctgagcataggagggagtaagtatggtctagttattgttgatgacttttcccgcttcacttgggtgttctttttgcaggataagtctgaaacccaagggaccctcaagcgcttcctcaggagagctcaaaatgagtttgaactcaaggtgaagaagataaggagcgacaacgggtccgagttcaagaaccttcaagtggaagagtttcttgaggaggaagggatcaagcacgagttctccgctccctacacaccacagcaaaatggtgtggtagagaggaagaacaggacactaatcgacatggcgaggacgatgcttggagaatttaagacccccgagcggttttggtcggaagccgtgaacacggcttgccacgccatcaacagggtctaccttcaccgactcctcaagaagacgtcgtatgaactactaaccggtaacaaacccaatgtatcttactttcgtgtatttgggagcaagtgctacattctagtgaagaaggttagaaattcaaaatttgctcccaaagctgtagaagggtttttgttaggttatgactcaaatacaaaggcgtatagagtcttcaacaaatcatcgggtttggttgaagtctctagtgatgttgtatttgatgagactaatggctctccaagagagcaagttgttgatcttgatgatgtagatgaagaagatgttccgacggccgctatacgaaccatggcgattggtgatgtgcgaccacaggaacaagaagagcaagatcaaccttcttcctcaactatggtgaatcccccaactcaagacgatgaacaggttcatcaacaggaagcgtgtgatcaagggggagcacaagatgatcatgtgatggaggaagaagcacaactggcacctccaacccaagttcgaacgatgattcaaagggatcatcccgttgaccaaattctgggtgacattagcaagggagtaactactcggtctcgattagttaatttttgtgaacattactcctttgtctcttccattgagcctttcagggtagaggaggccttgctggatccggactgggtgttggccatgcaggaggagctcaacaacttcaagcggaatgaagtttggacactggtgcctcgtcctaagcaaaatgttgtgggaaccaagtgggtgttccgcaacaaacaagacgagcacggagtggtgacgagaaacaaggctcgacttgtggcaaaaggttatgcccaagtcgcaggtttggatttcgaggagacttttgctcctgtggctaggctagaatcaattcgtatcttgctagcatatgccgctcatcattctttcaggttgtaccaaatggatgtgaagagcgctttcctcaacgggccaatcaaggaggaggtgtacgtggagcaaccccctggcttcgaggatgaacggtaccccgaccatgtgtgtaagctctctaaggcgctctatggacttaagcaagccccaagagcatggtatgaatgccttagagactttctaattgttaatgctttcaaggttgggaaagccgatccaactctctttacaaagacatgtgatggtgatttgtttgtgtgccaaatttatgtcgatgacataatatttggttctactaaccaaaagtcttgtgaagagtttagcagggtgatgacgcagaaattcgagatgtcgatgatgggcgagttgaactacttccttgggttccaagtgaagcaactcaaggacggcactttcatctcccaaacgaagtacacgcaagatctgctgaagcggtttgggatgaaggacgccaagcccgcaaagactccgatgggaaccgacggacacaccgacctcaacaaaggaggtaagtccgttgatcaaaaagcataccggtcaatgataggatcattactttacttatgtgctagtagaccggatattatgcttagtgtatgcatgtgtgctagatttcaatccgatcctaaggagtgtcacttagtggcggtgaagcgaattctgagatatttagttgctacgccttgccttgggctctggtatccaaaggggtctacttttgacttagttggatactcagattccgactatgctggatgtaaggtcgataggaagagcacatcggggacgtgccaattcttaggaaggtccctggtgtcatggaactctaagaaacaaacctctgttgccctatccaccgctgaggccgagtatgttgccgcaggacagtgttgcgcgcaactactttggatgaggcaaaccctcagggactttggctacaatctgagcaaagtcccactcctatgtgataatgagagtgctatccgcatggcggaaaatcctgttgagcacagccgcacaaagcacatagacatccggcatcactttttgagagaccaccagcaaaagggggatatcgaagtgtttcatgttagcaccgagaaccagctagccgatatctttaccaagcctctagatgagaagaccttttgcaggctgcgtagtgagctaaatgtcttagattcgcggaacttggattga

SEQ ID NO: 131571 - DNA, 360 bp, Zea mays
  unsure (1)..(360): unsure at all n locations
  Clone ID: MRT4577_51475C.1
acccggggcggaccaaggcgnccgccaacccggccgggacccgggaaggcggcaataaagaagaaggcggggccaaggggcaagcgaacgaggggccgccaggaggcagaaaacaggctcccgaaagaaggacccaaaaggggaggcccagaaaccagaacggcggaaaaaggggggggccaaaaggaaacacccggggaaaaacgagggccaagcaaaaaaacaacgaaggcccaaaaccgccaaaaaccgccggagggaagcccaaagccaggggccacaaaaagccggcggagaaggaggccaaaaagaaaggcaccgggggaaaacggaggcggaccggaagggaaacggaccccc

SEQ ID NO: 131572 - DNA, 5454 bp, Zea mays
  Clone ID: MRT4577_51476C.1
atggatcctaagggcaaggggatggtgatcaacgacaaggagaccttcgtcaacgagctcaatgatgacaagcccactgactcaggctcgagccacaaaagaaaagacgggaggaagaagaagacaaggcgcatcaaggaaattgtctactacgacagcgacgaatcttcctcctctcaaaaggacgacgacgaccacgatagacgaaagacggttaactcaaacttttctttcgattattcgcgcatcccgcaaagttcaaattcacatttgctctccattccactcggcaagcccccacactttgatggggaggactacggtttttggagccacaaaatgcgtagtcacctattctctctccatccaagcatatgggagattgtagagaatggaatgaaatttgatagctcggatagccctatgcttataaatgaacaaatccatagaaatgcacaagctactactgttctattagcatctttgtgcagggaagagtacaataaggtgagcggcttggacaacgccaagcagatatgggacaccctcaagatctctcacgaggggaacgacatcaccatgctcactaaaatggagttggtggagggcgagcttggacgattcgcaatgataaggggagaggagccaactcaaacttacaaccggctcaagacccttatcaacaaaataaggagctacggaagcacgcgatggacggaccacgacgtcgtccgcctaatgctaaggtcctttaccgttcttgatcctcatctcgtaaacaatattcgtgagaatcccaggtacacgatgatgacgcctgaggaggtgctcggaaaattcgtaagcgggcggatgatgatcaaggaggcgagatacgtcgacgacgctctaaacggtccaatcaatgagccgcaacctcttgctctcaaggcaacacgaagcaaggaggcgctacctagcaaggtggcacagattgaggcggccggacttaatgatgaagagatggctctcatcatcaaaagattcaagacggcactaaaaggccgcaaggggcagccaagcaagaccaagacaaaggagaagcgcttatgcttcaaatgtggtaagcttggtcattttattgctaactgtcccgacaatgatagtgatcaggatcaagggaacaagagggagaagaagaagaactataagaaggcaaagggcgaggcgcatctaggcaaagagtgggactcggactgctcctcttccgactccgacaatgaaggactcaccgtcaccgccttcaacaaatcaaccctcttccccaacgagcgtcacacatgccttatggcaagggagaagaaggtatgtactcgaaactctacctatgcttcttcaagtgaggacgaatctagtgatgaggatgaagtagattactcatgtttgtttaagggcctagatagaaccaaggtagacaaaattaatgaattgattgatgccttgaatgataagaatatgcttttagaaaagcaagaggatttgttgtatgaagaacatgataaatttgtagaagcacaaagatctcatgctctagaagttaaaagaaatgaaatgctttcttgtgaattatcttcttgccatgagacaatttctaaattaaggagcattaatgataatttgaatgctaagttagagattgctagtaaatctaattcttgtgtagaaattgttgaaacttgtaataggtgtaaagattttgacattgatgcttgtagtgatcatttagtttcaatttctaagttaaatgaggaattagctagtcttaatgcccaacttaagactagcaagaatgaatttgacaagctaaaatttgcaagggatgcctacacgattggtagacacccctcaattaaggatggacttggcttcaagagagaagccaagaacttaacaagccataaggctctcattcccgccaaggagaaagggaaggcccctatggctagtagtgtgcaaaagaaccatgcgtttatgtaccatgataagagacaaactagaaatgcttataggagttacaatgcatataatgcctttgattctcatgccatgattgcttctagttctttttatgtgcatgatagaaatgttggtaggagaaatgttgttcataatttgcctaggagaaatgttgttaatgttcctaggagagttaatgaaccttctacaatatatcatgctttgaatgattcctttgctatttgtagaaaggataggaaaatagttgctaggaagttaggggccaaatgcaagggatacaaaacttgcatttgggtccctaaggatatttgcactaaccttgtaggacccaacatgagttgggtttatgcatccgggggttcaagctggattatcgacagcggatgcacaaaccatatgacgggggagaagaagatgttcacctcctacgtcaagaataaggattcccaagattcaattatattcggtgatgggaatcaaggcaaggtaaaagggttagttaagtctcttggttacaatttgctatctgttagtcaactatgcaatatgggatataattgtctttttacaaatgtagatgtgtctgtctttagaagaagtgatggttcactagcctttaagggtgtattagacggcaagctttacttagttgattttgcaaaagaagaggccgatctagatgcatgcttaattgctaagactagcatgggctggctgtggcatcgccgcttagcacatgtggggatgaagaaccttcacaagcttctaaagggagaacacgtgataggtttgactaacgtacaattcgaaaaatatagaccttgtgcagcttgtcaggcaggtaaacaggtgggaggagcacatcacagcaagaatgtgatgaccacatcaagacccctggagctgctacatatggacctcttcggacccgtcgcctatctaagcataggaggaagtaagtatggtttagttattgttgatgacttttcccgcttcacttgggtgttctttttgcaggataagtctgaaacccaagggaccctcaagcgcttcctcaggagagctcaaaatgagtttgagctcaaggtgaaaaagataaggagcgacaacgggtccgagttcaagaaccttcaagtggaggagttccttgaggaggaagggatcaagcacgagttctccgctccctacacaccacagcaaaatggtgtggtagagaggaagaacaggacgctaatcgatatggcgaggacgatgcttggagaattcaagactcccgagcgtttttggtcggaagccgtgaacacggcttgccacgccatcaaccaggtctaccttcatcgtctcctcaagaagacctcgtatgagctactaaccggtaacaaacccaatgtatcttactttcgagtatttgggagcaagtgctacattctagtgaagaaggttagaaattctaagtttgctcccaaagctgtagaagggtttttgttaggttatgactcaaatacaaaggcgtatagagtcttcaacaaatcatcgggtttggttgaagtctctagcgacgttgtatttgatgaaactaatggctctccaagagagcaagttgttgatcttgatgatgtagatgacgaagacgttccaacggccgcgatacgcaccatgacgattggagatgtacggcctcgggaacaattggagcaagatcaactgtcttcctcaactatggtgcatcccccaacccaagatgacgaacaggtacctcaagtggaggcgcatgatcaagggggagcacaggatgttcaagttgaagaggaagaagcgcaatcggcacctccaacccaagttcgagcggtgattcaaagggattatcccgtcgaccaaattttgggtgacattagcaagggagtaactactcgatctcgattagttaatttttgtgagcattactcctttgtctcttctattgagccttttaaggtagaggaggccttgctagatccggattgggtgttggccatgcaggaggaactcaacaacttcaagcgcaatgaagtttggacactggacgagcacagggtggtgacgaggaacaaggctcgacttgtggcaaaaggttatgcccaagtcacaggtttggactttgaggagacttttgctcctgtggctaggctagaatcaattcgtatcttgctagcatatgcctctcaccattctttcaggttgttccaaatggatgtgaagagcgctttcctcaacgggccaatcaaggaggaggtgtacgtggagcaaccccctggcttcgaggatgaacggtaccccgaccacgtgtgtaagctctctaaggcgctctatggacttaagcaagccccaagagcatggtatgaatgccttagagactttttaattgctaatgctttcaaggttgggaaagccgatccaactctctttacaaagacatgtgatggtgatttgtttgtgtgccaaatttatgtcgatgacataatatttggttctactaaccaaaagtcttgtgaagagtttagcagggtaatgacgcagaaattcgagatgtcgatgatgggcgagttgaactacttccttgggtttcaagtgaagcaactcaaggacggcaccttcatctcccaaacaaagtacacgcaagacttgctgaagcggtttgggatgaaggacgccaagcccgcaaagactccgatggggaccgacggacacaccgacctcaacaaaggaggtaagtccgttgatcaaaaagcataccggtcaatgatagggtctttactttatttatgtgctagtagaccggatattatgcttagcgtatgcatgtgtgctagatttcaatccgatcctaaggagtgtcacttagtggcggtgaagcgaattcttagatatttggttgctacgccttgcttcgggctctggtatccaaaggggtctacctttgacttggttggatactcaggctccgactatgctgcatataaggtcgataggaagagtacatcggggacgtgccaattcttaggaaggtccctggtgtcgtggaactctaagaaacaaacttccgttgccctatccaccgctgaggccgagtatgttgccgcaggacagtgttgcgcgcaactactttggatgaggcaaaccctccgggactttggctacaatctgagcaaagtcccactcctatgtgacaatgagagtgctatccgcatggcggaaaatccagttgaacacagccgcacaaagcacattgacatccggcatcagtttctgcgagaccaccagcaaaagggagatatcgaagtgtttcatgttagcaccgagaaccagctagccgatatctttaccaaacctctagatgagaagaccttttgcaggctgcgtagtgagctaaatgtcttagattcgcggaacttggattga

SEQ ID NO: 131573 - DNA, 851 bp, Zea mays
  Clone ID: MRT4577_51477C.1
gcacgagctcattgcggactaggcaaagcatgaggggcagggcggcgccgtgatccccgtcctcgccgagcgccatcaacgacagatcatcgggcgagtggtccatgctggtcgtcgggctctgtcggccccgatcctaaattcctaatcctcttacgatgcggaagaatgcacgagcgctgtgcgggcctggccaagcctgggcggcggggccgccccccgatccccggcctcgccgtgccccctccgcgcctggtcaccgggcgggtggcccccgcggctccccgggctctggcggagcgaaacctgagcgagcgagcctccgccgatgagaggggcgcaaaccggcgagcgatgcagtccccttcaccttttcttcattcttccgcatcgtaagaggattaggaatttaggatcggggccgacagagcccgacgaccagcatggaccactcgcccgatgatctgtcgttgatggcgctcggcgaggacggggatcacggcgccgccctgcccctcattgcggactaggcaaagcatgacgacgatggcatcatccgaaaatgagcatgttgatggcgtcagcgcacatggtcacggaggtgaaggcgaccacgtcagccatggcagatgaggagcatccggagagaagagaggaggcctcagaagtgagctgtgtattctccatcgttgcgctgatagtgtttctgataattatagtgttgttcgcctgttcggttgcttgccttgattcatagcggttccagctagggttgagcttgcgagttgtgggttacatttaaggttctattccactacatgttcatgtatctatatttttttcttctccta

SEQ ID NO: 131574 - DNA, 5442 bp, Zea mays
  Clone ID: MRT4577_51478C.1
atggatcctaagggcaaggggatggtgatcaacgacaaggagaaggagaccttcgtcaacgagctcaataatgacaagcccactgactcaggctcgggccacaaaagaaaagacgggaggaagaagaagacaaggcgcatcaaggaaattgtctactacgacagcgacgaatcttcctcctcccaaaaggacgacgacaacgactacaggaagacggtcaattcgaatttttcatttgattattctcgtattccacctagttcgaattcgcatttgctttcccttcctcttggcaaacctccacactttgatggggaggactacggattttggagtcacaaaatgcgtagtcatctattctctctccatccaagcatatgggagattgtagagaatggaatgaagtttgatagctcggatagccctatgtttattaatgaacagattcataaaaatgcacaagctactactgtgttgctagcctctttgtgcagggacgagtacaacaaggtgagtggcttggacaacaccaagcaaatatgggacatcctcaagatttctcacgagggaatcgacatcaccatgctcactaaaatggagttggtggagggcgaacttgcaaggtttgcaatgataaggggcgaggacccaacccaaccatacaactggctcaagaccctcatcaacaaaataaggagctatggaagcacgcgatggacggcccatgacgtcgtccatctattactaaggtcctttaccattcttgatcctcatttggtgaataatattcgtgagaatctcaggtacaccaaaatgtcgcccgaagaagtcctaggaaaattcgtcagcgggcgaatgatgattaaggaagcaaggtacgtggacgacgccttgaatggaccgatcaatgagccgcaacctcttgctctcaaagcaacaagaagcaaggaggcgctacctagcaaggtggcacaaattgaggcggccggacttaatgatgaagagatggctctcatcatcaaacgcttcaagtcggtgcttaagggtcacaaggggcagccaagcaagaccaagacaaaagggaagcgctcatgcttcaaatgcggtaagattggtcattttattgctaactgtcccgaaaatgaaagtgaccaggaacacgggagcaagagggaaaagaagaaaaattacaagaaggccaagggcgaggcacatctaggaaaggagtgggactcggattgttcctcctccgactctgacaatgaaggactcgccgccatcgccttcaacaagtcatccctcttcccgaacgagcgtcacacatgcctcatggcaaaggaaaagaaggtatgtactcgagacggtactacttatgattcctctagtgatgatgaatctagtgatgatgatgagatagattactcatgcttattcaagggattggatagaaataaaattgataaaatcaatgaattgattgatgcattgaatgagaaggataaactcgtagagaaacaagaggatttattgtatgaagagcatgataaatttgtagaagctcaaagatctcatgctctagaagttaaaagaaatgaaatgctttctcgtgaattatcttcttgccatgagacaatttctaaattaaggagcattaatgatgatatgaacgctaagttagagattgctagtaaatctacctcttgtgtagaaaatgctataacatgcactagatgtaaagatattaaccttgatgcttatagtgaacacctagcgtgcatttctaaactaaatgaagaggtagctagtcttaatgcccaacttaagactagcaaaagtgattttgaaaaactaaaatttgctagggatgcctacacggttggtagacacccctcaattaaggatggacttggcttcaagagagaagccaagaacttaacaagccataagactcccattcccgccaaggagaaagggaaggcccctatggctagtagtgtgcaaaagaaccatgcttttatgtatcatgataggagacaaactagaaatgcttataggaattataatgcttatgatgattttgactctcatgccatgtttgcgtctagttcttcctatatgcatggtagaaatatgtctaggagaaatgctactcatcatgtgcctagaaagaatattattcatgctcctaggaaagtagtgaatgaacattctacaatttattgtgctttaaatgcttcctttgctatttgtagaaaggataggaaaatagttgctaggaagttaggggcaaaatgcaagggggacaaaacttgcatttgggtccctaaggatatttgcactaaccttgtaggacccaacatgagttgggtttatgcatccgggggttcaagctggattatcgacagcggatgcacaaaccatatgacaggagaaaagaagatgttcacctcctacgtcaagaataaggattcccaagattcaataatattcggtgatgggaatcaaggcaaggtaaaagggttagatgtgtctgtctttagaagaagtgatggttcactagcctttaagggtgtattagacggcaagctctacttagttgattttgcaaaagaagaggccggtctagatgcatgcttaattgctaagactagcatgggttggctgtggcatcgccgcttagcacatgtggggatgaagaatcttcacaagcttctaaagggagaacacgtgataggtttgactaacgttcaattcgaaaaagatagaccttgtgcagcttgtcaggcaggtaaacaggtgggaggagcgcatcacagcaagaatgtgatgaccacatcaagacccctggagctgctacatatggacctcttcggacccgtcgcctatctaagcataggaggaagtaagtatggtttagttattgttgatgacttttcccgcttcacttgggtgttctttttgcaggataagtctgaaacccaagggaccctcaaacgcttcctcaggagagctcaaaatgagtttgagctcaaggtgaagaagataaggagcgacaacgggtccgaattcaagaaccttcaagtggaggagttccttgaggaagaaggaatcaagcacgagttctccgctccctacacaccacaacaaaatggtgtggtagaaaggaagaacatgacgctaatcgacatggcgaggacgatgcttggagaattcaagacccccgagcgtttttggtcggaagccgtgaacacggcttgccacgccatcaacagggtctaccttcatcgccttctcaagaagacttcgtatgagctactaaccagtaacaaacccaatgtatcttactttcgtgtatttgggagcaagtgctacattctagtgaagaagggtagaaattctaaatttgctcccaaagctgtagaagggtttttgttaggttatgactcaaatacaaaggcgtatagagtcttcaacaaatcatcgggtttggttgaaatctctagcgacgttgtatttgatgagactaatagctctccaagagagcaagttgttgattgtgatgatgtagatgaagaagatgttccgacggccgctatacgaaccatggcgattggagaagttcggccacaggaacaagatgaacgagatcaaccttcttcctcaactatggtgcatcccccaactcaagacgatgaacaggttcatcaacaggaggcgggtgatcaagggggagcacaagatgatcacgtgatggaggaagaagcgcaaccggcacctccgacccaagttcgagcgatgattcaaagggatcatcccgtcgaccaaattctgggtgacattagcaagggagtaactactcgatctcgattagttaatttttgtgagcattactcctttgtctcttctattgagcctttcagggtagaggaggccttgctagatccggattgggtattggccatgcaagaggagctcaacaacttcaagcgcaatgaagtttggacactggtgcctcgtcctaagcaaaatgttgtgggaaccaagtgggtgtttcgcaacaaacaggacgagcacggggtggtgacgaggaacaaggctcgacttgtggcaaaaggttatgcccaagtcgcaggtttggactttgaggagacatttgctcctgtggctaggctagaatcaattcgtatcttgctagcatatgccgctcaccattctttcaggttgtaccaaatggatgtgaagagcgccttcctcaacgggccaatcaaggaggaggtgtacgtggagcaaccccctggcttcgaggatgaacgataccccgaccacgtgtgtaagctctctaaggcgctctatggacttaagcaagccccaagagcatggtatgaatgccttagagactttctaattgttaatgctttcaaggttgggaaagccgatccaactctttttactaagacatgtgatggtgatttgtttgtgtgccaaatttatgtcgatgacataatatttggttctactaaccaaaagtcttgtgaagagtttagcagggtgatgacacagaaattcgagatgtcgatgatgggcgagttgaactacttccttgggttccaagtgaagcaactcaaggatggcaccttcatctcccaaacgaagtacacgcaagatctgctaaagcggtttgggatgaaggacgccaagcccgcaaagactccgatgggaactgacggacacaccgacctcaataaaggaggtaagtccgttgatcaaaaagcataccggtcaatgatagggtctttactttatttatgtgctagtagaccggatattatgcttagcgtatgcatgtgtgctagatttcaatccgatcctaaggagtgtcacttagtggcggtgaagcgaattcttagatatttggttgctacgccttgcttcgggctctggtatccaaaggggtctacctttgacttggttggatactcagattccgactatgctggatgtaaggtcgataggaagagtacatcggggacgtgccaattcttaggaaggtccctggtgtcgtggaactctaagaaacaaacttccgttgccctatccaccgctgaggccgagtatgttgccgcaggacagtgttgcgcgcaactattttggatgaggcaaaccctccgggactttggctacaatctgagcaaagtcccactcctatgtgataatgagagtgctatccgcatggcggagaatcctgttgagcacagccgcacaaagcacatagacatccggcatcactttttgagagaccaccagcaaaagggagatatcgaagtgtttcatgttagcaccgagaaccagctagccgatatctttaccaagcctctagatgagaagaccttttgcaggctgcgtagtgagctaaatgtcttagattcgcggaacttggattga

SEQ ID NO: 131575 - DNA, 807 bp, Zea mays
  Clone ID: MRT4577_51479C.1
cattgggtacctcgaggccggccgggatatctattctaccccacctgacctgacccgccgtgcctcaaccggttccgcgcggccaacgcgtcttccggtctgccccgtcggcgataatccgccgcctagcaaagcggccgagccgagccgatggcgctggcgctggccgggctcccccacgccgcttcccgcctcgtgcctcgtgtccgccagcctcccttccgcgctctctgcgccgcagctgcggccggcgatgcctcgaagcggatgctggtactgtacaccaagccggggtgctgcctctgcgatggactcaaggagaagctccacgccgcgtccatgcttgctggcacgccctactcactcgcgtctctcgagctccaggagagggacatcacgacgaatccggagtgggagcggctctaccagtacgagattccagtgttggccaaggtgctccccgacgggaccgaggaagtacttcccagattatcgccacgtctaagtgttgagctcgtacaaaagaaaatttattttgcgtttgatcagtagggagaccgttctgggggaaacggtaattttattttattaattaatagctccagctgtaagattgccagttgttatattttcatgattttgacacatgaatttcaatttgcttgacttatgtttgcaaggaattactttaggtttgttcattgctctgatgaaatataaattatatggagtgacatccaaaaaaaaaaaaaaaaaattaaacaaaaaaaaaaaaaaaaaaagaaaaaaaaaaaaaaaaaagcggcc

SEQ ID NO: 131576 - DNA, 750 bp, Zea mays
  Clone ID: MRT4577_5147C.1
gatcgacacacgacacacgacgcaaaaactcctgaaactagcgtctgtaggtaccgagagcttctgaagatgagcgtggagatcctggacgggaggacggtgcagagcttcgtggaggacgagggcgccttcaacgcctccgtcgatggacgcttcgcggccctcgacgccgaccacgacggccggctctgctacagcgagatggccggggagatcatgagcctccgtgtcctcgagaagcacttcggtgtcgacgacgccggcgccgttggtcccgacgagctcgcaaagctctaccgcgttctgttcgcgcgcttcgaccgcgacggcgacggcggggtggaccgggaagagttccgggcggagatgaaggaggtcatgctcgccgtggccaacgggctcggcttcatgccggtgcagatggtggtcgaggaggggagctttctcaaggtggccgtggaccgggagctggccagagctgcctgaccgattctgtttgtactagtgtatgttacagagtgaaccaggcattaagagagtgaggataatgtttttgttttattttcaaaacgagaagtgagtattaatgctgacgcctcaatggcattcagctatatctacctaaaaaaaaaaaaagtaaactcgccaccgctcccaggaacggaaccaacaaatccccaccaatctcgtcttccatcgacccgaggctcgtcgaatcctcccttcccaccgctcaagaagaaaatcttt

SEQ ID NO: 131577 - DNA, 878 bp, Zea mays
  Clone ID: MRT4577_51480C.1
ggcggccggttgaaaacctcaaaaaagaaaaaaacgcaaactagctagctactcctactcgtactagctagcagagagggagacgacggcggcggttagatcccattcccccacggcacggcgagaggtacgaggaggaggtacagatgtcggccgccactggttacagccggttcctgcggcagtacatgagagagccgcagcggcatcagctggtggaggcggaggagacggactccggccggaccatgcagctgttccccacgcgcgccggcggcggcacgtcgtcgtcgtcgcatgaacagtcagatgatggtgcgcaggcggccaacaaggcaacgctgagcatcttctacgagggccggatgctcgtgttcgaggagttcccggccgacaaggccaaggcgctgatgcagctggccgccgggtcgtcgggctcctcgtcggcggcggcgcccaataacaaggacgccccagtaccagtggtgcgggtgcggcgggtgccagagcagccggcagccaccgcgccattggcagtcgtgccctccgacctgctgcccatcgcgaggaaagtgtcgctgcagaggttcctccagaagaggaaggagaggatcgccgccaccgagccttacccggagccggagaaagatgatgttcctgccaccgccaccgccaccgccaccggttggcaagcgacggccttaaaggataaacctgcacctgcctcatggctcgggctttgaaaataatgatccgatcatcttgttgtctccgtttcagaatttttcagcgttgcgaagattcttcttcctctttttttttttaaaaaaagcacagttaccaaaaaaaaaaaaaaaaagcggcctcgagctcagctt

SEQ ID NO: 131578 - DNA, 327 bp, Zea mays
  Clone ID: MRT4577_51481C.1
agcttgcgcactaacaccctgtgggtcaacctcaaagctatctatacactcgtaggggctgccgcacttaagagggaaagcttatcaaaccccagtgaaggtgatggtgtgaaagtcgctcgactcctaaccgaaactggttcagctctacgattgttcgacataacgactggaactaatgttactcgatcaaggcttctcccagtgacagctacatgtgatctgtagctcgtgcagcctgatctttacaccttgacagaaggcttcgtcattcgctgcccattctgagcgatcttcagctaacgcttctattgagctaggacctga

SEQ ID NO: 131579 - DNA, 4983 bp, Zea mays
  Clone ID: MRT4577_51482C.1
atggatcctaaagggaagggaatcgtgatcaacgacaaggagaaggagtccttcgtcaacgagccaagggatgacaagtccaacgactcgggctcgggccacagacgaaaagatgggaagaagaagaagacaagacgcatcaaggagatcgtctactatgacagcgatgagtctacttcctcccaaaaggacgacgaccacaacgaatacgagagaaagaaaccggtcaattcaaacttttcttttgattactctcgtattcctcaaagtactaatgctcatttattatctattccacttggtaaacctcctcattttgatggagaggactacggattttggagtcacaaaatgcgtagtcacttgttctctctccatcctagcatatgggagattgtagaaagtggaatgcactttgatagtacggatagtcccatgtttattaatgaacagattcataaaaatgcacaagctactactgtgttgctagcctctttgtgcagggacgagtatcataaggtgagcggcttggacaatgccaagcagatctgggacaccctcaagatctctcatgaggggaatgatgtcaccttgctcaccaagatggagttggtggagggcgagcttggacggttcgcaatgataaggggcgaggagccaactcaaacatacaaccggctcaagacccttatcaacaaaataaggagctacggaagcacgcgatggacggatcacgacgtcgtccgcctaatgctaaggtcctttaccgttcttgatcctcatttggtgaataatattcgtgaaaatcctaggtacaccaagatgtcgcccgaagaagttctggggaagttcgtaagcgggcgaatgatgatcaaggaggcaagatatgtggacgacgcgttgaacggtcctattcatgagcctcaacccattgctctcaaggcaacgaggagcaaggaggcgctaccgagcaaggtggcgcaagttgaggcggccgggctaaataatgaggagatggccctcatcattaagcgcttcaagacggcgcttaaaggtcgcaagggacagccaagcaagaccaagacaaaggagaagcgctcgtgcttcaaatgtggtaagattggtcatttcattgctaactgccccgataatgaaagtgaccaggaaaaggggaacaaaagggagaagaagaagcattacaagaaggccaagggcgaggcacatatcggaaaggagtgggattcggattgctcctcctccgactccgacaatgaaggactcgccgccaccgccttcaacaagtcatccctcttccccaacgagcgtcacacttgcctcatggcaagggagaagaaagtaagcactcatgatactagtacttatgcttcttcaagtgaggatgagtctagtgatgatgatgagatagattactcatgcttattcaagggattagatagatctaaaattaataagattaatgagttgattgatgctttgaatgacaagaatagattactagaaaaacaagaggatcttttatatgaggagcatgataaatttgttagtgcacaaaattctcttgctctagaaattaaaagaaatgaaatgctctctagtgaattatctacttgtcatgaatccatctctaaattaaaaagtgttaatgatgatttgaatgctaagttagaaatagctagtaaatcaacatcttgtgtagaaattgttgaaacttgcaataggtgtaaagattttgacattgatgcttgtagtgaacacctagtttcaatttccaaacttaatgatgaattggctagtcttaatgctcaacttaagactagcaagagtaattttgataagctaaaatttgcaagggatgcctacacaattggtagacacccctcaattaaggatggacttggctacaagaaggaagccaagaacttgacaagccataaggctcccatctccgccaaggagaaagggaaggcccctatggctagtagtgtgcaaaagaaccatgcctttatgtaccatgataggagacaatctagaaatgcttataggagatgtaacgcatatgatgcttttgattctcatgacatgtttgcttctagttcttcttatgtgcatgatagaaatgttgaaaggtttatgcatccggggggttcaagctggattatcgacagcggatgcacaaaccatatgacgggggagaagaagatgttcacctcctacgtcaagaataaggattcccaagattcaattatattcggtgatgggaatcaaggcaaggtaaaagggttaggtaaaattgcaatctctaatgagcactctatctccaatgtgtttttagttgagtctcttggttacaatttgctatctgttagtcaactatgcaatatgggatataattgtctttttacaaatgtagatgtgtctgtctttagaagaagtgatggttctctagcctttaagggtgtattagacgacaagctttacttagttgattttgcaaaagaagaggccggtctagatgcatgcttaattgctaagactagcatgggctggctgtggcatcgctgcttagcacatgtggggatgaagaaccttcacaagcttctaaagggagaacacgtgataggtttgactaacgtacaattcgaaaaagatagaccttgtgcagcttgtcaggcaggtaaacaggtgggaggagcgcatcacagcaagaatgtgatgaccacatcaagacccctggagctgctacatatggacctcttcggacccgtcgcatatctaagcataggaggaagtaagtatggtttagttattgttgatgacttttcccgcttcacttgggtgttctttttgcaggataagtctgaaacccaagggaccctcaagcgcttcctcaggagagctcaaaatgagtttgagctcaaggtgaagaagataaggagcgacaacgggtccgagttcaagaaccttcaagtggaggagttccttgaggaggaagggatcaagcacgagttctccgctccctacacaccacagcaaaatggtgtggtagagaggaagaacaggacgctaatcgatatggcgaggacgatgcttggagaattcaagacccccgtgcgtttttggtcggaagccgtgaacacggcttgccacgccgtcaacagggtctaccttcatcgcctcctcaagaagacttcgtatgaactactaaccggtaacaaacccaatgtatcttactttcgtgtatttgggagcaggtgctacattctagtgaagaagggtagaacttctaaatttgctcccaaagctgtagaagggtttttgttaggttatgactcaaatacaaaggcgtatagagtcttcaacaaatcatcgggtttggttgaagtctctagcgacgttgtatttgatgagactaatggctctccaagagagcaagttgttgattgtgatgatgtagatgaagaagatgttccgacgaccgctatacgaaccatggtgattggagaagtgcggccacaggaacaagatgaacgagatcaaccttcttcctcaacaacggtgcatcccccaactcaagacgatgaacaggacgagcacggggtggtgacggggaacaaggctcgacttgtggcaaaaggttatgcccaagtcacaggtttggacttcgaggagacgtttgctcctgtggctaggctagaatcaattcgtatcttgctagcatatgccgctcaccattctttcaggttgttccaaatggatgtgaagagcgctttcctcaacgggccaatcaaggaggaggtgtacgtggagcaaccccctggcttcgaggatgaacggtaccccgaccacgtgtgtaagctctctaaggcgctctatggacttaagcaagccccaagagcatggtatgaatgccttagagactttttaattgctaatgatttcaaggttgggaaagtcgatccaactctttttacaaagacatgtgatggtgatttgtttgtgtgccaaatttatgtcgatgacataatatttggttctactaaccaaaagtcttgtgaagagtttagcagggtaatgacgcagaaattcgagatgtcgatgatgggcgagttgaactacttccttgggttccaagtgaagcaactcaaagacggcaccttcatctcccaaacgaagtacacgcaagatctgctaaagcggtttgggatgaaggacgccaagcccgcaaagactccgatgggaaccgacggacacaccgatctcaacaaaggaggtaagtccgttgatcaaaaagcataccggtcaatgatagggtctttactttatttatgtgctagtagaccggatattatgcttagcgtatgcatgtgtgctagatttcaatccgatcctaaggagtgtcacttagtggcggtgaagcgaattcttagatatttggttgctacgccttgcttcgagctctggtatccaaaggggtctacctttgacttggttggatactcagactccgactatgctggatgtaaggtcgataggaagagtacatcggggacgtgccaattcttaggaaggtccctggtgtcgtggaactctaagaaacaaacttccgttgccctatccaccgctgaggccgagtatgttgccgcaggacagtgttgcgcgcaactactttggatgaggcaaaccctccgggactttggctacaatctgagcaaagtcccactcctatgtgacaatgagagtgctatccgcatggcggaaaatcctgttgaacacagccgcacaaagcacattgacatccggcatcactttctgcgagaccaccagcaaaagggagatatcaaagtgtttcatgttagcaccgagaaccagctagccgatatttttaccaagcctctagatgagaagaccttttgcaggctgcgtagtgagctaaatgtcttagattcgcggaacttggattga

SEQ ID NO: 131580 - DNA, 557 bp, Zea mays
  Clone ID: MRT4577_51483C.1
gccggccgggtccaatattatccgtttgctgcaagttctccgtctcaaaaaaaaaaaaaaaaaaaaaaaaaaaaaaaaaaaaaaaaaaaaaaaaaaaaaaaaaaaaaaaaaaaaaaaaaaaaaaaaaaaaaaaaaaaacatgaagccccaaaaggagcaaaaaataaagagaacccctaaaatctagggcctccgggggggggtggtccttcccgtggccgtccccggggggggccgatccccattcgcccgctgttggtttcttttccccggggggggtgggcggggccttcctacgccgtgatcggggaaaaaattacccgtctccctgttctttgcctttacaaacatgcccctgtttgcacccgggcccttttccgaatagatccgccctgatgaaagttgcctgaaggggggggggttaaatgtggaggggaactcgcaattggttttattttatgctggttccttttttttatgttggaggccactctcaatttttttatcttataggccaaattcctagacaatttctttttattgggcgtgattttttt

SEQ ID NO: 131581 - DNA, 420 bp, Zea mays
  Clone ID: MRT4577_51484C.1
gtttacacttaaaaaaaaaaaattaaaaaattaaaaaaaaaaaaaaaaaaaaaaaaaaaaaaaaaaaaaaaaaaaaaaaaaaaaaaaaaaaaaaaaagaaaaataaaattaaaaaataaaaaaaaaataaatatgggggggggtgtttaaaggatttttttttttttttcatgtttttctcatttttttattttttttttgtggcacctttatttggttttattgcgggattttttacactgttgcatttgttaaactttggtcttttcccattttaatgttttagtaaaatacccttttttcatgtggtttgttaatagaaaggactcctgtatttttcttgtttccaccttttccttattttttttggttagtgggcctccctttttacccttcccttaaaccgctggtggtttgggg

SEQ ID NO: 131582 - DNA, 304 bp, Zea mays
  Clone ID: MRT4577_51485C.1
ccatgagctactactccggcgaccgatcctcctactgctccttgcgcgccaccaacacctacgtcgactcctacaagttcgactactgcagtaactcctcccgctccttcggctctagccccctccgagaccagcggccgggcgcggctaccaaccgtccaacgaggcccgtcaccggcgcgcacgtgagatgcaccagaccgtcagtgccaagccgcagtggacccaccagccttgccccgccgaggcgtcggcgcccaccatggcggagcctggatccgggccaacctgcatggtcggcgac

SEQ ID NO: 131583 - DNA, 592 bp, Zea mays
  Clone ID: MRT4577_51486C.1
ccggccgggaaaattcgcaattagtatgaatagaaagagacgatgaagatggtggcgctcatcatggtctgcaggtgatagatggatctaccaacaagacggatgcgtacctgcatgtaatctcctcatctcgatcgacctcgccggttattgaggccgacaaggatggatggatgtggcagcactagcaagcgccatccatccatggacgaccgagatggccgccggccggatatattgcgctgcggcgcgcgtatcagcagccaccaccaacataatcttcgatccgctgctcgcgtcacatccgtagtcgtcgcttttaatattttcttccagatcaccggccggtcactcgtgctggcctgctgcccttttccattttccatacacagctacattcaatttcggcatcacattgttccgctgcagagttttattagatttttagatcaaaaggtgggttttttttgttttctaggcgaaacaaataagcccttaggctatctcgagcagatctactatcacatctcgtgtcttattttttttatttcaaactatactctgcaaaaaaaaaaaaaaaaaatttgcggcc

SEQ ID NO: 131584 - DNA, 213 bp, Zea mays
  Clone ID: MRT4577_51487C.1
gatccacgcggacttgccaacggtacctttttatcccaaactctttaccttccgtggacattcggacatcactgcgtttatcactactgaagtccttggggcgccaccaactggttgctgtttgtgcgccccattaatgggtacgtttttacattccttattttcgtctcccttgtacgagggtactacctgtggatatgccccttttgtttg

SEQ ID NO: 131585 - DNA, 267 bp, Zea mays
  Clone ID: MRT4577_51488C.1
gacccacctgtgcggaacgagctgcaggctctcaagaaagacaaggagaagtgtagctgccgcggcaatcgtccagcggggagaggacggacgtacgtaggctaaaaacaatgggttctcggcaacacattatagaacggcattgcagacattgttgtcagacagcagcatcagaaggtggctgctgtggcatattggcttcagcagaccggtcgagatatttcatattcgttaaaaacttagtattttagtttgttcgatggtttt

SEQ ID NO: 131586 - DNA, 806 bp, Zea mays
  Clone ID: MRT4577_51489C.1
ctcaaggtcgaagtcgacagactggctgcagagcaggaacctgaactccaaaaccgcaatgtgggtgatgatggataccggctgtggcagcaggtcgattgggaaggatttgggatagggagttccatgttgccatcagaaccttcagctgctgcgcaagtgccatcaagggaagccgagcctgaaccgcacctggaagtggagcaaagcgtgtctccagccccaagtgcagcaacctcatacgatgttgctgttccacactggttccagcgccatgcggacccttctgagctcatggggttcgcttcccgtggcctgatcaaggccccgtttgtttccgcttttgagcggcttctggcggccataatctgcccgggtcatccaaacgcgcagattccatgccgactgcgagacgaagcgctttaaggagaagtggatatgcagctgttggagaaaagcggtcactccatcgcgtctccaggaatcccaaccgcttctcggtcgtcagtcaccccgcagtgcagtacagtgccaccatgccgaacctgacagacggttgctttgtgccatgcgatgtatctagtgacttgttgaattagtgatgcatgattcctttgttaacaaagctaacgcttcaacttcgacttgagcattactttgattttttgttgaatcgtgcatatctgtatcaatttatttattttgggtttatggtattgtggttcgatcaaggtatatgggagaatttaaaagagaaccgccgcgggagatgaaaaagtaggggatggaatgttgatgatgtgatg

SEQ ID NO: 131587 - DNA, 375 bp, Zea mays
  Clone ID: MRT4577_5148C.1
aaaaaggataagaggggggccgctttttgagtaatagccatattattaaacaaagttccccgtatacacatcacgtacaactgaagcagctgaatacacctgtacaagatgtaacgacacaatgatgtcacatcccgttatggcaacaccctataataagacgtcagggacacattttagacgcgctacttgctgacccttgccgacggaggccagcattgaccgtccattgcactggtacatctgggccatgatggggctgcaaaggctctgcaagtgcatcatatcgccatcgatctcgtactcctgaaagagctcgttggcttacagccaggtgatgggcgggttgatggctttctgcgcctttttattgtc

SEQ ID NO: 131588 - DNA, 812 bp, Zea mays
  Clone ID: MRT4577_51490C.1
gcaaaaatctcctcccccaacttctccgccggatccctgaaagattcccggagatgtcggactccgaggagcaccacttcgagtccaaggccgacgccggcgcctccaagacgtacccgcagcaggccggcaccatccgcaagaacggctacatcgtcatcaagaaccgtccctgcaaggttgttgaggtctccacttccaagactgggaagcatggccatgccaagtgccactttgttggaattgacattttcactggaaagaagcttgaggatattgttccttcttctcacaactgtgacgttccacatgttaaccgtgttgagtatcagctgattgacatttctgaagatggatttgtcagccttttgactgagagtggcaacactaaggatgacaccaagcttcccagtgatgaagctctgcaagcccagatcaagagtggatatgatgaaggaaaggacatcctcctgaccgtgatgtctgccatgggcgaggaacagatctgtgctgtcaaggagattgggggcaagaactaaagctgctgcttcgctccggctgtttgtgggcaatacctgttgtcttgtgcttggagttgagaagccaagttgagatacatacataggcgtttaagttatctgtggttttgggtttacctggaatgtgttgagatggtgcgagtacttgtggtacttggttattgatctctggtatctttttgaactgagtaatggtgtaactctggtagtgcatcaatgggaattacaatatatatttgttaaattatttgatttggctttggccgccgtgtt

SEQ ID NO: 131589 - DNA, 1007 bp, Zea mays
  Clone ID: MRT4577_51491C.1
accctcgggcctgccggatacggccagtgggaatacccgtcccatcggtcgacgccctccgataaaaatctgggcagaaaccgaacccgtagaagcccgagcctcgcggtcgcggatccgtcctgcaaatctcctctcatacttctccaccggatccctgtaagattcccggagatgtcggacgaggagcaccagttcgagtccaaggccgacgccggcgcctccaagacctacccgcagcaggccggcaccatccgcaagaacggctacatcgtcatcaagggacgtccctgcaaggttgttgaggtctccacttccaagactgggaagcatggccatgccaagtgccactttgttggcattgacgttttcactggaaagaagcttgcggatattgttccttcttctcacaactgtgatgttccccatgttgatcgcactgagtatcagctgattgacatcactgaagatggatttgtgagccttttgactgacagtggcaacactaaggatgacctcaggcttccgactgatgaagctctggaaggccagatcaagagcggatatgatgatggaaaggacctcctcctgacggtgatgtcttccatgggcgaggaacagatctgcgctgtcaaggagatcgggggcaagaactaaagccgctgctgctgtctcgtgtgcttagagttgagatgcatagataaagcgtataagttatctgtggttttgggtttacctggaaatttgtcgaggtggttggtgttactactctacttggttagcgatctgtggtattcttttcaacttagttatggtcaatatgtattcagttgaaatatttggtttaaattcttgcctacagtcttgttatgccttgtaggatcggcaaaaaaaaaaaaaaaaaaaaaaaaaaaaaaaaaaaaaaaaaaaaaaaaaaaaaaaaaaaaaaaaaggcccctaaggccgcggccgctcttaaaatagagaatccacaaaggccccaaggt

SEQ ID NO: 131590 - DNA, 126 bp, Zea mays
  unsure (1)..(126): unsure at all n locations
  Clone ID: MRT4577_51492C.1
gcaacctggagctagcggaggtgagaaggagntnttgccgctgggaatctacatatttttttttgtcgatgcctttcttttaacagtggatataattaaatcatgttacctgtttcaaaataaaaa

SEQ ID NO: 131591 - DNA, 1865 bp, Zea mays
  unsure (1)..(1865): unsure at all n locations
  Clone ID: MRT4577_51493C.1
nnnnnnnnnnnnnnnnnnnnnnnnnnnnnnnnnnnnnnnctgcagctctcaaaggggtggggcgggagggcaatgatcaatgtctgatatttttgttccctatcgaaggcgtcacatcaagatcatttcttctcaggggtatggactgaaatcggaccgctgaaaaatatgaaacaaaattattaaacagatttagagtaacctactcgaaggggggggctactgcccactgcctgcgtacacttggcatcctggaatgccaagctcaagcgaactgcgggcgggagtcttctcaaccccacggggggccattttcctcctaattggggctgcctgcgcccacctttctgaggcagccatgatatttgcgagcatgaggtactctgcatcggtagacgacgcgtgaaaagaatgcaatcgaaggatctcctccgttaccaatcttgacatttccgcatcacgatgcactctgcaagctccttatgtactgaaatcggaccgctcgttgggttcctcagacatgttattgacaatctcgtaggcttccttcagttttccagccctgcctaatagatcgaccaggcaaccgtaatgttccactcccgctccaactccatatgcatcgagcttgttgaagatttgtaatccttcatcaacgaagcctccgtgcgtgcaagctccaagcacggcaagaacagtgattgtgttgggcttccgcccagagcgctccatctggaagaacaggtggagtgcttcatcgctctgaccatggcttgcaagtgcggagatcatggtgttccagcattcgttgttcttccatctcatgctatcaaagatgtatcgggcgtgcgcgaggtcaccacacttggcatacatgtctatcaaaccgttcatcacaaagtggttcttccggatatgctcctggttaatgaagtcatgaactttcttcccctgctctagcgacccgagctgcgcgcacgctgaaagcaagctcgccatggtgaactcgtccggttttaccctctcctgcagcatcaaatgaaaagcctcaagcgcctgctcactgcacccgatttgcgcgtacccggcgatcagcgcgttccagttcaccaggttccgcgtcgggatcctatcgaacaccgcccgcgcctcctcggcgtcgccggccttgaagtatcccgtgaccatcgacgaccacacaaaggcgttcctcgcgggcatcctgtcgaacacctccctcgctgtctccatgtcccccgcgcacacgtagccctgcaccagcacggtccacgtgacaacggttcgcatccccggcggcgtggcctcgaaccacctccgagcctccgccatgtcgcccttctccgcgaacccgcggatcagcgtcgcccacgtgacgtgcgtccaggagcgcatgccaccgaacagagccagggcaccgtccatgtcccccgccacggcgtacccggcgagaagcgcgttgtaactgatgacgttccggtccggcatttcgtcgaacgccctgcgcgcgtcggcgagtgcgccacacttgcagtacatcgacacgatcgtggtgccgacgagcagatcgcgggcaaaggcggacttgagggcctccgcatggagggacttgccgagacctagctcggtcggggaggaggcagcggcggccttgaggaggacggggaggaggggctggtggtgcgtccggcggggcaggttcctggcgtagacgagggcggcttcccggagcaaggattgcgaggcgtactccttgacgaggtgcgcccacttgtcagggtcatgggagctgctggtcatgtagatggcgtggagtggcctcgcccgcgaggccatgaattcgagct

SEQ ID NO: 131592 - DNA, 219 bp, Zea mays
  unsure (1)..(219): unsure at all n locations
  Clone ID: MRT4577_51494C.1
agagagtgatcgtaggcagagtcacnggaagagtaaacagtagaaacggaaagactgaagcatacgtgacggaagatacgaggataaggacgatctagcatggagctgtagtcacaggacgctacgatggatctaggaagaaaggattcgagtatatgaaggaagaaggtaggtctacgcaaggaatctacagagataacgtacagatatagaagacga

SEQ ID NO: 131593 - DNA, 330 bp, Zea mays
  unsure (1)..(330): unsure at all n locations
  Clone ID: MRT4577_51495C.1
ggacgccaaagcaacacaacctttttatacaagacatgcaagtgatgaccccaaacaaacacgggaacccttgcgaaaccagggggccaaaaggtttcaaaaaaacacaaaccattgggggggggtgtggggggggattatcannnaaatnaaaccctccannaagatggattccatcctaatccctaaatagggacttgttctgggggggacccaggaatcttgtgaaatttcgaaggggtattgctcccttgagagaccaaagaagccaacgcttagctttggcccatccngggcgggggggggggcctaaccccccnnncttttttt

SEQ ID NO: 131594 - DNA, 5427 bp, Zea mays
  Clone ID: MRT4577_51496C.1
atggatcctaaagggaagggaatcgtgatcaacgacaaggaaaaggagtccttcgtcaacgagccaaaagatgataaatccaacgactctggctcgggccacagacgtaaagatgggaagaagaagaagacaaggcgcatcaaggagatcgtctactacgacagcgacgaatcctcttcttcccaaaaggacgacgacaacgactacaggaagacgatcaattcgaacttttcatttgattattctcgtattccacatagttcgaattcgcatttgctttccattcctctcggcaaacctccacactttgatggggaggactacggattttggagtcacaaaatgcgtagtcacttattctctcttcatccaagcatatgggagattgtagagaatggaatgaaatttgatagctcggatagtcctatgcttataaatgaacaaatccatagaaatgcacaagctactactgttcttttagcatctttgtgcagggaagaatacaataaggtgagcggcttggacaatgccaagcagatatgggacaccctcaagatctctcacgagggcaacgacgtcaccatgctcaccaagatggagttggtagagggcgaacttggaagatttgctatgataaggggggaggagccaacccaaacatacaaccggctcaaaacccttgtcaacaagataaggagctatggaagcacgcgatggacggaccacgacgtcgtccgcctaatgctaaggtcctttaccgttcttgatcctcatttggtgaataatattcgtgagaatcccaggtacaccaaaatgtcgcccgaagagattcttggaaaatttgtaagcgggcggatgatgatcaaggaggcgaggtacgtcgatgacgcgttgaacggtccaatccacgagcctcaacccattgctctcaaggcatcgagaagcaaggaggcactaccaagcaaggtggcgcaaattgaggcggccgggcttaatgatgaagaaatggctctcatcattaagcgcttcaagacggcgttaaggggtcgcaaggagcatcccaacaagaccaagacgaaggggaagcgctcatgcttcaagtgtggtaagattggtcactttattgctaattgtcccgataatgatagtgaccaggaaaagaagagtgggaaatgggaaaagaagaagaattacaagaaggcaaagggcgaggctcatattggaaaggagtgggattcggattgctcttcgtccgactccgacaacgaaggactcgccgccaccgccttcaacaaatcaaccctcttcccaaacgagcgtcacacatgccttatggcaaaggagaagaaggtatgtactcgcaactctacctatgcttcttcaagtgaggacgaatctagtgatgaggatgaagtagattattcatgtttgttcaagggcttagacagatctaagatagacaaaattaatgaattaattgatgccttgaatgaaaagaatatacttttagaaaagcaagaggattcgttgtatgaagaacatgataagtttgtagaggctcaaaaatcccttgcattagaaattaagaggaatgaaatgcttgcttgtgaagtgtcaacatgccatgattctatttctaacttaaagagcataaacgatgatttaaatgctaaactagtagaagcaaataaatccaactcttgtgttaaacatgttgaaatttgcactaggtgtaaggatgttgatattaatgcttgtagtgaacacttagtttacatttcaaaattgagtgatgaagtggctagtcttaatgctcaacttaagactagcaaaagtgattttgaaaaactaaaatttgctagggatgcctacacggttggtagacacccctcaattaaggatggacttggcttcaagagggaagccaagaacttaacaagccataaggctcccattcccgccaaggagaaagggaaggcccctatggctactagtgctaaaaggaaccatgcctttttgtatcatgataaaagacaaactagaagttatgatgcttttgattcatatgtttgtgattctcatgccatgtttgctcctagttcttcttatgtgtatgatagaaatgttactaggagaaatgttgtccctaaaagaaatgttgcaaatgttcatagaaaagtagtgaatgaaccctctacaatttattgtgctttgaatgcttcatttgcaatttgtagaaaggatagaaaagtaattgctaggaagttaggggcaaaatgcaaaggtgataaaacttgcatttgggtccctaaggaaattgtgactaaccttgtaggacccaacaagagttgggtttatgcatctgggggttcaagctggattatcgacagcggatgcacaaaccatatgacgggggagaagaaaatgttcacctcctacgtcaagaataaggattcccaagattcaattatattcggtgatgggaatcaaggcaaggtaaaagggttagatgtgtttgtctttagaagaagtgatggttcactagcttttaagggtgtattagacggcaaactttatttagttgattttgcaaaagaagaggctggtctagatgcatgcttaatagctaagactagcatgggctggctgtggcatcgccgcttagcacatgtggggatgaaaaaccttcacaagcttctaaagggagaacacgtgataggtttgactaacgtgcaattcgaaaaagatagaccttgtgcagcttgtcaagcaggtaaacaagtgggaggagcacatcacagcaagaatgtgatgaccacctcaagacctctggagctgctgcatatggacctcttcggacccatcgcctatctgagcataggaggaagtaagtatggtctagttattgttgatgacttttcccgcttcacttgggtgttctttttgcaggataagtctgaaacccaagggaccctcaagcgcttcctcaggagagctcaaaatgagtttgagctcaaggtgaagaagataaggagcgacaacgggtccgaattcaagaatcttcaagtggaggagtttcttgaggaagaggggatcaagcacgagttctccgctccctacacaccacagcaaaatggtgtggtagagaggaagaacaggacgctcatcgatatggcgaggacgatgcttggagagttcaagacctccgagtgcttttggtcggaagccgtgaacacggcttgccacgccatcaacagggtctaccttcatcgcctcctcaagaagacctcgtatgagctgctaaccggtaacaaacctaatgtatcgtattttcgtgtattcgggagtaaatgctacattcttgtgaagaaaggtagaacttctaaatttgctcccaaagctgtagaagggtttttattaggttatgattcaaatacaaaggcgtatagggtcttcaacaaatcatcgggtttggttgaagtctctagcgacgttgtatttgatgagactaatggctctccaagagagcaagttgttgatcttgatgatgtagatgaagaagacgttccaacggccgcaatacgcaccatggcgattggagaggtgtggccacaggaacaaaatgagcgagatcaaccttcttcctcaacaatggtgcatcccccaactcaagacgatgaacaggtacatcaacaggaggcgtgtgatcaagggggagcacaagatgatcatgtgatggaggaagaagcgcaaccggcacctccaacccaagttcgagcggtgattcaaagggatcatcccgtcgaccaaattctgggtgatattagcaagggagtaactactcggtctcgattagttaatttttgtgaacattactcctttgtctcttctattgagcctttcagggtagaagaggccttgctagatccggactgggtgttggccatgcaagaggagctcaacaacttcaagaggaatgaagtttggacgttggtgcctcgtcctaagcaaaatgttgtgggaaccaagtgggtgttccgcaacaaacaagacgagcacggagtggtgacaaggaacaaggctcgacttgtggcaaaaggttatgcccaagtcgcaggtttggactttgaggagacttttgctcccgtggctaggctagagtccattcgtatcttgctagcatatgtcgctcaccattctttcaggttgttccaaatggatgtgaagagcgctttcctcaatgggccaataaaggaggaggtgtacgtggagcaaccccctggcttcgaggatgaacggtaccccgaccacgtgtgtaagctctctaaggcgctctatggacttaagcaagccccaagagcatggtatgaatgccttagagatttcttaattactaatgctttcaaggttgggaaagccgatccaactcttttcactaagacatgtgatggtgatttgtttgtatgccaaatttatgtcgatgacataatatttggttctactaataaaaagtcttgtgaagagtttagcagggtgatgacgcagaaattcgagatgtcaatgatgggcgagttgaactacttccttgggttccaagtgaagcaactcaaggaaggcaccttcatctctcaaacgaagtacacgcaagacctgctgaagcggtttgggatgaaggacgccaagcccgcaaagactccgatggggaccgacggacacactgacctcaacaaaggaggtaagtccgttgatcaaaaggcataccggtcaatgatagggtcgttactttacttatgtgctagtagaccggatattatgcttagcgtatgcatgtgtgctagatttcaatccgatcctaaggagtgtcacctagtggcagtgaagcgaatccttagatatttagttgctacgccttgcttcgggctctggtatccaaaggggtctacctttgacttgattggatattcagactccgactatgctggatgtaaggtcgataggaagagtacatcggggacgtgccaattcttaggaaggtccctggtgtcatggaactctaagaaacaaacttccgttgccctatccacggctgaggccgagtatgttgccgcaggacagtgttgcgcgcaactactttggatgaggcaaaccctcagggactttggctacaatctgagcaaagtcccactcctatgtgataatgagagtgctatccgcatggcggaaaatcctgttgagcacagccgcacaaagcacatagacatccggcatcactttttgagagaccaccagcaaaagggagatatcgaagtgtttcatgttagcaccgagaaccagctagccgatatctttaccaagcctctagatgagaagaccttttgcaggctgcgtagtgagttaaatgtcttagattcgcagaacttggattga

SEQ ID NO: 131595 - DNA, 3960 bp, Zea mays
  Clone ID: MRT4577_51497C.1
atgccttatggcaagggagaagaagatagactcttagaaaaacaagaggatcttttgtatgaagagcatgacaaatttgtagaagcacaaaaatcttatgctttagaagttaaaagaaatgaagtgctttctagtgaactatcttcttgtcataaaaccattgctactttaaagagtgttaatgatgacttaaatgataaactagaagtagctagtaaatctaattcttgtgtagaacatgttgagatctgcactaggtgtaaagatttcgatgttgatgcttgtagtgatcatttagtttcaatttccaaattaactgaggatttggctagtcttaatgcccaacttaagactagcaagaatgaatttgataaactaaaatttgcaagggatgcctatacgatcggtagacacccctctattaaggatggacttggcttcaagagggaagccaagaacttaacaagccataaggctcccattcccactaaggagaaagggaaggcccctatggctactagtgctaaaaggaaccatgcctttttatatcatgataggagacaaactagaaatgcgtataggagttataatgcatatgatgattttaactctcatgccatgtttgcttctagttcttcctttatgcatggtagaaatatgtctaggaaaaatgctatgcctagaaagaatgttattcatgctcctaggaaagtagtgaataaaccttctacaatttattatgctttaaatgcttcctttgctatttgtagaaaggataagaaaattgttgctaggaagttaggggcaaaatgcaagggagacaaaacttgcatttgggtccctaaggatatttgcactaaccttgtaggacccaacatgagttgggtttatgcatccgggggttcaagctggattatcgacagcggatgcacaaaccatatgacgggggagaagaagatgttcacctcctacgtcaagaataaggattcccacgattcaatcatattcggtgatgggaatcaaggcaagttgagtctctgggatataatttattatctaagaagtgatggttcactagcttttaagggtgtattagacggcaaactttatttagttgattttgcaaaagaagaggccaatctagatgcatgcttaatagctaagactagcatgggctggctgtggcatcgccgcttagcacatgtggggatgaagaaccttcacaagcttctaaagggagaacacgtgataggtctgactaacgttcaattcgaaaaggatagaccttgtgcagcttgtcaagcaggtaaacaagtgggaggagcgcatcacagcaagaatgtgatgaccacttcaagacccctggagctgctgcatatggacctattcggacccgtcgcctatctgagcataggagggagtaagtatggtctggttattgtagatgatttttcccgcttcacttgggtgttctttttgcaggataagtctgaaacccaagggaccctcaagcgcttcctcaggagggctcaaaatgagtttgagctcaaagtaaagaagataaggagcgacaatgggtccgagttcaagaaccttcaagtggaggagttccttgaagaagaagggatcaagcacgagttctccgctccctacacaccacagcaaaatggtgtggtagagaggaagaacaggacgctcatcgacatggcaaggacgatgataggagagttcaagacccccgagtgcttttggacggaagccgtaaacacggcttgccatgccatcaacagggtctaccttcaccgcctcctcaagaagacttcgtatgagctgctaatcggtaacaaacccaatgtatcttattttcgtgtatttgggagcaagtgctacattctagtgaagaaaggtagaaattctaagtttgctcccaaagcagtagaagggtttttattaggttatgactcaaatacaaaggcgtatagagtcttcaacaaatcatcgggtttggttgaagtctctagcgacgttgtatttgatgagactaatggctctccaagagagcaagttgttgattgtgatgatgtagatgaagaagatgttccgacggctgctatacgaaccatggcgattggagaagttcggccacaggaacaagatgaacaagatcaaccttcttcctcaactaaggtgcatcccccaactcaagacaatgaacaggttcatcaacaggaagcgtgtgatcaagggggagcacaagttgatcatgtgatggaggaagaagcgcaaccggtacctccaacccaagttcgagcgatgattcaaagggatcatcccgtcgatcaaattctgggtgacattagcaagggagtaactactcgatctcgattagttaatttttgtgagcattactcctttgtctcttctattgagcctttcaggatagaggaggccttgctagatccggactgggtgctggccatgcaggaggagctcaacaacttcaaaaggaatgaagtttggacactggtgcctcgtccgaagcaaaatgttgtgggaaccaagtgggtgttccgcaacaaacaggacgagcacggggtggtgacaaggaacaaggctcgacttgtggcaaaaggttatgcccaagtcgcaggtttggactttgaggagacgtttgctcctgtggctaggctagagtccattcgtatcttgctagcatatgccgctcaccattctttcaggttgttccaaatggatgtgaaaagcgctttcctcaacgggccaatcaaggaggaggtgtacgtagagcaaccccctggcttcgaggatgaacggtaccccgaccacgtgtgtaagctctctaaggcgctctatggacttaagcaagccccaagagcatggtatgaatgccttagagatttcttaattgctaatgctttcatggttgggaaagccgatccaactcttttcactaagacatgtgatggtgatttgtttgtgtgccaaatttatgtcgatgacataatatttggttctactaataaaaagtcttgtgaagagtttagcagggtgatgacgcagaaattcgagatgtcaatgatgggcgagttgaactacttccttgggttccaagtgaagcaactcaaggacggcaccttcatctcccaaacgaagtacacgcaggacctgctaaagcggtttgggatgaaggacgccaagcccgcaaagacgccgatgggaaccgacgggcacaccgacctcaacaaaggtggtaagtccgttgatcaaaaagcataccggtcaatgatagggtcattactttacttatgtgctagtagaccggatattatgcttagcgtatgcatgtgtgctagatttcaatccgatcctaaggaatgtcacttagtggcagtgaagcgaatccttagatatttagttgctacgccttgcttcgggctctggtatccaaaggggtctacctttgacttggttggatactcagattccgactatgctggatgtaaggtcgataggaagagtacatcggggacgtgccaattcttaggaaggtccctggtgtcgtggaactctaagaaacaaacctcagttgccctatccaccgctgaggccgagtatgttgccgcaggacagtgttgcgcgcaactactttggatgaggcaaaccctcagggactttggctacagtctgagcaaagtcccactcctatgtgataatgagagtgctatccgcatgacggaaaatcctgttgagcacagccgcacaaagcacatagacatccggcatcactttttgagagatcaccagcaaaagggggatatcgaagtgtttcatgttagcaccgagaaccagctagccgatatctttaccaagcctctagatgagaagaccttttgcaggctgcgtagtgagctaaatgtcctagattcgcggaacttggattga

SEQ ID NO: 131596 - DNA, 5529 bp, Zea mays
  Clone ID: MRT4577_51498C.1
atggatcctaaagggaagggaatcgtgatcaacgacaaggagaaggagtccttcgtcaacgagccaagagatgataagtccaacgactcaggctcgggccacagacgcaaagatgggaagaagaagaagacaagacacatcaaggagatcgtctactacgacagcgatgagtctacttcctcccaaaaggacgacgaccacaacgaatacgagagaaagaaaccggtcaattcgaacttttcttttgattactctcgtattcctcaaagtactaatgctcatttattatctattccacttggtaaacctcctcattttgatggagaggactacagattttggagtcacaaaatgcgtagtcacttgttctctctccatcctagcatatgggagattgtagaaagtggaatgcactttgatagtacggatagtcccatgtttattaatgaacagattcataaaaatgcacaagctactactgtattgctagcctctttgtgcagggacgagtaccataaggtgagcggcttggacaatgccaagcagatctgggacaccctcaagatctctcatgaggggaatgatgtcaccttgctcaccaagatggagttggtggaaggcgagcttggacggttcgcaatgataaggggcgaggagccaactcaaacatacaaccggctcaagacccttatcaacaaaataaggagctacggaagcacacgatggacggatcacgacgtcgtccgcctaatgctaaggtcctttaccgttcttgatcctcatttggtgaacaatattcgtgaaaatcctaggtacaccaagatgtcgcccgaagaagttctggggaagttcgtaagcgggcgaatgatgatcaaggaggcaagatatgtggacgacgcgttgaacggtcctattcatgagcctcaacccaatgctctcaaggcaacgaggagtaaggaggcactaccgagcaaggtggcgcaagttgaggcggccgggctaaataatgaggagatggccctcatcattaagcgcttcaagacggcgcttaaaggtcgcaagggacagccaagcaagaccaagacaaaggagaagcgctcgtgcttcaaatgtggtaagattggtcatttcattgctaactgtcccgataatgaaagtgaccaggaaaaggggaacaaaagggagaagaagaagcattacaagaaggccaagggcgaggcacatatcagaaaggagtgggattcggattgttcttcctccgactccgacaatgaaggactcgccgccaccgccttcagcaagtcatccctcttccccaacgagcgtcacacttgcctcatggcaagggagaagaaagtaagcactcataatactagtacttatgcttcttcaagtgaggatgagtctagtgatgatgatgagatagattactcatgcttattcaagggattagatagatctaaaattaataagtttaatgagttgattgatgctttgaatgacaagaatagattactagaaaaacaagaggatcttttatatgaggagcatgataaatttgttagtgcacaaaattctcttgctctagaaattaaaaggaatgaaatgctctctagtgaattatctacttgtcatgaatccatctctaaattaaaaagtgttaatgttgatttgaatgctaagttagaaatagccagtaaatcaacatcttgtgtagaaattgttgaaacttgcaataggtgtaaagattttgacattgatggttgtagtgatcatttagtttcaatttccaaattaaatgaggaattggctagtcttaatgcccaacttaagactagcaagaatgaatttgataagctgaaatttgcaagggatgcctacacgattggtagacacccctcaattaaggatggacttggctacaagagggaagccaaggacttgacaagccataaggctcctatctccgccaaggagaaagggaaggctcctatggctagtagtactaaaaggaaccatgcttttatgtatcatgataggagacaaactagaaatgcttataggagttataatgcttatgatgattttgactctcatgccatgtttgcttctagttcttcctatatgcatggtagaaatatgtctaggagaaatgctattcatcatgtgcctagaaagaatattattcatgctcctaggaaaatagtgaatgaaccttctacaatttattgtgctttaaatgcttcctttgctatttgtagaaaggataggaaaatagttgctaggaagttaggggcaaaatgcaagggagacaaaacttgcatttgggtccctaaggatatttgcactaaccttgtaggacccaacatgagttgggtttatgcatccgggggttcaagctggattatcgacagcggatgcacaaaccatatgacgggggagaagaagatgttcacctcctacgtcaagaataaggattcccaagattcaattatattcggtgatgggaatcaaggcaaggtaaaagggttagttgagtctcttggttacaatttgctatctgttagtcaactatgcaatatgggatataattgtctttttacaaatgtagatgtgtctgtctttagaagaagtgatggttcactagcctttaagggtgtattagacggcaagctttacttagttgattttgcaaaagaagaggccggtctagatgcatgcttaattgctaagactagcatgggctggctgtggcatcgccgcttagcacatgtggggatgaagaaccttcacaagcttctaaagggagaacacgtgataggtttgactaacgtacaattcaaaaaagatagaccttgtgcagcttgtcaggcaggtaaacaggtgggaggagcgcatcacagcaagaatgtgatgaccacatcaagacccctggagctgctacatatggacctcttcggacccgtcgcctatctaagcataggaggaagtaagtatggtttagttattgttgatgacttttcccgcttcacttgggtgttctttttgcaggataagtctgaaacccaagggaccctcaagcgcttcctcaggagagctcaaaatgagtttgagctcaaggtgaagaagataaggagcgacaacaggtccgagttcaagaaccttcaagtggaggagttccttgaggaggaagggatcaagcacgagttctccgctccctacacaccacagcaaaatggtgtggtagagaggaagaacaggacgctaatcgatatggcgaggacgatgcttggagaattcaagacccccgagcgtttttggtcggaagccgtgaacacggcttgccacgccatcaacagggtctaccttcatcgcctcctcaagaagacttcgtatgagctactaaccggtaacaaacccaatgtatcttactttcgtgtatttgggagcaggtgctacattctagtaaagaagggtagaaattcaaaatttgctcccaaagctgtagaagggtttttgttaggttatgactcaaatacaaaggcgtatagagttttcaacaaatcatcgggtttggttgaagtctctagcgacgttgtatttgatgagactaatggctctccaagagagcaagttgttgattatgatgatgtagatgaagaagatgttccgacggctgctatacgaaccatggcgattggagaagtgcggccacaggaacaagatgaacgagatcaaccttcttcctcaacaacggtgcatcccccaactcaagacgttgaacaggttcttcaaaaggaggcgtgtgatcaagggggagcacaagatgatcacgtgatggaggaagaagtgcaaccggcacctccaacccaagttcgagcggtgattcaaagggatcatcccgtcgaccaaattttgggtgacattagcaagggagtaactactcgatctcgattagttaatttttgtgagcattactcctttgtctcttctattgagccttacagggtagaggaggccttgctagatccggattggatattggccatgcaggaggaactcaacaacttcaagcgcaatgaagtttggacactggtgcctcgtcccaagcaaaatgttgtgggaaccaagtgggtgttccgcaacaaacaggacgagcacggggtggtgacgaggaacaaggctcgacttgtggcaaaaggttatgcccaagtcgcaggtttggactttgaggagacttttgctcctgtggctaggctagaatcaattcgtatcttgctagcatatgccgctcaccattccttcaggttgttccaaatggatgtgaagagcgctttcctcaacgggccgatcaaggaggaggtgtacgtggagcaaccccctggcttcgaggatgaacggtaccccgaccatgtgtgtaagctctctaaggcgctctatggacttaagcaagccccaagagcatggtatgaatgccttagagactttttaattgctaatgctttcaaggttgggaaagccgatccaactctttttactaagacttgcaatggtgatctttttgtgtgccaaatttatgtcgatgacataatatttggttctactaataaaaagtcttgtgaagagtttagcagggtgatgacacagaaatttgagatgtcgatgatgggcgagttgaactacttccttgggttccaagtgaagcaactcaaggacggcaccttcatctcccaaacgaagtatacgcaagatctgctaaagcggttcgggatgaaggacgccaagcccgcaaagacgccgatgggaaccgacggacacaccgacctcaacaaaggaggtaagtccgttgatcaaaaagcataccggtcaatgatagggtctttactttatttatgtgctagtagaccggatattatgcttagcgtatgcatgtgtgctagatttcaatccgatcctaaggagtgtcacttagtggcggtgaagcgaattcttagatatttggttgctacgccttgcttcgggctctggtatccaaaggggtctacctttgacttggttggatactcagattccgactatgctggatgtaaggtcgataggaagagtacatcagggacgtgccaattcttaggaaggtccctggtgtcgtggaactctaagaaacaaacctccgttgccctatccaccgctgaggccgagtatgttgccgcaggacagtgttgcgcgcaactactttggatgaggcaaacccttcgggactttggctacaatctgagcaaagtcccactcctatgtgacaatgagagtgctatccgcatggcagaaaatcctgttgaacacagccgcacaaagcacatagacatccggcatcactttttgagagaccatcagcaaaagggggatatcgaagtgtttcatgttagcatcgagaaccagctagccgatatctttaccaagcctctagatgagaagaccttttgctggctgcgtagtgagctaaatgtcctagattcgcggaacttggattga

SEQ ID NO: 131597 - DNA, 5448 bp, Zea mays
  Clone ID: MRT4577_51499C.1
atggatcctaaagggaagggaatcgtgatcaacgacaaggagaaggagtcctttgtcaacgagccaagggatgacaagtccaacgactcgggctcgggccacagacgcaaagatgggaagaagaagaagacaagacgcatcaaggagatcgtctactacgacagtgatgagtctacttcctcccaaaaggacgacgaccacaacgaatacgagaaaaagaaaccggttaattcgaacttttcttttgattactctcgtattcctcaaagtactaatgctcatttattatctattccacttggtaaacctcctcattttgatggagaggactacggattttggagtcacaaaatgcgtagtcacttgttctctctccatcctagcatatgggagattgtagaaagtggaatgcactttgatagtacggatagtcccatgtttattaatgaacagattcataaaaatgcacaagctactactgtgttgctagcctctttgtgcagggacgagtaccataaggtgagcggcttggacaatgccaagcagatttgggacaccctcaagatctctcatgaggggaacgatgtcaccctactcaccaagatggagttggtggagggcgaacttggatggttcgcaatgataaggggcgaggagccaactcaaacatacaaccggctcaagacccttatcaacaaaataaggagctacggaagcacgcgatggacggatcacgacgtcgtccgcctaatgctaaggtcctttactgttcttgatcctcatttggtgaacaatattcgtgaaaatcctaggtacaccaagatgtcgcccgaagaagtacttggaaaatttgttagcgggcgaatgatgatcaaggaggcaagatacgtggacaacgccttgaatggtccgatcaacgagccgcaaccccttgctctcaaggcaatgaggaacaaggaagcgctaccgagcaaggtggcgcaagttgaggcggccgggctcaataatgaggagatggccctcatcattaagcgcttcaagacggcgcttaaaggtcgcaagggacagccaagcaagaccaagacaaaggagaagcgctcgtgcttcaaatgtggtaagattggtcatttcattgctaactgtcccgataatgaaagtgaccaggaaaaggggaacaaaagggagaagaagaagcattacaagaaggccaagggcgaggcacatataggaaaggagtgggattcggattgctcctcctccgactccgacaatgaaggactcgccgccaccgccttcaacaagtcatctctcttccccaacgagcgtcacacatgccttatggcaagggaaaagaaggtgagtactcgagactccacttatgcttcttctagtgataatgagtctagtgatgatgatgacatagactattcatgcttattcaaaggcttagatagatctaagatagataagattaatgagttgattgatgctttgaatgacaagaatagattactagaaaaacaagaagatcttttatatgaggagcatgataaatttgttaatgcacaaaattcttatgctttagaagttaaaagaaatgaagtgctttctagtgaattgtcttcttgtcatgaaaccattactactttaaagagtgttaatgatgacttaaatgctaaactagaaggagctagtaaaaattcttgtgtagaacatgttgagatttgcactaggtgtaaagatttcgatgttgatacttgtagtaaacacctagtctcaatttctaatttgaatgatgaagtggctagtcttaatgcccaacttaagactagtaaaagcgaatttgataaattaaaatttgcaagggatgcctatacgattggtagacatccctcaattaaggatggacttggcttcaaaagggaagccaagaacttaacaagccataaggctcccattcccgctaaggagaaagggaaggcccctatggctactagtgctaaaaggaaccatgcctttttgtatcatgataggaaaaattctagaaatgcttttagaagttatgatgcttttgattcacatgcttatgattcttgtactatgactgcttctagttctcatgttatgcatgatagaaaagttggtagaagaaatgttattcataatatgcctaggagaaatgttgttaatattcctaggaaagttaatgagccttctacaatatatcatgctttgaatgcttcctttgcaatttgtagaaaggatagaaatgtgattgctaggaaattaggggcaaaatgcaagggtgataaaacttgcatttgggtccctaagacaattgtgactaaccttgtaggacccaacaagagttgggtttatgcatccgggggttcaagctggattatcgacagcggatgcacaaaccatatgacgggggagaagaagatgttcacctcctacgtcaagaataaggattcccaagattcaattatattcggtgatgggaatcaaggcaaggtaaaagggctagatgtgtctgtctttagaagaagggatggttcactagcatttaagggtgtattagacggcaaactttatttagttgattttgcaaaagaggaggccggtctagatgcatgcttaatagctaagactagcatgggctggctgtggcatcgccgcttagcacatgtggggatgaagaaccttcacaagcttctaaagggagaacacgtgataggtttgactaacgtacaattcgaaaaagatagaccttgtgcagcttgtcaagcaggtaaacaagtgggaggagcacatcacagcaagaatgtgatgaccacatcaagacccctggagctgctacacatggatctcttcggacccgtcgcctatctgagcataggaggaagtaagtatggtctagttattgttgatgacttttcccgcttcacttgggtgttctttttgcaggataaatctgaaacccaagggaccctcaagcgcttcctcaggagagctcaaaatgagtttgagctcaaggtgaagaagataaggagcgacaacgggtcggaattcaagaaccttcaagtggaggagttccttgaggaggaagggatcaagcacgagttctccgctccctacacaccacagcaaaatggtgtggtagagaggaagaacaagacgctaatcgacatggcgaggactatgcttggagaattcaagacccccgagcgtttttggtcggaagccgtgaacacggcttgccacgccatcaacagggtctaccttcaccgcctcctcaagaagacttcgtatgagctactaaccggtaacaaacccaatgtatcctactttcgtgtttttggaagcaaatgctacattctagtgaagaaaggtagaaattctaaatttgctccaaaagctgtagaagggtttttgttaggttatgactcaaatacaaaggcgtatagagtcttcaacaaatcatcgggtttggttgaagtctctagcgacgttgtatttgatgagactaatggctctccaagagagcaagttgttgattgtgatgatgtagatgaagaagatgttccaacggccgctatacgaaccatggcgattggagaagtgcggccacaggaacaagatgaacgtgatcaaccttcttcctcaacaaaggtgcatcccccaactcaagacgatgaacaggttcatcaaaaggaggcgtgtgatcaagggggagcacaagataatcaagaaatggaggaagaaacgcaaccggcacctccaatccaagttcgagcgatgattcaaagggatcatcccgtcgaccaaattctgggtgatattagcaagggagtaactactcgatctcgattagttaatttttgtgagcattactcctttgtctcttctattgagcctttcagggtagaggaggccttgctagatccggactgggtgttggccatgcaggaggagctcaacaacttcaagcgcaatgaagtttggacactggtgcctcatcccaagcaaaatgttgtgggaaccaagtgggtgttccgcaacaaacaggacgagcacggggtggtgacgaggaacaaggctcgacttgtggcaaaaggttatgcccaagtcgcaggtttggactttgaggagacgtttgctcctgtggctaggctagaatcaattcgtatcttgctagcatatgccgctcaccattctttcaggttgtaccaaatggatgtgaagagcgctttcctcaacgggccgatcaaggaggaggtgtacgtggagcaaccccctggcttcgaggatgaacggtaccccgaccacgtgtgtaagctctctaaggcgctctatggacttaagcaagccccaagagcatggtatgaatgtcttagagactttcttattgttaatgctttcaaggttgggaaagccgatccaactctctttactaagacatgtgatggtgatttgtttgtgtgccaaatttatgtcgatgacataatatttggttctactaaccaaaagtcttgtgaagagtttagcagggtgatgacgcagaaattcgagatgtcgatgatgggcgagttgaactacttccttgggttccaagtgaagcaactcaaggacggcaccttcatctcccaaacgaagtacacgcaagatctgctaaagcggtttgggatgaaggatgccaagcccgcaaagactccgatgggaaccgacggacacaccgacctcaacaaaggaggtaagtccgttgatcaaaaagcataccggtcaatgatagggtctttactttatttatgtgctagtagaccggatattatgcttagcgtatgcatgtgtgctagatttcaatccgatcctaaggagtgtcacttagtggcggtgaagcgaattttaagatatttggttgctacgccttgtttcgggctctggtatccaaaagggtcgacctttgacttggttggatactcagattccgactatgctggatgtaaggtcgataggaagagtacatcagggacgtgccaattcttaggaaggtccctggtgtcgtggaactctaagaaacaaacctccgttgccctatccaccgctgagaccgagtacgttgccgcaggacagtgttgcgcgcaactgctttggatgaggcaaaccctccgggactttggctacaatctgagcaaagtcccactcctatgtgataatgagagtgctatccgcatggcggaaaatcctgttgagcacagccgcacaaagcacatagacatccggcatcactttttgagagaccaccagcaaaagggagatatcgaagtgtttcatgttagcaccgagaaccagctagccgatatctttaccaagcctctagatgagaagaccttttgcaggttgcgtagtgagctaaatgtcttagattcgcgaaacctggattga

SEQ ID NO: 131598 - DNA, 348 bp, Zea mays
  unsure (1)..(348): unsure at all n locations
  Clone ID: MRT4577_5149C.1
tttgaggaaaacaccattctgaggacagcaggaggtgggggaatgtgtgaattttaagggaacancanaagaaccgagcatgacaagtgctactccaaggcttggtagcactccacacctcttcttccccttctccttctccttggcattcctgtgctgcattgccgtgtgcaatgccgccggcgatgaggccgcggcgttgcttgccgtcaaggcgtcgctcgtcgaccccttgggtaagctcgggggctggaattcggcgtcggcctcgtcacgttgtatctgggatggcgtgcgctgcaatgcccggggcgtggtcaccggcctcaacctcgccggcatgaacct

SEQ ID NO: 131599 - DNA, 399 bp, Zea mays
  Clone ID: MRT4577_514C.1
atggctaagtctgccagtcagactggcaaacaggtcgccaggagctgtcaggggcggttcaaccccccctgggcggttcaaccggtgttggtcaactttgaccagtctgcgctttggtactacatcgagttctttgtggattcattactcttggagcttctagctcctagacgactaggtgtctcttgcaactttcaaccacagatgaagaagggtggccacaacactaaggtcactaagaagccattccatgatgggagcaaagataaccttggctttgaggacctaaagcacactatgcttgtcatctgcaatgccaccggtgagctaagctctcacaatgctctaaacctcttgcgtcaagagccaactgcatacacatacactgatacacagtga

SEQ ID NO: 131600 - DNA, 538 bp, Zea mays
  Clone ID: MRT4577_51500C.1
ctcgagttttttttttttttttttttttttttttttttttttttttttttttttttttttttttttttttttaaaccaaaaaggcacgaggttccggttttttttaaaagcaggtgtaagagcctgtattttttttctgggttttaaaagcattacttaagcacaaaaaccaaaattcttcctctaggggaataagcggacccattacgaccccgcacacgtacctttttttaggacagggaccgtccagaacaaaggaaaggcagggggccgattaaaaatcacagggggggcccataaaaaagctggatagagcgcgggcccccctaaccagaccaaaccagaccaaaggcttttttcaaaaaaaaggaggcgcctaatgcaaaaaacggtttttccgccttgaggggcttcaccacctcccaggagaagcgggggacccccctccaaaagggcccatagcccccctttttgaggaatcccccgttgccctcttttttgaggacaagggtgaagaagatcatcccgcgcctgaaaa

SEQ ID NO: 131601 - DNA, 1736 bp, Zea mays
  Clone ID: MRT4577_51501C.1
ttgggtacctcgaggccggccggggatcctagtcaccagatcaaacctgaatggctccagatcgaccctcgagcctgtcgaacgatcctttaattccaaccgatcgaaaagtcgggccgggagtgttgaggccaaggccaccgacccacctctctcatagcactagcagcaatggaggtggagatcctcgagtcctgcatggtgaaacccagcgacgacatagggacgccgccgccgcccatgcacgtggtctggctctccaacctcgatctactcgtggccaggagccacacgcccaccgtatacgtgtaccggcccagccctgacccggacttcttctcgccgggcgtcctcagtgctgccctgtccaaggcgctcgtccgcttctaccccctcgccggccggctcgcgcaggacggcgccggccgcccgcagatccactgcaccggagaaggcgcgctcctcgtcaccgcgcgcgccgacgctaccctccaggacatccccggcgggttcgccccgtcggatgagctgcggcagatgcttgtcccctcggctgccgacggcgaagaccgcgccggcatcttggccatgttccaggtgacgtccttcaagtgcggcggggtgtgcgtgggcgcggcgatccaccacacggcggcggacggcctagcggcgctcgacttcgtcaacacgtgggccgccatcgcgagcaagggcgtcgacgaggccgcgccggcgccgcgcccgtggctggaccgcacgctgctccgcgcgcgctcccctcccgacgtgcgcttcgaccacagcgagtactccccgcggggcggcggcggtccaaagacggcgagggtcccgttcgactccgccatcctacccatgtccaagacccaggtggacgcgctcagggccggcatgaaggtgggccgggtcaaggccgtggtcgcccacgtgtggcggtgcgcgtgcatagcgcgcgggctcgcgggagacgaggacacccgtctgtacatgaccgccgacgcgcgctcccgcgtccgcccgccgctcccggaaggctacctcggcaacgccatcttccgcgcgtcagcggtggccacggcgggcgacgtcgtctccgagcagctcgacgccgttgcgggtagggtgtccggcgccaccgcccggctggacgacgagtacgtccgatcgctggtggactacctggagcaggtggtgggcgatgtggcggggctccgcaagggggagtgggtgatgccggagaccgacctgtgggtgataagctggcaggggctgcccatctacgacgccgacttcggctggggacggccggcgttcatgggccgcgcgtgcctccagttcagcggcctcgtgtacctcgtcccgggcccggacggcgacggccgcctcgacgtcgtcgtggccatggagcccaagagcctggccagattcaaggagctgttgtacgagctcaaaggtgcaggtgttccgtgcacggcagactgagctgctgcattccgtgcaggttccttggcttgctaccggctggcaaaacgaaaacctgtttgccgaattgttccttgcattgcgtatctacttcgacctttactgcagtactcctagttttctactcgttgtttgtgatcgcaatctggtgagtactgtactctatatgcatttacatggctatctatattattcggagctaaattcatcacaaaaaaaaaaaaaaaaaagcggcc

SEQ ID NO: 131602 - DNA, 5292 bp, Zea mays
  Clone ID: MRT4577_51502C.1
atggatcctaaagggaagggaatcgtgatcaacgacaaggagaaggagtccttcgtcaacgagccaagggatgacaagtccaacgactcaggctcgggccacaggcgcaaagatgggaagaagaagacaagacacatcaaggagatcgtctactacgacagcgatgagtctacttcctcccaaaaggacgacgaccacaacgagtacgagagaaagaaaccggtcaattcgaacttttcttttgattactctcgtattcctcaaagtactaatgctcatttattatctattccacttggtaaacctcctcattttgatggagagtactacggattttggagtcacaaaatgcgtagtcacttgttctctctccatcctagcatatgggagattgtagaaagtggaatgcactttgatagtacggatagtcccatgtttattaatgaacagattcataaaaatgcacaagctactactgtgttgctagcctctttgtgcagggacgagtaccataaggtgagcggcttggacaatgccaagcagatctgggacaccctcaagatctctcatgaggggaatgatgtcaccttgctcaccaagatggagttggtggagggcgagcttggacggtttgcaatgataaggggcgaggagccaactcaaacatacaaccggctcaagacccttatcaacaaaataaggagctacggaagcacgcgatggacggatcacgacgtcgtccgcctaatgctaaggtcctttaccgttcttgatcctcatttggtgaacaatattcgtgaaaatcctaggtacaccaagatgtcgcccgaagaagttctggggaagttcgtaagcgggcgaatgatgatcaaggaggcaagatatgtggacgacgcgttgaacggtcctattcatgagcctcaacccattgctctcaaggcaacgaggagcaaggaggcgctaccgagcaaggtggcgcaagttgaggcggtcgggctaaataatgaggagatggccctcatcattaagcgcttcaagacggcgcttaaaggtcgcaagggacagacaagcaagaccaagacaaaggagaagcgctcgtgcttcaaatgtggtaagattggtcatttcattgctaaatgtcccgataatgaaagtgaccaggaaaaggggaacaaaagggagaagaagaagcattacaagaaggccaagggcgaggcacatatcggaaaggagtgggattcggattgctcttcctccgactccgacaatgaaggactcgccgccaccgccttcagcaagtcatccctcttccccaacgagcgtcacacttgcctcatggcaagggagaagaaagtaagcactcatgatactagtacttatgcttcttcaagtgaggatgagtctagtgatgatgatgagatagattactcatgcttattcaagggattagatagatctaaaattaataagattaatgagttgattgatgctttgaatgacaagaatagattactagaaaaacaagaggatcttttatatgaggagcatgataaatttgttagtgcacaaaattctcttgctctagaaattaaaaggaatgaaatgctctctagtgaattatctacttgtcatgaatccatctctaaattaaaaagtgttaatgatgatttgaatgctaagttagaaatagctagtaaatcaacatcttgtgtagaaattgttgaaacttgcaataggtgtaaagattttgacattgatgcttgtagtgaacacctagtttcaatttccaaacttaatgatgaattggctagtcttaatgctcaacttaagactagcaagagtaattttgataagctaaaatttgcaagggatgcctacacaattggtagacacccctcaattaaggatggacttggctacaagaaggaagccaagaacttcacaagccataaggctcccatctccgccaaggagaaagggaaggcccctatggctagtagtgagcaaaagaaccatgcctttatgtaccatgataggagacaatctagaaatgcttataggagatgtaacgcatatgatgcttttgattctcatgacatgtttgcttctagttcttcttatgtgcatgatagaaatgttggttatgcatccgggggttcaagctggattatcgacagcggatgcacaaaccatatgacgggggagaagaagatgttcacctcctacgtcaagaataaggattcccaagattcaattatattcggtgatgggaatcaaggcaaggtaaaagggttagttgagtctcttggttacaatttgctatctgttagtcaactatgcaatatgggatataattgtctttttacaaatgtagatgtgtctgtctttagaagaagtgatggttcactagcctttaagggtgtattagacggcaagctttacttagttgattttgcaaaagaagaggccggtctagatgcatgcttaattgctaagactagcatgggctggctgtggcatcgccgcttagcacatgtggggatgaagaaccttcacaagcttctaaagggagaacacgtgataggtttgactaacgtacaattcgaaaaagatagaccttgtgcagcttgtcaggcaggtaaacaggtgggaggagcgcatcacagcaagaatgtgatgaccacatcaagacccctggagctgctacatatggacctcttcggacccgtcgcctatctaagcataggaggatgtaagtatggtttagttattgttgatgacttttcccgcttcacttgggtgttctttttgcaggataagtctgaaacccaagggaccctcaagcgcttcctcaggagagctcaaaatgagtttgagctcaaggtgaagaagataaggagcgacaacgggtccgagttcaagaaccttcaagtggaggagttccttgaggaggaagggatcaagcacgagttctccactccctacacaccacagcaaaatggtgtggtagagaggaagaacaggacgctaatcgatatggcgaggacgatgcttggagaattcaagacccccgagcgtttttggtcggaagccgtgaacacggcttgccacgccatcaacagggtctaccttcatcgcctcctcaagaagacttcgtatgagctactaaccggtaacaaacccaatgtatcttactttcgtgtatttgggagcaggtgctacattctagtgaagaagggtagaaattctaaatttgctcctaaagctgtagaagggtttttgttaggttatgactcaaatacaaaggcgtatagagtcttcaacaaatcatcgggtttggttgaagtctctagcgacgttgtatttgatgagactaatggctctccaagagagcaagttgttgattgtgatgatgtagatgaagaagatgttccgacggccgctatacgaaccatggcgattggagaagtgcggccacaggaacaagatgaacgagatcaaccttcttcctcaacaacggtgcatcccccaactcaagacgatgaacaggttcatcaaaaggaggcgtgtgatcaagggggagcacaagatgatcacgtgatggaggaagaagcgcaaccggcacctccaacccaagttcgagcggtgattcaaagggatcatcccgtcgaccaaattttgggtgacattagcaagggagtaactactcgatctcgattagttaatttttgtgagcattactcctttgtctcttctattgagcctttcagggtagaggaggccttgctagatccggattgggtattggccatgcaggaggaactcaacaacttcaagcgcaatgaagtttggacactggtgcctcgtcccaagcaaaatgttgtgggaaccaagtgggtattccgcaacaaacaggacgagcacggggtggtgacgaggaacaaggctcgacttgtggcaaaaggttatgcccaagtcgcaggtttggactttgaggagacgtttgctcctgtggctaggctagaatcaattcatatcttgctagcatatgtcgctcaccattctttcaggttgtaccaaatggatgtgaagagcgctttcctcaatgggccaatcaaggaggaggtgtacgtggagcaaccccttggcttcgaggatgaacggtaccccgaccacgtgtgtaagctctctaaggcgctctatggacttaagcaagccccaagagcatggtatgaatgccttagagacttcttaattgctaatgctttcaaggttgggaaagccgatccaactctttttactaagacttgcgacggtgatctttttgtgtgccaaatttatgtcgatgacataatatttggttctactaaccaaaagtcttgtgaagagtttagcagggttatgatgcagaaattcgagatgtcgatgatgggcgagttgaactacttccttgggtttcaagtgaagcaactcaaggacggcaccttcatctcccaaacaaagtacacgcaagacttgctgaagcggtttgggatgaaggacgccaagcccgcaaagactccgatggggaccgacggacacaccgacctcaacaaaggaggtaagtccgttgatcaaaaagcataccggtcaatgatagggtctttactttatttatgtgctagtagaccggatattatgcttagcgtatgcaagtgtgctagatttcaatccgatcctaatgagtgtcacttagtggcggtgaagcgaattcttagatatttggttgctacgccttgcttcgggctctggtatctaaaggggtctacctttgacttggttggatactcagattccgactatgctggatgtaaggtcgataggaagagtacatcagggacgtgccaattcttaggaaggtccctggtgtcgtggaactctaagaaacaaacctccgttgccctatccaccgctgaggccgagtatgttgccgcagggcagtgttgcgcgcaactactttggatgaggcaaaccctcagggactttggctacaatctgagcaaagtcccactcctatgtgacaatgagagcgctatccgcatggcggaaaatcctgttgaacacagccgcacaaagcacattgacatccggcatcactttttgagagaccatcagcaaaagggcgatatcgaagtgtttcatgttagcaccgagaaccagctagccgatatctttaccaagcctctagatgagaagaccttttgcaggctgcgtagtgagctaaatgtcttagattcgcggaacttggattga

SEQ ID NO: 131603 - DNA, 3492 bp, Zea mays
  Clone ID: MRT4577_51503C.1
atggattttccgcccccgtccgaccaccccgccgcagcggccctgggcacgacctccgccgcggggctgggcgccgcccctgctgtgtcgggtgcgggcgccgcggggctaggcatggccgccgccgccggtcaccacgtcgccgccggggctcccaccgcggccagcacgcgtgctgccgacctcgctgctgtgcacaggacatccgcagccacctccgtcgagcaccacaacgccgccggggctcccaccagggccagcacgcgtgctgccgacttcggcccctccggatttggcctcctgggctacccgacatgcgccggcgtcttcacctgtctacccttgccaacacgtctcaccggacacccgccccctgggttcccccccactcggccgctcgtcgccgacgccacctgggcttctccgccgccctccaccgactccacgctgccatccaccatcgccgccatccaggcggccctggccgcctcgcaggagcgcgagcgcgccgcgtctcgtgctctggaccaggagcgcgccctggccgccacactgaccgcccagatggccactgtgcagcgtctcatcctcagccctcctccggtcgactcggggacaccaccgcccaccccagatgctacccacgcctctggactcgaggctgaccacatcgccgctctccatgcccaggccgccggactacagaacatctggtccctcgtgttctttttgcaggataagtctgaaacccaagggaccctcaagcgcttcctcaggagagctcaaaatgagtttgagcttaaggtgaagaagataaggagcgacaacgggtccgagttcaagaaccttcaagtagaggagttccttgaggaggaagggatcaaacacgagttctccgctccctacacacctcagcaaaatggtgtggtagagaggaagaacatgacgctaatcgatatggcgaggacgatgcttggagagttcaagacccccgagtgcttttggtcggaagctgtgaacacggcttgccacgccatcaacagggtctaccttcatcgccttctcaaaaagacttcgtatgagcttctaaccggtaacaaacccaatgtatcttactttcgtgtatttgggagcaaatgctacattctagtgaagaagggtagaaattctaagtttgctcccaaagctgtagaagggtttttgttaggttatgactcaaatacaaaggcgtatagagtcttcaacaaatcatcgggtttggttgaagtctctagcgacgttgtatttgatgagactaatggctctccaagagagcaagttgttgattgtgatgatgtagatgaagaagatgttccgacggccgctatacgaaccatggcgattggagaagtgcggccacaggaacaagatgaacgagatcaaccttcttcctcaacaacggtgcatcccccaactcaagacgatgaacaggttcatcaaaaggaggcgtgtgatcaagggggagcacaagatgatcaagtgatggaggaagaagcgcaaccggcacctccaacccaagttcgagcggtgattcaaagggatcatcccgtcgaccaaattttgggtgacataagcaagggagtaactactcgatctcgattagttaatttttgtgagcattactcctttgtctcttctattgagcctttcagggtagacgaggccttgctagatccggactgggtgttggccatgcaggaggagctcaacaatttcaagagaaatgaagtttggacgctggtgcctcgtcccaagcaaaatgttgtgggaaccaagtgggtgttccgcaacaaacaagacgagcacggggtggtgacaaggaacaaggctagacttgtggcaaaaggttatgcccaagtcgcaggtttggactttgaggagacttttgctcctgtggctaggctagaatcaattcgtatcttgctagcatatgtcgctcaccattccttcaggttgttccaaatggatgtgaagagcgctttcctcaacggaccgatcaaggaggaggtgtatgtggagcaaccccctggcttcgaggatgaacggtaccccgaccacgtatgtaagctctctaaggcgctctatggacttaagcaagccccaagagcatggtatgaatgccttagagactttctaattgttaattctttcaaggttgggaaagccgatccaactctatttactaagacatgtgatggtgatttgtttgtgtgccaaatttatgtcgatgacataatatttggttctactaaccaaaagtcttgtgaagagtttagcagggtgatgacgcagaaattcgagatgtcaatgatgggcgagttgaactatttccttgggttccaagtgaagcaactcaaggacggcaccttcatctcccaaacgaagtacacgcaagatctgctaaagcgatttgggatgaaggacgccaagcccgcaaagacgccgatgggaactgacggacacaccgacctcaacaaaggaggtaagtccgttgatcaaaaagcataccggtcaatgatagggtctttactttatttatgtgctagtagaccggatattatgcttagcgtatgcatgtgtgctagatttcaatccgatcctaaggagtgtcacttagtggcggtgaagcgaattcttagatatttggttgctacgccttgcttcgggctctggtatccaaaggggtctacctttgacttggttggatactcagactccgactatgctggatgtaaggtcgataggaagagtacatcggggacgtgccaattcttaggaaggtccctggtgtcgtggaactctaagaaacaaacttccgttgccctatccaccgctgaggccgagtatgttgccgcaggacagtgttgcgcgcaactactttggatgaggcaaaccctcagggactttggctacaatctgagcaaagtcccactcctatgtgataatgagagtgctatccgcatggtggaaaatcctgttgaacacagccgcacaaagcacatagacatccggcatcactttttgagagaccaccagcaaaagggagatatcgaagtgtttcatgttagcaccgagaaccagctagccgatatctttaccaagcctctagatgagaagaccttttgcaggttgcgtaaggaaggtgaattggttgatttccaaaagaactgtttggttatcttggatattttgccaaatggcatggtcatacctgctggtgtacaagcataccttgctggtcttacatttgtattgtcggcattaccttgcagcacacctattcttgctacccttctgggatatgttgacacttcaagagacccaattattggaggaagtttattgttgacatacacaacggactatgttgcgcgccttcctactatagcttcttttgctagagcactgcaggtcaccgttggatcatggtgctccaattctatgaggtggtag

SEQ ID NO: 131604 - DNA, 675 bp, Zea mays
  Clone ID: MRT4577_51504C.1
actgcttctcattcgtcccttcctctccgctccgtccctttctctccgctgcgtcccttttcgccagatccgacgcccttccggcttgtcgttgcctcgccgccgtgacaaagttgggagaagggggttggccgtcgtcttgcggttgggccggagcagcggtgggctggacgccgcttcctgctgtcttcgagcgatgggagagggttagggtctgtcgtttgccgttcgattggtgactgttgcgggttggcagcgcgccgtgtagctgcgagacaacttccttgttgatctgccgtcctgctgcagtgttatatactgtcgaattccaaaaacgaggtctgccacacgcgcatatcctcatctggcgtaaaggagacaaagatggtgatcactgccctagctgctcttgtcccaggaaacaagaagttgactattcgtgtgtatgtctcaaggctgtggcagcatcgtggaactactgataatggtcctatcattcatactgacatggtgcttgtggatgctgagggttctcatatctatgctgagatctctaaagactgggtaagcaagtttatggagaagctcagggaaggctgtgcttatgagatttgtcagtttctggtgttcccaaataagcgttactttaaggccgtcgatgcagcaaacatgatc

SEQ ID NO: 131605 - DNA, 3488 bp, Zea mays
  Clone ID: MRT4577_51505C.1
tcaatccaagtttcgcgaatctaagacatttagctcactacgcagcctgcaaaaggtcttctcatctagaggcttggtaaagatatcggctagctggttctcggtgctaacatgaaacacttcgatatctcccttttgctggtggtctctcaaaaagtgatgccggatgtctatgtgctttgtgcggctgtgctcaacaggattctccgccatgcggatagcactctcattatcacataggagtgggactttgctcagattgtagccaaagtcccggagggtttgcctcatccaaagtagttgcgtgcaacactgtcctgcggcaacatactcggcctcagcggtggatagggcaacggaagtttgtttcttagagttccacgacaccagggaccttcctaagaattggcacgtccccgatgtactcttcctatcgaccttacatccagcatagtcggaatctgagtatccaaccaagtcaaaggtagacccctttggataccagagcctgaagcaaggcgtagcaaccaaatatctaagaattcgcttcaccgccactaagtgacactccttaggatcggattgaaatctagcacacatgcatacactaagcataatatccggtctactagcacataaataaagtaaagaccctatcattgaccggtatgctttttgatcaacggacttacctcctttgttgaggtcggtgtgtccgtcgattcccatcggagtctttgcgggcttggcgtccttcattccaaaccgctttagcagatcttgcgtgtacttcgtttgggagatgaaggtgccgtccttgagttgcttcacttggaacccaaggaagtagttcaactcgcccatcatcgacatctcgaatttctgtgtcatcaccctgctaaactcttcacaagacttttggttagtagaaccaaatattatgtcatcgacataaatttggcacacaaacaaatcaccatcacatgtcttagtaaaaagagttggatcggctttcccaacgtggtcggggtatcgttcatcctcgaagccagggggttgctccacgtacacctcctccttgattggcccgttgaggaaggcgctcttcacatccatttggtacaacctgaaagaatggtgagcggcatatgctagcaagatacgaattgattctagcctagccacaggagcaaatgtctcctcaaagtccaaacctgcgacttgggcataaccttttgccacaagtcgagccttgttcctcgtcaccaccccgtgctcgtcctgtttgttgcaaaacacccacttggttcccacaacattttgcttaggacgaggcaccagtgtccaaacttcattgcgcttgaagttgttgagctcctcttgcatggccaatacccaatccggatctagcaaggcctcctctaccctgaaaggctcaatagaagagacaaaggagtaatgctcacaaaaattaactaatcgagatcgagtagttactcccttgctaatgtcacccagaatttggtcgacgggatgatccctttgaatcatcgctcgaacttgggtcggaggtgccggttgcgcttcttcctccatcacgtgatcatcttgtgctcccccttgatcacccgcctcctgttgatgaacctgttcatcgtcttgagttgggggatgcaccatagttgaggaagaaggttgatctcgttcatcttgttcctgtggccgaacttctccaatcgccatggttcgtatagcggccgtcggaacatcttcttcatctacatcatcacaatcaacaacttgctctcttggagagccattagtctcatcaaatacaacgtcgctagagacttcaaccaaacccgatgatttgttgaagaccctatacgcctttgtatttgaatcataacctaacaaaaacccttctacagctttgggagcaaatttagaatttctacccttcttcactagaatgtagcacctgctcccaaatacacgaaagtaagatacattgggtttgttaccggttagtagctcatacgaagtcttcttgaggaggcgatgaaggtagaccctgttgatggcgtggcaagccgtgttcacggcttctgaccaaaaacgctcgggggtattgaattctccaagcatcgtcctcgccatatcgattagcgtcctgttcttcctctctaccacaccattttgctgtggtgtgtagggagcggagaactcgtgcttgatcccttcctcctcaaggaactcctccacttgaaggttcttgaactcggacccgttgtcgctccttatcttcttcaccttgagctcaaactcattttgagctctcctgaggaagcgcttgagggtcccatgggtttcagacttatcctgcaaaaagaacacccaagtgaagcgggaaaagtcatcaacaataactaaaccatacttacttcctcctatgcttagataggcgacgggtccgaagaggtccatatgtagcagctccaggggtcttgatgtggtcatcacattcttgctgtgatgcgctcttcccacttgtttacccgcttgacaagctgcacaaggtctgtctttttcgaattgcacgttagtcaaacctatcacgtgttctccctttagaagcttgtgaaggttcttcatccccacatgtgctaagcggcgatgccacagccagcccatgctagtcttagctattcagcatgcatctagaccggcctcttcttttgcaaaatcaactaaataaagtttgccgtctaatacacccttaaaagctagtgaaccatcacttcttctaaagacagacacatctacatttgtaaatagacagttatatcccatattgcatagttgactaacggatagcaaattgtaaccaagagactcaactaaaaacacattagagatggagtgctcattagaaattgcaattttacctaatccttttaccttgccttgattcccatcaccgaatataattgaatcttgggaatccttattcttgacgtaggaggtgaacatcttcttctcccccgttatatggtttgtgcatccgctgtcgataatccagcttgaacccccggatgcataaacctgcaaggcaaatttaggcttgggacttaggtgcccaactcttgttgggtcctacaaggttagtcacaattgtcttagggacccaaatgcaagttttatctcccttgcattttgcccccaatttcctagcaatcacctttctatcctttctacaaattgcaaaggaagcatttaaagcatgatatattgtagaaggttcattaactttcctaggaacattaacaacatttctcctaggcatattatgaacaacatttctcctaccaacatttctatcatgcacataagaggaactagacgcaaacatgtcatgagaatcaaaagcatcatatgcattacaactcctataagcatttctagattgtctcctatcatggtactcg

SEQ ID NO: 131606 - DNA, 600 bp, Zea mays
  Clone ID: MRT4577_51506C.1
atcatcgaggccggccgggaagaaccacatatcaactaaagcaccttgacaagttttgtattgacataggtacttgacgatgacctcccaacccaccaagccattttctgtgtctggcaaaactgccattgtcactggagctggttcaggaatcaactttgaatttgcaaagatcctactctccaagaattgcaatattgtcattgcagatctgtctcttcggccagaggcccaagatctggtgtctcaatactcctcatcctcttcaccacgagcagtctttatcaaaacagacgtaacatcctggaaagatttgtcgaatgctttcagaactactgttcaggaattcggtgaccttgacatcgtctgtcctggtgcaggtgtctacgagcccacctggtcccacttctggcatccaccaggatctccagagagcaaagatgattcagaaggcgacggctacaagttgctcgacattaacctcgttcatcctatccgagctactcaaatggccatatcttactggatgcatggccctggagcaaaagcatcacctgataacccaaagcgagagattcacatttccttccgatgctgctc

SEQ ID NO: 131607 - DNA, 5517 bp, Zea mays
  Clone ID: MRT4577_51507C.1
atggatcctaaggggaagggaatcgtgatcaacgataaggagaaggagtccttcgtcaacgagccaaaggatgacaagtcaaacgactcgggctcgggtcatagacgaaaagatgggaagaagaagaagacaaggcgcatcaaggagattgtctactacgacagcgacgaatcttcctcttcccaaaaggacgatgacaacgactacaggaagacggtcaattcgaacttttcatttgattattcttgtattccacatagttcgaattcgcatttgctttccattcctctcggcaaacctccacactttgatggggaggactacggattttggagtcacaaaatgcgtagtcatttattctctctccatccaagcatatgggagattgtagagaatggaatgaaatttgatagctcggatagccctatgtttattaacgaacaaattcataaaaatgcacaagctactactgtgttgctagcctctttgtgcagggacgagtacaataaggtgagcggcttggacaatgccaagcagatatgggacaccctcaagatttctcacgaggggaacgacatcaccatgctcactaaaatggagttggtggagggcgagcttggaaggtttgcaatgataaggggcgaggagccaacccaaacatacaaccggctcaagacccttatcaacaaaataaggagctacggaagcacgcgatggacggaccatgacgtcggccgcctaatgctaaggtcatttaccgttcttgatcctcatctcgtgaacaatattcgtgagaatcccaggtacacgaagatgacgcccgaggaggtactcggaaaattcgtaagcgggcggatgatgatcaaggaggcaagatacgtggacgacgccttgaatggaccgatcaatgagcctcaaccaattgctctcaaggcaacaaggagcaaggaggcgctaccaagcaaggtggcgcaagttgaggcggccgggctaaataatgaggagatggccctcatcattaagcgcttcaagacggcgcttaaaggtcgcaagggacagccaaacaagaccaagacaaaggagaagcgctcatgcttcaaatgtggtaagattggtcatttcattgctaactgtcccgataatgaaagtgaccaggaaaaggaggacaagagggaaaagaagaagcattacaagaaggccaagggcgaggcacatatcggaaaggaatgggattcggattgctcctcttccgactccgacaatgagggactcgccgccaccgccttcaacaaatcgaccctcttccccaacgagcgtcacacatgccttatggcaagggagaagaaggtatgtactcaaaaccctacctatgcttcttttagtgaggatgagtctagtgatgatgatgagatagattactcatgcttattcaagggattagatagatctaaaattgataagattaatgagttgattgatgccttgaatgacaagaatagattactagaaaaacaagaggaccttttatatgaagagcatgacaaatttgtagaagcacaaaaatcccatgctttagaagttaagagaaatgaaatgctttcttgtgaattatcttcttgccatgagacaatttctagcttaaagagcataaatgatgatttaaatgctaagctagaaaaatctagtaaattaacatcttgtgtagaacatgttgtgatttgcactaggtgtaaagactttaatgttgatgcttgtagtgaacacctcgagtgcatttctaaattaaatgatgaagtggctagtcttaatgcccaacttaagactagcaagagtgatttggataaactaaaatttgcaagggatgcctacacaattggtagacacccctcaattaaggatgggcttggcttcaagagggaagtcaagaacttgacaagccataaggctcccatctccgccaaggagaaagggaaggcccctatggctagtagtgtgcaaaagaaccatgcttttatgtaccatgataggagacaaactagaaatgcttataggagttttaatgcttatgatgattttgattctcatgtcatgtttgcttctagttcttcctatgtgcatgatagaaatgttgataggagaaatgttgttcataatatgcctaggagaaatgttgttaatgttcctagaaaagttatgaatggaccttctacaatttatcatgcactaaatgcttcctttgctatttgtagaaaggataggaaaatagttgctaggaagttaggggcaaaatgcaagggagacaaaacttgcatttgggtccctaaggaaatttgcgctaaccttgtaggacccaacatgagttgggtttatgcatccgggggttcaagctggattatcgacagcggatgcacaaaccatatgacgggggagaagaaaatgttcacctcctacgtcaggaataaggattcccaagattcaattatattcggtgatgggaatcaaggcaaggtaaaagggttagttgagtctcttggttataatttgctatctgttagtcaattatgcaacatggggtataactgcctatttacaaatgtagatgtgtctgtctttagaagaagtgatggttcactagcttttaagggtgtattagacggcaaactttatttagttgattttgcaaaagaggaggccggtctagatgcatgcttaatagctaagactagcatgggctggctgtggcatcgccgcttagcacatgtggggatgaagaaccttcacaagcttctaaagggagaacacgtgataggtttaactaacgtgcatttcgaaaaagatagaccttgtgcagcttgtcaagcaggtaaacaagtgggaggagcacatcacagcaagaatgtgatgaccacttcaagacccctggagctgctgcatatggacctcttcggacccgtcgcctatctgagcataggagggagtaagtatggtttagttattgttgatgacttttcccgcttcacttgggtgttctttttgcaggataagtctgaaacccaagggaccctcaagcgcttcctcaggagagctcaaaatgagtttgagctcaaggtgaagaagataagaagcgacaacgggtccgagttcaagaaccttcaagtggaggagttccttgaggaggaagggatcaagcatgagttctccgctccctacacaccacagcaaaatggtgtggtagagaggaagaacaggacgctaatcgacatggcgaggactatgcttggagaattcaagacccccgagcgtttttggtcggaagccgtgaacacggcttgccacgccatcaacagggtctaccttcaccgcctcctcaagaagacgtcatatgagcttctaaccggtaacaaacccaatgtatcgtactttcgtgtatttgggagcaagtgctacattctagtgaagaagggtagaaattctaaatttgctcccaaagctgtagaagggtttttgttaggttatgactcaaatacaaaggcgtatagagtcttcaacaaatcatcgggtttggttgaagtttctagcgacgttgtatttgatgagactaatggctctccaagagagcaagttgttgattgtgatgatgtagatgaagaagatgttccgacagccgctatacgaaccatggcgattggagaagtgcggccacaggaacaagatgaacgagatcaaccatcttcctcaactatggtgcatcccccaactcaagacgatgaacaggttcatcaccaggaggcgtgtgaccaagggggagcacaagatgatcatgtgatggaggaagaagcggaactggcacctccaacccaagttcgagcgatgattcaaagggatcatcccgtcgaccaaattctgggtgatattagcaagggagtaactactcgatctcgattagttaatttttgtgagcattactcctttgtctcttctattgagcctttcagggtagaggaggccttgctagatccggattgggtattggccatgcaggaggaactcaacaacttcaagcgcaatgaagtttggacactggtgcctcgtcccaagcaaaatgttgtgggaaccaagtgggtgttccgcaacaaacaagacgagcacggggtggtgacgaggaacaaggctcgacttgtggcaaaaggttatgcccaagtcgcaggtttggactttgaggagacctttgctcctgtggctaggctagaatcaattcgtatcttgctagcatatgccgctcaccattctttcaggttgtaccaaatggatgtgaagagcgctttcctcaatgggccgatcaaggaggaggtgtacgtggagcaaccccctggcttcgaggatgaacggtaccccgaccacgtgtgtaagctctctaaggcgctctatggacttaagcaagccccaagagcatggtatgaatgccttagagactttctaattgttaatgctttcaaggttgggaaagccgatccaactctttttacaaagacatgtgatggtgacttgtttgtgtgccaaatttatgtcgacgacataatatttggttctactaaccaaaagtcttgtgaagagtttagcagggtaatgacgcagaaattcgagatgtcgatgatgggcgagttgaactacttccttgggttccaagtgaagcaactcaaggacggcaccttcatctcccaaacgaagtacacgcaagacttgctaaagaggtttgggatgaaggacgccaagcccgcaaagacgccgatgggaaccgacggacacacagacctcaacaaaggaggtaagtccgttgatcaaaaagcataccggtcaatgataggttctttgctttacttatgtgctagtagaccggatattatgcttagcgtatgcatgtgtgctagattacaatccgatcctaaggagtgtcacttagtggcggtaaagcgaattcttagatatttggttgctacgccttgcctcgggctctggtatccaaaggggtctacctttgacttagttggatactcagactccgactatgctggatgtaaggtcgataggaagagtacatcggggatgtgccaattcttaggaaggtccctggtgtcatggaactctaagaaacaaacctccgttgccctatccaccgctgaggccgagtacgttgccgcaggtcagtgttgcacgcaactactttggatgaggcaaaccctccgggactttggctacaatctgagcaaagtcccactcctatgtgacaatgagagtgctatccgcatggcggagaatcctgttgagcacagccgcacaaagcacatagacatccggcatcactttttgagagaccaccagcaaaagggagatatcgaagtgtttcatgttagcaccgagaaccagctagccgatatcttcactaagcctctagatgagaagaccttttgcaggttgcgtagtgagctaaatgtcttagattcacggaacctggattga

SEQ ID NO: 131608 - DNA, 413 bp, Zea mays
  unsure (1)..(413): unsure at all n locations
  Clone ID: MRT4577_51508C.1
antttatttttttttttttttttttttttttttttgttttttttttgggaaaaactccgaatattccccaggaacacttaaaccacaatgaaacattcgctcctggcccaaaactcaaaagtccaagaccccagacaaaacagtttcctccgaactccaaaactaagagcttaaaaaaccatttcagggggcttgcccccatccctgaaagaaaaccgggccccaaaataggttttaagctccggaacaccctaaatagccttgaccaaagcaaaatccacagcctttgggtcatcctttttgaagacaggcaaggacttggatgcctccttttttgtctaaaaaagtccgccctgggcctttttcaccttctggtttttctccctggaaaagaccttgtcatcaaacttggc

SEQ ID NO: 131609 - DNA, 405 bp, Zea mays
  Clone ID: MRT4577_51509C.1
ggtaccgggaccccttctcgagttttttttttttttttttttttttttttttttttttttttttttttggtttttttttttttaagagaaagaaaagcaggcaggggataatttcgggaagggtgcccgcgcgcttctcattaatgcaagtatttaaaaaacggactacaggcgggcggtgaacaccaccaaaaaggtttttgttggttgacgacttaaaggccaaattacatccctcggtttgaaaccacaaaggcctttctttaaattctgaaattgaaaagaaaaaggggacttcccattgttaaatcccgaaccttgaaagggttttatggggagtccaaaaagaacaaggggttttaaaactcagaggacccggacagaaaattttatgccaatttaccg

SEQ ID NO: 131610 - DNA, 641 bp, Zea mays
  unsure (1)..(641): unsure at all n locations
  Clone ID: MRT4577_5150C.1
tgatagnatgagagtccttaataaagaagttcaaaaggagatatccagcctgaagnaagagctacagcaactcaggcgtggtatgatgggaaatggtggtattctccctacggatcaagaggatcttgttaatttaaaacttcagcttgaagctgggcaagttaaacttcaatcgaggctagaacaggaagaggaagcaaaagcagcattgatgggtaggattcagaggctaacaaaattaatattggtatcaaccaaaagttcgatatcctcaaatgtttctggaaagactaacttccgccgacggcattcatttggagaagatgagcttgtgtatttgcctgatcgaaagcgggaatactttgtagatgacgatgatgttagtcttgattcagaactttcgcttgaagggaaacttgatctgaacaatccagaggagtcagccaggtttggcagaaggaaccacaaacgtggaatgcttggctggtttaaactaaagaagtccgaccagttatcagggctatcatccagtgtagacggtgatagcactgctagcgtctcaccttcgtgctctaaatcatcacaacaaaaacacttgctgcttgacctgaaggatggtcgaaggaaatctatgactagga

SEQ ID NO: 131611 - DNA, 781 bp, Zea mays
  Clone ID: MRT4577_51510C.1
gccggccgggtcgggatctcggatcgtagtgccatgtcgtcgttctcaaccgagcccattaccttattgcgctgccgaacagctgaaagacaatacacgatgcccggaaagggtcatgagcagcgtatcctcatatatctcggcacgaagcactcttgcgtaagcgtgtgggagcaataccgctgcaagatcataggcaaccaccagggtatcccgcacaacgccgtcgtacttccacttcacagtctgcgagcgcctcatgctcaaatgcctgcaagaaccaggtggccatgaatttcattatcacagtctttgatgtcatcacgtgcatctcgatgaggttcaccgatgctctggccaaggatatcaaggtgcggcccttcaaggtgatttctgggcctggagagaagctaatgattgttgtccagcacaagggtgaggagaagcagcttgcagctgaagagatctcctctatggctcttatcaagatgcgtgagattgctgaagcttaccttggtagcacgatcaagaatgctgtgggcacagtccctgcctacttcaatgactcacagaggcaggccacaaaggatgctggggtgattgctggccttaatgtgctgcgtatcatcaacgagccaacagctgcagctatcgcctatggtcttgacaagaaggctaccagtggtcggtgagaaagaatgtcctcatctttgatcttgagagcgatacctttgatgttccctactcccattgaggaagaatctttgatgtcaagccacag

SEQ ID NO: 131612 - DNA, 373 bp, Zea mays
  Clone ID: MRT4577_51511C.1
atcatgatgtccgagccaccgatgaactcacccttcacgtagagctgggggatggtgggccagtggctgtagtccttgatgccctggcggatctcctggtcgtctagtacgttcacggtggcgatgttcttggggtccacgccgcaggccttgaggatctgcacggcgcggcccgagaagccgcacatcggaaagctggcgttgcctttcatgaacagcaggatgtcgttggtcttgaccagttggtcgatgcgttgctggacgtcgctcatggggttctcctgaaggggggcgccctggggcagggcggcgatggggggattatttcactgcggggcgccgccgggcattgacccctagttctagatcgcga

SEQ ID NO: 131613 - DNA, 646 bp, Zea mays
  Clone ID: MRT4577_51512C.1
ccggccgggattctcccctcttcttccgccgatacacacgccctgcacgggggctcgccgaggcttcagtttactactgaagcacgcaccgcagcgtctccaccttctgctcaacctccgcttccgtaggtgccggcgctaagcgaggatccctccgttcatcggtcccgacggcacctcgactcgtttcgtcggtcgctgtggcgacgggtgattgactgcgatatgaggcaatggttatgttgtaactgccactttgatgacgaggaagatggccatgacaaggaacaggccaaagctcagagcaataagatagaccgtacgatgcttgctttcaatgcttttctttgtttggtcctgtgaattctggtatgactgggccagttgaaggttatgtagggaccaaccttttgttctctcttgacgtccatgggagttaggaaacttcagtcgtattcattctgaagaacagctcagagcagttttctggccattcacagaaagttttcatgttctttaatgtgaatcagattattactggattcacatgtacagataaggcagatgaagaatttctgatatgatttccgggactggctacaaacttgatatataagtcaaaaaaaaaaaaaaaaaatttgcggcc

SEQ ID NO: 131614 - DNA, 1071 bp, Zea mays
  unsure (1)..(1071): unsure at all n locations
  Clone ID: MRT4577_51513C.1
accgacccccttctcgcctaatctccgcgccccgcctgcgtctccgccccgcctcacccgcagcctgtctctgctcggcggcggccgtctcgactgcgggagaggggagcgccccttcgccgatctgatcgtgagctgcaggccaaacggcgaggcgagcccatcaggaaccaccatggcagcggcagccgccgactccgatcccgccgcagctgtggccgacatgtccacctgcgcccattgatcagttgctctctttgcaaagaaacaatagaacgtgtgaggtgggatcttcataaaggcgaaaagtgcctacaaagaatcgtcgcttgtgaatattgcgagtttgaattgcctgcagttgatctccatgagcatcaggatgtatgtggaaaccgaacagaactttgccaaacatgcaggaagtatattagattgtgtgaatggatagggcacgaaatacagtgccatacaagctcaaatggttctgcagacacatccagtgccagagcaattccagagagagaactacgaccgccgccgccggtgcggccggcacgaccagcacgtcctgctcatgcttcaccacacaagcggctcctcttcacaatcgctgtcactggaatagcagttatggttggctccatactgttccaaagggacgagagtttctagctccagtggccatggacttactctgtctgtcatgttgtttcttgaccgggagagtcatgccacaggaggtgtatttatgtataataactcctcgaatcagtgcataaatcgagtttgtttgagagcatagccccaggcgtgggtttgtggaaaatgcaaagtaaccgtggataaatgcgttcgcccttggcagttctggaacttctgtttgttctgacagaaaaaaaaaaaaaaaaagcggccttgcatttgttcgtctgtaaagtcgagatgagttatacaatcggngtatcatatctggaaagcgacacgatgcagcagttgttaatagtttggtttatactgtatcctgtagtgttctaatgtaccanattgtgggaaactgggactatctcc

SEQ ID NO: 131615 - DNA, 772 bp, Zea mays
  unsure (1)..(772): unsure at all n locations
  Clone ID: MRT4577_51514C.1
cccgcctgcgtctccgccccgcctcacccgcagcctgtctctgctcggcggcggccgtctcgactgcgggagaggggagcgccccttcgccgatctgatcgggagctgcaggccaaacggcgaggcgagcccatcaggaaccaccatggcagcggcagccgccgactccgatcccgccgcagctgtggccgacatgtccacctgcgcccattgtcaacgagagatcccttcttcgaacatcgacttgcattctgtacattgtgcccgtaacctccaaaagtgccagcactgtggagaaatgattcctaggaaacttatggatgaacactatgatgcaaaccatgccccgatcagttgctctctttgcaaagaaacaatagaacgagtgaggtgggatcttcataaaggcgaaaagtgcccacaaagaatcatcgcttgtgaatattgcgagtttgaattgcctgcagttgatctccatgagcatcaggatgtatgtggaaaccgaacagaactttgccaaacatgcaggaagtatattagattgcgtgaatggatagggcacgaaatacagtgccatacaagctcaaatggttctgcagacacatccaggttcagtgctaatctgatcgatgtttttaagtgccagagcaattccagagagagaactacgaccgccgccgctggtgcggccggcacgaccagcacgtnctgctcatgcttcaccacacaagcggcttctcttcacaatcgctgtcactggaatagcagttat

SEQ ID NO: 131616 - DNA, 1219 bp, Zea mays
  Clone ID: MRT4577_51515C.1
cattggtaccctcgaggccggccgggccgggaccgacccccttctcgcctaatgtccgtgccccgactgcgtctccgccccgactcacccgcagcctgtctctgctcggcggcggccgtctcgactgcgggagaggggagcgccccttcgccgatctgatcgggagctgcaggccaaacggcgaggcgagcccatcaggaaccaccatggcagcggcagccgccgactccgatcccgccgcagctgtggccgacatgtccacctgcgcccattgtcaacgagagatcccttcttcgaacatcgacttgcattctgtacattgtgcccgtaacctccaaaagtgccagcactgtggagaaatgattcctaggaaacttatggatgaacactatgatgcaaaccatgccccgatcagttgctctctttgcaaagaaacaatagaacgtgtgaggtgggatcttcataaaggcgaaaagtgcccacaaagaatcgtcgcttgtgaatattgcgagtttgaattgcctgcagttgatctccatgagcatcaggatgtatgtggaaaccgaacagaactttgccaaacatgcaggaagtatattagattgtgtgaatggatagggcacgaaatacagtgccatacaagctcaaatggttctgcagacacatccagtgccagagcaattccagagagagagctacgaccgccgccgccggtgcggccggcacgaccagcacgtcctgctcatgcttcaccacacaagcggctcctcttcacaatcgctgtcactggaatagcagttatggttggctccatactgttccaaagggacgagagtttctagctccagtggccatggacttactctgtatgtcatgttgtttcttgaccgggagagtcatgccacaggaggtgtatttatgtataataactcctcgaatcagtgcataaatcgagtttgtttgagagcatagccccaggcgtgggtttgtggaaaatgcaaagtaaccgtggataaatgcgttcgcccttggcagttctggaacttctgtttgttctgacatcggacttgcatttgttcgtctgtaaagtcgagatgagttatacaatcggggtatcatatctggaaagcgacacgatgcagcagttgttaatagtttggtttatactgtatcctgtagtgttctaatgtaccaatttgtgggaaactggactatctcc

SEQ ID NO: 131617 - DNA, 193 bp, Zea mays
  Clone ID: MRT4577_51516C.1
actggaagcacaagcagcatcgtaccaaaagcaaggttccatagcacaaggaaaatacaagcatcaacagcgacagaatgggccacgagggtggtacgctagcagtagtaacacggcaacaatacgaaaggggacaccaaactcgtcagggtctgcctgccctagaaccaccaggcttgacactgtcacagcc

SEQ ID NO: 131618 - DNA, 759 bp, Zea mays
  Clone ID: MRT4577_51517C.1
ctcgaggccggccggaactactcaaacgcgtctccccaacatactaccacgccctcttcgccatgtcgatcacatcatttgacactgcacccggaagaggcggattcctgacattcaactcctctcctccacgcatctacctcacaagcacgtatccagctccagaaaaagcgctcctagcttggcaagaagaaggctacgatgcacaattccttccttacgaaccgcgcaagcaatcccaaaccgaatacgtcaacactatccgaaagctcacagaaacatgccggctcggcgagcattacgcgataattgcgtatggcgaggccgccagccttgtcctcaaaacagcacagaaaccactggcgaaatgctgtgcaattgtcgctttctacccgacacttctacccagtccaaaaacaatgtatccgcgatcgcaccaactgcaggttcacgttgcatgcttaagtcaagccagcgccagaccagagatgtgcgagtggaagctgtatcggtatgagaggtgtgcttcaggatttctggatccatcatccccggcgtactcggaagtagaagccaatctagcctggaccagggcgctagcgagtatccgcaaagggttcggaaagaatgtcgatctggagcccattgcgattgcgcattggaacgcacgttttgaagacgatgacccagatcgagcgagcatggctgtggccaagaatatgacgcaggatagcccgcatgttactattcttccacaat

SEQ ID NO: 131619 - DNA, 400 bp, Zea mays
  Clone ID: MRT4577_51518C.1
ggaagccgccgccatttcacaatcagaaggaaaagggtgggcccccccctcgataatttacccgcgggggccttgcacattcttcaaacccccacatacagctttttatcccgggaaaatcaaagacgggatgccgcagcccatgacttggcattgctcggggggggggcgcccgcccttacaggctaggcgtcccctcgggggccccggaaatgacggggaccaggttgttgcccaaggggtccctgaggggcttggcgaggttccccacggggccttccccggggacctaggcctggatgaaaaaggccaacatggaaaacatggcccgccggccgttcttgatctccttcaccttgaggatggcggcctggtcggggtccctggccaggcccagggg

SEQ ID NO: 131620 - DNA, 360 bp, Zea mays
  Clone ID: MRT4577_51519C.1
ttcggctcgaggcttgaggcaccgtttttttccaacggctccacagaacttcagtgggcatttggaaaacaggtgatatgcttgcagagcacaagctaaagacccaacgaaggaaccaggactgggtttgctcggcatacaagaaaagcgatgtgggctatgaacggaagaaacggtaaggtggggcatcataagccaactggctttcgcttgtacaagattgcccttggggtcacgtgggcgaactaccctatgcgtagatagagcttttcttaagctcgagaaggatggaatgaagattgtatgccttcggccaaacgacagttggtggaactacatagtggaaaatgatcacgtttt

SEQ ID NO: 131621 - DNA, 372 bp, Zea mays
  Clone ID: MRT4577_5151C.1
agatctggcggacgctctgcaacatgatcccttacgaacatgtccattgatttgttcggttctttttcccgacccccctactacggtcagtaacgtggtcgtcgccctcgataactgcagccgcctaaaacatatagaacttgatgctggacgggcgtgtctgtcattcgatagactggacgcatgcctacttgatgctgacctatcgcgtgtgcttcttttctgagttagcctcatgcagcggagcacatgtcttgagaccgcggggatggaaccgctctctgagaggcactcgtgtacggcaccctatatatatgattctataacatgctaaaattgagcttctgtattactatatatataaccctccat

SEQ ID NO: 131622 - DNA, 272 bp, Zea mays
  Clone ID: MRT4577_51520C.1
ttgggaccctcgaggccggccgggggatgcgtatcataccagcactaaagcaccggatcccatcagaactccgaagttaagcgtgcttgggcgagagtagtactaggatgggtgtacctgtgcccggagccgacgtgcgtgcaccacgacccgtcccgcgcgctgggcgacctcacgggcatcaagaagcactactgccgcaagcacggcgagaagagtgaagtgcgacagtgcaacagcgctacgcgtgcagccgactggaggcgcactcc

SEQ ID NO: 131623 - DNA, 237 bp, Zea mays
  unsure (1)..(237): unsure at all n locations
  Clone ID: MRT4577_51521C.1
agaaatggtcttttttttttttggccttgggngtgcccttcctttgggttgttctctctgcccttcgcgcagcttgcggcccggccgcgggggggggggggccggggccgcctcctgccggggctcgccggcttgagtggggtgggcttttctgctgcctcgcgggtcgttttgcctggcgcgccccctgcgctagtgagtcgggcaatgcgcggcgagaggccggtggcccggtgg

SEQ ID NO: 131624 - DNA, 2185 bp, Zea mays
  Clone ID: MRT4577_51522C.1
ttttaataagcccctaggcactactggtggtttttacactggagccctctggacgggccagtagtggcctccacgtcgggcgggagcacttcgcactcttctccccctcttctcttctcgtagacggcagatctccaggggtgtcgccgtctccggccacggcggccggcgctcggagcatcggtggggttcggtgcggaggtgggcggccatgtacaagaaccagctgcaggagctggcgcagcggagctgcttcaacctgccgtcttacacgtgcctgcgggaggggcccgaccatgcgccgcggttcaaggcggcggtgaacttcaacggggagcagttcgagagccccggcttcttcagcacgctccgccaggctgagcacgccgccgcggaggtcgcgctcgccgcgctcgcgcggcgcggcccgtcctactcgctcgccgcccgcatcctggatgaaacaggggtttataagaaccttctacaggaggtagctcaaagagttggggcgccgttgccattgtatacaacagagcgatctggcgttggccacctgccggttttcacatgcactgttgagctagctggtatcacatttacaggtgatcatgctaagaataagaaacaggctgaaaaaaatgcagcttcagctgcatggtcagcactaaaacaattggtacgcgaggaagtgaattcatccaatgagacagaaaacagtgatgagcaggagcagatcaggattgcccgagccctcctcaactatcgcttgaaggagaagatggcgatggccaattatcctcatgtttcaccattccctaagaaatttcccatgcagccagagaggaagccttcttttggtcaatcttctcagtccagctactcaaagattctccctctattccgccctaaatctaactcaagatccagaccagagtcaccagcatctactgatggcgcatcacaaatgcctggccgggccatggatatccacactccaagcccaagatcaagatttccagctgcagaggcagccccctacgtgccagttgggcacttccgtatgccttgccacagcatggctccttcagtcacaattaggactgctgttcctgtgttctctgctccacctctcccaccgccgtctgcacgcccgcagcagcttcctccactcatgagccacccaccaccgattcggatggcatccccagttcgcatgaggccagcctctccaatgtttgcctcctcagctccagctcaagggccgaaacttgtgaggcctgttcaattgaaggatgtgcaagatcaaccaaggaaggaaacagctccatccgtgatccctgttcaggtaaaggacgtgcaataccaatcaaggaagagctcaatgtctcctgtgattcctgtcctggtaaaggatgcacaacgccagcctctcccagttcagacgaaggatgtgcaaacccaaacccaagccccaaaggaatcacttgcagatccaattccagcaatcaggcctgcagtcaagattgatttgcctgctcaaggcaagaaggaagcttcagctggtgctaccagcgaagcgccatcttctgccactggcaataatggtgctatggaacgcggtacatcatcagacgttctcttggcaaggcgatcaagggctgctgcggacggggatggcgacaaggtggaagcaaagcacgaggccgaggctcaagcggtggcagaggcagccatcaggcagctggagatcaattgacttcagaaaatgcgcgccaccatcttctcccagattttgtaattagctgccttgcctcctgtgcacattccgttctgcttagtccgtgtatgtcttgttcgggttagggctgtctgggcaagctgcattgtggtaggaacacctaggttttctgttgaggagaaaaaaaaacatggagtggtggtaggcggtttgcccagtgtttagttggagacggttattacttcgctggatatgcaattggtctgcttttacccccgaatgatgaggtggactgcgaggtgcctctaagggaaggattctgaattccttgttattgtcgaaccgccgtaatcctatccagcttcttttttactagtagtactacaatgcaaatgatgatgcattggtggttggtgtatgatgaaaagtggagatgggttattt

SEQ ID NO: 131625 - DNA, 510 bp, Zea mays
  Clone ID: MRT4577_51523C.1
cttccaacgatttcaaagatatattcgacgtcgaccacttcaaggagtcgttgaaggaagacattgtgatcgtggattccctcccaccacattacagaagggtgaaaccgtacgtgagagcacccacctcctggtccagggcttccttctacagagacttcgcgaaaatcctgaggaagttcaaagtggtgaggttgacgcacacggattcacggatcgtgaacaacggcctcgctccttcgctgcaaaagcttcggtgccgcgcgaactacgaggcgctccagtacaggaaggagatcgaagagctcggcaacacgctggttgatcggctgagaaacgagtcccagcattacatcgcgcttcacctgagatacgagaaggacatgctggcattcaccgggtgcaaccacaacctgacgctggatgaggcggcggagctgacggacatgcggttcaaggtgcggcactggaaggagaaggacatcaacagcgaggagaggcggctgcagg

SEQ ID NO: 131626 - DNA, 469 bp, Zea mays
  Clone ID: MRT4577_51524C.1
aaggcttccactccactccatcaatgactcattcttcgccgtctctacttgcctctatccaactttggtataatcttcactcatatattgtttgccaaaggggagaaagtagttaaaaagggcttttatttcactcaaatatccattttttggcgattcatgctaaagggggagaaaagtattagcccaaagcaaaaggaccgcaccaccaccaattttcaaaatttgagttaagaaaaggttttgaaataatgaatttttcaattggtatcttagttttgatagaatttcaaattgggtcacctcttcaaaaactaatatctaaaacccccttgaacactaagaggaggattttattgagggggagttttgtttagtcaaaggaaaagcatttgaaacagggggagaaaatttcaaaactcgataatgcttctcaaatttttattcatttaccctttgacttttttca

SEQ ID NO: 131627 - DNA, 330 bp, Zea mays
  Clone ID: MRT4577_51525C.1
cggacacttgggcggaagcgtgggctgccgcgcaacggctggatatcctgcgacgagttcagcaaggtcggcttcgtataccgcgagaactccagctccccgtgccactacgaatgccgctacaggaccatgttgaagctgccgatgttctgctgcatctacgccacccaggtgtcaacggatctgcacgatgccatcaaatcctacccggacgccttccacggcgtcagctgattctacaacatcaagcacacgcacttcgtcagcttcatcacctacaagccccctggcagctgactcatcgctcccggcgtgccgaccacgccggtt

SEQ ID NO: 131628 - DNA, 321 bp, Zea mays
  unsure (1)..(321): unsure at all n locations
  Clone ID: MRT4577_51526C.1
catcttcctcggttcggcacttcggctcgtcctcctcgcggcgaaaccctagcccgccgccatggacgatccctcctccggcttcaacaagcacaagcacaagcgggggcgcaaggccaaagcattgtccgccttccccgaccactccttcccctctccctcggtcggccccgctccggctgggcgccgtggccgcaagccgcgacatcatgaggccctcgccgacgtggacgccacgcgttctccatatncaccccgccgcggggagccgaaaccggtggcaaaccgaggcgatgtggtggcaatggcagagtcaggccc

SEQ ID NO: 131629 - DNA, 360 bp, Zea mays
  Clone ID: MRT4577_51527C.1
aaaaactggaaatgtaactttttatttttgggtggccccatacatcatccaaaaaactttattattgaattacatctaataagccatctaaaaaagggcccccccaattatttttttttggtaggaggcttcttggtttgtcaaaacaagttggacaaagggcaacaattgttttacttttaaaaaggttgcggggttaaccccaaactgcttgtaaaaccgcaacaactttttttttttcaaaaaagaagcaccgcttgctttaactaactggctaaatggtagtaatatttgctgctgcaaaaaaacaacggggttcaatgcggcccatttgttaaatggaaaaaatttttttttttt

SEQ ID NO: 131630 - DNA, 382 bp, Zea mays
  Clone ID: MRT4577_51528C.1
tacccaacgcgctctgggagctggcctagccgttttcgagactctacagcgccagaggaccggtgctgctatgctagaattctcgtgcattagagacagaggcctccacagtccccactgtactcctagctggtcttctgagagacagagtatgcggctgacatctccccggagtatcagacgaaagccggtctgatactagcgagagtcagaacctgtgcacggccgtatcgacctgctgggctgcgtcgccaacctgatcatgtgcgatcaggcgcagctgggcatcaggtgtacatgtacaacatgaccggctgcaccctcctacgcttaagggtgccgaccaccataatgatggccgccatcagacagctcatggggg

SEQ ID NO: 131631 - DNA, 426 bp, Zea mays
  Clone ID: MRT4577_51529C.1
gatcagggaaacccaattaaatgagtcagacaggaacattttggtgaacattacgaatatgaagcagtgtaattctgaggggatagaaacaagtgaggctgtgctcaaatctcgacataccttgcaagagctactaagttagcttaatgtgtgataacccatcaatcctcggaaatcatcagggcttgatggtttatttccaggtttagatcgccatggaaataactgggtgaggccttgcctttcagaatcagcttcttgcctgccagtgaccccgtatttctccctctcgactgcatccataatatcctcccgagacacaggttgtccgacctcttcttgcagctagtatagcggactcattgacaacgttagctagatctgcgccgaccaggcctggggttactctagcaaccagatcactga

SEQ ID NO: 131632 - DNA, 282 bp, Zea mays
  Clone ID: MRT4577_5152C.1
ctgacatttatcgccgaggtgccagaacaaaaggggctcttgtagatgtagcttactgcgaagaacttggagtttctctgctggaagctgctatgaatggatagtctattcatgcgacataaagtggatcccctgtggagattgatcaggtccagtacaatggtgtcacttagcgatcctgacgatcagattgccagtgacgctgcactatataaacttccttttaatgaacatctatggtcaaggcgcagacagaatggactgaccaatactgaccaaatc

SEQ ID NO: 131633 - DNA, 202 bp, Zea mays
  Clone ID: MRT4577_51530C.1
gatgagatcgctgtgcttactgtgttgagtgcttgcgcgtgatgaactaagcatgtgcaccgtacacttatcctctgatatggactaccatggtgatcgtgtggacatcaatatgttatcatccacttgtttactagatcgctttcttttttttgtatcatgtaaaagttatggaggaaataaaaatgaaaaaaaccatggt

SEQ ID NO: 131634 - DNA, 378 bp, Zea mays
  unsure (1)..(378): unsure at all n locations
  Clone ID: MRT4577_51531C.1
aatatntnttttttttttttttttcttaaaacattttattttattatannntnntttttggaacattaattgcatgaccgccgggttcactttaaatcaatcataataataataaaccttaagtgtacatcacaaaacatgttgcatcagatgaaatagcatcgagatctacaaaaaactgggggtttgatcaaatgctctcaaacaacgaaaatgtttttttttgccgttgaccttattatccgggaagtaaacatgaaaatttccattcaaggtcaaggcgttttggttccaacacaaccggggtaagcatgtaaacacgtttccccccttttctgggccattaataagtgatcaaaagcttattttgttccccct

SEQ ID NO: 131635 - DNA, 525 bp, Zea mays
  Clone ID: MRT4577_51532C.1
ttttttttttttttttttttttttttttttttttttttttttttttttttttttttttttttttttttttttttttttattttttttttgcttcctttcaatttttttttttttacaagcacaaggataagaataaaacaggaaaaggaaaagaacaaaaaaggaaaaaaacaaaaccaaaggaagcatgcccctatcccccctgccaaaaaaaacaaaacggggggaaaactacacccaattccggaccaaaagcatacaaacaaatgaggttaaaataaccaaaagaactaccctttgaaacgcaacgagattaccatcaccatgcgaacttgttgtgttccctcttgtggaaagaaaacccacccgaagggtactaaaaggggaaccaaaaaaatggccaagccttccttaaaaaaacccttgggaaggccgctaaaatcagacccgcaaagctctgaaaggcaaaccccaaaactggcctgtggtaaggccgaaaacgggaaggttcttttcaggaagctc

SEQ ID NO: 131636 - DNA, 305 bp, Zea mays
  unsure (1)..(305): unsure at all n locations
  Clone ID: MRT4577_51533C.1
gggaaaaataaaaaataaccttttattttttaattaccagaagacgtaaatttaataaaaaacccctttttgttggccggtttcgtggggggactaaaaaattttcatacataaggattcatggatgggtggataaagttttaattgaaaaaaaacttaagggggagagggtatataaaaaaagtacgtaccttntngggcggggaatggtttgtgaaaataataatgggtttatttacgtacaaaaaaatgggcttaaacagcagggggagtaaatattatttggcagggacgattattatttt

SEQ ID NO: 131637 - DNA, 207 bp, Zea mays
  unsure (1)..(207): unsure at all n locations
  Clone ID: MRT4577_51534C.1
gaaatcctcagccgcctcgcccccttccctccttcgccgacgtccctccactcttcggtgcccgtcctcgatccggggtctccaaattcggacgatattggcaggatccgccacatctcccgcgaaacccatccgcgagctgctcgtcggccatgcggggagcatggacgagctgctcgtcgacgnccatcccacacccccggcgac

SEQ ID NO: 131638 - DNA, 452 bp, Zea mays
  Clone ID: MRT4577_51535C.1
aaccaaataaacttatgcattgggggccaaaccaacctgggggaacctaattttagaagagataacaccagaaacgagggagacggccaagctcaccaaacccgggggggggggaggccaacacttacatacaagaacgaacacgggctattcccgatagcgcccaggcccctttaccttatgccctacttcgaaccaaaaaaaaacagagctgcgggaatagatggcccccacatggcccaaagcaagggggcctacagtacggaccgccctccaacccccatgaatcccggtggggacaaccgttactacgggccctatctccttgagggaagagaaaggagcgcactcaaaacaagagcctatcattgggaaaaacatggggtacaaaggggctcggtagccccgcaacagacactcctggaaggacaattaaccgccccaatgcaaga

SEQ ID NO: 131639 - DNA, 397 bp, Zea mays
  Clone ID: MRT4577_51536C.1
tctacgtttgcgtccacgcgtgcgtccacgcgtccgagcattatggacacgcgcggctgggtgtcaaggccgatagactctgggagagtagctgctagcgtaaccgcgcgcggcggacggtcttgcgctgcgctgttgctccatgtacgtcaccgccaagagcggtggggatctggcggcattgcgccgaccgttgaatctcaccaacaagggggccgagtgcaccttcaatgctgaaagatgctggggaaatatctacagatgaagaatcagctggggtctgtgacatgccattcgaatggttacactgacgtatgctgggaaactattagaggcagtcacgatggtgattgttcattaatggcggaaactagttgcattatggaacctgacgcat

SEQ ID NO: 131640 - DNA, 651 bp, Zea mays
  Clone ID: MRT4577_51537C.1
gcgtccggccagtgctcatttcctaagcttgagtcatgccttgaagagaacggtcttcgccaggactctatcgtcatgcgtatgactggttgccccaacggttgtgctcgtccttggttggccgaggttgctttcgtcggcaaggcttatggtgcttataacatgtaccttggtggtggctaccacggccagcgcctcaataagctatatcgccagagtatcaaggaggatgagattctcgccattatgaagcctcttctcaagcgatatgctcttgagcgcaacgagggcgagcgcttcggtgacttctgtgtccgctctggtatcattgttgctaccactgatggccagaacttccacgataacgttgccgaggaagaagaggacgaggaataaatcacgactaaaaagactgaacaagatttgaggttagcatgaactgggacaggaaaagaatgaaggacctgttgattgaatttgatatcatgatttgttgctttattttgcatagcttgatgtggtatttactcggccggcgcaactgataggaacgcatttattccatgtagaaacacttcgcaatgatttgagactttgcgtgaaccatctagactgttgaattacatagactttatctcaacttcaagtctt

SEQ ID NO: 131641 - DNA, 992 bp, Zea mays
  Clone ID: MRT4577_51538C.1
ctcgaggccggccggaagtcattgaactcttctaaagaacaagaccttggttcagtactacacttgaacaattttcttttgcagcaaaatccaacaaactagtacgccatgactgccgatagcacaattccatcgcaggctgccgttgcctcgcaaaacaacacatcaaacggccaacctagaaccaagatttgcgtctactgcggttctgccccaggcgcgagtcctgctcatattgaagctgctcgcgcacttggaaaggccatggccgagaacaacattgacttagtttacggaggtggaaccgtcggactcatgggcgaggtggcgaagagcctttgcgccatcaatggccctgactctgttcatggcatcatccctgaggctctggtcaagtatgagcgagacggcacttatggaactgtcaacgagcacaaccacattgtgcctgaggagtctgtctacggccacacaacggtcgtcaaggacatgcacactcgaaagaagctcatggccgaggaggttttcgctggtggtcccggcagcggcttcatcggattgagcggtgggtttggtaccatggaggagattttcgagacaaccacttggaaccagctcggaatccacaaccgtggcattgttctactcaacattgaaggttattgggacggcatcgttcagtggatggatcgtgctgctgagcagggctttgttaagcctgccaacaaggacattctggtgaatgccgatacccctgaaggtgcaatccaggctcttcgtgactacaaggtttcggatgccatctaccaactccaatggggtagtcagtgagcgactcgaggcgctggatccggtccctgtttagaattgcattggagatggtttgatgtttttacggtgctatatggatgataattcaacctgcatttcaggataggatagactggtgctctcatgaatagacgacctgatgacccaggcagacgggctac

SEQ ID NO: 131642 - DNA, 255 bp, Zea mays
  Clone ID: MRT4577_51539C.1
ggcatgccgatcacgagggagccgtctaggaaggggagcctgaggatcaagttccagatcaagttccccactagcctaacaggcgaccagaaggcggccatccaacagcttctgtcttgaagctctctctctctctctctctgtgtgtgtgtgtgtgtgtacaatgcgaggagtgttttcgtttgtggagtagttgtagtagtgacattagctgaatgcaccgtcacgtttttttttcatgctagtgttggcctt

SEQ ID NO: 131643 - DNA, 260 bp, Zea mays
  unsure (1)..(260): unsure at all n locations
  Clone ID: MRT4577_5153C.1
cacccacacccgatctaccaggggcgggttttttttaaggcactggcggtttttaaaccnccaacaccaaaaacaaatgacaaaaaccggataattataccaggaccccaccctcttagctggggaagcaaaaacaaaggggcttctaaaaagaccagggtctaacacaaccaattccaaagggcccaactgtttgaaaacactggaggggcaccacaacccaacaaccgcccaacattacaggatgaaaaaaagggggg

SEQ ID NO: 131644 - DNA, 322 bp, Zea mays
  Clone ID: MRT4577_51540C.1
tcgtaccctacctcacgtcccggatcctatccttcggccaaggtgagttacacgctgggcgggggttggtcagccgtcggcaaccacctcattcccatcagtctcaccgtcgccttcgaggcaaactcgaatcctcctccgtcaccacatccacagccgttccgagcttgagccgtctgttgctccggtaaattgcccttcatcttgtttcctgtagagagaggtcatttattgtgaccgcatgccttatattaagacaagtcgtgtcaagttttctgaacgatgggagcttattgaaccaaccatcctggtgttggatgcc

SEQ ID NO: 131645 - DNA, 1096 bp, Zea mays
  Clone ID: MRT4577_51541C.1
gaacgacgacctaccctgtctgcggtctgcctgcaaccacacgcactggaagcatcgtgcgggtgcggcgcagcgagcgagaggagtggaggatgacggcgcccaagcctggcgggggagcggtggcagcggcgcgggcggcggcggcggggcccaggacggtgctcatgacgggggtgagcagggggctgggccgggccctggcgctcgagctggcgcgtcgcgggcacgcggtggtcggttgtggccgttccgccgagcagctccgctccctcgaggcagagatcacgtcaccgtcgcgccacttccttaccgttgccgatgtcagatctgacagcagtatgtccgagctggcaaaggctgttttggaaaagaagcaagttccagatattatagtaaacaatgctggtacaataaacaagaataacaagacatggaatcttccagtggaagattttgatatggtggttgatacaaatatcaaggggacagcaaatgtgcttcgtcattttgtaccacttatgatagcgaggagacatgggattataattaatttaacctctggttggggaagatccgctgctgcagaagtcataccgaaagccaccaaatgcattatagttgatcctttctgttgaatcaaaatccttagtgcatactaaattgcacgttgccatttcaggttgctccatattgtgcttcaaagtgggcgattgagggcttgacacgctcgttggctaaagagctgcctcctggaattgcagccattgctcttagccctggtgtcgtgaatactgacatgcttacttcatgctttggaagttcagcagcgttatatcaaacaactgaaacatgggcacccaaggcagctacaatgatactaagcctttcactggacgataacggtgcctccttgactgtatgaagtggtgaaattttgtgctcaactgattactgatggggggtctgtatatttttgcgagattatggtgatgtaaaatagtagttataatgtgtgtgcactctgatgtccctagctgctgtctgaacgttgttgtttaaccttacctctatggcctatgcacatgctcttctt

SEQ ID NO: 131646 - DNA, 220 bp, Zea mays
  unsure (1)..(220): unsure at all n locations
  Clone ID: MRT4577_51542C.1
cctgggtggacccacgcgtgcgggtatttctgctgaatataatgaaaatgacctgtgcacattgctttcatatttcaggcggcgtcntcagacacctggactttttctattgctttggttgtcacaaaaaatgccaagtgtcatttaaggtcttgtgaaaagggggagaactattgattccatttatttaacttacggggttgagcttactgtacaggtt

SEQ ID NO: 131647 - DNA, 1123 bp, Zea mays
  Clone ID: MRT4577_51543C.1
gtgattcatgggccgatttcacaggaaacatcgagaacgacgacctaccctgtctgcggtctgcctgcaaccacacgcactggaagcatcgtgcgggtgcggcgcagcgagcgagaggagtggaggatgacggcgcccaagcctggcgggggagcgggcggcggcggcggggcccaggacggtgctcatgacgggggtgagcagggggctgggccgggccctggcgctcgagctggcgcgtcgcgggcacgcggtggtcggttgtggccgttccgccgagcagctccgctccctcgaggcagagatcacgtcaccgtcgcgccacttccttaccgttgccgatgtctagccagtggagctgattatcgtctcagactatggactagaacagtctgtgcatgagttgctggagcattctccacattgaagaactggtttccaccatattaaaaatggggagatgagagatctgacagcagtatgtccgagctggcaaaggctgttttggaaaagaagcaagttccagatattatagtaaacaatgctggtacaataaacaagaataacaagacatggaatgttccagtggaagattttgatatggtggttgatacaaatatcaaggggacagcaaatgtgcttcgtcattttgtaccacttatgatagcgaggagacatgggattataattaatttaacctctggttgctccatattgtgcttcaaagtgggcgattgagggcttgacacgctcgttggctaaagagctgcctcctggaattgcagccattgctcttagccctggtgtcgtgaatactgacatgcttacttcatgctttggaagttcagcagcgttatatcaaacaactgaaacatgggcacccaaggcagctacaatgatactaagcctttcactggacgataacggtgcctccttgactgtatgaagtggtgaaattttgtgctcaactgattactgatggggggtctgtatatttttgcgagattatggtgatgtaaaatagtagttataatgtgtgtgcactctgatgtccctagctgctgcctgaacgttattgtttagccttacctctatggcctatgcacatgtcttctttcaaaaa

SEQ ID NO: 131648 - DNA, 327 bp, Zea mays
  Clone ID: MRT4577_51544C.1
tcccacgcgtcctcccactcgtccgtccactctttctttaaaaaatatgcactggggactgggatcataaatataacacagagagtgtgtaagaagatgaacctgaggatacacgaacatacatgaacaatgaaccaacctataaaactaatacggaacacttttgtactggataatgaaattagctagcccatatacaattagaacattacaaattctatgaatgctacaaaattttaaactgtaaccatatcaaaaaaacttactacaatctgtatcttttaaaaatagaatagctaaaaacatttaagactaaacctactttga

SEQ ID NO: 131649 - DNA, 546 bp, Zea mays
  Clone ID: MRT4577_51545C.1
ggaacagcaaatgtgcttcgccattttgtaccacttatgatagagaagagacatgggatataatcaatctatcctctggttggggaagatctgctgctgcagaggttgctccatattgtgcttcgaagtgggcgattgagggcttgacacgctcgttagctaaagagctacctcctggattggcagccattgctcttagccctggtgttgtgaatactgacatgcttaattcatgctttggaagctctgccgcattatatcaaacaactgaaacatgggcacccaaggcagctacaatgatactaagcctttcactggacgataacggtgcttccttgactgtatgaagtcgtgaaattctgtgctcaactgattgctgatgggttctcttcatctcttgtagcctgatgtgtagatttttgcgagattatggtgatgtaaaatagtagtgataatgcgtgtctgcactctgatgtccctagctgctgtctgaacgttgttgtttagcattacctctatggcctattcatataaaaaaatatggtg

SEQ ID NO: 131650 - DNA, 163 bp, Zea mays
  Clone ID: MRT4577_51546C.1
ctttgatagctctgagaatgagcttgccatgctcgacctcgtacaagtgtttgttgaaacattggacatgtgcttcaagaatgtatgcgagcttgacatcgtatttaacttcaacaaggcagcagaaatggtgatgcagcttctgtgtccctctagatcgcga

SEQ ID NO: 131651 - DNA, 517 bp, Zea mays
  Clone ID: MRT4577_51547C.1
attacgtctatacaactcgccggcccaaatcgactcatcgaccacgcccgttgccaggctcccgtctccttgggtttcctctcaaacgggtctcctgaaacagttcaaccctcatatctgttccttctcatccgtattgattgggaaggagagcctcaaggtgagggatcacatctactcctggaaggcggcgtgggtctacgcgcatcacgcaggtgatttctttgaactgaaaatgtttctagcgttgagatttagttatcttcttggggcatggattgattatctagatataacaccagcaccatttgttcttggaaaaggctactcgcattgattcagcagtgggaagtgtcctgggatgacaccttagatccagcagtttcttacaaaattggtcaggttgtggatgctaaagttattcatctggactataataatagccgcatatttttgtcacttaaagatgtaaaggcaaggtttcacaagctgagggaatgaaggttgacagatccat

SEQ ID NO: 131652 - DNA, 196 bp, Zea mays
  Clone ID: MRT4577_51548C.1
gacccacgccgtccgcatctgctcataggcgtcgtcgagcccttccttaggccatctctatgccgcctctgcccgcaccagcagtctcccatcgagagcgcatgcctcaagagcggagagccaagaggcagagtagagctccccagagccttcctctctcccctctctatcctcagacgagcaagcctaggcaggg

SEQ ID NO: 131653 - DNA, 990 bp, Zea mays
  Clone ID: MRT4577_51549C.1
acgcgtccacccacgcgtccgcccacgcgtccggcatcttccctgtcgtggatccacatgaacaaggttggccctacccctgctctttttaaggctgaaatgccctggtcagcccgaagaggaaatctctcggagaaacaaagagtcttcaaaacggtgaaaggaggttcctttatagcttacttgatgcaatgcagtctctaacatcgcaagctgttgttattggtgtgagttgccgcttggtgtcactcttgattgatgtttcaaacaaaaaagatgtcattcttggttatgtagtagtgatcatgcaacaccatataaagcacatgtgtttcaggtgactctaactttaattattagctaactctaacttggctgctgcaactgagaaagggactatcgttaaggctctattcatgagcacgatgccaaaaaagagtcgatccaactgttgatggtagacaaaagctgaggtctgttcgaagctgaacttggtgtgcagggaggtgtcgagtagatacatgtctcagatgaagaatacaaagactgccaagaagggtgaggagaccacggtggccaagatcaaagacataacatgcagtcgaggtctgtttgaagctgaacttggcgtgccttgaggtgccgagcagatacatgtctcaaccaaagaatacaaagactgccaagaagggtgaagagaccacaatggccaagatcaaagacataacatgcagtcccataacgaaaatgataacaaacgaccttcagtggacatatcaaggcttcctagataacaaatgagcttccgtggacatacttctcaaggcgtctgtgttcttggagtgtgctatggagttgcagaaagtttgtaatactcatacaagagaccctgtttgagacatttggtagagttgctctaacactcatattttgtcaaatattttgtacgccgttgcaacgcacgggcacaaacctagtgattactatagc

SEQ ID NO: 131654 - DNA, 1611 bp, Zea mays
  Clone ID: MRT4577_5154C.1
gccggccgggccgggctagcacgggccgcgcgactgccggaggcgatggaggcgccggcaccttggagagtgctcgagttctacagcggcatcggaggcctgaggtactcgctgatggcgtcgggcgtgcggacggaggtggtggaagccttcgacatcaacgacgtcgccaatgacgtctatgagcacaacttcggccaccgcccctgccaggggaacattcaaacgctcactgctagtgacttagacaaatacaaggcacatgcatggcttctttctcctccatgccagccatacacacgacaaggacttcagaagcattcagctgatgctcgggcattttcgttcatcaagattcttaacctcatgcaagacatgagctatcctccacaaatgttatttgtggaaaacgtagttggatttgaggtgtctgatacacatgaccagttgctggaggtcctttcaagtctcaattttaacacgcaagaattcatcctaagccccttacagtttggtgtcccatattctagacctcgctacttctgtttggcgaaacgtgaacctgtgcggtttcgacatgcattcgtcaacaataagttgctccagacacctatgtgcctgagcctgacactgagcagtacatcacagggtagcgaccaccagactgaagaagagctagagccagtttgtaagccaataaaagatttccttgtcaaggaggctgatggaggcactccagatgagacagttttgcaggattatatggtcccagtaaacttgattgagcggtggggcaatgctatggatattgtataccctgaatttaagcggtgctgctgtttcactaaaagctactatcgttatgtgaaggggacaggctctttgttggctacatctaaaaacctcaatgttcctgaagagaagctccaaatttcttccctgaaggagttgggcctacgatttttcacccctcgtgaggttgccaatttccattccttcccttcaaatttctgcttcccggatcacataagccttaggcaacagtatgctatgctgggtaacagtctgagtatagcagttgtgggtcctttgctgcattatctctttgctgaggcctgagtcatagagaagtccagtcagccctggtgacattagcatggcacaaacactgtggctgcgatctgccaaaatttcttcatacgtgatttaagcaaggttttttggggactacagtttggccatttgatgagcacaccgtgtaggcacaacctcacaatgtatcaacaaaagtgtaccatacagtagagaagctgtttctgcgcatacttcctccccctcatgcctatgctgtcatggtgaatgaattttggaattgtgatccgttgatgtgtgcatggatgaggctgtcgtaacgattgttgatctgagctttaagtaacttggaacctacttactccgagcaattccaattctattcttagctaacccatttaaagtttgacaatatttatgatgtaaaatatgtatagcaagtataaaatatactcaatgaagaatctatatcataaatattgacactttttttatataaacatcgtgaagctctaaaaa

SEQ ID NO: 131655 - DNA, 613 bp, Zea mays
  unsure (1)..(613): unsure at all n locations
  Clone ID: MRT4577_51550C.1
ggtacccccgggtccggccgggnagctatcccttggttgccgcagcctccaaagccactcccaaacccccgcttccagaaccttctcgaagctccccgccgcctcctccactcgcaccgatggcgaaggaaccaatgcgcgtgctcgtcactggcgccgcaggacaaattggatatgccctggttcccatgattgctaggggtgttatgcttggtgcagaccagcctggtattctgcacatgcttgacatttcgccagcagctgaagcccttaatgggggtaagaaggaggtgggtgatgctgcggttccttttctgaagggaggtggtggtaccaccgaaggtggggaagcccgcactgggggcaaagggggccgcatgggtgggggaattcccaagaagggaggaatgggaagggaagaaggtattttcaaaaaaggtttaatttaccaaatccaagcatttggccttggaggccaagccggttcccaccggaagggtttggggggtggccaccccacaaacacccatggttttaatttggaaggaattggttcctttatttccaaaaagaaacgtaatttgcttgacccgcttgaacaccacaagggttt

SEQ ID NO: 131656 - DNA, 329 bp, Zea mays
  Clone ID: MRT4577_51551C.1
aaacaccctggaatacttcatctcaagaattacagataatggtgttgtccgtccgtcgggtaaaaaacttttaacaagatttttgttgaatcccaacgggaacggtttttgcttggttacaaacaggctttacaggctgttgggggggcttgttgacaaagagggaccccttaggggcggccatggaggggctgtagccggcgaccttggggaacctgggcaccctcctgaggtcaaccttggtgccctccttgatcgtgattacaatttcgccccactttcccccgaaccggggggggacccccccggtcttgttggactattttggg

SEQ ID NO: 131657 - DNA, 137 bp, Zea mays
  Clone ID: MRT4577_51552C.1
gcgcagacgcgctatgttgccatgaactttgctatgttgaaatgaacgcttgcatgggatgagtgatagctgctagaggggctgaccacacacaaactatatctgcttaatcgttaaacatgcgcgcactgtctaat

SEQ ID NO: 131658 - DNA, 339 bp, Zea mays
  Clone ID: MRT4577_51553C.1
gactaccagcaaccactgctgcatcgggcgttatcgatggacagtgctaaaggcgggcatgctgttccatgactgtacctaaaacgcacccatgctacaatatacctaggcatcactatatatatacgttcagtaaatgtattgcatgtctcggactgccggtgtctccgtcgtttaattctacctactgtatagagcgagtgacatatctcccgccactgcctacttatagctgtgagtaacaagcctgcatatgtaatactgaactatctgtcatgcatacgcaagaggtgcaacactgtaataaatgtaaaggaacccatcgactccgaaaaaaca

SEQ ID NO: 131659 - DNA, 313 bp, Zea mays
  Clone ID: MRT4577_51554C.1
ccgccagggctggattcgcccttaacgggtaacaacgcagagaccttttttttttttcttttttttttttttttttttttttttttattattttgcaattctaaaggaacaagtgatggtttaataaattccaggaacaacaagacataaaaacacttcggaccaactgatggatctcgtgggggggcacaagtcctttgatacagtcacacagaagtgagaactaggttaacagctaagactattaccgatccaagagatggatttgtcgccacaaactgagcgacgattatttaactactgggactaagcc

SEQ ID NO: 131660 - DNA, 218 bp, Zea mays
  Clone ID: MRT4577_51555C.1
accagcaacaagctttattctatatgagctcctataaccctagtatcactcatctgagtcaaatatttcatgtccgctccgagtataaaattgcttgtcgacagcggctattagctgccagcgatacacctgtgccgaggaaaaaatcaaagacctagcagatatcaagaggttcatattcatcaaatcacgcgtcaggaactatttccgagcgaaat

SEQ ID NO: 131661 - DNA, 1107 bp, Zea mays
  Clone ID: MRT4577_51556C.1
atctgaccgtgatagcagtcgtgactgctggagaatgtctgatggaaataatttcagagttcgaagcaagaattttgtatatgataaaagcaagattcctgcaggaaagcctcttatggagcttgtcgctgttgactggtttaaagatgcaaagcgaatggatcatgttgctagaagaaaaggctgtgcagttcaagtagcggctgagaaggggctctttgcattggctataaatctacaagttcctggcactacagtatggttttctactttgttacgaagaaactgataccaaactccttattgcaacgctttgtggatggtgatgacgaatttcggaatagtaggttcaagttgataccatcagttcctaagggctcatggattgttcgacaaagtgttggcagcactccttgtctattaggaaaagctgttgacattacctatatacgtggctcaaattgcggggaaatagatgtggatattggctcgtctacagtggcgaatggagtcttggggcttgtgtgcggtgccataacgacactagttgtcgatatggctttccttgtccaggctaatacatacgacgagttcccagaaaggctgattggggcagttcgtatgtcgcatattgagctgtcatctgcaatagttcccgtgctcgaggattaatcataatacgcgatactgcatgcattgggcccgacaggattatgccggtctgctgagatcactgacagtgtacacaatgtagtaggaaacatagttctcgacttctcgtgccatcttcctgaggacctttctatgcgatcatgcatgcattgcgtatttagacgtgaactatgtaggctttagaatgggttgtgttggggaaaagaaaggagagattagaagaggtaggaatagaggcactagtgacccaaactgaggtttcaataaatggtacgtacatgcttaacttgagagaccaccccattcttcattgatagtatttcccttgtgtgtaatgttgtgacagccgtatccctgatatgtatttatgtaactcaaaagtgtttattggaatcttttgactactataaggttggttggtgccgcgtttctcgc

SEQ ID NO: 131662 - DNA, 845 bp, Zea mays
  unsure (1)..(845): unsure at all n locations
  Clone ID: MRT4577_51557C.1
cattgggtacctcgaggccggccgggagccgctcccaccctagccacgcaggaactcacagccccgccgctcctcgcctccatcccaccctcttgttccccactttgcgttgtgccacgacgctccgggcatgcatggaggccgcaatagatccaggagatcgcttgggggcggcgggcaggcaaaggaggtcactcgctgggtttgctagcgtgggggacactagtgcgacagcttgtacaaggcgacgaggctgcacggcgtgctcctggaggtggcgcatgtgcccttcctcaaggaccgctatgcactgtgcctgcagctcgagtgcatccagttcggcatcattcgctcctgctccgacctcgtcacgggcaaggcgctggcctgcaagtccatcgccaaggttcgcctcgtgtccgccgccgacatgcatggggtcaagctcaagatcgaggtcatgacgctccttggtggccagcccaacatcgtcgcctcaaagccgtgtacgaggaccgcgattccgtgcacctcatcatggagctctgcgctggtggggagctcttccatcgcctgcaggagcgcgactgcttctccgagcgagagagagtcctcaatggagaggcaaaatacgacaggaaaattgtgaccatatctagcattgatggaaaagataataagttatgctaggccagagcaccaactagaaaaggcagtgatgcatctcctacatcaaggaacctgttgacacatcctattttgacccatgttcacgaggaggcaagtggctgaccctgtaacagtttagtttgtggataanaaactggcactactggcatattcta

SEQ ID NO: 131663 - DNA, 874 bp, Zea mays
  Clone ID: MRT4577_51558C.1
cctcctccgtctctgcgccacccgctccctgggcggaagccctcaggaagccacgcgcacaccgcaactggtcgacgacgacttcctcgtctctctcctccggcctcgagtcgcctccgatccgtccgagaaaacaaaacaaaccgaaagaagaaaggcgacgaggaagagaaggctctccgcgagatctgggggagctcccattctcaagatgcacgacttctgcttcaccatcccctacgggttcgccgtgctggccggcggcgtgctgggctacctccgccgcggcagcaccgcctccctggcggggggcgccggcgccggcgcgctgctcctcctcgcgggcttcgtcagcctgaaggccttcgagaagagacgcaactcctacgtcgccctcgcgctcgagacgctttgtgcattagccttaactttcgttatggggcaaagattcctcgagacttcgaagattatgccagctggtgtcgttgctggcctcagtgctgtgatgtccgcgttttatctgttcaaaattgcaagcggcggcaaccacatcccaccaaagaaagagtaaactggactctaacttgtaaagtatgttcgattgaactcggaagactacgagccactgcgttatctagttgcatggtaacttcaggtactagcatcttgttctccatttgtggtgtggctagagtgtaccatggtttgtgaacattgtaaaagaaataagtatgcggttcacggaaatgaatatgaacttccctgtggcggcaggcgcgaaagaaaaaaaaggaaaagcggccaaaaatatttaaaagattaagattctttatttaaactcttataatttaaataataatattaataagggggg

SEQ ID NO: 131664 - DNA, 266 bp, Zea mays
  Clone ID: MRT4577_51559C.1
gagctctttagtcggcggtcgcccttctttactatgccgttctttgaggctgctcggacgttttaaggcgttcgatgagcgtactgggccgcatactcatgccacaggcgaacggtgcgactatcatctcctcctcacggatgcctatttgaaagctcgaaagaagaataattggacgatcggcaaatgcttcaactgtggcaaccgcggtcactttgcacaggactgccccaagccgaagaaggaagaggcactattcgacaatg

SEQ ID NO: 131665 - DNA, 417 bp, Zea mays
  Clone ID: MRT4577_5155C.1
gggggggggggggggtggttttaagaggaaaaaaggggcagcttgtaaaggtggttcaaaggaaagacaagggaaacaagacctacataggggggaaaaaaggggatgcacagaaaaaattgattattaaggggccgaggaggagaataaagggaccgaaagttttaggaagtggggttttttgagggggaaaaaaaaagaaaaaaagatctgaccattcctaaaaaaaggagggcaggggggggatttcattaaaaaacccgggggggaggttatccccaacggggggttttatggggggggggttttagccatagaaaaaacccttgggggggtttgggaaacaccctgaaacacctgcgtgggggggatattatgaaaaggagcccttgatggggggggccctggggggggggg

SEQ ID NO: 131666 - DNA, 324 bp, Zea mays
  Clone ID: MRT4577_51560C.1
tctgatgaaacacgcgcaattctggacctcaaggtccagtatcggacaaggagagggcggccatatgtccctggaaactatggcggaaggacctgttttggcagatagtatgcgcagagactattgaacaaatggcatattgttgatgtggttcgagtgccattgcagcacaagatctccggccgggtgcttgaatgggcttggcacacctatctgtgcaagccgtcaagctacaacaagctgctgtcgtgagggtcttacaacatccaattaaacaatcgcagctacaattcttggctcatgtgaccatgcctaccatctctt

SEQ ID NO: 131667 - DNA, 449 bp, Zea mays
  unsure (1)..(449): unsure at all n locations
  Clone ID: MRT4577_51561C.1
ctcgaggccggccgggttcttattacagagatttgaatttgttcnaaaaaaataaaaaaaaaaaaaaaaaaaaaaaaaaaaaaaaaaaaaaaaaaaaaaaaaaaaaaaaaaaaaaaaaaaaaaaaaaaaaaaaaaaaaaaaaaaaaaaaaaaaaaaaaaaaaaaaaaaaaaaaggggggagggggttcctttttccccaacaaagtccccgctttttccccccggggtttaaggaattcattctttcccctcccaaaaacccccccggggaacccccggggggtacccccccggaacccgggttattctcctcggggcccaggaattttttaattggcggggtttttttggtccccacacaatttaagggaaaaaaattggctcacccggcgggcggggttgtgggggaaaggaataaatcatcgggaaaaaggaccgctttttttttc

SEQ ID NO: 131668 - DNA, 404 bp, Zea mays
  Clone ID: MRT4577_51562C.1
tcgggcccactatatattctctcgtttggacatgcattcggaagtgcagcctttaaaaaaaaaaaaaaaaaaaaaaaaaaaaaaaaaaaaaaaaaaaaaaaaaaaaaaaaaaaaaaaaaaaaaaaaaaaaaaaaaaaaaaaaaaaaaaaaaaaaaaaaaaaaaaaaaaaaaaaaaaaaaaaaaaaaaagggggggccggggacccattcccggccaaggccccgttgggaaaaaaaggttggcaacccccagtgggggacggattaaagccgggtccggaaccagtttggggacaaaacaaaaacgggttttgtccaccccccccccggggaagaaaaaaacccaacggtttggggggggattgttcccaaaaaaaccgggttcgggaggggccctttttcttt

SEQ ID NO: 131669 - DNA, 526 bp, Zea mays
  unsure (1)..(526): unsure at all n locations
  Clone ID: MRT4577_51563C.1
cacataatcaaaagatttacaaaacaaggctggcacaagtagctgttgcctatgaaccagcttgggcctattgtgaactggacaaagtttctcacccctagctcaggactcacgcaagtacccgccttcatggagggattgaactcaagaccaatgccagacctgaggttgctacaatctatacgatcatctactgaagctatatgactggtgtaaactgaaaagagctagcagcacagcctgatgtggatggaggtcttgtgggtggaccttatttgaagcctgtgttaattgacatgatcaacgcacacaacggggaagtatggttaacatgctcatctgaatacgaacatactttttttatgatcaactgtgctatgtaagctagttgatttcgtgcacgagcagacactgtttttcctggcctcaacttgatatttgagctagctaataatgaacacctgtggacatatcaataatggccgcttatgtcgacgnagaaggngactacaactacatccagttc

SEQ ID NO: 131670 - DNA, 421 bp, Zea mays
  Clone ID: MRT4577_51564C.1
ggagggctaaaccgacggtttaaactttgaaaagttcccatctggggaaccccaaaaaaaattttccttgtaactgaagcccccaaacctggggtttttagctgatctaccacccattcaaattccaaacggttttgccggggtaaccatgggggctgcaaagggcaagttggctactgttgccttaaacccaaaacgtccccagtttgccctcaaaaacccggcccaggaggtaaacttggataaccctggggggaatcagcccccttgactcaaaaagccccttatggcccgcccccctgctcatgttctcgtccaatattgcttgacggtcaatttgggcctctacccagggctgtccaaactgaatattggaaagggcctcatccaacttgcctttttgctcaaaaaggggggcaaa

SEQ ID NO: 131671 - DNA, 1507 bp, Zea mays
  Clone ID: MRT4577_51565C.1
taataacaaggtacgcaacgacagcattaagttcaatgggaagtaaagagatccaaggtacatcgtcatacaccacatacaaacttttcacttgcttgctcatcagaactaccagggcctaccgcttcacttctgaaaatatgtgattgcctgtccagcaaagttgaagggcagctggctttgcacaaagtaaggtggcaaaataagtctcagtctctcctggcgcatatttcaccaagaacaccggctacaatatctggattacaaaacgctagaacagtaaaaaggtatgcatcatatgcacaagacgactgccaaattactgtacagataacctgcaacttttccttgatgcaaggccaaactatgtaatcccaacaattttgtgtctacatagaagtcggctgcaagtcaggaaaatccaagtttcacggcagcctgaggtctccagatgggtcacagttgggcattctgcttctttaattcctcgagttcaatcaaggcagcgtcatgctcagtcagtgttcagggcagcggtatattcgagtagtctccatacgaatattgtcttcagccacacctgagttgatgattgtgagattttgtccttacccaatccggttgcgggacgagatcaggcattgtatttccttgtgggggaccctctgaagcaagagctactggcgcaggggcttctggtacaggaatctccggtgcgcgagtcttcggattaggaacaacaggaataaatggatctggcgcccatggctcatcatcgataacaatgagctcctctgaatctttctcatcttctttcggctcgatatcttcaatatcctcatcagccgggtcctgattatctgccaaaatatcatcatcggacgcgtccgtcccttccacggagacgtcctcatccgagaggtcatacttagagtggttttcgtcttgaatcatacttagttcagcaggcagctcagttttaacctcctattgtagctcagccacccagttccagttagccgggccttcaggttgcgcatcaaatgtaagttcatcgtctgactcgagaagtcaatcgtcatatccctcgaagtcatcctcagatcgggcgtgcgagggtcttgcttctaggttgtgggagggtcctacctctaatgacgatggtggaaacactccggtgctggaaagaggaaacactccggtgctgatacagatgttccctcaagtgctcttctggacagtcaaacgggtgcatgccatcatagaagaaatatgcttgttctgtgaaaaatcacacaacaagcagatcacctttttgtctttggatgataaaccaaactaatttgaccattttatccagcaaccagtattaatctggaaccagtcttgacccagcttgaccaatggaagttcattggaaatgttgccacatttatcgcactgcaaaacatgtggcagactcctccatttacaagaacctatggaaggatgctttacaagcctccaa

SEQ ID NO: 131672 - DNA, 556 bp, Zea mays
  unsure (1)..(556): unsure at all n locations
  Clone ID: MRT4577_51566C.1
gttgaagaaggctccctttacttttttatgatcacacgccatctcactaacacagggcggtcagactagttcaaagcgtgcgttattgcaagaacgtataccatgtaagtgcatcgagacaacatctataaacacacgtacacagatatggtctctcataggagagccatggccgcctgtcgcacatgcaggtaccattctttattcccacgtcatccctaccaaggagcataaacacttggcggatgggtccctggaaactggatagcgcaaatcacggggactcgtactgtacgcgggaagcgtacactaccattttattattacctctgggccacgccatgcacgtaatgcgatcgtgacaccaccttaaggattgggccggccaccgggtcccagccacggccgcggaggcagtcaaccacgcactgctgctgattgtctgtacctgagaggtgctgctggcccttcttctcgcaccggtcgccgtgggtggcaatcctgtcagaggcggcacaagcgccgnacatctcctgagccccgtaccgtttcatgc

SEQ ID NO: 131673 - DNA, 442 bp, Zea mays
  Clone ID: MRT4577_51567C.1
gacatattgtgttgaacaatataagcatgggagaacaaagatctgttatatgaagcggccataaatatttcctaagatatggctgagacaaggtaaaactcacagctagttaacttgcgctccaggaggggcttaataaactaactctttgaccgagctgtcggctaactatgcacggcttgttctcaaagaactgggtggaaacctcaaacgatatcttcccttgtcttaagacagccaatttttgcacaaaaggtagacacacaccgagtgggatccacctgatccacatttgtgaccctctacatcttaaccatgacagactgttccatccataaaacaatttgccttgcacattgccctaaagaataatggatgtcctccaacattctgcctgcgagtatctgaccaagtagtatctccatgtaaggtcagatctaag

SEQ ID NO: 131674 - DNA, 443 bp, Zea mays
  unsure (1)..(443): unsure at all n locations
  Clone ID: MRT4577_51568C.1
agcggcgccctttttgtttttttaacaggaaagatgtatcttanatccggagccatttaaaaaattgcccgttaccgccccatcttacatccccaacattaacaggagagggtggatcttatccagaggccaccggactcctcgtcctcgtcgaggtcacaggtgtaaatggtgtacagggaccatattaggccaaaaacccccaggaggatccaccccaacaggttgttgctgagcccgaggctcagccccgtgccctccgtggacatgcgctcgtacacaagcgccagcgcgggccccgccgactcggacaccgtgcccgctgctgcgagcatcgacacgcctgcacccttggtgctgactggggccacttacttgtcgtaactgtaccgaaccctatcgctccttgcccttagcgcaagcagccctataacatttggcct

SEQ ID NO: 131675 - DNA, 593 bp, Zea mays
  Clone ID: MRT4577_51569C.1
ggggaaaaaaccatttaaaacccacttacccagggtttttgtcaaggggggcccctggctgacctttgaaggcccaccctttttttttaaaaaccctttccccaaaaatccccccaaaaccaacccccttttttaaaggggggaacccgggagaaatccccaattaaattccccctatcccaaattaaaaaaacctttttaatcattggggggccgcccccggccccccgaaggtttttaaaaatggaaagggggccccttggggggttacttttaaacccaaaggcgagggctgggccctcactggcctttgccagaaaacttttttttgggcttttgcccccataagggggcccaaagtttgtttaagaacaaaacccttttggtttaaactaaactggcattcccctgaccttggaaaattttggtcctaaaaaaggaggcaacttgtttaaacctaaaaaaaaaaaaactttgtttttgatcggaacccacctgcttccagtttttttccaaaccttttaagggcccataagctcccccatttaatccttttttttccacttccctggggccaaataaaggtgggaaaa

SEQ ID NO: 131676 - DNA, 613 bp, Zea mays
  unsure (1)..(613): unsure at all n locations
  Clone ID: MRT4577_5156C.1
cgccctaatcctgtcttttgcatacacangccgctacgcccccggnatccaacnncctacccccctgccgnncctcctcgccggcgcccgcctctaccccnngcctcactccccantcgatcannagttggttaattaacacgttnggtggtnnaaaaaaaaaaaaaaaaaaaaaaaaaaaaaaaaaaaaaaaaaaaaaaaaaaaaaaaaggacaaaagaagggagaggatccaagaagtagcaaagcgttacatgcgagggcatagcaacgtcaatagtgtttccatagtttcactctaagtggacttcagttggccagccgtctttaaatgggtaaaaccttgggaaaaccctagcttaacccgcttgaatcgcattcccctttatccagtttgcgttatctggagtaggcccgaacagaccgccattgataacctttgctcaccctggttggtaattggggcccaccgtgaagcgccccgtaacgcgccattaaccggggggttactcgtagtgtcacccatacactcgccatcactttacagccccctactagcggtttctttccttcttttcccttcatttttggcggctttccccggcttgccctaa

SEQ ID NO: 131677 - DNA, 1101 bp, Zea mays
  Clone ID: MRT4577_51570C.1
aattcggcacgagggtcgcatccgcctcaacgcgattctgcatctgctcgcgtcgcatccgcctcaacgccgcccagcgacctggatcctggcctctcgccttcgcgttcgcaccagccggtccccgcgccacgcttcggccgctggtcaccagctccgtcgctgcctcaacaactttatccggtcattcgagggcgcaacatcattccattcgacttccgctagcgccaagacctacacctcggcggttgccacgccggtgaagaagccatactcactcgccacgatcgcaggtgaacgtcggattactgccatcaaagcgacaaaagatgcacaggctgggaacatactttcctgttgtaattagtacaattccactattcaaaagaacaattggagggtattgccatgccatattctcaggagaagttgccgatctattggtcgtttcaaatgaggaatatgatgttcttgagctgaaatggaataatcatgacgaatggatgattggagtttgcagatgatagaactatgcgagctttgattgcatcattcacaactgcagatgaagttcagttcccaaaggattcaggtttgacaaagtcatctacctactaatgatttaattacttcattatagccaggtaacatcagtctgcttaaacgattttttgctacctcatatttagttggtaaagaatcctataggcgcactagcagtttcagtgaatttttaactattttctccacatgtttgtgctatggacttcattactcttacgagtgcatgttgcttttgcaacgcataagatgttgacttaaatccgaaactatgtggtatgtgaatactaggttggcacacttattatgtatttaaatttatattggctgtactgtttacatacaacttcatattctacacttagtgtatttttagcctctatctgtgaactatatcatgtattcagctgtctctctttgggaggaggacgatgagcaggaagcggaagatgatagtggggcgtcggccgccgaccgtctaggccaacaggataagctaggggtagaagggcaagggcaggccgacgtgctacatgatga

SEQ ID NO: 131678 - DNA, 396 bp, Zea mays
  Clone ID: MRT4577_51571C.1
aaaaacagaaaaaaaccgcttcttgtttatatcaccacaaggtttttgtccaacaattggggagaggaaacataccctgtctttataaacaccaaacatgggatggccacccctgccagcaaatagggccccccagttacaaggcccacattaacgcccaaattaagcccggggattttaagttttacaggccagtttacaatcatacaacaccggttttatggcaaaaaaaaccgttggggctgatataggagggttcgttatcggaaccgcttcccatatttaaggctgaaacgggttcgcgcagtttgctgctgccctgggagggccccaagctgtaatagtattaaacgagccctttccagccccccgggcacaaaaaaccatcggggggac

SEQ ID NO: 131679 - DNA, 565 bp, Zea mays
  Clone ID: MRT4577_51572C.1
cttctgatacaagggggggtattacacacacgaggggggggagcggcacacgcatggcccattatgcccgcctacagtagcagacaagcgcaccacctgcggcgacacccagacaccagcggctaaccgcgaggggggggggcgccccgcaaacagaccctgcccaaggggggaaggaaacaccaccaagcgaaacagagccaactctacggcgcaggcagggcactcaacggaagggcaggcgcccacaggcaatacgtacaaaggttgatgagacgagctggtacgcgcaaggtcccacagactgcgggcctggagctaggggaaaccaccaaccatgcatgcctgaacacgacgacgggcaacccttacagtgagccccactctacgtacaacgcttggcggcgcgcagggcatagctggcgtgctccgacacagagccgagggggggcgagccgagcataccgacgaacccactgaagcccggggagccgccaaccggtcaggacgtgctcccgctgccgcccaggctgaaccggggtaggctgatgccgagggggggcct

SEQ ID NO: 131680 - DNA, 244 bp, Zea mays
  Clone ID: MRT4577_51574C.1
ccacgcgtaccgctaccatattaaggagtgcacttcatgcaacaagcctctgttcatgtttgatgaaagaagcaagacgggaaaagctgtgcttgatgctctttgcacatattacccaagcattggcggtatattgcttgccatgggcaacgtgggcctatttatccattcccttcatggccctgtaataagtacttattgtgatcggaaacatggtttgctgccggagatagcacaaaatcta

SEQ ID NO: 131681 - DNA, 279 bp, Zea mays
  unsure (1)..(279): unsure at all n locations
  Clone ID: MRT4577_51575C.1
ctcnancngccttctnctnttcctcatcnggggcaggaggagcnacagagggaggagncgcacgncgctatgantcntcaatacngtatngtctgccccaacagatttttagtatattagctgctgcttctcaagnantattcttattagtagatctantctatnaattcgctggnntcgtactgntagtagatatggtngatatncccattannatnntattcnacgatgatgnngccgcgantagtgtgtgatcancgccgccatgaanaccggctt

SEQ ID NO: 131682 - DNA, 990 bp, Zea mays
  Clone ID: MRT4577_51576C.1
ccaacgccgccggagtctgtcgccaccgtcgctgctctcccgccttcaccgcgcccaactctcctccttgcctcccctgcgcgcttcagccgcttcactccccatcgttttcgcctggccaggatctactgggaccatggatcaagaaaaaaaaactagaagtatctaataccagccatacttacaagcatcattgtagcgttggagttgacgtccacgagatcttttttaagaggagcagattgcgggttgttctgtcatacattggcattattttccttcttgtgaatgcctgccaaccattgctgacaaaggagagcctatctcttggatctgtttggaatattacgtttgctgttctggtcgccaaatgtttgcaatacaaacctgtgaagagagaatcagtagtgataatgccagcttttggagttcagctagaaatacatttttggagattctcaagccaatgataaatgagtgcgtgacaccggtgacctgttactggagcttggcgctgcttctgcgtgatgaagaggaactcctgctcgttttccagagatctcgtcctcctgtcaaaatgttggttccaatatggaaagctctctgcacgttgacaaactctcaacacccaagcccttctcaaattcctaaccatgacccttgaggaacatgagtcagctggggcgttgtgtagatgtacgtatcatcagaagaggcacctgcagttgagccagattcagataggatagtaactgttgatgccagtgctaggggcatttgattgttagggagtgatttcggctggaagtgtatacggataaacactagtaatttgtgacactgaatactctcctttacttgcatgcttcattttgttggatatctgaatgaggtgccgaatataagcaaattcaagtgaaactttggtatgtacgtaaagatgcaaacttttgttaaacaaaaaaaaaaaaagagggcggccgccgacta

SEQ ID NO: 131683 - DNA, 341 bp, Zea mays
  Clone ID: MRT4577_51577C.1
tcgcggtgcaagtgcaagaacaagatacaccttccttaggttaactagccacctaattaccagctgccagccatcttctgtcagcacactgcagtgttcgctcgtttctgtcgggaagagagagaagaggcagcgacgatggatgagcctccgccacagagcgacgatgaccggaagctgtcaaggcgctcgacgcccagatcgcctcgctcagtgatgagatcgtcaagaaggtgctcccatccgcgtgatgaaaccaaaccggccctgccttatcctatgactatagttacatgaacatcataaattaatgataattttgaagaaattggccgatgacc

SEQ ID NO: 131684 - DNA, 295 bp, Zea mays
  Clone ID: MRT4577_51578C.1
cgggcgggacccggcccgaatttccgggttttcccacaccttatggaagccctaaaaaggccagggcatgcgtgggtactttttagaaaactggtggggacttcctcggggaggttactggacgcgcaaatgttatatgccatcaacaccaccgacaatgttaccgacgcaagatcaaagataagcatttgaaggccctcgccccagattatgtgggaacaaaacctggcatgcttcatgctcaaaatgctccattctttgcggccaaactgcaaatcacaacacttgcatgtgt

SEQ ID NO: 131685 - DNA, 1229 bp, Zea mays
  Clone ID: MRT4577_51579C.1
cggacgcgtgggagagaattccctccgaagattgaagagatttaaatcccttcctagttatttttgactaagagaggatttaatgtcctctaatctctttctggattggtcacgggaatgggggatcggcgccattgccgtctctaccgaaaatccagacaaagcacgagctacgcacgcccccgctgcctcctttctgccgtcccaacgccgccggagtctgtcgccaccgtcgctgctctcccgccttcaccgcgcccaactctcctccttgcctcccctgcgcgcttcagccgcttcactccccatcgttttcgcctggccaggatctactgggaccatggatcaagaaaaaaaactagaagtatctaataccagccatacttacaagcatcattgtagcgttggagttgacgtccacgagatcttttttaagaggagcagattgcgggttgttctgtcatacattggcattattttccttcttgtgaatgcctgccaaccattgctgacaaaggagagcctatctcttggatctgtttggaatattacgtttgctgttctggtcgccaaatgtttgcaatacaaacctgtgaagagagaatcagtagtgataatgccagcttttggagttcagctagaaatacatttttggagtggaagagttgatcatcgttttgtgcccattggcaagattctcaagccaatgataaatgagtgcgtgacaccggtgacctgttactggagcttggcgctgcttctgcgtgatgaagaggaacttctgctcgttttccagagatctcgtcctcctgtcaaaatgttggttccaatatggaaagctctctgcacgttgacaaactctcaacacccaagcccttctcaaattcctaaccatgacccttgaggaacatgagttagctggggcgttgtgtagatgtacgtatcatcagaagaggcacctgcagttgagccagattcagataggaactgttgatgccaccataggacgtaaccagtgctaggggcattgattgttagggagtgatttcggctggaagtgtatacggataaacactagcaatttgtgacactgaatactctcctttacttgcatgcttcattttgttggatatctgaatgaggtgctgaatataagcaaatttaagtgaaactttggtatgtacgtaaagatgcaaacttttgttaaacaatatcttgtctcgtgtgcc

SEQ ID NO: 131686 - DNA, 511 bp, Zea mays
  unsure (1)..(511): unsure at all n locations
  Clone ID: MRT4577_5157C.1
cggtctagaattcncgggccgacccacgcgtcagctcactgcagtcacacatcacacatcccatcttctgacatccccccatctctctgcaaaactcgcacaaccggtcgccaaactgcggtatccacatctctccggctccaacatggacttctccgacatctttcgcatggtgaacttcgccgtgcgccgccttcattgttctcggcggtgttgcgaaattgttccctttcaacgatttctcagcacatcattcttggtgtctacctgatcatcttcggcgctggcactgctcttctcgaattccagatccctccacagatcgctcgttatgcctcgttcatgttctctttcctcggccgcggtatcttttacgtttttatcggttgcgtaactgtcggctctggctggtaccgctacatcccaggaaccattgttggcatcatcggactggcatacatcgttctggagtacattccatcgatcgagcctccagcaaacatgcgcgacg

SEQ ID NO: 131687 - DNA, 1153 bp, Zea mays
  Clone ID: MRT4577_51580C.1
atcattctgaaaatgaagtcgtctttgggaattggcattcagatattcatctcagtctgccggtaccactaagtggggtaaatggggcgattcaccacctggattttttgaactatgttctgccattccttcagtgcaaagaggaatctgactggtgtgccgagtcaagtattgatttttcatttttgtccaatccacgcacataatcatccatcttcttgtatagaccgtgcactatgtttacggccaattggttctaggctatgaaggcacattattcctttgttcactgcagctaacaatttagctcattaaacttgtggccctgccgatcataattaatagtagctttgtatgttagcaagccctgatggtgggtgtctgcgatttattgatcttgtgtactaggtgttccaataatatttgtggtttgtctgtgttctttttgccagtgtaaccttttcattcagcttaacttcgactgaatttctgaatgtcttgtttcagggttcattgtattatatcagcattaagattgaatgctgtctatgttccagataccatactttgacgataacattggttttcctacaggagttcaagatcgcagtcctgcccattctgccgtgacaacctgaagaagacctgtcctagtgacctgtggatctatgttgaggaccaagatgtggtcgacatggagacggtgtcgagcgagaacctcagacggctgttcatgtacataagcaagctgcctctgattgtcccagacgtcatcttcagcgtgtatgattcccaaatcaaatgacttccgacgcgaccttcccgacgaccttcagccagtgcccagctccagtaaatcttattaccccatgtcctccattttcatgctttgctcaagcttttggcagtgcctgaactgatttggaaccgcaagccttccggtggtgctttagaaagttgtttagtgcctgcatgcatccttaatcatatgcagccactctgtacatatctgacttcgctcagttaataggggactgtgcttgccccaaatggaggcagggccgtttgtgtctttctcatgtttccattagcgaagcaacgcaaagttctgggcattggaaggtttctgctgcaatgttaggatgctctctat

SEQ ID NO: 131688 - DNA, 1093 bp, Zea mays
  Clone ID: MRT4577_51581C.1
aacacaaagccaggcgcggcgcagccagagtaagcagagagttgcactaccgtgcttcttcagttcttcttcctagtatgcactcgcttgtgaggcgtggcaatggctacggctacggctatggtggttacggcagcagcaatccccatatgaactaccaccgccaaaacaccgagtccgtgaccaccgtcgtcacggagatgaaccggatggccgtcgacgacaagccctgctacggcggcggcgtgcagaagcaggcctgcaaggtggaggcgttccaggagcacgacgaagcgtacaagggcgccgtggccgtgcagcagaagcactcctccttcaaggaggacaaggaggaggtgcgcggtgctgctgccgccgtcagaagctggcacgacgagttatacaaggaggaggaggaggagaagcgcgtcgtcgacacggagtacggtgcccgctaccataaagatgcgtacgggtaccggcggcggcgccaccgccggtggaaaagtgaagaagagcggctaccagtacgaggaggcgtacgctggaactggcgcgggaggatacggcgctcactatggtggtggccccgccgtcgctcagaagcaaggctacaggcagggcatatacgagagcgagagcgagagcgaaagcgagagcgacgagagcgactgcgaggaggcgttcctgccgcacggcggcgtgcagcacagctacggctacgggggcggggcgtacatgcaggagaagcacggggctggcaacctcggcggggtgcgccgctacgagtcgtacgagagccgcgacgatctcggcggcggacgccgctacgagtcatcctaccagagcaccgtccagtacaccggctccccgaccaagaaccgccacgtcctacgctacggcgcgtaggcatatatacgctctggtccagttgcattgcagcacgtgcacctacgtatattcctatgccgtgtcgtgtcgtataggcaggcggcaccgctacttggtgggccttgtgtttgctggtgcagatcgaaaaatctgacaataagatgtacttaatgccaccttgatataataatgtatgatgacg

SEQ ID NO: 131689 - DNA, 823 bp, Zea mays
  unsure (1)..(823): unsure at all n locations
  Clone ID: MRT4577_51582C.1
tctcgatcttggaagagcagaagtattagctgctgttacccctacaagtcggttcgtatttgatgcaaatttcgaaccgacaatacaaagtggacatgtaaacattcaaggtagtataccagtcacttatgtagacaacagctcgatagaggaaagtccagaagaggcagatgggaaacaaggtatcataagaatccctgtttgggcaagagacagaggatcatcgaatgagatcagtgaagcaagaatggtgagagacaagacagaggagggctgggaatttcaattagctgaaaaacttaaaggtttaagttataacatgctagaaccaggtgaagtgaggatagatgcagatataaaggatgggggtatgatgctgataactgcattgagtccttatgcaaactggcttcaaggctatgctgatgttctcctgcaggttaaaggcactgttgatcagcctgttgttgatggatcagcaacgtttaaccgggctattgtgaactctccttttcttcggacaccattgacaaattttgcgggtacaattcaagtcatattcaacagactatgcatcaggtcaatggaaagcagggttgggaggaaagggagattgtcgatgaaaggaagcctacctcttaaaaatagcgagccatctgccaatgacaagattgatttgaaatgtgaagttctggacatacgagcaaaaaatattttgagtggccaagtagacagccagctacaagttacaggctcaattttgcgaccagatctttctggaatgatccggttgagtcatggtgaagcatatntgcctcatgat

SEQ ID NO: 131690 - DNA, 482 bp, Zea mays
  Clone ID: MRT4577_51583C.1
cccaatgggtgtagcccccgacctttgagtagattttagaaaataatctactcgaaggtcttccccagaaattatctccattcgcgctcctgcatcttggttgaggattgatcttttaatcttgtcccacgccttagaagtcggcactatctcggtttggaatgataatccatggggtgcaccgaagtgcacccaatggatgtagcccccgaccttcaaatggattttttaaggataatccattcgaaggtcttccttttgaaaaaattggcatgaagctattcgcatcatgctttggaggtcagcattatgtcatcaaaattttgctgcagaggtcagcatatattttgtctttagcagccgagtttgcaatccgtccatatcttgctaggtaatgcaatttatttgcttctgcaacttgattggacgtttgatggacgttctgtgtctagtcctcacatcgcttctgtcggtcatatctt

SEQ ID NO: 131691 - DNA, 626 bp, Zea mays
  unsure (1)..(626): unsure at all n locations
  Clone ID: MRT4577_51584C.1
cgtcttcatacattattatatcaaggtggcattaagtacatcttattgtcagatttttcgatctgcaccagcaaacacaaggcccaccaagtagcggtgccgcctgcctatacgacacgagtcacacgacgcggcataggaatatacgtaggtgcacgtgctgcaatgcaactggatcagagcgtatatatgcctacgcgccgtagcgtaggacgtggcggttcttggtcggggagccggtgtactggacggtgctctggtaggtctcgtagcggcgtccgccgccgagatcctcgcggctctcgtacgactggtagcggcgcaagccgccgaggttgccagccccgtgcttgtacgccccgcccccgtagccgtagctgtgctgcacgccgccctgcggcgtccggccgccgtgcggcaggaacgcctcctcgcagtcgctctcgtcgctctcgctctcgctttcgctctcgctctcgctctcgtatatgccctgcctgtagccttgcttctgagcgacggcggcgcatctttatggtagccgccgtactgctgcacggngccaccgccgccgncgncgtagtgagagtcgtaccctcctgcaccacttccgccgtagtactggt

SEQ ID NO: 131692 - DNA, 1846 bp, Zea mays
  Clone ID: MRT4577_51585C.1
ccggcccgggtacaataggggcaccctcgagccggccggaaccaacacaaagccaaggcgcggcgcagccagagtaagcagagagttgcactaccgtgcttcttcagttcttcttcctagtatgcactcgcttgtgaggcgtggcaatggctacggctacggctatggtggttacggcagcagcaatccccatatgaactaccaccgccaaaacaccgagtccgtgaccaccgtcgtcacggagatgaaccgaatggccgtcgacgacaagccctgctacggcggcggcgtgcagaagcaggcctgcaaggtggaggcgttccaggagcacgacgaagcgtacaagggcgccgtggccgtgcagcagaagcactcctccttcaaggaggacaaggaggaggtgcgcggtgctgctgccgccgtcagaagctggcacgacgagttatacaaggaggaggaggaggagaagcacgtcgtcgacacggagtacggtgcccgctacgggggtgtcgccgccgtgaagaagccgggctacaactacaagcagcacgaggcatacggggagaccgaaggtgcagggtacggctacggcgccggcggcgtgaagaagcaagcaggctacagctacgcgcaggaggcgtgcggagagagctacggcggcgctcaccacggtggtgccggtgccgtcgcgcagacgtacgcctacgaccagcagcaggcctacaagcacaagaacgcggcaggggcgggggcggggtacggtgctccctacggtggtggcgccgtgcagcagcacgacggacacaaagatgtgtaccggcacggcgccgccgccggtggcaaagtaaagaagaacggctaccagtaccaagaggcgtacggcggaactgacgcaggagggtacggtgcgcactacggcggcggtggtggcgccgtgcagcagtacgggtacggcggcgccactaccgatggcaaagtgaagaagggcggccaccagtactacggcggaagtggtgcaggagggtacgactctcactacggcggcggcggcggtggcgccgtgcagcagtacggcggctaccataaagatgcgtacgggtacggcggcggcgccaccgccggtggaaaagcgaagaagagcggctaccagtacgaggaggcgtacgctggaactggcgcgggaggatacggcgctcactatggtggtggcgccgccgtcgctcagaagcaaggctacaggcagggcatatacgagagcgagagcgagagcgaaagcgagagcgagagcgacgagagcgactgcgaggaggcgttcctgccgcacggcggccggacgccgcagggcggcgtgcagcacagctacggctacgggggcggggcgtacaagcacggggctggcaacctcggcggcttgcgccgctaccagtcgtacgagagccgcgaggatctcggcggcggacgccgctacgagacctaccagagcaccgtccagtacaccggctccccgaccaagaaccgccacgtcctacgctacggcgcgtaggcatatatacgctctgatccagttgcattgcagcacgtgcacctacgtatattcctatgccgcgtcgtgtgactcgtgtcgtataggcaggcggcaccgctacttggtgggccttgtgtttgctggtgcagatcgaaaaatctgacaataagatgtacttaatgccaccttgatataataatgtatgaagacgaaactttgaaaaaaaaaaaaaaaaaaaaaaaaaaaaaaaaaaaaaaaaaaaaaaaaaaaaaaaaaaaaaaaaaaaaaaaaaaaaaaaaagggggggccggttttagaaga

SEQ ID NO: 131693 - DNA, 462 bp, Zea mays
  Clone ID: MRT4577_51586C.1
aaaaacaacctttcgaaatgaacacaggaacgctctaatggccggctttaagaagttcctcctcaacgtgcaaaaataggtggaatgggcggggggcaccaggtggaaggcccacatgaacaggggccccttgcccgagggggagacctgcccggataacccttggaaggcaaccatggccaggcccccttctttattctccgcaatatgtacacaatctttttttttgggggcgtccagaaaggatatctgttcaaacatggatccgacagggtacacgccctttttgagagtataaccagcaattgcactccaactatactttcgcacaaaaaaacctttgatccaaataagcgtcatgtatggataatcgaagctttctggcccaggaggtgagaaccaactctccaaatactccttacatgtgttctatcatgatacgccaaatactcaatgacctga

SEQ ID NO: 131694 - DNA, 223 bp, Zea mays
  Clone ID: MRT4577_51587C.1
atcttgatgaactaatggccctcccaattcacaccattatttctacgacctcaggtaactccttgccggttccacttacatgtggggtgggcaccaccaaatctacctcctcttttcattgcaaccactaccagccgtcctctaactcactcaatcatgaaaccactcaccccactttctactccccctaaactcacactcccccttctttactgcaccgcta

SEQ ID NO: 131695 - DNA, 327 bp, Zea mays
  Clone ID: MRT4577_51588C.1
accaagcgtccgcccacgcgtccgcccacgcgtccgcccacgcgtccgaaaaatatcaaaaaaaacaagaagatctcaaaaaggaaagaaaggtaacaaaaaaaaaaacgatcaacctttctctaaaaaggattggtaatgacatcaaggcaacgtcagtgttcactgtgcacaatcatcgggaatactctcgtatccagaaaacagggtatgaggattgcttctgaaggtctgaagcacagaatctttgaagtttgcctaactgatcttcatggcgacgacgataaagcttacacgaaaatcatgttccatgctgaagatgtgcaa

SEQ ID NO: 131696 - DNA, 1142 bp, Zea mays
  Clone ID: MRT4577_51589C.1
cgttctcgtgggtttttccatcgcccacagtcacgcagctagtgcatatcattgaatttgacgcaaatcatttcacacacatgcagcataccttagtatttttactattgaagtgagttctaatttctgatatctgttcccaaagtattacagctggtgcagatgattgcattatcagtttctatgtagagttttttattccatttatttgatggtgttggcctggcagtattgcgattctgaacacatttgataatgcaactaagtaataactatatggtttgcatttaattttcttacatactgattattgaaatctctaaaggactgtttggatggtcggtaatatttgagttctttatggttactaaaatataccataacatttaaagcttcaaggtgtttcgatacagcgatgtagttttacatccaattaccatgttattttgagttcttgaagaaaacctattcaaaactcatttccccctttttttaaaatcaaagcacacctcacattaccttttgcaccattgtgagttatgaagcattggcctgtctaatttcatgcgaaagggcctccagctgagttggttaggtggtatgattagcactccttaggtcctgaatttagctctccatgggagcaaatttcagtatgattttaaaaaatcccctcgtctgtcccacgccaaagcacaagtctaatgcttggccctggtcgtggttgttcagcgaggcaggggttcgggggggtttctcgacttgtgtgaggtcttcttaatacaatgtccaaggctgtctcacttccgcaggttgagttttttttcatgcactagcagtacacattcctaatgtatatacttgtattgtgtacattcatttttgattgtccacagggtacttaagcctttttcgattttccatatataaactattgctatgtatcaaagctagtagtatctatatgtctagctttattattttcttctggtgtttgattatatagtatgatgtatatttgaccacaaaggaaaaaaacactaagcccaaaccacaaaatatgtattggttttctatatattggaaaaacagtgttcttttttacaacctatgtcattacattacttcgcgttttgaaactt

SEQ ID NO: 131697 - DNA, 444 bp, Zea mays
  Clone ID: MRT4577_5158C.1
acggcgcggcgcggcgcggcgcgccttttgcgggacggtggtgggcgcggcgtcagacagacaagacagacgcctaggcagaagttttttttttttttttttttttttttttttttttttttttttttccgactgtagcaggaacgtttattaataccactaactgattacacgagttgactgttttttttgaagcaggcacgtttataagttgctaccgaactgttttgctggccgatatggaaccattaatttgcgccgcggaaaaaaacatgtgttaaatttatttggctggccgataggaggcccatttaaaaattaaattgtataccggtagaggcccaatcactcagtcagctccactcccggggaatccctaatcacggcctccacttctccgctttttcccgagaagttccccttcgcgcccaaaaaccccggcgg

SEQ ID NO: 131698 - DNA, 400 bp, Zea mays
  unsure (1)..(400): unsure at all n locations
  Clone ID: MRT4577_51590C.1
cttgccctaacaaatcatcacaccatctctcncggaccgtaaactatgttattctgtctccaanttctacatnaaaataattccntaagtttaaatcactgctctatataatccaatggaagttgctcctgcttattacactgttcatatccttacatactatagtatgtgtggtccttcaaggtgtgatgagttcgacggcatcctattgaacattatagatgggcgatacttacttccaaagaacatgcttgaaaatctaactacactgaatgtgccaataaagtggtatcatgtgaataaaatttctcgtgactgattggcacctaaccgatttcatataactaaggctatcgtttaaaatggttatgtagaaaatttaagacaaccattcaacaaa

SEQ ID NO: 131699 - DNA, 170 bp, Zea mays
  Clone ID: MRT4577_51591C.1
tgccaaggctgagaacgacaagtatggcccgtccatcgtgcacagaaaatgcctgttattctttgggcccaaaagatgcaaaaccataagggggcctttttttcaggctcccgcccccgattttttttctttttggagatggtcttttataagcatgaccaaaatttttt

SEQ ID NO: 131700 - DNA, 328 bp, Zea mays
  Clone ID: MRT4577_51592C.1
tcggtgaattccaattccacattttcaagaaataaagacgcaaaaatggtcagatatgaattggaattagttggtttcttaataaggctattcttgaacccaagggaattgaaaccggattccttgggggatttccatttcccattttcaagaaattagggagccaaaatggtcatatattaattgggattatttggtttctttattaggctcttcttaaacccaagagaattgatccggatttctctcggaatttccatttcacatatttaagaaatatggaagcaaaaatgttcatatatgaattttgaattattttgctgtctta

SEQ ID NO: 131701 - DNA, 168 bp, Zea mays
  Clone ID: MRT4577_51593C.1
ccctttttctccgaaccgacagaaccaaggcggcgacgagggcagtgacgacaatggcgaccagtttcccggagagcgggacagcaaggcaggacccggcggtggcatccccacggaagccatgaggcggcggcaagaccggcggacaccagacccctagccgggcga

SEQ ID NO: 131702 - DNA, 206 bp, Zea mays
  Clone ID: MRT4577_51594C.1
cgcccgtcccctaagaacggagctgcgaggtgtgccctgccgattcgcgtcggccggaccacccagatgatgcctcgaactagcggtgcgcgaacgccttcaccctgctcgcgtgtgataggggaacatgggttcggctagcagggttggattccgacttaaagccgcaagggcatatttcttctaacattatgttgccggccact

SEQ ID NO: 131703 - DNA, 321 bp, Zea mays
  Clone ID: MRT4577_51595C.1
atcccccggctggagccggaccgtagatccggggtcagactgacgcgagctggtgctgggctgtggaggggacccctaggcgcatggggggtgacaccaagcaaccttagagcattctggagcatccacactcagggtttgcgcatccgccagtgatgctaagtgattcgagctccgatcctgtgagaactctgagatcaggtctgagctcaattctaggccgcacgtgtgcgcacttagctgcggatgcgtgcggaaggctgccctacgttacatcacgcttgtctggaaactctaagaggcagggcacgagactgcact

SEQ ID NO: 131704 - DNA, 720 bp, Zea mays
  Clone ID: MRT4577_51596C.1
gcgtgcgctccctttcgtggcacgactgggcgaccgccgctgtacgccagctgctcagatctcgtcgggccccttcgccggcgaccatcacctgttagtgaacgcagggagtccattggatgtctcaaagaggtctaggattgttgaaccaggcccgccctattttggggccatggggcttcctagcatatttaactccaagcctgtcagctatccacctccaagggaaaagtgtgcaggcccgtcgtgcacaaacccgtacaagtaccgcgactccaagacgctgctccctctctgcagcctggcgtgctacaaggctgtccagggccgccctcctgaccagggaaccgacgctgcccaggggagtggaggtggccaggaaagcgctgggaagcaagcatgatgaatctagctacctgacgcgattgaaccgtgaccgtcagttggctggagaagtgtatgttaacatgtccagctcgctggtgtgtggtttcctttggcagtagtctaacaatcaacctgacaaaagatggggtgaccgcctgcccgtcgtgaaccaagccgggttttgttaatggtggttcgagtttaaacccatggtgtggtcggatcggtgtatgagactagtcgagaaatatgaagggggaaaaaaacttgtacagcaatcttgtgcttgcgtggttggatgggagcccagcatgctgcatgcatctgtggcac

SEQ ID NO: 131705 - DNA, 662 bp, Zea mays
  Clone ID: MRT4577_51597C.1
agcgagccatcccattaattcccataagcactgtactgtgcctgcgcctaccgacgagcattgctgctgcctcggccagtcggccggcatggcggcagcgccggtggaggtgggcgcgcagggcacggtgggctcgctggtgctccgggaggtcgagtacttccggcggatggaggtcgccggcggccacggcaagaagagcagcagcaaggtcgttggagccagcggcggcagcggcagcggcagcccgtggagcgacagcggcaagaagccgaagccgacgacgaagaagaagggtgccgtagcagcaggcaatgggtccttcttgccgaggatgtgctcgtcggcggaggtcgccgaggaccccggcagcggccggagggagcggccgtccagggtccgctaccggcctctgggcgacgacgacggggacgctctgcctcagcaggactagctgatcagagggatatgtgctgcattattattcttcttctgtatcagattcagatccggagaaatctgtgccgatactaggtactggatgccatttttctcctccgtttcttttggcttcccctccgcttgttcagtgttagtaacatctaggactattagtagatgagaaaagtatttgatattatgacgactgtggtttgactcgt

SEQ ID NO: 131706 - DNA, 581 bp, Zea mays
  Clone ID: MRT4577_51598C.1
ctcgaggccggccgggagcatgtgaggggcataaattcctactgtcaagcttccttcctcctccctgttcgccgccaccagcgacaccaccgcggggaaaattcgaaagagagactgccgacgtggctgcccgcccgcgccgcgaatcctcaacctaagggtgtccgcagagactcgcggaagccgcacggtgtgattctggggccgtgacgcgtagattcttcatcaagcgccgttcaattgctcgccggacttcgcccttcaccaccgggtcgcacttcctcgcggacggactccttcaccgcttgaccgccgacgagcaagccactgaggacctaggtgttcagtaggtggggactgttgagcaggagctcattgaaggtgaagagcaggtggtccaagaggagccctacaatgaggaatatgagcttatctaggtggcgtctcccagtcagcttgatggcgccatagcataattatttagtttgttttattgttatcatctatttttgtaagactttcactatgtaataattatacctttgacatttatctctaaaaaaaaaaaaaaaaaagcggcc

SEQ ID NO: 131707 - DNA, 130 bp, Zea mays
  Clone ID: MRT4577_5159C.1
gttttctaattttcccttcccagaatgaatagggatatctgcggtggcgccgggcttggcgaatggagcctgctacgcccggggagtccttactgtatcgtgcgggagccgtgggcacgcagccaccatg

SEQ ID NO: 131708 - DNA, 543 bp, Zea mays
  Clone ID: MRT4577_515C.1
ctgaaccgatcggatggaccgctcttgctggggctagccaacgagacggcagtgatggtggaccgtgaccgcagaggaatctacggcggtgcccacgccacctactgacagtagcatcataagggaggaggatgtctcccgatgggtgatcaggtgaagggcatgctccacgacaaggggccaacggcgtctcaggcgctgactgtggcgacgctaatcccgatggacgggctggtgatggcgctgttggggctgtcactgaccgcctccacggtggggctggccacggccacgccggtgttgctgatattaagaccaatgctggtatccacctcgctgattattgggacagccggtatagggttcctaacatctggcacgctggggctcgggggcctgtgctcgactcacgtgccttgccaacacggcgcgtgcatgattccagactacccaggactacgtgagaggatgctcaccgtaagactggcagatgccgctgatcacgcggaacacaacatcggtcaagtaggacatgccatacag

SEQ ID NO: 131709 - DNA, 428 bp, Zea mays
  Clone ID: MRT4577_51600C.1
gcgttgcacttgcactgccctcccagctggtttggtttggtttcgttttggttttggttgggttttcacaggcaccgcgcgcgcgccggcgatcgagatggccgactggggccccgtggtggtggcggtggagctgttcgagctgctgtagccgggcctgctgctgcaggtgccgctcaagggacgagggctttgcacagttcggggggggagaggaacctgcaggatcatgttcgcccagggtatgagccggacgatgttatcggcagcgtccgtagccccgacaagtactgaagcccccaccccaagaccggcgtcttcgacccggcggaggtggaccccaagctggccgatggtggcgcgctggacgccgacgcggatgctgtaggaggcacggagctggaccagaaggtgtggatccgcccgct

SEQ ID NO: 131710 - DNA, 441 bp, Zea mays
  Clone ID: MRT4577_51601C.1
atacgcacagaccccgaatgacctgtacacataccacgcgcatacagacattgggccccgacgagagagagcaccatctccttagccctcgcccactgtggctaccgcgctggcttccagcactacttgcccgtgatcgcacagccgatgttctacaatcgactgatacgcctaataaaggagaaggccaagagtgatgatgaaacgctctcgcgcgcttatcaccatgacacagccataacctgtaatcgcgctcgatgatgctccttactcagtaggaacctacgccgaacctcaccgcgatgctctaccaaatgcgacgacgcactgctacgtctcgcacttcgagaccaaaatctgattcctgatcgtgcacacgatccccgaggagatccacgaccgcaagctgaagtttgacgacgacataaacgacgcgctcca

SEQ ID NO: 131711 - DNA, 677 bp, Zea mays
  Clone ID: MRT4577_51602C.1
agggtcgcgaaaagcaattggagcgtcgtaccgcatcaaaggaaataaccgcctaaacaatactatgtaagtcccagctataatactaaacccccctgatgatctgtccggtacactatacacagggcgaaaaatctcactgttctaaaatgttaattgatgcttcccccctggactccctattagcataaaaatcgactaaactggtgtaaacatcctcacgtgatatccttctcaacgatgtgggctggtttggccccgtccctggtagccattgtgttttgcctggttaattccttccctacattgtcgtgcccggtgttgccatcgatgctaagcttgcaacccgttgtagccgtgtcgttatatgctcattaagcctaaccggcggaagccgacacgctgcaagtatgtttgttggcgtaagcagcaatacgttgtgtacactcagatttgccgtacccagtacaatattcaaccttgggcaaaggcagggccgcatagtacaaagaacgcccgagggaacagtcttaactttattacatggttgcgtgcgtgctatttagctaaccccccacaatatatgcgtaagacacatattaacaattgtacccggtaatggtgtcaaggttgtagagtgcgtatgcaacctacaagtgtccgtccctacataaccg

SEQ ID NO: 131712 - DNA, 121 bp, Zea mays
  Clone ID: MRT4577_51603C.1
atctgatccgtacaagctttacagcccttatgatgtgttggtaagcatcacggtacacgttgaagtatcactggaaaatgctttcctgaacctggttcagtgtgttcagtccaagctcctg

SEQ ID NO: 131713 - DNA, 528 bp, Zea mays
  Clone ID: MRT4577_51604C.1
gcgatctagaacggacgcgtgggaaaaataaaaaattaaaaaaaaaaaaaaaaaaaaaaaaaaaaaaaaaaaaaagaaaaaaaaaaaaaaaaaaaaaaaaaaaaaaaaaaaaaaaaaaaaaaaaaaaaaaaaggggggccgccctttttttttttttttgggacatcaaaccactttttttatacaaaagccccccccaaaaagctaaagggaacacagggtcttaattaggggccgaaaccatggccccatcccccatttagtaaaacgccgttaccataccataccaccatttttaacgggccccgggattcacccttccttattttcagttcagttcggagggggacccaaacccagagtccccacccggaaaaacaagattggggggggggggaaaaaaaaaaaacaattatgggccctttgcaaggggtttgggccttgggccccaacaaaaacccctgggaaatgccttccgggggggtgggggggggggaactgggcccccggtaacccggcccccggggg

SEQ ID NO: 131714 - DNA, 698 bp, Zea mays
  unsure (1)..(698): unsure at all n locations
  Clone ID: MRT4577_51605C.1
cgggaccgacatattattgagaccaactcgcancgataaagagcacaatagtcgaccaacaatggcaggcaaaatatattgactccttacgcgcgttggtcgttctgcaagtgctggtacggcgagcattttccacgaatgcgtcacaagctcgtatagattgccttcttcccacggacctttcaacagcggagtttattggatgtgaaacctcaattcttgaaccctacaggattcaacagggagttacaggtgagatcttaactatatcaacctggctacttgaacaatcattagtcgtattacagaagcttccttaggagcatttagcggcacaaacaataatggctcaccaactacaacaacttgtgctagcagaccttggtggctaatttgagaaacaacaggttcttgcattaaaccaactagctgattgaactctgatttttatttgcaacaacaacaacgtaccattcaatcagctagctgatgcctaccgccaggaagaactttcattgaatacaataggcagattgaactatcctgcttatctacgagcacagcaactactaccattcagccaggtagctggagcgagacctgctgcctttatcacacaaccacagttggtgaagctctaccaacacgctgcgcctaacgctggcaccctcttacaagtgtgacaatagctgtgatgc

SEQ ID NO: 131715 - DNA, 158 bp, Zea mays
  unsure (1)..(158): unsure at all n locations
  Clone ID: MRT4577_51606C.1
gcacccggcgtcctaaatcttattnctttcttncttnacattatattttattcaannttttnctggccccagtaatcacagacagagttgcagaattttcnttccatnnnactcctncaaanataaancatnntnatnttntaattncancaattacc

SEQ ID NO: 131716 - DNA, 797 bp, Zea mays
  Clone ID: MRT4577_51607C.1
tgtagagaacagataatgacatgggcacccaaaacgttctcagagataactcctgaaagtgtgcaattagagtttggtctctgttaccttttgcttgccattgtattgatgagatctttattcttggttgcggaagacacgtccagctggtcagtcctgagctgcggatgttcattcggtcaactggaatgaaactagaagcagttgattcgaggaatgcagcttcaacatataatatcctgaacgaggagggcaggccggtggcagctgctgttcttccctatggagtcacttgttaatgttttatcttctataccagttgggcaggcgttctctctttataatcgataaccaactgagctttgtttcgttcgtgctgtttcttggaagttctatatctgtcatgcatgtccaaagtagagttgtctatcttcctgcttttctacttcctctagcaagcccagatgcacagactgttggtatgttttggttgccgagggtacaatcatacatacaggcgaaacacttgccactctgctacgaactgggacgtgcgcccgcctggcgactggcgaggaccacggagtcacggacccggctgttttgccttctgttgatcgtcctaatttcagggctcagacgacgaagcttcgtttggcaagcagacgcgatgggatcctacgtggtaggagtactcgccagttcagatctcgcgggttaatatttactgtcacgtcatgttgtatcactatcgaccatatactataaattatgtaattgatttttgtcagtgttta

SEQ ID NO: 131717 - DNA, 319 bp, Zea mays
  Clone ID: MRT4577_51608C.1
gggaacaaaacactgcacacgacccagggactgcaaggttcttgtataacgctgataacgacaccggtacatcacaggcacacacatttcctgcttgttcttattacaggcacgagcattacgttgccaggccttatatcaggcgacagggggggggttttttgacgtcctcgagcgggcggaaccacaccttttggtccagtaccgtgcctcctgctgcaacagcgttaggggctactcccagctggtttggggtccacccgcgtcgggccgaacactccggtcttggggagggggttcagatcttggtgggggttcc

SEQ ID NO: 131718 - DNA, 416 bp, Zea mays
  unsure (1)..(416): unsure at all n locations
  Clone ID: MRT4577_51609C.1
ngggcttataattagcatttttaatgaccggtctttcattactattttttattattgaggttagccaatttcaatggcccatctgtggaaatctcaacgaggatctttgatcaggcatggcgcttgcaagctaccttgctctgatgactgccattttcttatgggctatgcacaatactcgatttcttatcggacaaattcgatgatgacgtcgatcatgtacagctatcatgaaatgatctccggcctatacctctaactgagtatcatgagccaggctgtgatcttagtcacctgataccgtaactagaccttcgtggaacgccctggtctggttcttgtcaccgagttcctgcttgataaacttgccgtcagcttgctctatgtctacgccaactggggctatgacaggatca

SEQ ID NO: 131719 - DNA, 424 bp, Zea mays
  unsure (1)..(424): unsure at all n locations
  Clone ID: MRT4577_5160C.1
gagcaaaaacatttcagtctcgttatggcataattatacacatgtttcattgagattaatgtattttcactgtagtttaacaatcgcaatctgctgccactatccatcatgcagcaacaacaaagcctttgtcagtggcgaaagcaggacagaaatttaagtgggaccaaacaaaatcgcaaagcaactagacaagaccgtgaaactgatctctggtggatgtggacgcactaaacatggaaatggctcactatgagtggcattntaccatgaaatagtgaaaaggataatgagaaagaaagcactcatgtcgaagtgtttgagcagactagttgtggtaactatatctcgtctagcaaccataccagtaaaatcatgaaatgttgatggctgataagaattgtggtgcacctttacaatcaat

SEQ ID NO: 131720 - DNA, 225 bp, Zea mays
  Clone ID: MRT4577_51610C.1
tactcgcactacacgcccgacacgagacaatcaggaccacccctcggcgcaacaacggcacaagaagatcatacgccgcaggcgactggcacatcctgaagaagaccccggtggctaatctcgtgcagctgcacaagtcccagcacctggtcctactgatacggatgccggtgagtatggatttccggttgatgatcgtacgcagtgtccttcatgcgttgcgga

SEQ ID NO: 131721 - DNA, 588 bp, Zea mays
  Clone ID: MRT4577_51611C.1
caacgaactcatttcgcccacgcgtccggcaaaacccttcagaaacccatcggagaagaggcggagggcgatcggagagcgggatcatggcggggccagttgcggcggtgacggaggcgtgggacaagctcaccgtgttcctgtactcccagctctacgacgagaggaactgggccaaaaacaagaagttggcgaaggctcttggtgtgttcgctggatccatcctgttcatgcgcacctgtggtgatatggtggccatctagggagccttcaaaagttgcctaccgtgaactagagacacccccttttttgttggcattggatgtgttcttacttcggtcagggacagttgaagcgtatctagactctagagactgtttgtcttgctagaatcgcaaccaaaagtattggtccaagattagtgcaacggtgaaattatttcacccaagcgcacgagttgcagttttttttttcctggaaccatttgaattctggacagtggaatggtactcccttctttggcttccttaaaaaaaaaaaaaaaaaaaaaaaataaggtaaaagggaaaaaaaaaaaatgaggagaaa

SEQ ID NO: 131722 - DNA, 1282 bp, Zea mays
  Clone ID: MRT4577_51612C.1
gggacctcttatacgaccgccctcttttttttttttttttataattttttttttttttttttttttaaactaaatttgcaccccatgaaaacgcagcatccaaaatactgcactgtattaacatcctccaataatctgtattcaaacaatgatttaaaatacaggtaatgcactaagccattctattatcgacctactatttatcacctaaaatgtcttcaagttgccgttgcctccttgagctttccatcatctccagttgcacttccgttaccattgtgaattagtttctcctctgaaggtagatgtttcatgatcttcctggtcggccccgaagccttccacaagtaccacacacgcgatttgggaggcggaacagatcctgccaagggagctaccaaccctggtttcccctcatctatgatattgtcaactatcccataatccttggcttccgaaggactcatgaaataatcaaacttcgtgtcttcatcaatctgctcctcagattttccagtaattctcgacattattttattgatcttaatcttttcgtacatcatctctcttatctgtagtcccatctctgtgactttcccgccagcgccacctgatggctgatggatcataatcctcgcatttggcatgcagtacctcttaccctttgtcccagcagcaagtaaaaatgcacccattgaagccgccaatccaaagcaaacagttgacacatcagctttgcaaaatttcatagcatcatatactcccatccctgctgttatagagcctccaggtgagttgataaacaatttaatatctttagtctggtcctctgcatccaatagtaggagttggctgataatgagatcagcacttgtatcatccaccggggaacccaggaagacgatgcgctggcgaaggagcatgttggttgtatcaagctcctctaggcacgccttcctggccgccggcctcgccaccgctaacctggatgggacccacctagcggagaccgtccgctgggcccgcgtcaccgccgacccacgaacggccgccgcccttagcgctgtactccggcgattcgaggaacagggggtaaggaatgcggacgagcgatagaaggaagtgcagggaggcgccaggaacgccgccatggctgctgccgcgggcccgaggcttccactcctagcctagtggcggcggtttctactgctgctagcgctatctatgactatgagcccactcgtattgtctaagtgggaattgggaccgaagggcctcgtgc

SEQ ID NO: 131723 - DNA, 283 bp, Zea mays
  Clone ID: MRT4577_51613C.1
aaagcacctgcctgctaccatctcaactggcctcctcccattgctgttaacaagaccatctgcaaaacactggacaaattcataaccaacaggaaacattggacaaaaggcaaaacactgtttgagatggtatggcaaatgttgataacttatttgcaaagttgtcacaatagtgtttgtgcttctgtcatgttcaagaaactgcatatcacttaggagttctcctgctgttctctttgtccattgacttgtctgctaatggagagctaaggcatttttcggc

SEQ ID NO: 131724 - DNA, 351 bp, Zea mays
  Clone ID: MRT4577_51614C.1
tttttacgcgtgggcggacgcgtgggtttgagggtagttgtatcttgtgctggagagtctgcgccctcctacaagggtgaggtaccctattgccaccactgaataactacaggccccttcaatctcgtttcgatgcttttccctgatccgaaatttgattttagttgtttttcgcgctccgtgatttgatttttgatagtgaagataaactaatgcctaatccagcacttgatccgaggcaggcttctgtcgagcgactgattcgcagacatatctgtatttgagtccttaacatccttgaatgattttgaccatttgcttctattcttgggcctgcgaattgcatctata

SEQ ID NO: 131725 - DNA, 1637 bp, Zea mays
  Clone ID: MRT4577_51615C.1
gggtacctcgaggccggccggggaccctcgggctggccggggtgccctgcgcgcgggcagccgcagctgcccacagctcctcctttcccactttccgtcaagcgtgcaggagggttattccgcttcctcgtttacatcgccgcagccgccgtaccatcgccaccatggcctccgcctccggcacccccaacccagtcgtgctagggtgcggcggcatctccgtcgactacctggccacggtggcatccttccccaaccccgacgataagatccgcagcctcgccctcaaggtgcaggggggcgggaacactggcaacgcgctcactgcagctgcacgcctcggcctccgtcccaggatcatttccaaggtagccaacgatgctcaaggaagaagcatcctcagcgaactccaaactgatggcgtggacacatcctacatcctggtcgcagagaacgggaactcacccttcacctacataatagttgatgaacagacgaaaactcgtacatgtatacacactcctggttctcctcccatggtgccagaagagctcacaaaggcaaactcgtcgtccgctttagatggcgtggacatcgtctacttcgatgtacgattgcatgacattgctttgcttgttgctgaagaggcaagtcaaagaaaaatccctattttgattgatgccgaaagaaagagggaggggctggacgagcttctcaactttgcatcttacgttgtatgctctgcaaagtttcctcaggcttggacaggagcctcatcaatacctgttgctttagtatccatgctttcaaggttaccaaacatcaaatttgttattgtaactctgggggagaaaggttgcttgatgcttgagagaagcagtacagatgcttctgaggcaggggaaatagatgcagaggctttattcgaatcactagagaagagcattgatcagagttctactataccaaaatgtgttgcttccaagtcaaacttgagaataagcgcggatggagtaggctcgataagtggcaggttacttctaggtacggccgaagttataccacctggtgaactcatagatacaactggcgctggagatgcattcattggagcagttctatatggtttatgcaccagcatgccaccggagaggatgctaccttttgctgcacgagtggctggttgtggttgcagaggtctgggggctcgaaccagccttccccatcgcgcagacccacgcctggctggctattgatccgaattcagaagggctgcatcctccatgaccacctgcctgcaccccgtccaatggttgtgaatattccagtcccgatcagatcaaataagtcatcaactattagcagcacatcattactatcattgtgatagctattattttgcgatgattatgcaactatatggttccaacttgctagctccaggcataccaggcctgtgcaccttttacgggtgtagaaagttatacaaattccgattgtcacgaggtgtgccctaatcaaagctaaaggtgaaattatcaaaacgatacaaaatcgattgtaaagaggtcttgaagttcccaaaaagacccattaaattttctatcaataaatgtagtctaatgtatcattcaccc

SEQ ID NO: 131726 - DNA, 303 bp, Zea mays
  Clone ID: MRT4577_51616C.1
taaaaggcttcgtcaaatatccaaggaggcacatcttagcctcgccatgctcgcatcatatctcaacgatgtacttccatctatgctgactgtgaaggcaaacaatggggaacttaaggagatcatgagattccaaaagttagctcgtgctgatctaaagaataatttgagtaagaagaaaatgaaggctctcatacctcaagcggttcgagcaacatacattgggggcctgcttgtgctctgtgctgggtcgatagttgtttcaggctcatcctttgatgctgaagagtttctgtctttcct

SEQ ID NO: 131727 - DNA, 471 bp, Zea mays
  unsure (1)..(471): unsure at all n locations
  Clone ID: MRT4577_51617C.1
tcgaggccggcgggtcgtnttcncccagcagcggaatggcaagtttcttaaacatttctaggccctgtgaatgtgcgggtggcgaggaaggaagataaactcaaaatcaaggatgagtacaacaattatagggataggacagcctataagtttctgttatttccatctatcctccccccactgacatggaggccttcctgacaaagtatgacatcaagctgaacaatgctattctcgctgaggagaagcacttgcctatgtatgacgagttggctaccaacagcaatgctgaatatattgccggccgagccacccccaactctatcagccctgcccaccgcctgcttccctcttctgtcgcccccccctacccgccaccccctcccccactcccaccttgttgaccgaatcatctacccccctctaggctccccccctctctgcctcccccccccccccctcccccccccc

SEQ ID NO: 131728 - DNA, 1545 bp, Zea mays
  Clone ID: MRT4577_51618C.1
gggtaattgtttttaaagcagaaataaacccagtgatactaacgacaataatgattagattataccacagcatatatcgccacatgcatgtctctcatctttgagatattccagcacatttgtttttttagcatatctcataaaggaatggcgtccatgctgcctccgattaatattaatattatattaaaagttgtccgtcgtacgttttattgcttgacataaatatgctcgtcgtacgttttattaaaggaataaaatcttggaggacccctgctggccggacgatctcgggtaaatataatatgctcatatcttcttctggacattcttaagatctgtagtctggttgatggatgaccccagcttgacagtgttgtacatgcgcatgaagtcaccgaacctgatggtgcggtagcacggtggcttgtccccggcgaggaactcctttgacgggccgatgaggcagtctggggtgggcatgatgaatgtggccaccgccgtccgcgccagcgtcgagctggtcaccacgcggtgctcaacgctcttcagcaatccgttggtcaccacctcgagttgctggccgaagttgacgacgaaggcaccgggcatgggctcgacctttatccactctcccctgtaggcgacgtcgaggccatagacggagccttggaggaggagggtgatgaggttgcggtcgcaatgtggcggcaggccgagcgtcttctccgggctggggcacggagggtagtggttgacgttgaggaccacgtcgccggcgctgatgtcgccctcgaagtagtcgggccggatccccatggcctcggacagcagccgcagcagctccacccccagccctctcgtcagagcggtgaaacgctccacgacacccctcagccgctggggcgtgtgcggccagtcgtcccttgtgccgaccgggaaggacgaggggcaggcgaggcggaggcagtcccgccagtacttgtcgccgcccgtgtcgtaggttgtgccggagaagatccggttgggcctctgactgtcctccgagtacatgtacgccttgctcgccgccggcagctggaagaactcctcgcacacctccagcatgtcgcgcatcacctcctctgggatgccgtgctccaccaccaggaagaagccgaactccatgccggcgtcgaggatagcgcggcggacctcgtcgcggctgcgagacatgtcgataactggcagggaggtgacagcggagacggccggcggcacgtgctcacgcgagaagacggaggagcggtccaaggccaatgcctgggcctgggacgacggggctaggtggagcatattctccatgaatggaacgaggggaaagtgacggacggagctctctgatcgagatggagaccagaccacgcactagttaatttgggccttcagaagagtggtaaaaaaacatgaaacgtatatgtagtcagcaacaagcttcctgcgtgcgtgtgcatgcattaactgcgctccaacaaaatttctcggtgactttcctttttttgattt

SEQ ID NO: 131729 - DNA, 784 bp, Zea mays
  Clone ID: MRT4577_51619C.1
cgccggggctgatgtcgccctccaagtagtcgggccggatccccatggctcggacagcagccgcagcagctccacccccagccctctggtcagagcggtgaaacgctcgacgacacccctcagccgctggggcgtgtgcggccagtcgtcccttgtgccgaccggggaggacgaggggcaggcgaggcggaggcagtcccgccagtacttctcgccgcccgtgtcgtaggttgtgccggagaagatccggttgggcctctgactgtcctccgagtacatgtacgccttgctcgccgccggcagctggaagaactcctcgcacacctccagcatgtcgcgcgtcacctcctctgggatgccgtgctccaccaccaggaagaagccgaactccattccggcgtcgaggatagcgcggcggacctcgtcgcggctgcgagacatgtcgataactggcagggaggtgacagcggagacggccggcggcacgtgctcacgcgagaagacggaggagcggtccaaggccaatgcctgggacgacggggctaggtggagcatattctccatgaatggaacgaagggaaagtgacggacggagctctctgatcgagatggagaccagaccacgcactagttaatttgggccttcaggggaatggtggtaaaaaacatgaaacgtatatgtagtcatggacagggtgagccattaacaccaacaagcttcctgcgtgcgtgtgcatgcattaactgcgctccaacaagatttctcagtggccttgcttcccgg

SEQ ID NO: 131730 - DNA, 500 bp, Zea mays
  Clone ID: MRT4577_5161C.1
aaaaaaaaaaaaaaaaaaaaaaaaaaaaaaaaaaaaaaaaaaaaaaaaaaaaaaaaaaaaaaaaaaaaaaaaaaaaaaaaaaaaaaccaaaaaaagggaggggcttttaaggagtttgtttccacaaaaccctactgtgggggatgcaaagggaaagggccacactgatgttggggccccaactgggtaagaaaacatttatgtttttagggaaaaggaggggtaaaaaatccaacttttccaatataaaacacatggaaaaatcatgagtcctgttttatttttggacttgagcaaacttggaaacattgcaaaagggttaacttttgcaacaacgcccttggagggttttttatattggattgagggatcaaggggttgggcaaatgttgttgacattgaaaaaacctcgaccactatggttttggctgaaaacggggatgggggaaatgaccttgatcttattgttaccactatgaagggaaacgttttttgttttt

SEQ ID NO: 131731 - DNA, 288 bp, Zea mays
  Clone ID: MRT4577_51620C.1
cggtttccattcttttcctcctccagccaaactctagggaaacacggcacatcttgagagacctagacagccacagagaggcaatgccctccgcgacgttcctggaagtgctcctcgccatcttacttccaccattcttcgtcttccttcgctacggctacagcgacctgttctcgatccaacagttacttaccttcctgggatacatccctggcaacatccactccacctacatgctcatcgctcaagttctccgaagaggaggacatgaaaactctctatctaccc

SEQ ID NO: 131732 - DNA, 419 bp, Zea mays
  Clone ID: MRT4577_51621C.1
cccaccgactgcagatggagtcgcgaaagagacgaccgacgtcggataggaccgcgcccgagcccccctaatactggctgactcgggtcacctcctgcgacgacgccggaggtgaagccagtggggaccacagaggcattagctgggagaacccactcggagggggcagggaattgtgtgctagatggaatggctgctacaaagcttgaagctctttggaaccacacagatggccgcaaaaccagttagacattagctggactataaccttactcactcttggtttgggccaacggggaacaaaagcatactcatagtagataatgctcagatcgacaatgctggacatggccatgaacatctggcaatggcgagctgtataaagactggcaatggccatcacgcatctggcacagtga

SEQ ID NO: 131733 - DNA, 321 bp, Zea mays
  Clone ID: MRT4577_51622C.1
ttctctggccatcttgaacttgtttctgttcgcccttcctgtgaactgtcgttcccttgctgtttgcttcgtttctggtttccttttgttttttgcttgcctgcctggggcaggcggggggggggtgacctttttctgccccttgtttgcctccctggtgggcctttctttgttccccgctctttcctggcgttgcgggtctcctggtgcgtggtcccgcttctcctcccctccttttggccttggttttctcttgcttgggtcctcgcttttcttggcgttcggttcgttttcctcttgtggtcctccttgtggcttctt

SEQ ID NO: 131734 - DNA, 277 bp, Zea mays
  unsure (1)..(277): unsure at all n locations
  Clone ID: MRT4577_51623C.1
gttatcggacggcgccgtcctttttttttttttttttctgatgatttctttcttagggcccagagaagataggggtattgtgtttttttccttccctagacccttgcccaagtctagggttaatgcattagacattagcggagcgccacacgcgagccaatacacgacagnccaaaagttaatatttaacccattctgggccaacgacccctggatttggtcgaccagttcggggaccaccaccgtgaagaggacttgagctttgtttagtgttctg

SEQ ID NO: 131735 - DNA, 287 bp, Zea mays
  Clone ID: MRT4577_51624C.1
cgtggctctcctctctcttctggcattgcatgcagcccagggagcagccctggggacgcctatggaagacaccacctccagtaattacccttcgggaacagagggccttagtgagttcctgaactttaacaagttacagtctgcctttaagtcggatgacttcctgaactggcacgtcctcactgatatgttcaaaaaagcgcttcctttcattaactgggaattcttccctaaggtgaaaggactgagaagcgcagttcctgattcccagtgaccattctctttaa

SEQ ID NO: 131736 - DNA, 600 bp, Zea mays
  Clone ID: MRT4577_51625C.1
tttttctgaccaacttttccgggggggggggggggggggagaatctggttgtgggaagaatatgagtatcgtgaggattaagtgcggaggaagatgaaagcgtccatagagttcaggatctagaagtgacggatcctactattgcaacttcttggccgattctgtgtctatgtgggggggggggggtttttatcaaatcaattcttatagaagcgggctgaaaaggtaggcgtttgatagtccatagcagcttttggtggccggaagttgaaaaaagctgaaacaaacaaagccattgtgcctccagctgtgaccgcctacgccatacccctcagtgcccctaatagtacatccaagctctgcgcctctgctgcagtataagttgtgcctctgttccagtgcagcatcatgatatgtcacacaccaggatagggggtgagttctgatacaaccttgtatggtggtgaataattggttgagtaacatgtatctatggttttttataatgatgtttaaaaagtttgttcatcaggaatactaaattgacatatatcttggaccagagatagtagtttgtttgtttggattctttctcctttt

SEQ ID NO: 131737 - DNA, 496 bp, Zea mays
  unsure (1)..(496): unsure at all n locations
  Clone ID: MRT4577_51626C.1
gggccgcgcggttttttggccctctctngtgtctcccccggcggggtaggcgggccggctgctgctgtcctgttgtgtggtgctgccccctggggttctccgccgggggccggctctccggctgcgcctccgtggcctgctgcctccgtcgcgggtgctgtgctctgtggcggtccgtctcccctggtgggggggggggggccgcgttcgctcggccctgctgggcaccgctcggtttgggccggtctctttctcgtgctcctctttcgcgggggcagacgttcgtcatcgcgtgcttgtcgcgttctgtgtttgccgatggctgcgcgcgcgcacgctgtcttctggtacacgttcttctgcttctgctgtcttcagtatctttccgccgccaccggcggctccccagtatcgtggttgcggctgagctggccgtggttcttttagttgcaatttttcgcgttgcgtgcgtgccactttgtgggtctcttttgcc

SEQ ID NO: 131738 - DNA, 468 bp, Zea mays
  Clone ID: MRT4577_51627C.1
gaagtccctggatgaagaggtagaatcaaaggagatgcagaagcagcaaccgcatgattataatagcatgagcctaggggtggtaacgggtcatttaatttagcctagcaaatttacggatcgaatcaagttagggccggatcataaaataatacaattttgaactaataaaattaagggctttgttggttcgtgaagcaagtattagggccatgatccattaccactcctacatgagcctcaggaatcttaaagccacacacaagaaatatctcattgctgcaaaggaagaggaggtcaccgaagggaagaggcttcctctcgaggaggtggaagagaacgcatgcatcagccactgaacagaacaagcaggcgatttttttgtgtggatggcgtctgccacaaaaggattgaatcgaggagtgtgctctggttgtgaagtgataactaggctaccacatgttcatt

SEQ ID NO: 131739 - DNA, 499 bp, Zea mays
  Clone ID: MRT4577_51628C.1
aaaaaaaaccataaaaaaaaatttatttttaaaaaatcccaaaaggaaaaaattttagaggggggaaactcaggaaaaaaaaaaaacgaaccccaaaggaactagaactttaggagacaaacccaggacatccaaacatgggttcagaccccaaagggggccccaacatacgcaaagggggggaccactttccaccatcctacgaaattacgaccatttggacaaaccccataattttgggaacccaattttatttcaaaaaacgaccggggggaacgggcgttcctaaaaccacccagggacaaaaaccggaaaccgggggttagccggaaatctgaagggacttcacttaagggttttgggggtcccccttgggaacagggactggaaacaccccgttttccatggggggcgggatctgctccgtttgggggttctcgggcagggggaacctgggcaggaacctcccgttggtccgttccacggggggccagggggc

SEQ ID NO: 131740 - DNA, 378 bp, Zea mays
  Clone ID: MRT4577_51629C.1
tcttcatctcccagcctccctagagaagcttcctcctcactcgctcgatggcccccgccaggcggacggcgaggaagtccaccggcgccaaggctgccgagaagcagttggcgactaagggggcccgcaagtctgcccctgcgacaggtgtagttaagaagctccaccgcttccgccccggtaccgtcgcgctccgggagatcggcaagtccctgaagagcacagagctgctgatccgcgaggtggcgttccagcggctggtgcgggagatcgcgcaggcacttcagagcgacctacgcttccagagctccgcggtctccaggctgggggaggcggctgagcgctaccttgtcgctcgctgcgaggacgccagcctct

SEQ ID NO: 131741 - DNA, 273 bp, Zea mays
  Clone ID: MRT4577_5162C.1
agcgtctagaggctaagctgcttcgtacctggcaactcgtaggcatggatgcctgggaggacacaactcctaaattgttcttaggtagtcatgaaacatcgtggctcacacttccatggtccaactagcgggccctaaggcctagatatgcacccactgatcagagagtccatccattctaccagtgcactgtagtagtgtagtagatcacgaaccgtgagggaagagacgcaacacaaaataaccggctgagttacattccaggagaccgcg

SEQ ID NO: 131742 - DNA, 595 bp, Zea mays
  Clone ID: MRT4577_51630C.1
ttttaaaaaccaccgaccattcaaaatgcagccagatattccctaccgaaaatcccaccaacaggctccagatgagtggaagctagagcaaggactcgagcccgcgcgtctcggcatccgcaaccagagcagcatccagatcaacacagagtctcatcgtctcaacccaaatgaccacgaagaactgaagggatctgatatccccgaggacccggatctcgacgttcaaaatgagcggcccggttggaaaggctatgttgagtgggaagactacccagagaagaaagccaaggctcaccagcgcttttcgcgcttcacatttcctcctccgcctgagttccagttagagcctcttccagcaacgaaccccgtccttgagggcaagagatggaagttgtggcataaagctatcgggggggttctagatcaggttccccgaatcagttgggagactgttctcaaggaaaaacacccggaaatgcttcatcttctcgaatttccctataacgggagaagcgcccaagagtcttctgaccaaagactacattatgccaaacgagtcttatttcgttcggaatcacggtggcatccccga

SEQ ID NO: 131743 - DNA, 331 bp, Zea mays
  Clone ID: MRT4577_51631C.1
tctgataattttgacagaattttcctgtttgcatcatgctgtatttttctttttcttgtgttgactcaatttctttaacttagcgtactggttgtgggatttgatggtaacataaatagtatgagagttgcttgggaattagatgattctggagaatcagcttccaaatgttaatgacaacggaaaactcaatgtaggggcttcccctacagtatttctcaaaaaagaaaaaaaacggaaactcaatgcctctattgggacttggcagtaccaattaagtgatttccttttgttttttttatatctgtaggtttgcctgccctggtgaggg

SEQ ID NO: 131744 - DNA, 239 bp, Zea mays
  unsure (1)..(239): unsure at all n locations
  Clone ID: MRT4577_51632C.1
ttantaacaaaaaagatttagataaaaaatattacagaaaagacataaaagtctataacattgttttagaggacgcaagggagcacaatattggtcatgtgtttttcaaataacacatttgtgcctatttaaaatagcaaaacagtgcctgcatatgaccaatcttattttctaagtgcatgctacttctttcttttttttattaatatttttttcgtaattttgatatttttttattt

SEQ ID NO: 131745 - DNA, 1244 bp, Zea mays
  Clone ID: MRT4577_51633C.1
gtcgtgggtgcgcaacaacatccaggcgtacccgtccgtgtcgttccgctacgtgtgcgtgggcaacgaggtggccggcggcgcggcgcaggacctggcgccggccatggagaacgtgcacgcggcgctggcggcggccgggctgggccacatcaaggtgacgacgtcggtgtcgcaggccatcctgggcgtgtacagcccgccgtccgccgcggagttcaccggcgaggcgcgcgggtacatgggccccgtgctgcagttcctggcccgcaccgggtcgccgctcatggccaacatctacccgtacctggcctgggcatacaaccccagcgccatggacatgagctacgcgctcttcacctcctccggcaccgtcgtgcaggacggcgcctacgggtaccagaacctcttcgacaccaccgtcgacgccttctacgtcgccatgggcaagaacggcggctccggcgtgccgctcgtggtgtcggagagcgggtggccgtccggcggcggcgtccaggccacgccggccaacgcgagggtgtacaaccagtacctcatcaaccacgtcggccgcgggacgccgcgccaccccggcgccatcgagacctacctcttctccatgttcaacgagaaccagaaggagagcggcgtggagcagaactgggggctcttctaccccaacatgcagcacgtctaccccatcagcttctgaagaaccgttaaccgtaccgatccaagctagctgctagctggccctggatggtggctccgaccgacgacggacgacgacgatcgacctgcagccgtatgtgtcgatccggccggccgtatacggatagtacgtagcatgtatgtatatatatggtatatgtgggcttgctttgcgaccgctgggagtgagtatccgatccaatggtacggtagctactcccagatgcgtacgccgtgagtgatgctgagtacgtattttatatgtatatgttatacacatcgaaagggatctatcggagacgacgcgcgcggttaccgtatatattgataaatacggtaacatcgtacgtcgtcaattgatcgatgatctcccttcgtagctctagtagtatacagagagagaggttggtgatggataagatacacatgcatgtacattatcacgcaccgtataaattaatatacggtttttaattaacttgagataattgtacgcgtacatcaaaaaaaaaaaaatccgcggccctgaattc

SEQ ID NO: 131746 - DNA, 686 bp, Zea mays
  unsure (1)..(686): unsure at all n locations
  Clone ID: MRT4577_51634C.1
aatgcggcacgagggttttttctgagagaggcggcgatggcggcgacgatccaatccgtgaaggcgcgccagatctttgacagccgcggcaaccctacagtcgagggcgacgtgttttgctcagatggaacctttgcaagggcagctgtgcccagtggagcatcaactggggtatatgaatcgctngggttnagggacggtgccttnatattggggaaggggactacaggctnggaacatgggaannctggccgggacctgctctgattggcaaggaccctacagcacagactgagattgataacttcatggttcaacaacttgggggggccaaaaatgagtggggatggggcaagcaaaagcttggggctaatgcgattctggctgggggattaggtgggggggagagtgggggtaaggtgtgggagggtggttggggggggggggggggcggggggggggggggccggggggcgtggtgggggggcggggggggggggggggccgcggggggggtggggggggggtgggggggggggggggtgcggggggggtgggggcggggggggtcgtcggggcgtgggggggctgngggaggggggcgggggtggggcggggggctgggggggggggggggcggggggggggggggggggggggggggtggggggggggggggggggggg

SEQ ID NO: 131747 - DNA, 534 bp, Zea mays
  Clone ID: MRT4577_51635C.1
ccggccgggcatcgtggttgacccgaccgcagccgagtgcccgattacaatcagccatcgccaccacctccctccgcggctccgccttccgccgcgaacacgccgctgtctcgaccccttgtcctcctccttcagcaagatggcggaggtgaggagacccttccgctccgtctgctggttctcgttgcggctggcgctcgttactacggtttaggtttggccttgcgtgcccgacgtcagggcgccgccggtacatgccctccgctctgttcccggccggattggtggcggagaagcgagacatcgtaggatcgtatatgttttttttttcttcttctctcgttttcattgggcagaaatgcgaggatgtatctcatccgcgtttgcagattcagggtggttagggttgccgtttgatacgttttgctgccgcgtctcctataagactgacgagaacacattgtaggcttgtatcaattctgaatcataacaacactgtgttcaaaaaagaaaaaaaaaaaaaaaaaagcggcc

SEQ ID NO: 131748 - DNA, 2019 bp, Zea mays
  Clone ID: MRT4577_51636C.1
gtaggcatagcgctctctctcccgctcgccccctcgagtcccgactcccgtcctcgatcgaaattccccggatcttccagctattagacagttttcctgctgattttcgcggcttcttttcttttgctcccggggagataggatggagaggatactcagatgcttcaatctagggccaacaggatccgaagatgatgatataagtttcacactgaccgtggaaacgtttagcttcgaagagctctctgctgcaactgataatttcagtagcaccctcaggataggctctggggggcaagccacagtctatgaaggccacataccccacattggacaggttgctgtcaagcggttgagaaccaatgattttccctctaagcaaagggcatttcttatggaggtctatgtgctcaattcaactaaccaccctcacattgtgaaactactcggttgctgttctgagggaacagaacgacttcttgtgtatgaatatgtaaagggggggacattgcgtcatcgattgaaagagttgaactggtatacgagaatgagaattgcacgtgacacagctacagttctggagaaactccatctccaatccgatccaccaatcatccacagggactttaaatcagacaacattttattaagcacaaaccttagtccaaaggtttctgatttcgggatagctaaaattgccccagctggggatgagcttactgcagcaacatcagaaacgttgggaacgtatggatatgcttcaccagggatttttcgtccattaaatgcgacagtcatgacagatatctacagttttggggttgtgctcttggagatcattactggaaagcctgccattgatcatagtaaagaaggagatgaacattatctagttcactggagacaagttttttttggagctgattatgttattaaagagcaagttttggagtagtggttcatttgactgtgtttggaagtccaacgaatctatggacagactaaggttgaaaaatcgtttgtggaactaatgatgatatataaactgatgggcatgtttaggcatacatgtggtttatctgttattttctgaagataaataatactggagagagagagagagttgtcggtacatgtactgttcgtattataattggcttgggagagtgctgcatctgatgggcatgaagatatataaactgctgcatcaaacaggccaatttgaaagaactatcagaaactactgggaacagggactcacttcaggtcgtttatggcatatatgtacttgtccgaagataaacaaatacctgagaaagtgtttggtatcaccatatactgtttgttcttcatcatcttggagatgtgcagcagccatttgtaaactactttggatcaagttcctggtgtcatttctccctagattatcatttcacaaaacaacccctgtgcaggccgcaagcaagtcgaaagatgggaactttgaggaagtacttgatccaaggttacgtggctctgtatccagaatggtgctcagcgaggctcttgctgtggtggataggtgcactgggacagaacctgttggccggcctcggattagagaaatcattagagcccttcgccatgtggtgtccatatctcaggatgatactccgggtgcgtcatcgtcagcagcgagctagatacgtgcatggggtctgtcactccatcttcgatgaagcatataagaggcaaatgctgacaagaaagcaaaaactgtcgactgatgcgcatctgctgtttactgattaaaatataattcatgcatgtgactgttagactgtgtgctatatgtaagagactctgccttccatctcgtacatcctgaaagcttctgtcagccacctgcacagcacttaggtgcgtttggttggagagtcaaatggaatagagtggatccattatagtatttgagaatggagccattctattctacgtttggcaagaataacaaagtcgttctattttttgtttggttgg

SEQ ID NO: 131749 - DNA, 273 bp, Zea mays
  Clone ID: MRT4577_51637C.1
ctcgacgcccggcgcacacggcatactgcatcataccgcaccggcagtggcggagaaaagagatgaggcagccggggccgggagccatcgccgcctcatgcctcccgactccgtgacggcccgcagccacaggccaccggataacgcacacagcggaaccatccaaaaacgcgggagctttcccccgtcaaagcccccaccctaatcccccgtctcgcgcgccaatcaactcaccctcccctccggcttccgcggaactaggagcagccatgc

SEQ ID NO: 131750 - DNA, 512 bp, Zea mays
  Clone ID: MRT4577_51638C.1
tttttttttttttttttttttttttttttttttttttttttttttttttttttttttttttttttttttttttttttttttttttttttttttttttttttttttttttttggaaacaaaaacccccgggggattttttttttttatgtagttggccccgggaaaaggggggttttacccttttcgggcaaaaaaaagggtcccccccctttagggtaaatttttactggccctcccaaaccctatccaccctttatgggggagccattttatggggcccccccccaaaggggagcggtaaacttaagcaaggttccccttgggggccctttagccccctttttgatcaggttttacaaggggaaaatacccctggggggccctttttgatccggggaatttttttaaagctcccgaataaggtgttaaaggttttttctttttataggccgggaagggggtttgatcataatttttaaaagccttagtttgcccacaaaaaattttggggg

SEQ ID NO: 131751 - DNA, 273 bp, Zea mays
  Clone ID: MRT4577_51639C.1
tccacaacgtacgcttagaggaaggctgcaggtgctcctccgtaagccgagacgagggtatggcaccatccctgtgagtaccaacactactaatgcagctcgccatgctctatcagtaccgaccatggttgctaactagatctccgacttagagaaaaacactaataataccgcacatgctatcttttcaccactagattttcaaacgatcgccatcaccaatagcatgaatctcatgcacctgtccaactccgtcaaactactattcttcta

SEQ ID NO: 131752 - DNA, 316 bp, Zea mays
  Clone ID: MRT4577_5163C.1
cgccccaccaggggctcggcacggtggaagccaccagcgacgtgccggaaaaggagagagaaggcaaggacacccacagagagagaaagaaacaatctgccatatggctggtactcctacctcgctgtttgggggtctgcatggttaccgggggcatctctgggggtcaaggatggtgtgcgtggatttctttgggcgtgcggctctccatgggaacctttgttgcctgactcgtcggtcgcccatcaccgcgggtgggattcgatgtcgtgtaatcgctggtaccgctggaggaacatgaaagatggaacgatga

SEQ ID NO: 131753 - DNA, 174 bp, Zea mays
  Clone ID: MRT4577_51640C.1
tcgttcgtgctatttcatatctattatataatctcacctacattcacatcacatatcctacctttactatcatctaactaaaaaaactctacctttactcaacttacaatctcttcactacataaacctttctccatctcaacttaatctaatacaccatatcctattttcctt

SEQ ID NO: 131754 - DNA, 124 bp, Zea mays
  Clone ID: MRT4577_51641C.1
acgacgccatcgcgtaccggggtctggagtcagatcttcgaccggtccggggtccatggtgtggctgtccggcgcagatccaggcggtgcggcggctgtcgtgtggtcagacagtggtcgtgcg

SEQ ID NO: 131755 - DNA, 830 bp, Zea mays
  Clone ID: MRT4577_51642C.1
aattcgtgatgaagacatttcctgaaccactgtgattagtacagcaaaaatcaccatctttcgactgagattgaattgtgggcctcggaccctctctttgttcttccgtttccaccctctctctcgtggttctcccgtgctctgtgtccgtagcggcgacgactgggcgatcgccgccgccttaagccaggtgctcaggtctgccacttggcacttcgccggcgacgagcacctaacaggatttacaagtgagcgaatcgacttctacgtaatggtaataatagatttgacttctctaaaatagtacttacaaagagatggctggtggttttcgagtactgcatcttgtgaggccatttctggctttcttgccagaagtacagagtgctgataggaaaataccattcagagagaaagtgatctacacggtcatttctctcttcatttttctggtctgcagccagctcccactctatggcattcattcaactactggcgctgaccctttctactggatgcgtgttattcttgcatcaaaccgtggtactgttatggaactgggtatcactccaattgtaacatctggaatggtgatgcaacttctagtgggatcaaagattattgaagttgacaacagagtgagggaggatcgtgctctgctaaatggtgcgcagaagttgcttggtatccttattgccattggagaagccgtggcgtatgttctctctgaaatgtatggcagtgcgagccaactgggaactgggaatgctatcctcattatacttcagccttttcttttgctggtatcattgtcaatctgtctagatgaa

SEQ ID NO: 131756 - DNA, 186 bp, Zea mays
  Clone ID: MRT4577_51644C.1
gagaaattcttaacatacctatgtaccgttgacctctcagattgagatagttgtgctgacttcaggttcctatggcatagagttatctttccttactcttcttctcgacctaacgtattcgctcttcggacagctgcctgttcgctaatcctggcctaaaaagcatagcatagatccacctggttg

SEQ ID NO: 131757 - DNA, 330 bp, Zea mays
  Clone ID: MRT4577_51645C.1
gcaactccttttttttccgtggtgctcaatcaggccttcgtggatgataaagcgcattcagcacgccaccggctccgttctggaaaaactccgttgagggtccaaaatgtccagtgacgtgttaatccatcattccaggcgggtatttcgtggcgcccataacgcccacacctacttattgcctcccccccactccttggtgaagctgctgctgctcggcccgtacctccgctagagcttgactgttatgaacaatcaggcccacagacgcatgagagcaaaaaagacgtagcagcactttttcatctcttatgacacgtgagcctgatc

SEQ ID NO: 131758 - DNA, 234 bp, Zea mays
  Clone ID: MRT4577_51646C.1
cacagccgtccacacaagcacttccacatctttcaggttctgcacacacacacacctaacgtacccgcgaatctcttactacgaggaggtggactactgctcggaagacgccatgtctgttgccctggctctcttcatcccccactaacgcgtcttccagcatcacttcttcctggagaagttcgaggttgtcaacactgtcttacttcgccgactcctactaccattcaccac

SEQ ID NO: 131759 - DNA, 211 bp, Zea mays
  Clone ID: MRT4577_51647C.1
gtgaaccaaacatcaccttattttttttatgctacaagcaacccacaccacgctgtcatggacacgcattttgccagccccccacactaagtgacatcacacaggctcctattgatcctgtgcttcttgaccatacaccatattacatatatgtcgcacattgacctccccacctatacctcctagcaatagagttcatgatcaataagcc

SEQ ID NO: 131760 - DNA, 222 bp, Zea mays
  Clone ID: MRT4577_51648C.1
gggcaacagcaggttcacttacactgttcttgtagatggctgctctaaaaagacaaatgaatggggaaagacaatcattgaatacaaaacaaataagccatcacgcctgcccttccttgatattgcacctttggacatcggtggtgctgaccaggaattctttgtggacattggcccagtctgtttcaaataaatgaactcaatctaaattaaaaaagaaag

SEQ ID NO: 131761 - DNA, 773 bp, Zea mays
  unsure (1)..(773): unsure at all n locations
  Clone ID: MRT4577_51649C.1
gatcggaagccgagggccgccgcggttgcaagaactgggctgtggtgcacgccgaagcgaaccatgggctaatagagcgaaggtagtgcttggagttcgaaggaaagtttgccagagttcacgtctcgtggggaacttcactgtgtcgacgatggccagcctcgtcgttgattgtgtcgatggccagcctcgtcgttgattgagcatcgcggccaagtctgttgtgaccgggattcttcaacacgttccacctcgaggtatggatccaaatgctagcagcagcatctctcaactacttccgcgtgatgcgatggtgctgggtacgtagatgtgcttccgctctctgctgcatgccgttgtaggccatcctattgcctctcacgccctgaaaccgggtctccggctaaccacctagcttgcggacaaactctcgccgacgaaggttcaccgtgccgcgtggacagcttcgccttgcctcctaaccttcggtaatgccccttggatcaattcgacaccttctctgcattgcttagcacctagttacgcttggaatcaagccctggcatgataattgggtgctccgcggtcatggcgccgccgtgggtagggccggcgtgctgccgtattccggctgngaggaagaaaactggcagccattggattggaagttgacggttaggatgggttatgggaaagatgtaccgtggaccgttgatcgcggaatggacgtatcggattagattcacgtataccccgtcgactcattaaatcca

SEQ ID NO: 131762 - DNA, 486 bp, Zea mays
  Clone ID: MRT4577_5164C.1
aagctacggcacctgtacgtctgggtccggtattgcagggactgcccacaccagccgtgcctcagcagctcgggcgtgagccatcacatcgagagagttggatccatagcatcagtggatatgcctgacgagcgtgatgtgtgccagagggtgggtgaatgagcttctgcgtccctctcgctactctgcccatactcgcaaaattgcccactccatctatttcgggagatggtcgtgcatatatatatagtgaaacccggctccctttcgttggggtgggggtgatggtacttggccgcgggagattgagattggatggggccctccctttaggtgccacgctatcatgtgacgtagggctggggctgggcactgtggtgtgtttcaggaggatcctctacaggcgacctgcttgcatgcaagctcggcactgaccgccttttacaacgccacgactggtaaaaccctggagtaaccatcttaatc

SEQ ID NO: 131763 - DNA, 440 bp, Zea mays
  Clone ID: MRT4577_51650C.1
aagggccaaagggccatttttttaaaggggggccacacggacaatctcaaaaaagtaggaaagggagaacaggccccccccaggggactaaaaggggagcggggaacccacggcccgggggaaatgcccccgcccattaaaccggaaaaacagaaccaaaacccgggctaaaaaagcacaagaccatggtatatcccggaaaaaacaacccggggacctacaaaaaaaaggagggcccgcaaaaaaaaaatatccctggaaaaaaaaagcctttaaaccccggaaaaagccccaagcccgccattcaaaacggtatgccccccgccaccggggttaaaaaaaaaaaaaggcctggaaaaaaaaaaagcccgcccttggaaaaagcctcttgcctaaaccaagggagcttaaaagcaaaacccccgggcaggggccccaaa

SEQ ID NO: 131764 - DNA, 541 bp, Zea mays
  Clone ID: MRT4577_51651C.1
aaaaaaaaaaaaaaaaaaaaaaaaaaaaaaaaaaaaaaaaaaaaaaaaaaaaaaaaacaaaaaaaaaaaaaaaaaaaaataaaaaaatggtttgtccccttggccggggccacctttggggggtttttttcaaatttccttccccttggggggggttttagcttgcttttttgggccccttttggcccttttttgagtttttttacaatggattggccgcgtttttacagggtcaggactggaaaacccctggttttacccattttattccctttggggcacttccccttttccccaattggggtgttacaaaaaaggcccccttccattgcctttcccaacattttcgcagcttggttggccattggacccccccttttgggggcctttaaggggggggggggtgggggttccccccaactttaccctttccctttccagcgccttatcccccggtctttttttttttttcccttccttttggggccctttcccgggtttttcccgttaaggttttaatttgggggttccttttggggtc

SEQ ID NO: 131765 - DNA, 477 bp, Zea mays
  Clone ID: MRT4577_51652C.1
caccaacggcgcgtacaagagcgtgatgcaccgggtggtggcgcagcccgacggcaacaggatgtccatcgcctccttctacaacccgggcagcgacgccgtcatcttccccgcgccggcgctggtgaacaaggccgccgcaggggatggggatggggtcggggtgtaccccaggttcgtgttcgaggactacatgaagctgtacgtgcggcacaagttcgaggccaaggagccacggttcgaggccttcaggtccatggagacggacagctccaactgcatagccatcgcgtaaaaagtaccttgctctggtttactgttcgagatgtatctgctgcatgatcatctatgtatgcctggtctggtccctctctgctcttcttcgctcgctagtcagcctgctagctagttatatgtgtcgcgcactctgttctgtaatatgtcttactttacaaaactgttcgtgttctcctttcg

SEQ ID NO: 131766 - DNA, 435 bp, Zea mays
  Clone ID: MRT4577_51653C.1
gccggccggtccggggcgacggctgggtccgtacatgaggtcagggactacttgaagaacatgttgcccagctccagatacacgctacagggcagagggactgcacttattgcaactgacactgtttctcttacttcatgttagctgtctgattcaaaaatgatctttatattttgttggtttcctattttatcatgtaagctgtaagcaatataaaaaccacagattgccggtctcagacgaagagcagcagtagcagcatgttctgcttaccacagcagcagcagcgaagtattttattgtaagcaagctggggtagactccggttaagaaactcagtagaatgcacggttcaggcatatagataattgtttttcaagaataaatcttagatatattcttcttctctaaaaaaaaaaaaaaaaaaggccccta

SEQ ID NO: 131767 - DNA, 352 bp, Zea mays
  Clone ID: MRT4577_51654C.1
gcgtctggctgtctattgacgggaccagggtggcagcgcgcgcgggtcacccggaaacagcgactagcccgggcacaactggtggtgctgaaaactgggtattgctgggcaggcgcgggatcgcatcattttttcttggccgcgggcgggggggggggggcgcctgttgtgttcttcttctcccggtcttgctggctccctctgcttccgtgtgcctcatgtcacggtctgtggacctaccaaggtgtggatgcgctgggaatgcctgcaccggcgtgggcttgggggggctcatcttccccgttcctgccttaccgctccttccgctctttggctccttctggggctcctt

SEQ ID NO: 131768 - DNA, 266 bp, Zea mays
  Clone ID: MRT4577_51655C.1
ctggtgaatcacctggctgagcagttcccctggagccccttcgggatcagtgctgtgtcccagatgggcacttctgagccttcagagtacgtcctgcctggcacttactggtccttaccagagacgcccagccccatccctgtcctcatgacccctcgtccaccctgcacacacactataaggctgtgggctgccagcagccccgtctgcccaccattcccggccgtggaccatagtcgggatggcagcagacacacatgggcagg

SEQ ID NO: 131769 - DNA, 295 bp, Zea mays
  Clone ID: MRT4577_51657C.1
ggggaaggccgaggaggaggagcaggaggctgcttccgctgctgcgtcgcggcccgcgccagcgtgaccgacagctacggttgttcggccgacttttccctgggcgtacggcaggcagggcggcgtgtcggcgcggacaccgtcaattgcgtgacatcatgagttgcgctgcccgctccgctccgctaggacgaggttacgatacggtcagtgcagtggtgcattattgtctgcactgtcacactccgaatagtcgcatgatggctgtgtaccgacgacgctgatttatcccaca

SEQ ID NO: 131770 - DNA, 320 bp, Zea mays
  Clone ID: MRT4577_51658C.1
gattactgttgacaaaaccattctacggaacgcacgacttaacaccatatggaagctcgtcgggtcaacctgatgcataaatgtcactgacgcttagaaggctatctggctggcgacttagttgataatggtgtgttttgccatatatagcaatggaccatttcattttatggacaattgacttctgggtggttggctatacaaaccataggtaggtctgtaatgactattctaactcgatggaccgaactattgtatgcagactactccaaactggaatcatgaataaaatgtggtactatatgctcgtagacattttc

SEQ ID NO: 131771 - DNA, 245 bp, Zea mays
  Clone ID: MRT4577_51659C.1
ggaccacattgagggctttgcacgtggggtgtcttgggttactaatggaaggagacctggcctggaaacacctgttggactccggcccacagggggacactgtcaggttgccatacgttaacaactgggttatactcgagcgaaacttacccttgaagatgcactaatgccgctacgtgtgggaatgtgagttacagactgatactccgctactgatgacgctgccttttatcgtggcctgaggg

SEQ ID NO: 131772 - DNA, 401 bp, Zea mays
  Clone ID: MRT4577_5165C.1
gtaagctcggaattcggctcgaggcactatctaaacattttgtttatgacaatggaagacacctttcctacgcgggggggaaaccactgggtggatatcctgacagactgggcaagagccatctagattagcttctgcttgcgtcataagatggcataatgggctctgaacctgatcgtttatgtcctctgtgctggctaatacatgagcaagaaggcaacgtgagttgtgaaggccacagtctgtatggcctgctgctcgccatgtcttggtggacactatagttcaacatcttcatatacgagatgggcattaaccaccctatctgaagcaaccatctgacacaggtgcaaagcatatacacatacattgagcacgactgagctgatctatacatgact

SEQ ID NO: 131773 - DNA, 240 bp, Zea mays
  Clone ID: MRT4577_51660C.1
caccactcgagtgtgtagcgagctagatattcgccgcacatgtgcctcttcgggctgatgatacccatgggagctgtccctgctcccaaacaaatctgggatgctatctccatgccttgatacgacgcctcgacagttaggtaacagaagaacggtgcctgcatcgcggactgcaggaacggggtggtatatcgaatactatttttccagggatcaagaaactgagcattctccgagata

SEQ ID NO: 131774 - DNA, 507 bp, Zea mays
  Clone ID: MRT4577_51662C.1
ataaaaaaaaaaaagaacgaagaacaagcaaaaaaaaaaaaaaaaaaaaaaaaaaaaaaaaaaaaaaataaaaaacaaaaaaaagaaaatatggcatggaacttggtaacacgttcacgcttgcgtgggcgcgggctccatttcccccctttcgggggccccttttagggcctttcttggccgcgggtttccccccccccttggtcgggggtaaccctggttttccccgggcttaatccccttgttgcggggccgggtttcccccgttggccccctggttaacaggcctggagcggtcgcccctttggccagttgaacagcctgtccggccggtgggcccgccctgtccccgctcggtacccccttttggcgcggcggttgcgcgccccttgaccggtgtgcttgcccccgttgtgggggcccttccccccgctcttttccctttttctttcgcctttttcgccgcctttcccggttgccctcttacttttctgctccgtttgggcc

SEQ ID NO: 131775 - DNA, 453 bp, Zea mays
  Clone ID: MRT4577_51663C.1
aaaaaaaaccctgggggggccgggggggtaaaaattttggaacggaagggggaagggaaaaccaaaaaaaatggtggttttagcccacccggaatcagacccccaacaaaaaaaggggcccgggcttttaaaaattggtccccgcccgaaaaaaggggaaaccggaaccattcccctttagggaaaatttggggaaccaaaaagccccttaaattttgggccatgggccccccccctccggaaatttaaaaaaagggggggggccaacggggggggctaaaaaaaccgggggggggccccccaatggaaagggcaaaaaaggggtcccggcaaaaaaaaaatccggcgacgccgaatacctaaatttaaagggggcttactttagccggcaaaatttcttgggcaaaaaaaaaaaaaacggggggggtttctgaaaaaaaaaccgggccaaaa

SEQ ID NO: 131776 - DNA, 385 bp, Zea mays
  unsure (1)..(385): unsure at all n locations
  Clone ID: MRT4577_51664C.1
ttttattgcgggatcaccgccggagaccttcctgtgggccttgcacagaactgatccgcgttggagcaccgacatcggatgcgtaggagaccgtgtcaatggcggactgatttggtgacaagcccagtttacgcctatctgatcgtgagatgaggtaatcgctgtgactaagatccaccgtgctgctgaagcacgacatgtgcgtaggcgctgactgtatggctagatccgactctacgactgtggaatacaccaggatgccgtggcatataggacaagtatggtgtgctggagtctgctcacgctagatcagatacttctacacagcntggctcatctccagaggatgttagtgatggtatgacagactgtttcatgacgcatg

SEQ ID NO: 131777 - DNA, 422 bp, Zea mays
  Clone ID: MRT4577_51665C.1
attccgcacctatgcgaatttcgtgctcgcgacgccgtcgacgccggagatgtccgattgccgccgcagaatagcttccgaatcataatcaatgtgggaacaaaaatgcgccagatgcgcacccatcccctagctgccatccgctatgcactactgacaatgaccatcacgtacaaagccatgcgacacagtgctcgggggcgcaccaagctcggattctgagagaatgaattgggcgcatgctgcgtcggaaggctacgtgctcaaagtatcttccttctgttttatcaaggtgacagatctgctgttgcctaaacagtggtggtatgacgcttttattaagattctgaggcaatcggctggcaacataagattggcactaatgcgggggaccccgatattgctttcagcaatgctaaggt

SEQ ID NO: 131778 - DNA, 557 bp, Zea mays
  Clone ID: MRT4577_51666C.1
tcgcgatctagaactagtttttttttttttttttttcccgcgaaatcaagtagagtctgatctcaagttctcaaccccgccactgaccccatagttcgaataggcgcgatgtcgccatcacttgctcgccagcctacaggttacagcgcgcggggagtgtgaggcaaaacatagccgggagagaagttatcctccatccacccagcgcgcgggggagaagctgccagcgaaagtcgcgacgaggcttaacctaggtggctggtccatccaatctgaccccatatatccagaaggtaagtagtacgaacctagcaaatttcttcaaattctagttgaaatcacatgatttcgtccccacattcgcctgcgcaacacttatttactttatttccccccctctattgttcatgattcctgaatcctgattcgcatggccacaactcgccattggtacctcttcttctgtacatcatagctaacactgaaagctcggcatgtcacgccgcttagtgttttacagaattgataagccctcacaccatgggtaggagcgcctc

SEQ ID NO: 131779 - DNA, 155 bp, Zea mays
  Clone ID: MRT4577_51667C.1
ctccgttggaagatgacactagtgtgtaataatctgtattatatcggttgttgttggttcgttgtagtgtattggagcactcttgcgaactcaatcccacatgggaggattcatcttgtacataaattaccgagaaatattggggtttgccattt

SEQ ID NO: 131780 - DNA, 508 bp, Zea mays
  unsure (1)..(508): unsure at all n locations
  Clone ID: MRT4577_51668C.1
gggaagggaagggatcaaaaaaatttggcccctgggaccaaattgaaaccttgggccccatttttttggggggcaaaaaaaagaattttttctgggggtccgttaccgggaattggaaattataaccccggaaaagggggaaaacccttttggaaaaaagggcttaaggggcccaacccaaccctttaaagaaaacgaccccaagggcaacagccaaaaaaaacggccatcaaaggggggcgaaggttaactttaatggcccgattaaaacggttaaacccccctgcccgatggggggacatggggggaaccaaaccccggcccgggcctcccaaaaagggccttcccctgggcccccctcatcgagggcaggggttgcttcggcgtctttttccggttaacctctttaagccccgccctgacagcgggggccctgccaaggccgttaaaaccggccccggccccggcctgggcctgggccgaancttggcctttccctttgcctgcc

SEQ ID NO: 131781 - DNA, 582 bp, Zea mays
  unsure (1)..(582): unsure at all n locations
  Clone ID: MRT4577_51669C.1
gttgctactctcgcctccgccatgattccgcccgcagactctttgctcaagtacgacaccccagtgctggtgagccggaacacggagaaacggagccccaaggctcggctactgaaagtcagcccccagcagcctggaccttcaggttcagccccacagccacccaagaccaagctcccctcaactccctgtgtcccagatcctacaaagcaggtagaagaaatcttgaatgccatactacccccaagggagtgggtggaagacacgcagctatggatccagcaggtgtccagcacccctagcaccaggatggacgtggtgcacctccaggagcagttagacttaaagctgcagcagcggcaggccagggaaacaggcatctgccctgtccgcagggaactctactcacagtgttttgatgagttgatccgggaggtcaccatcaactgtgcggagagggggctgctgctgctgcgagtccgggacgagatccgcatgaccatcgctgcctaccagaccctgtacgagagcagcgtggcgtttggcatgaggaaggcactgcangctgagcaggggaagtca

SEQ ID NO: 131782 - DNA, 875 bp, Zea mays
  Clone ID: MRT4577_5166C.1
ggaccctcgggtctgccgggcggctgggttttacgaggcgcggaaagataaagttaaaacgcgccgccccccgcccccttttatacacagggcgcggcgcttcgggaaacccgcagtccaacagtacggtgtcaatcaacggtcatgtcaaaaacccccgcggaaccacttcgagcgagggcagcgtctccaccatctagcgacgtcttcgacaccagatgacttagtcgaactggtccctcggagggcaaatgttgggacgaaggcgaagacgtcacccttcgctcgatgccttcgtcctcctcgctgcaccaacggagacaagacaacgggcagactaacccttcgtcccatacgtcaccggacgaagacctgtggacgaggtcgtctcatcttgcgacctcgtccagcatggaggctcacgtgtgatccggcccattgtaacaggccctgcgtggccgcagcgcattacgggcctaatttgtaaaggcatccctgtaattacggtctgtaaccccgctttatgggaatattccggggataacctaggtgtctgagggcacatgcgtccttaacacaggacgctgggcacacaaatacctataaatacccccgcgcagtgcccttgagaggctagattaacagagctattgccatctcgtgcaaaaaccctgtttgcgctgctacattcccccgttggatcaccttactccagtgagcaagttccaacaatgcacccgaatcaaaaagaacgactgcaggataattcaaaatggaaaagataccagtcatgacgagtgctccctctggaatatcagccaatgtggtgaagtttagccttccttgcctcacttgcaccctctgcctcttgcctg

SEQ ID NO: 131783 - DNA, 835 bp, Zea mays
  unsure (1)..(835): unsure at all n locations
  Clone ID: MRT4577_51670C.1
agtaaggcccgccgcccggaggnccacgtttggggtgctaaagcgccagcccgccgctcgcggcggccacggngacgaccactacggcaaagcaagggcaaacgaagccgacgcaaaggacggagcgacaccacacggagcaagaaaaaaaaaaagacacaacaaaaacagaagactacacgggccagacaacagacgaaaacgaaacaaaaaaaaaaaaaggacaaggaaggacaaaaaacagaaccagaaaaaagaacaaagaagacaaacaaaaacgaacaacgaggaaagaaaaaacacaaagcaaacgaaacaaaacacaaaatggaaaagacaaaaaaaaaaacacaacacaaaaaaaacaaaccaaaaaaaaaaaaaaaaaaaaaaaaaactaaaaaaccagaaacaaaacaaaaagaaccaaagagggaaaaccaaaaaaaaatagaaaaaaaacataaccaacaaacaaaaagaaaaaacaaacaacaacacaagagaaacaaaaaaagagacaaacaaacaacaaaacaacactaacacaaaacagaaccaaaaaacaaaaaaaacgaaacagaaaaaacacaaaaaaaaaaaaacaacacaaaacacacaaaacaaaaagacaacaaacacacaaaaaaccaaaccagaaaccacaagccacaaaacaaaaaaaaaagaaacaacaaaaacaaaacaaaaaaaaaaccaacaaaacaacaaaaaaaacaaaaaaaacaaaaaccaaaaaaacaacaaacaaagaaaacacacaaacaaaaaacaaacacaacaaaaacaaaaaacaacaataaccaaccaaaaa

SEQ ID NO: 131784 - DNA, 600 bp, Zea mays
  Clone ID: MRT4577_51671C.1
ggggaaggaatatatttatttattttgggcaaagtgttgccaatgaagagttccgggtaacaccggtttttaaaaggaaaatgattttccaaaatatgggggctgacccctttccttatgtaagttatctgccccaagggtttttaacaacaaaggaaggtaaatgttttagttaggaaaaagctaggaatttgtccccggttttgtcaccaagcagtcctcgtaaaaatccaaaaatccaccaaaataaggggaaaccccttccttgcttaaaaaacttcatgatcttccagtatactggattttgaattaaaggggcccccctaatttaatccagcacagcacacactttttcctttttgaaagggaggccctgggaaatcatttagttgggcaactccatgggaggttctataaaggccctgatcagttgaagcttttgggggccaaacttttgggggcatgcctggaacagtatgatttgatttctttacaaaaaaaaggttgccacaaactaaggccacccatatttatgtttttagctggcccaaattatatttgcagcttccagctttgttaaaatctacaagttgactttaa

SEQ ID NO: 131785 - DNA, 400 bp, Zea mays
  Clone ID: MRT4577_51672C.1
ggaattatattggcgggtcgaccagttttttagttgggggacgaccaagcattttgaggtcctgtacgaccaggggcattgaattaaccccaaacatcctagtcaatacaggatgcatagatctagataaaagatttatgaccttgtctcaaaggggaccatctacagagtgaatcctctcagctaatggcattattagaagcactactctaaagtagacagactcaactgagggactcaacacttatgagggggactatgagacaataatctctgtatgtagcttagctgatggaggaggatggacgacactggaatgacgactggacactcgagcctcaagatgaccgtatcatacgggcaagtcctagctagccatgaggatggaacgcttattgct

SEQ ID NO: 131786 - DNA, 377 bp, Zea mays
  Clone ID: MRT4577_51673C.1
gagacacagaaagtgaagagcactatctgcgaactgacaccaatgactaccaagatgttaatgctgcttgcactgattgcactatgtgtgagcgcaacaaatgcgctcattattgcacaatgctcacttgctactagtgtcattatatcacagattgctgcaccagttacttcgatgggctacgaacacctagatgtgcaggccaacatgcagcaacgagcgattgcggcgagcgtgttacaacaactgatagtgcaattgcaacaagaattcttgccgcatctaacaatacaagccatgacaacgcaacagatcagcagttgctaccagcactgatccagctagccatggtgaaccctgtctgctacttgcaagag

SEQ ID NO: 131787 - DNA, 219 bp, Zea mays
  Clone ID: MRT4577_51674C.1
cgggtcgaccacgcgtccacccaagcgtccgctgacgcgtgggcggacgcgtgggcagagccagtgcctacaccgaggcctgaacctaagaccgaacctatgccagagcctaagcctgaatctaagataagttcagagctaaagcctgaacgaaaaccagagcctatgccatagcatagacctgaggcagtgccagagcccaaagctagaccgttccca

SEQ ID NO: 131788 - DNA, 463 bp, Zea mays
  unsure (1)..(463): unsure at all n locations
  Clone ID: MRT4577_51675C.1
tcgtgtggacgtgcaagggagcgtgttcgagcttcttacggcgtgtcgcacggtcgaccccgagacccgccgtcaagtctcgtccgagtaccttcatacaccacgcgacggggctgttcacagtatcgactatcatgcgcgcgatcgtgcgcgctccttccaagtctcgcgtcccaccaagtatggctccccatacgtcattccgcgtccgatgttctcgctaccttcatcgatggtggtctatcgatgaactccgcgatgaagagcatcagacagccatcgcactatcgacgagctacgtccttcttcacacgtcaggcatgggcccgcggcataatggacgtccagctgtcccggaagcacgtacataccttctggacacggttagccgtctcacgatccaggtgtaccctangtcgtggacggcagtgatgatgacgttcgacaacgtcggcatgttgag

SEQ ID NO: 131789 - DNA, 135 bp, Zea mays
  Clone ID: MRT4577_51676C.1
tccacgcgtacgacatattgaagaacactagcaacatcttagcaccaatgggagccaggagttttggcctccgtggcctccatgctcttttatcaagcgctgctacctagtcttttattcacaatggtcacaaca

SEQ ID NO: 131790 - DNA, 564 bp, Zea mays
  Clone ID: MRT4577_51677C.1
gctgcctcctattgcttcttcacctcgcttcagtaccacatgcctccaaacaaataacgggcactggaaacaagagagactgggccttcgcggcggagctcttgccctgcttctgctcctgttcgtccacggaggccagcgagcagcagaggccggcggggacgcgttcgtgagggtccagggcacccgcttcgtgcaggacggcaagccgttcttcgccaacgggttcaacgcctactggctcatgacattcggcgccgaccccgcgcggaggggcaaggtcacctcggcggcggcagcgcgctgcagtactctcccggccgctacaacgagaacaccttccaggggctggatttcgtgctgtctgaggcaaggaagcatgggattaagatgattctgagcctcgtgaacaattacgacagctttggagggaggaagcagtacgtgcagtgggcgagggagcgggggcagaccattggatctgacgatgagttcttcactaacccctttgtaaagggcatctacaagaaccatatcaaggccgttctgacgagggtgaacacg

SEQ ID NO: 131791 - DNA, 1962 bp, Zea mays
  Clone ID: MRT4577_51678C.1
gccggccgggtttcgggaagaaccccatcaccttgatgtttcccaacacccatgtggggtgctcactgtccacaaacttggagcaaaaaagcttttgccttcaagcgccgtaaccgacaaagaaagttcatgttcttgctctttcttatttttttttcaaaaaaggtcgatattaccttcttccgctccgtcgccgaaatagcggtgcggagccgaagaaccactggtgccgctaaccagtggtcctgcctcgctcagagaccgtttttgcagcagtgatgaagattacctcaggaaattcaccaaaaccagacctcggcctatttaaacctcagctgggagagctggcatcctgcctgaggcctgagctgcctccatcctatttgcattcttcaccctcgcttcacgtcaccaccattgccatccaagaacaaattaagcgggacactggaaacaaagagagacatgggccttcgcggcggagctcttgccctgcttctgctcctgttcgtccacggaggccagcgagcagcagaggccggcggggacgcgttcgtgagggtccagggcacccgcttcgtgcaggacggcaagccgttcttcgccaacgggttcaacgcctactggctcatgacattcggcgccgaccccgcgcggaggggcaaggtcacctcggcgctcagccaggccgccggcgccggcctctccgtggccaggacgtgggcgttcagcgacggcggcggcggcggcggcagcgcgctgcagtactctcccggccgctacaacgagaacaccttccaggggctggatttcgtgctgtctgaggcaaggaagcatgggattaagatgattctgagcctcgtgaacaattacgacagctttggagggaggaagcagtacgtgcagtgggcgagggagcgggggcagaccattggatctgacgatgagttcttcactaacccctttgtaaagggcatctacaagaaccatatcaaggccgttctgacgagggtgaacacgatcaccggcgtggcatacaaggacgacccgacgatcatggcgtgggagctgatgaacgagccgcgttgccagtccgacgtgtcgggccacgccatccagtcgtggatcacggagatggcggcgcacgtgaagtccatcgacgggaaccacctgctggaggccggcctggagggcttctacggcgcgtcgtcggcccgcaggtccgcgaacccgtcggggtaccaggtgggcaccgacttcatcgcctggctcgacgcccacatcgccgacgcgcgggcggtgctgcgcaagccgctgctggtggccgagttcggcgagtcgcgccacgacccgggctacagcggcggccaacgcgacgcggtgttcggcacggtgtacgccagggtctacgactcggcgcgcgccggaggccccgcggcgggcgcgctcttctggcagctcctggcggaggggatggactcctacggggacggctacgaggtcgtcctcccgcaggcgccgtccaccgccggagtcatcgccacgcagagccggaggctgcagggcctcgccagggcgttcgtgcgcgcgcgcaaggcccaccaggggaaggcgggcaagggcgctaagggtggcggcaactgaaagtggggtgaaacgtgtgtggcgagatcaagaagagtgtgtgtgtgtatgcgtcgatgtctcctcgagatgatttgaagattcatccgggagccaagagttacttctacatactatctagcgttgtcctccatgttttattatttagaggacttgcgtttagttcctgtgtggatcaccatagtcgagaggagcgaagttatatgcaaaagtcgtggactcgtggggggagcaactctacaatctcgagacctttgttggtttcctcgcctctgattaaagaccccagacagttattcgaacaaaaaaaaaaatata

SEQ ID NO: 131792 - DNA, 122 bp, Zea mays
  Clone ID: MRT4577_51679C.1
cgcgtcattatgctgattgggctgataagatccatgggctcattctgccggctgatggcccacaggatgtacacaacgtgcatgtgccacttggtgtcgcaggtcagatcatcccatggaac

SEQ ID NO: 131793 - DNA, 356 bp, Zea mays
  Clone ID: MRT4577_5167C.1
tcgtttcactcggcagtcggcacgcaggctagcaggacagcattaggcagagccatcccctctcctcgctacgcgttgatcgctcggcgccgattgctcctgctgcgcctacaccctcgtgacgtaccgtgcggcgcgcgagctagcccgagacggggaacgcgagatcggcaggggctgcgaacgatgagtgcatgctgaagcccggcgagctgcagacgaagaggctgaaccgcttcataactgtgaggacggacaacaagacgaaggagatagctgaggaccaggtgggggaccgcgctacccgcgccgatgacttggaacacagcccccctgaggatgactgccggtacgcg

SEQ ID NO: 131794 - DNA, 655 bp, Zea mays
  Clone ID: MRT4577_51680C.1
atgacagcagatgtatccaggcgacgcacgaacagtgcttaaaatctgaaatggacggttatgtatccaagccattcgagggcgagcaattgtacagagaagtagctcgctttttccaaaatcaagaccaagttcagtaggtaggcttatatggaggagtgtaaagtagtggaggatatcgccaacggttcacccgtcgaggccgaaagaattttgtcaaagatctcatcttcttgaaagtggaaacgatttaggctggagatggaaccacccatgttcggatgcttggtacatctgaccaatctgcaaagctaaatgcgcaatgtcttgaaatcaacatgcacgtgcagctattcattcgacgatttgctgaggtcaaggcgtgtgaaaaaaaatcagctgcattcactaactgcaggtgccctctgccactatataatatataagactagggggagaagttttccttcccccggaaggcacggctgtacatattatattagggattggttggttgtttgtgcaggcatttttgtatgcatcatattcggcctgtatgggtcgaagctgtaaagtgtaaatgacacattcaaagatggaagttttgtttgacaaaaaaaaaaaaaaaagggcgccgctcgcgatctagaactag

SEQ ID NO: 131795 - DNA, 574 bp, Zea mays
  unsure (1)..(574): unsure at all n locations
  Clone ID: MRT4577_51681C.1
ctacagtnnaaaaaaaaaaaaaaaaaaaaaaaaaaaaaaaaaaaaaaaaaaaaaaaaaaaaaaaaaaaaaataaaaaaaaaaaaaaaaaagaaaaaaaaaaaaggggagttcaaatcttgaggaacgaaaatttatgacctcatcaattgcgaaaaattgtggcgtggtggtccttttttcaaggtggaccaaggttttcttgcccctgttttttcccgaattttttcgttcttttatttaccgcgtgccttttaacttaatttatttggcccggttttttaaccccctttgttttggttaacccctttgtgttcccgcctttatcgttttgccgacccccccttttttccccctttgttgtttttttgaaggggccttagacctgccctttctactgagttgcccttggtttttcgggcatgggtgccctctttttttgggctctttttaccccggggtttttgtgttttccccccttgtttccctttctttttccctggttttttccccccggcttttttttggggtccccttttttgtgccccctttttacccgtttttccccctccttgg

SEQ ID NO: 131796 - DNA, 711 bp, Zea mays
  Clone ID: MRT4577_51682C.1
tgcctcgatgcaaaccagaacacaactttgccacatccacatcctgagaaacaacatgagtgtagaaatccttgatggcaagaccgtccagagcttcgtcgaggacgaaggcgccttccattcatccgtggacggccggtttgcggccctcgacaccaaccatgatggcctgctgtcgtactccgagatggcccaggagctcatgagcctcagggttctcgagaagcactttggcgttgatgagtccgccatgagccgtggtgagcttgtcgagctttaccgtggcctgtttgcgaggttcgaccgagacggcaatggcacggtggaccttgaggagttccgggctgagatgaaggaggtgatgctcgctgtggctaacgggctcggcttcctgccggtgcagatggtggtcgaggaaggcagttttctgaaggtggctgtggaccgggagctggccaaagcaacttgacgaaactgcttggaacgacttttcagaatcaggaggctgcatgttcacgaattgtaacttttattctgccaattttgttgtgttacaactacaccggtgctagttatttgtacttaataagtgaaacagaagccacaacatcagtctaatttacaaaatcacaagctatttatgtaaagggaaatgttgtaaatctatgtttttggatgcctacatgagaaatatcacactagcagttttag

SEQ ID NO: 131797 - DNA, 2024 bp, Zea mays
  Clone ID: MRT4577_51683C.1
tccacaaacactaattggcgatcctggaagaataaggcaaatcattacaaatcttgttggaaactctataaaattcacagagaagggtcatatctacttgacggttcatgtcgttgaagagattatgcattgtctggaggttgagacgggaactcagtatacaaataccttaagtggctacccagtggcgaacaggaagcgcagttgggaaaactttcgactttttagtagggaactgaactcatccgagatgccttttgcacccattgcatcagactcaataagcttgatgatatcagttgaagatacgggtgctggaatcccgttcgatgctcaatcccgtgtcttcacccctttcatgcaagtaggtccatccatcgctcgcatacacgggggcactggcattggattaagcatcagcaaatgcttggttggcctcatgaagggagagatcggatttgcaagtaaaccccaagttggttctactttcaccttcactgcagtgcttacgagagtccattccagtagaaatgagaataaatcatcagaatttaaagagatcaatgcattggtggtagatcatagaccggtccgtgccaaggttactaagtatcatttgcagagactgggagttcagactgaattgacaactgacctagatcagtatatttctaaaaataattgtggatcacagattgcaaagcttgtgctcattgacaaagaaacctggctgaaagaatcccactccatgcctcttttggttactaaattgaggaacaaagatcagccagactctacaaagttatttcttttggagaaccctaaaagttctgtcaagagcaattcacatatattcagggaatataacttgaatgtaattatgaagccacttcgtgcaagcatgcttcaggtttcgctacaaagagcattgggtgggatagataaactgcattgcaggaatggagtagtcggaaattcaacactgggcagccttcttcacaagaagcgaatcatagtggttgatgataatattgtaaatctcaaggttgctgcaggcgctctaaagaaatatggcgcggaagtaacttgtgctgacagtgggaaggaagcaatcacactgctgaaacctcctcacaattttgatgcttgtttcatggacatacagatgcctgaaatggatggatttgaagccacaaaaaggattagagtgatggaaagagatctaaatgagcaaatagaatgtggagaagccccaccagaatgcgtaggggttcggcagtggcgaactccaatattagccatgacagcagatgttatccaggcgacacatgaacaatgcttgaaatctgaaatggatggttatgtttccaagccattcgagggcgagcaattgtacagagaagtagctcgctttttcctaaatcaagaccaagttcagtaggtaggcttatatggagtgtaaaatagtggaggatatcggggttcacccatcgaggctgaaagaattctgtcagagatcccatgttcttgagagtggaaaacactttaggctggagatggaaccacccatgttcggttccttggtacatctgaccaaactgcaaaactaaatgtgcaatgtcttgaaatcaaggtgcatgtggagctatttactcgacaatctgaagtcaaggcgtgtgaaaaaaaagcccagctgcattcactaaccgcagatgtcctctgccactataatatagagtagggagagaaattttccttccccggaaggtaccggctgtacatattaggtattggttgtttgtgcaggcatttgttggcattttgttgtgcatcgtcttcggtctgtattgtttgggtcgaagctgtaaaatgtaaatggcattttcaaagatggaagttttgtttgacaaatacatcggtcgtcatccgaccgatgtatttgtcaaacaaaacttccatctttgaaaacgccatttacattttacagatggaagttttgtttgacaaatacatcggtcgtcatc

SEQ ID NO: 131798 - DNA, 593 bp, Zea mays
  Clone ID: MRT4577_51684C.1
gtcaaacaaaacttccatctttgaaaatgccatttacattttacagcttcgacccaaacaatacagaccgaagacgatgcacaacaaaatgccaacaaatgcctgcacaaacaaccaatacctaatatgtacagccggtaccttccggggaaggaaaatttctctccctactctatattatagtggcagaggacatctgcggttagtgaatgcagctgggcttttttttcacacgccttgacctcagattgtcgagtaaatagctccacatgcaccttgatttcaagacattgcacatttagttttgcagcttggtcagatgtaccaaggaaccgaacatgggtggttccatctccagcctaaagtgttttccacctgaaagaatgagaagaatcatgacattagacctgaaggatcccatggacttaaaataatgattaatgacctctaaaatattgacacagagcttgctttaagaaagcgttacaattcttcagaacccctaccaactgttagagtggacgcaataatcagttcaacccaaaagcttttaggagaaggtaggcaatccacttatacatttcaacacccta

SEQ ID NO: 131799 - DNA, 2853 bp, Zea mays
  Clone ID: MRT4577_51685C.1
tcctagggatgctccaaatgctcatggatactgatttggacacaacgcaacaagactatgttagaaccgcacaagccagtggcaaaactttggtatccctcatcaatgaggttcttgatcaggcaaagatcgagtctggtaaacttgagcttgaggtggtaccctttgatcttagaacagtttgtgatgacattttgtctctcttctgtgggaaagcacaggagaaaggactggagttggcagtgtttgtttctgatcaagttccacaaacactaattggcgatcctggaagaataaggcaaatcattacaaatcttgttggaaactctataaaattcacagagaagggtcatatctacttgacggttcatgtcgttgaagagattatgcattgtctggaggttgagacgggaactcagtatacaaataccttaagtggctacccagtggcgaacagaaagcgcagttgggaaaactttcgactttttagtagggaactgaactcatccgagatgccttttgcacccattgcatcagactcaataagcttgatgatatcagttgaagatacgggtgctggaatcccgttcgatgctcaatcccgtgtcttcacccctttcatgcaagtaggtccatccatcgctcgcatacatgggggcactggcattggattaagcatcagcaaatgcttggttggactcatgaggggagagatcggatttgcaagtaaaccccaagttggttctactttcaccttcactgcagtgcttacgagagtccattccagcagaaatgagaataaatcatcagaatttaaagagatcaatgcattggtggtagatcatagaccggtccgtgccaaggttactaagtatcatttgcagagactgggagttcagactgaattgacaactgacctagatcagtatatttctaaaaataattgtggatcacagattgcaaagcttgtgctcattgacaaagaaacctggctgaaagaatcccactccatgcctcttttggttactaaattgaggaacaaagatcagccagactctacaaagttatttcttttggagaaccctaaaagttctgtcaagagcaattcacatatattcagggaatataacttgaatgtaattatgaagccacttcgtgcaagcatgcttcaggtttcgctacaaagagcattgggtgggatagataaactgcattgcaggaatggagtagtcggaaattcaacactgggcagccttcttcacaagaagcgaatcatagtggttgatgataatattgtaaatctcaaggttgctgcaggcgctctgaagaaatatggcgcggaagtaacttgtgctgacagcgggaagaaagcaatcacgctactgaaacctcctcacagttttgatgcttgtttcatggacatacagatgcctgaaatggatggatttgaagccacaaaaaggattagagtgatggaaagagatctaaatgagcaaatagaacgtggagaagccccaccagaatgcgcagggctccggcagtggcgaactccaatattagccatgacagcagatgttatccaggcgacgcatgaacagtgcttaaaatctgaaatggaaggtaatgtatccaagccattcgagggcgagcaattgtacagagaagtagctcgccatttctcaaatcgaggcgaacttcagtaggtacgcttatatggagtgtaaactaggcgacgcacgcacagtgcttaaaatctgaaatggacggttatgtatccaagccattcgagggcgaacagttgtacagagaagtagatcgctttttcaagcatcaattcgcagagttaggggccctattaaaacgctagcaacgctgggatgtggcctccagttaggtggaaaacactttaggctggagatggaaccacccatgttcggttccttggtacatctgaccaaactgcaaaactaaatgtgcaatgtcttgaaatcaaggtgcatgtggagctatttactcgacaatctgaagtcaaggcgtgtgaaaaaaaagcccagctgcattcactaaccgcagatgtcctctgccactataatatagagtagggagagaaattttccttccccggaaggtaccggctgtacatattaggtattggttgtttgtgcaggcatttgttggcattttgttgtgcatcgtcttcggtctgtattgtttgggtcgaagctgtaaaatgtaaatggcattttcaaagatggaagttttgtttgacaaaaacatcggtcgtcatcgtgaataaaattaataagataaaaaaaacagtgggcatcaattcgcaaagttagagggcccctattaaaacactagaaatgctgggatgtggcccaatccagttcgaacaaggcctcaggtggaaacgatttaggctggagatggaaccacccatgttcggatgcttggtacatctgaccaatctgcaaagctaaatgcgcaatgtcttgaaatcaacatgcacgtgcagctattcattcgacgatttgctgaggtcaaggcgtgtgaaaaaaaatcagctgcattcactaactgcaggtgccctctgccactatataatatataagactagggggagaagttttccttcccccggaaggcacggctgtacatattatattagggattggttggttgtttgtgcaggcatttttgtatgcatcatattcggcctgtatgggtcgaagctgtaaagtgtaaatgacacattcaaagatggaagttttgtttgaccaaaaaaaaattataatataaaaaaatataaaaataaataaaaaaaataaaatataaatattaataataaat

SEQ ID NO: 131800 - DNA, 329 bp, Zea mays
  Clone ID: MRT4577_51686C.1
gacttgtcaaggtcttatacggtgattgggccccgcgaaaccgacatctggaggttcctgatcgaaaacgcggtacacaacatgcgggagacatttcaggcacctgtagaacatgacaaggggagatccacaccccggagggcgcctttggggcaaagaggtcaccttctaccgcgttatagaatactgcatgcgccagggtagctacttggcccccccgctcgagtccccccctgtttacaaatacccagggaagcccctcgagggggaggtaaaatactgggttgcggcccgcctgacttacccattaccaaaggcttggggaagac

SEQ ID NO: 131801 - DNA, 169 bp, Zea mays
  Clone ID: MRT4577_51687C.1
gtcgggatggccggctgctgcggcggaaggctaggggctaagagctatcttcggtgttatcattgtctctgtttctgcacgctaacaagtgatgctgcgatgcttttattaagattctaatgagtggtgacggtgagagaaaattggagggctccttgaccacaaccac

SEQ ID NO: 131802 - DNA, 248 bp, Zea mays
  Clone ID: MRT4577_51688C.1
agccggcggatcaaggcagccggggggcgctcgaggtctctcgttggacacccgccgcggccgaacaagatcatgggcttccaggtggccgcggtggcaccgtcgccgtgcgcgcgctcctcctccgcctcaacgtcgccctcgacctcctctcggccgttgcccgccttccttggtggaggtggccgcgggtgcgccgggctcgcgagatcccggtcacccgtatactggggaaccggtgtgatggt

SEQ ID NO: 131803 - DNA, 476 bp, Zea mays
  Clone ID: MRT4577_51689C.1
ggccattaataccgcagaacaccttaaacgtcacgttcgtcaggtttgatagaagctgattaaaaccccggggcgccgggcagaggaccaccccaccccttaccgttttttgttcgtcacaacatgataaacacccaaagggaagccaatgtgcacacagggacagggtgtactcagtaggccataaccacgcacacgcacccctagctcataaacccttaccagccggatttcaccatgacttggaccgaccatccgggcgtaggggacggggaaacggctgttacaggaatcagtgaggcggcgcgcgggctttttattgtgcaggccacccagcgaggcgtcggtggaggtgcggaccggagacggtgacgctgacccttcatgttgtaggaaggtgctgtcggaagacgacgccgttgaggccggtgacggccctgaagtccatcacggagcacttgtatgctgcggggccc

SEQ ID NO: 131804 - DNA, 380 bp, Zea mays
  unsure (1)..(380): unsure at all n locations
  Clone ID: MRT4577_5168C.1
acaagagtaacactgggataaaactcttagtaccttgatgtctcaactatgacataattttcctgattttttatagaatttaatggcaatatattttttctaaaggttgacgatgtatccgtcggtgataagatataatcctgtcaatcttgagatctgatggcacgatcttttctgagacactgatagtgatataggccgtgtgggtattgcctcataggactcagtgggtgcttcaatttggggatgtccgactggcatcagcggaggtgagcagcaggcgatcaaacaaggcagtagcaagtgatttcttttcttaagacctcttctttttcaactcggatctgccaccgtctggtcctttccttttcnatttgcct

SEQ ID NO: 131805 - DNA, 623 bp, Zea mays
  unsure (1)..(623): unsure at all n locations
  Clone ID: MRT4577_51690C.1
ccggtccagaacccccgggcatttgaaattgcagtttgtctgctgttaatggcttngagggtgggattgctagtgttaacgaaggtgaagtgggcatgataactgttgcatttcttattgttctgttcagtctgcaacggtttggaacaagcaaagtagggcttgctgttgggccagctttattcgtatggttttgctgccttgctggggggggggtgtgtaacctcagagtatatggtccagaagtactccaggcattcaatcctgtttatatctactattattttgaaagaaatcccactgaagcttggatgtccctggggggctgtcttttatgtgcaacaggatctgaggcaatgtttgctgatttatgctacttgtctgttaaatctgttcagcttacctttgtgttccttgttctgccatgccttctactgggatacctagggcaagctgcatttcttatggagaacttagataaaagtcagcaggtcttctttttgtccattccaagtcaggcattttggccagtggtattcatagctactctggcagcactaattgctagtcgggccatgacaactgctttattctcaactataaagcaagcaaccgctctgggc

SEQ ID NO: 131806 - DNA, 1551 bp, Zea mays
  Clone ID: MRT4577_51691C.1
cattgggtacctcgaggccggccgggacaaaccctgcacgcctccccatccacggccggctgggactcttaccgccagccccacatcacggagcatcccccttaataacagcaaactaccacacccatgtccacctccgtctccgccgccgccgttgccgctctcgtcccacccctcaccggccgccggtcgccgccggcatctcgcgtaccgcagatttgccgcagaagaatcagatccaaaccccgtatcttctcttcttccccctccttccccattgtccccgccgctgccatggccaccggcggcgccgcccccaccgcctccgatgccgggtccaagaagaagttgctcatcttcgactccgaggaggatctcgcggtttctcttgcgaagtacactgcggagctgtcggagaagttcgcggccgagaggggtgccttcaccgccgtgctctctggcggatccctcatcgaggcactcaggttctttgactttccttgcactattagatatagctcctttctttgggtcatccgggggaccaagtagatatctctcgtcgtcattggtttcgcaggaagctgacggagccgccgtacctggattcagtggactggagcaagtggcacgtcttctgggtggatgagagggtcgtgcccaaggaccatgtggatagcaactacaagctcgcctatgatgggtttctctccaaggtgccgattcctcctggacaagtttatgctataaacgatgcgttgtcagctgaaggagcggcagacgactacgaagcgtgcttgaagcagcttgttaagaacggtgtgatttctatgtcagcggcgactggatttcctaggtttgatctccagcttctgggaatgggacctgatggccacattgcgtctctcttccctggccaccctcttgttaacgagaaagagaggtgggtgacatacattaaggattctccaaagccacctccagagagaatcacattcacgtttccagtaatcaactcatccgcatacgttgcgatggtggtgactggagctggaaaggccgcagcggtgcagaaggcgctctcagacaagcaaacctcgtcagacctgctgcctgttgagatggctgtgctgcaagatggagaattcacctggttcactgataaggcagcggtgtccttgctgcagaacaagtagagtcccatggtaaccttggctcgaagccattttagctcataaaataaaagatccaggggcctgcgtgcatagctgcattcgtcctccaggatttcgtgtaacggagactcgatccttttatgtagtgtgtgttgttcggagtaatgttcaaaaactctattgtcttccggcttttctgaaacattgctcgttaagtgtttggtttagtacatggttcgctgttccgtgctagacgcatggataggaaatgtggctgcattgaattcttccaggcttgtcgatcctggcatgttccagtttccagtggttttcagtgctcgtaccatctcatatatgaagagtggcctgcattccc

SEQ ID NO: 131807 - DNA, 299 bp, Zea mays
  Clone ID: MRT4577_51692C.1
tctgctcgagatcagatccaacgccaccagctagcagcagcagcagcagcatggccaccaccagcacgcctcgcctcgccaccctcctggtgctcctggcggcggcgtcaccgctgctgagcgcagtcaaaaggccgccccgaagctcctgctgcggcgaagcggcgcagtgccgggtggtcgcgtcgcctgcgttggtggcggacgggccctccacagactgaaaaggcgtcacgacgaccatctacgattcagagcgcttacgacacgcgcgtggacagagatcacgcgactgacga

SEQ ID NO: 131808 - DNA, 1095 bp, Zea mays
  Clone ID: MRT4577_51693C.1
aggagctccgcgttcgagctgggggtcgccgccttcgctttcctcttcgtggcgcagctcgtgggcaccacggcggcggtgagcaccgcgtgcgccgccgagcccaagaagaggcagagctccgccgcccgagggcgcgtcgcgttcgtcgccctcctggccctctcatggtacgtatacaaaaacaaatgatcgtggtgacaggaccccgggcgggcgcgattctttccagcgcacatgagctaggactaggagtgaactcaattccgtcgtccggtgttgttgttgcgcgggtgcttgctgcaggctgagcttcgcggtggccgtggtcctgctggcgacggccgcgagcatgaaccacgggcagcggtacgggcgcgggtggctggacggcgactgctacgtcgccaggagcggcgtgttcggcggcgcggcggccctggtcgtcgtcacggcgctcatcaccctcggcctcaccttcgcgaccgaatcggccgcgggggccatggcgacaacgcccgcgtcgtcaccggcgacgcgcgcgaggatacgtgtcgacgcggcgtcggcggacgcggaacaaccgggcgggcgatccaggcaatgaggcaagcaggcaggcaggctggcagtggcaggggcgcggcgcggggcgggccaaccggaggcggcgggtgagcggcaacgctcgttccggctgcaaaaggccacgcccgcgtggacaacggaaagtggcaggcgctcgccgccggacccgacgggtgggaccgcgggggggcggatggattatggatataccgctggttggttggatatttagcagccgcgacagagggtacatacattaccgtttactgtcctcttactgacacgatcgtctaacatgtaaatgacgctaagcgatcattgcaaaaaaaaaattgcaaagataaaccatacggaaattaccactttgttacagctgagtgttgagtgtttgtgtgcatgtgcaccaacctggtgctagtggtggtggggaatgggcatgttcagcctggcgccttgattggatgacctggacactgtactgtgaccggtgacaataatactacattg

SEQ ID NO: 131809 - DNA, 430 bp, Zea mays
  Clone ID: MRT4577_51694C.1
gagctctctagtcggcggccgccctccatctagaactagactgaagcgaaagcagccggtaatggactcctccatgcaaactgttagactccttgtggggacgtctaatttcaacttactggccccatgcataacatctcaaaaacgatgataaaaacttgggtgctacagaaaagtgaacctgtcagacatccaggcctttacggtgagaagacttgcaaatggagactactcaaaatgacataccaacagtagcctggcactgcatggtcaactgaacggtgccatataacataacggtaagaacactaggcgattctgctatgggcaggaacgacgcgctttgggacactgccatagaactcagtggtctcgaaatcttcccgaagaagcttttacccgtctctggtttctcactaagctgtatgac

SEQ ID NO: 131810 - DNA, 445 bp, Zea mays
  Clone ID: MRT4577_51695C.1
ccgggtaatgtggtccggggccggggagggggtcccggtttcccggtggggggccgctttaaagccggggggggggggggggaaagggggggcccgggggaaaagggtaaccggtcacaattccaaagagccttcggggggggaaggtaaaaatggaaaggccggggggcctaaggagggaaccaacccaaaataaagggggcgggccaaatgaccgggggaaaaaagggaaaaccggggggggaagggaaaaaaggaatcccccaagggggggggagagggggtttggggctcgggaaccagggggggtttccctgggaacaggggaaaggggaaaagccaaaaggccctcaacgccggggccggaaaaaagggccccaagggggccaagcttgtttgggccaaaaagcaaaaaaaacgggggggagggggggaaaaggggggg

SEQ ID NO: 131811 - DNA, 861 bp, Zea mays
  Clone ID: MRT4577_51696C.1
aattcggcacgaggggattgtctcgttcgtcttcgccatcgtcactcaacaactcgtctcatcgcgccgcatcgtttacctcaaggttgttttgttgcttccttgtcccgctctcaccagcaatcccgtcgatcacccagacctccacggcactgctccgtctcctccgttccgttccgaaccgcaagctcccaacccttccgcgatggacctcacctcgccgtcgcccgcggcgcgccgcgccgccgccatcgcgcgccacctcgccgcagccgccgcccccatcccggcgagcagccccctggaaccttcctgctgcctcagctacgtcccgccggagtccacggagcggccggcggcgtttgcgccggccgacctcaggcttctgctggacgggcacgacctgcccacgcgggactggctcttccgcgccatggaggagagcccccttttccgcagccggagttcgcggacgggatccagggtgttcgtggcgccggacttcaacgacggcaaggaagggcagcgggaggccaccatgcggcggatcgcgtacctgaatcggcgcggcgtgttccgcgggtggctcaccgaggacggcgctgccgccgagctccgcaaactagcgctcctcgactgcatcgccatctatgaccactctctcgccatcaagattggagtccacttcttcctctggggcagtgccatcaagtttcttggaacaaagcgccaccatgacaagtggttggttgccacagaaaattatgatatcaaggggtgttttgcaatgacagaactacgccatggaagcaatgtgcgagggataggaacaatagccacttatgattcagaaacaagaga

SEQ ID NO: 131812 - DNA, 255 bp, Zea mays
  Clone ID: MRT4577_51697C.1
ctcaatcatccgtgctcctatactccatttttctacactgggcatgtccactccaactgggaaaactctagttcactatgcatctacagcaacctaatgtaccaacaacaacactattaccatgtcaccacacaatatagatattaaacgttcttcaccacacactgtactcatccttttacacaaaacttagccgccgtgctcttaccatcatgtttaaaacccaacagccagatattggctcaccatgacaac

SEQ ID NO: 131813 - DNA, 141 bp, Zea mays
  Clone ID: MRT4577_51698C.1
tcgttcagacgcggcggcggttgagcaaacgcacctgaatgcgaaggggcgaggaatggagcaccagccattgtgcacgtgcacttgtaccgcaactgtgggctgacgtgcaagataccaatgcgctcttattagaacgac

SEQ ID NO: 131814 - DNA, 255 bp, Zea mays
  unsure (1)..(255): unsure at all n locations
  Clone ID: MRT4577_51699C.1
tctgtttaattcgccctttcgagcggccgcccgggcaggngcagnntcncctttggtctcactttttttgcttttttttttttggtcatcccagtgtcttatctgtttcttcatccgtngtgggtngatctatcctggcctcgngatcntggcctggccgnccnttgcncgnngcccgcgtgggggggggggacatgtttgcctnnntgttgggtttgaaattctttatgtggtgaatgcctcctaggtgaatcg

SEQ ID NO: 131815 - DNA, 2868 bp, Zea mays
  Clone ID: MRT4577_5169C.1
ttaagaagatctagggaaaaggtggggaaaatctatacgaagttcttcttctctttcccaagttgcttcatcttcaccgtggtggctccattgcactttgcacatctttataaccttatttcttgtaactcgagtcaaagtatccaaaatcttgacggggtattcagcataagtcaggtcatcttgaacattaaggtcttccatcggtaattgttcctcagggacacggagacacttctttagttgagatacgtggaacacgttatgcacatccgatagactatccggtaactcgagttggtatgcaacctctcccacttgctttaagattaaaaagggtccaataaaacgaggggacaatttgcccttaactttgaatctcctcattccacgaagtggtgacaccttgaggtacacataatctccttcttcaaattccagtggtcttcttctattatcagcgtagctcttttgcctggtttgagccactctcaaattctctcgaattatacgaacttgttcttctgcttcttgaatcagttcaggcccaaagaactgtctctctccagtctgatcccaatacaaaggagttctgcacttcctcccatataaagcttcaaaaggtgacatcttcagactggcctggtaactattattatacgagaactcagcataaggcagactcttatcccaacttcctccatgctgaagggcacaagctctcaacatatcttccaatacttgattagtcctttcagtctgtccatcagtctgagggtgataagctgtactaaaattcaacttcgtactcatattctcatgaaagcttctccaaaatcttgaggtaaactgcgaacctcgatcagacacgatcttcttcggtactccatgcaaacacacaatccgagccatatataactctgctagctgagaacctttataagtagtcttgacaggaataaagtgagccactttagtcaatctatccacaatcacccatatagcatcatatcctttttgggtgcgaggcaatccagtaatgaaatccataccaatctcttcccatttccactcgggtatcttcagtgggtgcagtagtccagctggcctctgatgttcagccttaactctttgacatacatcgcacatagccacatgtgcagccacatctctctttagtccataccaccaatacttttgcttcaaatcctgatacatcttagtgctcccagggtggatagaataaactgaatcatgtgcctccttcaatatggtttcccgaagactatcgatatcgggaacacagatccgactcttgaaccatatcgtgccttgttcatcctccgtgaactccgggcctctaccctctgttatcagatccttgatctcttgaatcttagcatcaccaacctgacccattcccaggttgagcctctcaaaatcttttgctaattcatcaggtagctggacaacgaaagcggagtgaacatgctccttccgactcaaggcatatcctaatccttggccacatgcatcacagtaaatgtcaaatcccttctgcagatctggcataatcaatactggtggagacatcaatctctccttcaattgatcaaagctgtcttgacacttctcgtcccacttgaattctcttcctttctccaaaagcgatgtcatgggcttagcaatcttagaaaatccttcaataaatctccggtaatatcctgcgagtcccaagaaactccgaatctccgtaactgtagtgggcactctccactccattatctccttcactttagcaggatccactgctattcctccattagaaataatatgaccaaggaatggcaccttgtcaatccaaaactcgcacttgctgaacttagcatagagttgattatctcgtaacttctgtagcaccaaccttagatgttgttcatgatcactttcattcttagaatagataagaatatcgtcgatgaataccacgacgaacctgtccaaatactccataaacaccttattcatcaaattcataaaataggctggtgcattagttagtccaaatgacataacagttaactcatataatccatattgggtcaagaaatccgtcttcgaaatatctgatggcctaatcttcatttgatggtaacccgatcggagatcaatcttcgagaataccctaacatctctcatccaatcaaataaatcctcaatgcggggtaacagaaacttgttcttcacagtgacatcattaagtgacccagcctctcgtaattccgttaattgcttcttaagttcctttagttcttctacggacatcctgtatgaccgtttagaaataggagcagttctaggtaagagatatatgacaaactcaacttccgtatctggtggcatccctggtaactcctctgggaagacatccggaaaatctctaaccacacggatgttgacaccaacaaacttcccatctactaagaatgccgctagtctggtggcggtagttactgcaattccaacttcaaatctttgtcctttcgaacttgtgagtgctacggttcccttagcacggtgtatatactgccttagcctttctccccctcgccagccgttgaaactccaccttgcacgtgtccctgctagcgcctgccgtcgacctccctggccgctgtgcttcatggccggtgtgatggtagatgagtgagagaccatgccgcgcctgtcctcacgacgggagttcgtcgcggccgtcgcgcactccagggcgctgttcgtcgctcctatttcatgcagccatcgctggatttggggctctggatcaccggcgggcctggtgggtatgctcgctgccgctgggcacat

SEQ ID NO: 131816 - DNA, 203 bp, Zea mays
  Clone ID: MRT4577_516C.1
ggaaatgtgcttttttatttctggggagccacaaacctcggacaaaaaactttttttttggactgttactttttttttatattttaaagagggcaccaccaatgttgggggggtggttgaatgctggtgggtttgttaaagcaagctggttgaatgggaaaaattgttgcctgtggcagagggtgcccgcggtagggccaccg

SEQ ID NO: 131817 - DNA, 597 bp, Zea mays
  Clone ID: MRT4577_51700C.1
gggcgcgaccaacaaattagatggattaaaaatgatgaaatttcttgcatgacaaaccaacttgggcatgtatatgagtatgactctgaaaacaaggatgaatgggcaaaaacaatcccctattaaaaataactcgcataccacatcgtcacggattgaattatgctatgaaaatgaaaatgggaacaaacttggggcatcaactgttctgtcctcgcttttcaagcggacgccgcattccctcctgcctttggatcatctggaagccccatggctccaaagtgaaggttgcaagacgtgacttttcatcatgtgcaattaagggccgagtcgtttgtatcagttctgctttgctaaattatcggcggctcaaattgttgttaaaaaaccatcgccatcagcaaattgccatcaaagtattttggagcgctaaagctggttgagcagttattgggcgtgatgacacacctagtcgtctgcatttgaaatgtgacgcatctggcgcattgcaaacgcatgagctgacgaccttattttttgaatcctgaaagccagagcttctgatccagcggtaaaagcatgtgtccccatgaatgc

SEQ ID NO: 131818 - DNA, 272 bp, Zea mays
  Clone ID: MRT4577_51701C.1
gtgaattaactgccgggatcgaccagccctcccggcggccgccgcccttttttttttgggggtttttttttttagggggggaattcccaaccagcctaaatcactatctcaagataaaacggacagggcctatatcaattattctatcaatcttttttaactacacctacaaaaaaaaagctttgcgtatcttccacaaaaaaaagaccttatttgccgttctatctgggtttttcattaccacctgatcatcgaattcacctaatttcctt

SEQ ID NO: 131819 - DNA, 366 bp, Zea mays
  Clone ID: MRT4577_51702C.1
acagaaataaaatttgaaacacacacattggaaaaggaggggaagacttttacaaaggtcacttaacaaaccaaaactcaggttccacaagggggaaagagagggagtaaatacaaggccggaacgtactcgaagggcaaaactaatgacaaaaggggggagggggaagcctttccaaaagagagataaaaaaaccggggggggcaaaagccctccaaaagaagggacgggcccaaagttaagggaaaaaaacttttccaccaaacgggggaagggccccaaggagaaagggctgggggcaaaaaacagggcaaaaaaattttcacccaccaaaagacgggggacggggaagccccggggggaaaa

SEQ ID NO: 131820 - DNA, 651 bp, Zea mays
  unsure (1)..(651): unsure at all n locations
  Clone ID: MRT4577_51703C.1
cctcgaggccggccgggccggngagattcaagacaccaattaagcctaagcatcctacgatggatacacatcacagaagcataatgagctgctgcttggtgtgcatcatcgacatggcggcggggtcggcgttgttgctacccgcatcttctcagctcgcgatgccggacatccccaacctgaaggtgggctcccacgatcccagcacgactcgcaagtgctccaacatcaagagcgaccataccacctgaagcgccacctgcgacgcacgctgccctctcatacgacgcttccagggaccaatgtgcaagacatgctgcttgcagcaactgctatccgcgggatgtcctgctagcgacccactgcttcacggtgcggcgacgaaaacaacttctacttccacggtgaagaaggaccgtgcacttctgcatcgactccgacgccgccctccacatcaacgcgcactgcatcgggaagcgcaacccggacatgagccgcgacttcacctggatccaggcgctgggcatccgcttcgcgcaccaccacctctacgtcgccgcccagaggacgcccaggtgggacgccgccgccgaccacctcgcgctggccctcgacgacgaggacgtcgacgtcgcgtccctgctgccgcgc

SEQ ID NO: 131821 - DNA, 1192 bp, Zea mays
  unsure (1)..(1192): unsure at all n locations
  Clone ID: MRT4577_51704C.1
ctgggcccggttattattgcngatgggattccccaaagcaactgtccgatcccatcgcgatggcaccgccgccgcaggagccaatccaccgccactgacgtaacccgatccatggaagcactaggatcttccgattacccccctcctcctcccaccttcctccgctccacccgccatatcctcgcctccctcgtcggcgcaaaccacacctccgcccgcttctgctcccgctagcaccaccaccagcaccggaccccttcccttcgcttcgcctccctcaccaggggtgacgggggcatggacccctcctccccgccgcggcgctgctccctcctcctccgcctgctcctcctcgccgtcgccgccctcgcgctccgtctcctctacggcgccttcctctccgtctccgccgggcccgcaggctggccgctctaccgccccgccgccaccgccacaaccaccacgcggaggaggacccacgtcgtccaggccgacgtcccgtcgccggaggtctggcgcacccgccactggcgcagggccgtcgactaccacgcggccatcctcgcgccgcacatcgccgccggcgccctcgcgcccgcgtcccgcgccgtctgcctgggcggcccgcaggaggcgctcgcgatgcgggagctcggcgtcgccaaagccgtcgccgtcggcaggaggcgtgcgccaccgctcgtcgtcgcggggggcgaccggagactgccgttcgactcgccgtccgccgacttcgtcttcgcggggcgcgccctcgacgccgccaagcgcccggccgacctcgccgccgaggccgcgcggatcctcaagcccgacggccatctcgtcgtgctcacgtccagcgccgccgacgcctacagcctccgctcgatccaggcgctcctaccgacgctccgcctcgtccaatctcgcgagatcgacgcccaggacgacggcgactcctccacactcagggaacttgtcttccagaagaatccccatcctacgggtacgggcgcgggcaattcatcagtgaacaactgctcggttggggatcacaggcgccactcctcgcgcacgccgagccactcatccaggaggagccgctcaagccgtggatcacgctaaagagaaacatcaagaacatcaagtacctcccggcgctggccgatatcagcttcaagcgccggta

SEQ ID NO: 131822 - DNA, 808 bp, Zea mays
  unsure (1)..(808): unsure at all n locations
  Clone ID: MRT4577_51705C.1
ccggccggggacataacaaccacacccacatacaaaagtcatgtcagtcacactacacacgtcgcatggcgacataaaagtagagatatactgtgaaagcgtccccaaaacagcagagaacttcctcgccctctgcggctcaggctactacgataaatccccattccaccgcgtcatcccaaaattcatggctcagactggtgcccccgcaacaccgaaccctcccgagaatcccaaaggcggacgcagtatttggggaggcgcattcgaagacgagatccgacctgcgctgcgacacggcgctcgaggtgtgctttcaatggccaacaaggggcccgggacgaacggatcgcagttcttcatcacattcgacaaggcgccacatctggatgggctcaacactgtgtttggacgtgtgatcggagatgagggtctggcgacgctggctaagatggaggctgtcgaagttgatcgaaagaacagaccgaaggagccagttcgcatcgaaaatgtgacgattcacgccaatccgcttgctggttgagacttgcgtatacttctactacttttccggagatactttgacggcacattntattggcgcaattacccctccccccccccgnnccacctcagggtatcangaaaaaatgtccactaagagcataatggacgaaattagtaggccatcttatgctgcttagactatgcccttaggctgnttatttctgtatccctagacttagggggtcaacttttctgctaccagcagcccccaaaagaagactactgcaattgaactgcgtca

SEQ ID NO: 131823 - DNA, 506 bp, Zea mays
  Clone ID: MRT4577_51706C.1
cctcgaggccggccgggggcatgggcttcttccctctcggtcggtcggcccccttcctgtgccttgccttgctttccgcaggaggatgcggagctgcttcttctgagttctgatcgctgacagagcagctagcagccgacttctgatggacgcggccatggcgctcgccttgctcttcttctgcgtcctcctgctggcctccggcgccatcgccttcctcctcatccgccactgcctcgcgcgagcacctcctcatcgtcatcgtcaggcacagcccgaagcagcggccaagcagctgcagcagcaagcgttactagccatcaagaaggagccggcaccgcggcggctggcgtggcgggaggtggaggcgctgaccggcggcttcgacgaggccgccgtggtaggccgcggcggctccagcaccgtctacctcgccaggctcctggacggctcgcccgtcgccgtcaaggtgcacccgctggtgcggccgccgagcgccggctgcc

SEQ ID NO: 131824 - DNA, 584 bp, Zea mays
  Clone ID: MRT4577_51707C.1
cgcggtgcctcggcccgccctatgcagccgcacgccgctgccttccgctcctcccaggccatcgtcgctgtggccatcggcacccacgtcgtcgagttcgatgctctgtcgggaagcaagatagcttctattgaccttggtgcccgtgttgttcgtatggcatatagccctacaactagtcatgttgtcattgctattcttgaggatgctacaatcagatcctgtgatttcgccacggagcagacacttgtgctgcattcgcctgagaaaaaaacagatcatgtttcaatagatactgaagtccatcttgcattgacacctcttgagcctattgtattttttggtttccacaaaagaatgagtgtaacagggactgttgatggagggagaccgccaacaaaaataaagactgatcttaaaaaacccattgttaacctggcttgccatccccgcctccctgtcttgtatgtagcttatgctgaaggcttgatacgcgcctacaatatccagacatatgctgtacactataccttacaacttgctgttgacagtacaattaaactaattggagctggtgcttttgg

SEQ ID NO: 131825 - DNA, 584 bp, Zea mays
  Clone ID: MRT4577_51708C.1
ggccgctttttttttttttttttatttgttgtaagtcagattgcacaatcttcgaaaaacacacagcgaggccaattctcccaaaatccaattctgagtaaaccaacaactctgatatcaagtcacatgtagataccacgacctcaactaaaaggagtttgacatgacctgtggtcaaaataataaattgtgacagagggagagggggccatgggcacaccccaaagggatcggggatttcaacagcaccaaaaacaccaactctgggccaatccgcctggttcttagtcagaatccatctccttaagagctggctgagcaggagctttggcctgctccaacagctcatttggaaccttaagatgctgacggttccatttattacaaatacagatcaacttcaactcaaaagcataggccttggctttgtcttgcacttcataaattatctttgcaacttcaacaatgcctttccggcacggaaactccaaaagcttcaacttttatatctcaatcttagcagtctgaacccccttccccaatgccagagcaaaatatttgtatgaaactccagagggttctat

SEQ ID NO: 131826 - DNA, 133 bp, Zea mays
  Clone ID: MRT4577_51709C.1
gatgaacccccccaggaagcacaagattaattaacccatcctatgtggggaccattattgttgcagaggcaaactacgtggccagcaaaaaccaccaactaggaggtgcatgaaccactggcttggggccaac

SEQ ID NO: 131827 - DNA, 520 bp, Zea mays
  Clone ID: MRT4577_5170C.1
gcggcttactcacacgaagtattaccgcggcatacacaggcgtccaactggagattggttcaccggacagacaaacttgcacgcaacatacctcattccgaggtactcatcttgagttcaagaacgactcgttccacccaggaaacaataaatcttatttttttgacagcaggaactattactttggataaacatgcagggtagcaccagaagcatcatttaacaggctgtgtgagtgaatatgcatcctgacggtcggcatgccgtcactaatttatttaaaggatggggagcatgcccacagtctaggcgagggtgctcgtttctcgacatggggcgaccaaacaacagacgaatgtgaacaccaccaggctgaaccatggggaggacattcacctcttgcatcccagcgagaggcttccggatgagctccttgagccttgcccgggtcacgtgctttacttcagctattttataatgcactcagttgctccttaacgtactggacgattaacatgaa

SEQ ID NO: 131828 - DNA, 343 bp, Zea mays
  Clone ID: MRT4577_51710C.1
atcgggctagcgcctgccaagcctggttgctttttctagtcaaacggggccgaccaattcatagtctctgatccgtgcaaggttcctcaggctaagcccgccatgacgcttatgtccggcatggcaggcctcatgtctcagacgtttgctaccacccatcagaaggtttacagcctgacctgcacaatggccacggctggggactgacgccaaccaccaatggccgccatggcattggagggggatcaggcccagaactcccagtactcggcaaagggcaagtccacgaggcagccatgataacgttacgttaacttaactcactgatagaacaccagggccg

SEQ ID NO: 131829 - DNA, 661 bp, Zea mays
  Clone ID: MRT4577_51711C.1
tccaagacctacgcgtcaagccggcacatccttcacaccaagcgatcgagctcctcgatccctgcgagcacccaccacaacctcgccatgaaattcgtactcccaaaaccttccgctgtgcgacatcaagagctggaaactcatgaccaccacaatctgcgtgccttttatgaccgaatgatatcccaccaagaacttgcccaagctctggctgaggaggtcggtgttatgacttcggaatcctgtgagcctgtgactcttgcagcttctgaacgtattgagtgagtgttcacttctcatggtgatccacttctgctccgtaaggtgtacatccctggttacaagggcactgcaggcgttacgatcaacacaactggaatgctgttcatgatcgcattctatgacgagacctatacgccatcgacttgctgaatgtgaatagaagagatacatgatatgacctgatctgactgacactgctaaagcaatgattaggttgaccaataactccatcccagatcggaaagctgcacaatcttaacattcctcatgatggacgcaatgaccccattacataccgtaggactttctctaccactatcaggaatgaggtgatgatgcatctactcattccattgcttgagacacccttgaccctcca

SEQ ID NO: 131830 - DNA, 184 bp, Zea mays
  Clone ID: MRT4577_51712C.1
gtcgcgttgtccccttctgcgaataacacatgggaagacatagggtaaatacagcaaagcgaaacgagcatgtaggccacagtagtcagtctgccgctgctatactatacccttatgtatgttcaagtaattgttcatatgtgaagtaattgaccaatcaactgatcttgctccttgtaggagg

SEQ ID NO: 131831 - DNA, 2156 bp, Zea mays
  unsure (1)..(2156): unsure at all n locations
  Clone ID: MRT4577_51713C.1
taaagacccaaaaatttccaccataatagcagactgcacagtttccttgtgctagacttttcggccgctttattttcatggttttggaccatcaaaattcaaaagtccctcatgcattttatttaccttggggaggagatacgagggtacaacaatcaaatcaaaggatatataacgaccgtcgatttaagaacctacgaaaacatatctgctttctaggttgatgataatgctcaaaaacttctaaagatgagcgttcctctgttatgatgcattcataggccctcggaagaaaaacgaacccacctggccacctccgatgctggatcatgaattacttgtttgataatatggtacgattttcacgtacttacactgccccgacactcaataaagacccaaaaatttccaccataatgcaccagcaactccccaaattacagcattgattgcggctgttataaaacccagcttgaatacatccggaaggtcaacataccccgctccaaagtatactgcagattgcccgctactatagtgtgttagtgctccaaagaggtttgcattgtatgccaaagcaagtgccgacattagagctggcacaccagctgctaaatgcatcgcaagaaatgctgagtataaagctccaacatgtgcagtttggcttgcaaatatatagtgaataaagaagtacgaggcctgaaggacaacaaatgctgcaggccagctcagtgagaaagattgaagaaccttggcaacacaattcgacatccaggacacaatcccaaggttagtaagctgcccagccaaaccaactaaaatagcaaaccaagctagggtgtcccatgcagacttctcattcaaacaatcctcccagtttagcactccaagcacaagaagtattgagagtccaatcattgcagcaacaacgctggatacgccaatagtttccccaaaaatccatagtgagactgcaagaagcatcgtcccaatcatgacccattcattttttgttactggacccatgttctttagcttctcggcagctaatgctggggcttcaggagtgtcctttatttcaggggggaatattttgtaaatcaaataaggagtcactaaaagcccaagaactgctggcacgctagaaaccttgaaccaagtaatccatgggtttccgatactaacaccaatctcctctgctaacttcagacacaacaggttctgtgcagctgctgtcaagaagagagcactggagttcgcagctgcctgtaactgcgattgcacaagataagagccgagtttcttcgccgatggatcgttgggcttgcttccggacgagagcgatagcgacttgacgatgggaaggaaaacacctccagccctggccgtggtgctgggcatggcaggggagatgagagcctcgctgatggcaagcccataggataggcccaaagtgctgcgccccagccatttgacgaagtaggtggcgacgcggtcgccgagtccggttttgacaaagccgcgcgcgaagaagaaggatatgacgatgagccagatgacttcgttagtgaacgccccgaacgcggcggtgaaggggagcgtgcgggtggcgacggtggctgtgaggccaaggaacgcccacgcaccgacggggagcgggccgaggacgagccccgcgatggtggagaggaagatggagaggagctgccaggcctctggggttacctcggccggccgcggcacgaggaagcggacggcgaggccggcggcaagcgagagaaagaggggcagcggtttagcaccgccagatgccgccgacgccgccggcttagagctcgcttgagaggccgatgcggaggcgaggagcgggggcaggtggcggcgagggataggtgagaggtgggaggcgatggggggtgagagggagaggggattggggtaagagtggaggtggaggtgcagatggcggcggcggaggtggctatgggaggtcgggagagggagagccggtcggtgggtgacggcgagccggaggctctccattggtggcggcggcggcggcgagcgctacgggcactggtggcggcggagagcaacgacaggtaagatttgtttttgtttgttttgtttttataaaacnggggagctggagttcc

SEQ ID NO: 131832 - DNA, 377 bp, Zea mays
  Clone ID: MRT4577_51714C.1
cgatctataaccccacgcgtccgctctccctcccctcctccgactccgacgaccaccaccgacggcggcgacgatgcatgcggcggcggcggcggcgcggcgccaccttctcgaccagcaccacctctccccggcctcctcggccgccatcgccgccttcagatccgccgtccagccggcgctcgcgccccaagggctgggcggggcggatggcgcgaggtacatgtccgccagggcgccggccgtcaagggggccgggcatctcgtacgcaagggcaccggagggaggtcgtccgggagtggaatcgtcgctccggtgtttgggagctactggaatttttttggacgcttttggcgttcaacaacttgccgaagat

SEQ ID NO: 131833 - DNA, 223 bp, Zea mays
  Clone ID: MRT4577_51715C.1
gacccccaaaaataaaaacacgagtcaaaatgccctgtgtacaaggtaggggtaaatcaatctgcatggagaactaggactagtttgggagcgagaaactggaggggctaaattctctttatttaaaattgaaaattgaatacgaagggaaatttttagcccttcatattttctccggttttggggctccgaaactagccccctaacatcgggcattctcagc

SEQ ID NO: 131834 - DNA, 120 bp, Zea mays
  unsure (1)..(120): unsure at all n locations
  Clone ID: MRT4577_51716C.1
tagttgtggtanactggggnattacatccatattcatacatgagaattntaagatgttagaggagtaaggcgcacgaccagcaccagctgccggcaacaaaagacacagcagctatggcg

SEQ ID NO: 131835 - DNA, 260 bp, Zea mays
  unsure (1)..(260): unsure at all n locations
  Clone ID: MRT4577_51717C.1
cgcggggatgatgactacctttcacgcatcgagtctctgtggctccttctgccttcttgacacagcnncatttgttgccgttctacctgcncactgcgcctatcgttggcgccctcttaccgctgctcctcttgctgcctttcgttcggcgtggtgtgtgcccccccgccgcgttctgcctgcctcccttccttggcggtcgccctctttctgattgcttatgacttctccttccctccctccgccttctttgctgcttt

SEQ ID NO: 131836 - DNA, 169 bp, Zea mays
  Clone ID: MRT4577_51718C.1
taccgagaagacgacagaaggtgatacaactacaagggaaagaagcagttatacaccctcgagaatggtgaaatccaggcaaaatataaaaccatttttttctctccgtccaaacggcagatccgatccgccctacaatcccctctcagttttctctcaggatccggga

SEQ ID NO: 131837 - DNA, 744 bp, Zea mays
  unsure (1)..(744): unsure at all n locations
  Clone ID: MRT4577_51719C.1
agcagtggtaacaacgtagagtacgcggggaactatggtcagtattatttgaactgttgtgcaaatgcacgttctgagtatcaaccccactacgagaaaaaaaagtgaactggctagaatattcttgtgaagggttaaaggcacacattttgtaggatatgctgatcgtcggaaaaatatttttgatgtgaatgtgagagaaaaaacacaatctatacgaatcaaagttttggtccatctcatgctgtcaatcttgtgatctcttccttaattttcctataacttgacatggataactggcctggcacacagttaatcagtcaacagaaagtgggagcttcatttcaagcttgattacaagtgcatgcctgtactaaaaatttacagatgaggtggccactgttagcattttacatggggtgtggctcaacaacaggcacatgatccctgcaaactggatcttgttcttaacaactaatagcatggtaaagtaaacccacacaaggcagacacgcaagtaagttgtttcttagcgctgttacaactgcttccagctcaatctttccattctggaatgcaagacacaaaaagttcgaacgtctaccatgtccaagcatatgtattttccctcccccaaaatatcttaaacaaactaatctatntatattatatatgaaatatataaagaaaaggatcgaccactcattaagcaaataagcctgaatctgaaaaaactgttcaaac

SEQ ID NO: 131838 - DNA, 126 bp, Zea mays
  Clone ID: MRT4577_5171C.1
tccattcacaatatctcattctcaattcctacaataatttaccactatttccacccttgggaaggggctaaagctcccgggcacaccctgcaccatacttaacaatactgcactcctctatgacat

SEQ ID NO: 131839 - DNA, 350 bp, Zea mays
  unsure (1)..(350): unsure at all n locations
  Clone ID: MRT4577_51720C.1
ggaaatgtaattttttatttttggttggtgaaatacattattcaaaaaatttattattgaattacaagtgggggggggctaaaaaagggcaccaccaatgatgttttgttggtaggaggccgttgggtttttcaaagcaagttggacaaagggcaaaaattgttgtagttgtaaaagggttggggggttagccgaaaactgtttttaaaaaggcaaaaactgttgttttgtcaaaaaggaaacacggtttggtgcagctagctggctaaatgggagtagtatttgtttttgnaaataagcaggggggttcagtgcggccaattttttaataggaaaaagtttttgttgtt

SEQ ID NO: 131840 - DNA, 246 bp, Zea mays
  Clone ID: MRT4577_51721C.1
cgccgttcgccgtccgtgtgtccacaccgcgcattgtgcgtgtaggttgttgtctgattaggccggtgtgctctcgcatcagtaagccttgtctcttccagtggtattactcaccttcgcagtgcatgtcgactgtgcatgccacctgctgccgcgtgcagttggtcagcatggtggtcttccctttcctgtcctcagccctcctcctcgggggggggggggggggggcggcgctctgcatgcacc

SEQ ID NO: 131841 - DNA, 157 bp, Zea mays
  Clone ID: MRT4577_51722C.1
cccatctctccctttccctatctagactactcaccaggccaccacgcacatgcgggggtccatggatgctcttccacctcatgacgttcaagaccatgctcgccatcaggttgttagaaccgactagcgagatctattcactccaggctctctccca

SEQ ID NO: 131842 - DNA, 478 bp, Zea mays
  Clone ID: MRT4577_51723C.1
ttggattctttaaaacgggccggcccttgtttttttttttttttttttttttttttttttttttttttttttaacaaaccatttgggacctttaaactttcaatttttgaccgtttttatggtctgggatccacacatttaaggccataatatacttatgtgatttacaacaacttctagcttattttatacatcatgccaacccaactaggagcaattttcatcatacaattacacttatctttaatcatcattcatcaatactggcatcagcaatacgctctaaactttgaagcatgacaagggggtagtcaccagggaccattttgttatgcaatttatgccacaattggataagatgcacaagttgcaacaccacacatgttcttccccaattccatcttgaagtagccattttcaccccaactttctccccatgaattttttttgagccaatatgggacaccatttttaactc

SEQ ID NO: 131843 - DNA, 885 bp, Zea mays
  Clone ID: MRT4577_51724C.1
ctccgttttccccctgttggaagagttcgtgccaaggccagcactcaccctcccatccctcctctccggccgcaacccccgccgccgccgccatggtgaagtactcgagggatccgtccaacccgaccaagtcggccaaggcctgtggcaaggatctcagggtccacttcaagaacacacgcgagacagcgtttgctcttcgcaggatgcctttgggcaaggctaagaggtaccttgaggatgttctcgctcacaagcaagcgattcccttccggagatactgcagaggtgtgggtcgtaccgcgcaagtaaagaaccaccagccaaatgggcagggtcgctggcctgcaaagtcggcccagttcgtgttggatttgctgaagaatgctgagagtaacgctgaggttaaaggcttggacgtcgacaacctctacatttcacacatccaggtgaaccaagcccaaaagcagaggcgccgtacataccgtgctcatggacgcatcaatccttacatgtccaacccctgccacattgagctgatcttgtcagagaaggaagagcctgtgaagaaggaggctgacaacgtcgtcgcaccaaggaaagctatctaagctaacggagtggctgcattcgtccaagaatcttagttgtagttcttctcaagtatctttgttggcagtgtttgttgcctccttgatgtttttgttaccaacatggagtaaggatttgttaaggttgatgctatccttgtgatcgcgagtggtctttatatgctaaaacagtttcagatatttgagcattagcccatcagaacttatttctcagagatgctggtcctttcgggatgttcactttgagtattatatccactttttagttgctctt

SEQ ID NO: 131844 - DNA, 320 bp, Zea mays
  Clone ID: MRT4577_51725C.1
cccggagcccccaaacaccccgcaaaagggcaccttttaacgattgtggtgggcattgcccccatttttttgagctttaatctaaacactccccgaattttcttaaaccctcttttttttagtttttttgaaaacaaactccctttgcagatttttgggggggagtgctttaccggggcccacctcaaaaaaataataatcctcggggggtttccccgacaattttggggccttccgtttttggccctttttgaaaaggggctaaaccttccccttttggcccccggaaaccttcccaaaaaacctgtggatggactttt

SEQ ID NO: 131845 - DNA, 560 bp, Zea mays
  Clone ID: MRT4577_51726C.1
ccctcctccccccaatctcccgagccttctttctcgtccccaatcgcgtcccaaaccctcccacccaccctgcgcggatcgatcccccaccgactgcgcagtggcagccgcagccgcgtccccgtcttcctccccgccgattcggccgagcgatcgcggcagccctcgtccacccatgcttccccgggcggctgcggacgagatatgagccggcggggaatcgacggagccgccgacgccgcccgccatggacccctccgagcgccccgccgtcgtattcgacaacggcacagggtacagcaaacttgggtttgctggtaactccgagccgtctttcaccatccctactgtagtagctgtgaatgaatctttcttggaccaatcagagcagtgcagtagtgcaaattggctagcacagtataatgcaggtgtcatggctgatcttgatttttttatcggggatgaggctctgtcacattttaaaactagtggcctgtacagtttaagaagcccaattcgtcatggtcaggtgaatgactgggatacaatggagagatttt

SEQ ID NO: 131846 - DNA, 102 bp, Zea mays
  Clone ID: MRT4577_51727C.1
gttttgcgtacggttaggcgcaagatcattggaagcgccatttatggtgacgaactcggctttgtaaacaaagtagatgatgttatgatgatagtactgatt

SEQ ID NO: 131847 - DNA, 396 bp, Zea mays
  Clone ID: MRT4577_51728C.1
ccggccgggattatactcctatcaccatgtctggtactgttgtgcttggaatgcctacgtatccgtatgctctatggagatggcctcgtgaatgatcggtaccacaattatgttgtcgatgatcgatcatagactgtatgtactaacatgaaccactggaatctgcgcagactgctttgacgatcacctgccaaatgtcatgaatgatattgtgaccgaccgcatcgactgaagagctcatcaactgtgatgactactgacctgagagagttcccgagcccctcaccggagtatgactctcgcttgggataccggtatagaaggtgcttggatgaaaaacagagaattccacgacctgcgaactgaatctctccttgaatgaacaacctgtgcaag

SEQ ID NO: 131848 - DNA, 855 bp, Zea mays
  Clone ID: MRT4577_51729C.1
aaattgtgtgcacgcttggagaaaaaaaaataaacaaacagaaagccacacgcctagtgttagctagctagcttactccacagtgtgtccacacccaccaacaccccaccaactatggcgaccgcgagcagcagcggaggcgccggcgcactggttctggccttcgttaccgtcgccgtgctgctctccccggcgctagccgcccctctggacggcgccggcttccactcggcgacgtgcccgcagctggagagcatcgtgctgtcctccgtgcaggcggcgctccagcgcgaggtggcgctcgccgccggcctcctccgcatcttcttccacgactgcttcccgcagggctgcgacgcgtccgtgtacctcaagggcagcggcacggagcaggccatggggcccaacaccacgctgcagccgcgggcgctgcagctggtcgaggacatccgcgccaaggtgcacgccgcgtgcggcgccaccgtgtcctgcgccgacatctcggcgctcgccacccgcgacgccgtcgtgctctccggcgggcccaactacaccgtgccccagggccagttcgacagcctcgccccggcgtcacagaacgccgtcaacgccctcccgtcgccggccacctccagcgtctccgcgctcgcgcgcgccttcagcgccaagggcctccgcgacctggccgacctggtggcgctctccggcgcccacaccgtcgggaggacgggctgcccgttcttccgcgacagggctcagcgcatggacgacgccttctccggaggctggcggccaactgcagcgcggccccgagccggctgaagaaacctggacgtggtgacgccggatctgttc

SEQ ID NO: 131849 - DNA, 264 bp, Zea mays
  Clone ID: MRT4577_5172C.1
gctctcgcaccctgtcccagagcagcgagtctggaactctttcttcggggcccccggggcacaccatggaggtctcctgttgaatggcccttgttgggacccagccctcacctcccccagagctaacctgggaggtgctgaaggggcattgggccaccgtaagcaagggaaaaagggcagatcatgcggggagatgaccttgatctttgattgctaccctaaccttgacctttaacccgtgattccacccagctcctgggagag

SEQ ID NO: 131850 - DNA, 335 bp, Zea mays
  Clone ID: MRT4577_51730C.1
ggccgcttttttttttttttttttgcaaccaaactagacagattgagtatgtaaagacccataacatgcaacgatacatgccatatacatgtcactgaaatatcatttataataggccctatcacaactgacacacagacccattaaacactcattataaggtcacacacttgcgtcaaccaaaaagcagtatgctaacttaattaatcacagatacagaagtgacgatcagcttagtacacaagcacacacaggctcgttgctcacatagagacactgtcactggcacacactcactaggaaagtaagatgacgaaacatgaaacacaagcgca

SEQ ID NO: 131851 - DNA, 510 bp, Zea mays
  Clone ID: MRT4577_51731C.1
ggggttagttgttactgaaaatgagagtaaccagcatcaacaatagattgctttcaaaattcaggaggatagatccttgttttgtacaacatttttttaagtataagagttttaaaatagaacatagcagcatgaaaggcttattttttccagaacatagtttaatagacttaataagtttaaacgacccataattctggtgctctattctgtaagtataagagttttaaagtagaacatagcagcatgaaaggcttatttttttccagaacatagtttaatagacttaataagttcaaatgacccataattctggtgttctattctgtcttttatctgttgggtcattaaaatctatagactttagcgtcctatcttgtcatgtgttagtgacgtatgaaatcatttggagtcgatgggaagattaatagccaaaaatgttagaagatcatgctttgttagacctctatgttgtacggaccagcaggtttgaaatgatgttgtcactga

SEQ ID NO: 131852 - DNA, 771 bp, Zea mays
  unsure (1)..(771): unsure at all n locations
  Clone ID: MRT4577_51732C.1
ccggccggactgaaacgacagcgagattggaacgagtaactaaccagctccagcccaaacacagcccccacgcgtccgatcccccgctgtcacctctccttccatcgccacaggcggcccttctccgcggaagccggcgggccgccgcctcccttacccctctcgccgtgctcctccgcaccgtcattccctagcattccccacgggcgagtggcggcttggtcgagatgggcgatgcggttgatgacatcatctgtgcaacggatgcggcggtcgccgtcgaggatgcggccagtgggaagcccgcaatgctctctagcttaggggggcagggtgaggaagagcatgaggagaaggacaatgaggacaagtcaggcgagagcgaggtgatcaacccgccagaagacgctggcggggaggccacctcacccctggaagggttgaagcctcgcctttccaaggggaatcaaagccatggacctaatgctgtcaaatcaaagagtccaacgagtggagacgaaggtcagacgaggaaaaaggctcccaattcttctcttccggtgtcccacggtgacgctggtgtcggcagtaataaagatggcaagaatgagtctcgctcatcttccgtggatgcaacattgctggatgactccaaggagaaaaggaaaactcanaagccattagcacagctcttttccatcaaaagtgacgaagaacagtcaaatggtggagagtgcanagcctcgaaaagttggcagcattccatcatat

SEQ ID NO: 131853 - DNA, 235 bp, Zea mays
  Clone ID: MRT4577_51733C.1
ctcgaactgggtctacgcctgcgaatcaatgacttcgatgccgctatggcgtaccctgtagctaggagcatgcctggggtctacactggcgatatcggtgctatccatgagggtaactatacgcgcactggcgatacgatgatgtacggcgccctggctgtggacgtggcacccagctgggcttgggtgcggagctattggattgctgctggtgctgagaggcatggctagggag

SEQ ID NO: 131854 - DNA, 516 bp, Zea mays
  Clone ID: MRT4577_51734C.1
gggtttacccacgcgtccgctggaacgacgggtaactaaccagctccggcccaaacacattcacgatcacctacacccccccgctgtcacctgtgccttccgtcgccacaggcggcccttctccgcggaagccggcgggccgccgcctcccttacccctctcgctgtgctcctccgcaccgtcattccctagcattccccacgggcgagtggcggcttggtcgagatgggcgatgcggttgatgacatcatctgtgcaacggatgcggcggtcgccgtcgaggatgcggccagtgggaagcccgcaatgctctctagcttaggggggcagggtgaggaagagcatgaggagaaggacaatgaggacaagtcaggcgagagcgaggtgatcaacccgccagaagacgctggcggggaggccacatcacccctggaaggcaggaagcctcgcctttccaaggggaatcaaagccatggacctaatgctgtcaaatcaaagagcccaacgagtggagac

SEQ ID NO: 131855 - DNA, 1827 bp, Zea mays
  Clone ID: MRT4577_51735C.1
actgaaaagaagcgagattggaacgacgggtaactaacctgctccagcccaaacacagccacgagcacctacatcccccgctgtcacctctccttccatcgccacaggcggcccttctccgcggaagccggcgggccgccgcctcccttacccctctcgccgtgctcctccgcaccgtcattccctagcattccccacgggcgaggtaaagaaacattctcccaccccctccagccccataggtgccaccgggatttctcttgcggttgcttggcccagatctgcggcgcattcggcgtttctgatctcgcgtgcacctcgtttccctcggcggtggatcagtggcggcttggtcgagatgggcgatgcggttgatgacatcatctgtgcaacggatgcggcggtcgccgtcgaggatgcggccagtgggaagcccgcaatgctctctagcttaggggggcagggtgaggaagagcatgaggagaaggacaatgaggacaagtcaggcgagagcgaggtgatcaacccgccagaagacgctggcggggaggccacctcacccctggaagggttgaagcctcgcctttccaaggtgagctcttggcggtgatgtcatgggaatcaaagccatggacctaatgctgtcaaatcaaagagtccaacgagtggagacgaaggtcagacgaggaaaaaggctcccaattcttctcttcctaaggcacccattgtccaggtgtcccatggtgacgctggtgtcggcagtaataaagatggcaagaatgagtctcgctcatcttccgtggatgcaacattgctggatgactccaaggagaaaaggaaaactcaaaagccattagcacagctcttttccatcaaaagtgacgaagaacagtcaaatggtgagagtgcaaagcctcgaaaagttggcagcattccatcatatggtttcaccttcaagtgtgatgagagatctgaaaaaagaagagagttctattcgaagcttgaggagaagattcatgcaagagagttagaaataagcaatttgcaagcgaaatcaaaggaaactgaagaagcagaactcaaaatgctgagaaagagtttgaacttcaaggcaacaccaatgccaagcttctataaggaaccaactcctgtcaaggttgaattgaaaaagatccccccaacaagagccaaatcgccaaagtttggtcgttctaaaaacaagtccacaccagagactgaagaaaatgctaccgcggaccagcctgcccacctgagcctcgaggagaatgtttctcaaaccggtgtgaaaaaaccaaccccgttgaatccagcaaagaagccccagaggaagtcactccccagattgccatctgaagaaaccggtccgcttgatgccacctcaaggcagctaataaagagcgccaagctggatgcagttagtgctccggagacaggatcagctacaggacaggtacaactacaaggaagtgagacggaaacagattctggtcaggggccagttgaagctggagctaatcctgatgaacaagacgccagcgaacagagtgttgtttagtgaagatcacggtgaccaaaccagctgatttgtgatgtgcatggtgtgcctcggctttgtataatatattgtgcttgcctgctagagtaacctgtagcctgtattatgttatgtgatatatactactactactactggtttattttcctggaattgagccgtatgttgcttatcaatcaaaaaaaaaaaaaaacatattctacagatatatatatccaaattgtcccgagtcaaaaaaaaaaaaaaaaaaa

SEQ ID NO: 131856 - DNA, 256 bp, Zea mays
  Clone ID: MRT4577_51736C.1
tcggcggccgcccgggcaggttttttttttttttttttttttttaattttttttttttttttttttttttttttttttttccaatcattttttttccttataaattatcccttcccattccaagggacaatacaggccatggcaaacactgccacccaggggggggggggacacaacggaacccatcgccgctaaaggaaaaaaccagcgagctagggagcaagccagcggctccataacattataacagaaccgg

SEQ ID NO: 131857 - DNA, 195 bp, Zea mays
  Clone ID: MRT4577_51737C.1
cttctcccgttcaccccgctgtgcgcgcgcgcccccgcggcgacaaccgggcgacggccgccgacctacgccaggtgccaagccgttcctcagtcccatcacgaggccttcaacgaacccttggccggggacgagaaaatgtaatttttccaaaccctgcttcctcgacttcctgtgtcgaatgtaggaagtcac
